United States Patent Application Publication US 2018/0126003 A1 - sequence listing, part 39

SEQ ID NO: 65003 - DNA, 2195 bp, Artificial Sequence
  derived and/or modified sequence
agctccgtccgcgccctcccggcgcaccgcctgcggggcggtgactggcccagccgcaccgcgtctcccgccttctccgcagccccgcaggccccgggccctgtcattcccagcgctgccctgtcttgcgttccagtgttccagcttctgcgagatgaccctcaaggcgagcgagggcgagagtgggggcagcatgcacacggcgctctccgacctctacctggagcatttgctgcagaagcgtagtcggccagagcttcctttgagcaactgcctctgccctttgaaccctgctgcagatgtttcctctgaaggggctttcagagcggcaggcattgccactccagcactttgtctgattaaaggccagaggctgcagaacaaaggccagacatggagtcctgggctgtatcgcatccattgaatactgtgaccgaggacatgtacaccaacgggtctcctgccccaggtagccctgcccaggtcaagggacaggaggtgcggaaagtgcgactcatacagtttgagaaggtcacagaagagcccatgggaatcacgctgaagctgaatgaaaaacagtcctgtacggtggccagaattcttcatggtggcatgatccatagacaaggctcccttcacgtgggggatgagatcctagaaatcaatggcacaaatgtgacaaatcattcagtggatcagctgcagaaggcgatgaaagaaaccaaaggaatgatctcattaaaagtaattcccaaccagcaaagccgtcttcctgcactacagatgttcatgagagcgcagtttgactatgatcccaaaaaggacaatctgatcccttgcaaggaggcgggactgaagtttgctactggggacattatccagattatcaacaaggatgacagcaattggtggcagggacgggtggaaggctcctccaaggagtcagcaggattgatcccttcccctgagctgcaggaatggcgagtggcaagtatggctcagtcagctcctagcgaagccccgagctgcagtccctttgggaagaagaagaagtacaaagacaaatatctggccaagcacagctcgatttttgatcagttggatgttgtttcctacgaggaagtcgttcggctccctgcattcaagaggaagaccctggtgctgatcggagccagtggggtgggtcgcagccacattaagaatgccctgctcagccagaatccggagaagtttgtgtaccctgtcccatatacaacacggccgccaaggaagagtgaggaagatgggaaggagtaccactttatctcaacggaggagatgacgaggaacatctctgccaatgagttcttggagtttggcagctaccaaggcaacatgtttggcaccaaatttgaaacagtgcaccagatccataagcagaacaagattgccatccttgacattgagccccagaccctgaaaattgttcggacagcagaactttcgcctttcattgtgttcattgcacctactgaccagggcactcagacagaagccctgcagcagctgcagaaggactctgaggccatccgcagccagtacgctcactactttgacctctcactggtcaataatggtgttgatgaaacccttaagaaattacaagaagccttcgaccaagcgtgcagttctccacagtgggtgcctgtctcctgggtttactaagcttgtagaatgggggaacccactgtatgcccctctccagcatttggaattccacccgccttgctttaagacaaacagggctgctccaactagttttgtgtcagcttccagctctctgcagctatcctaattcagccagtaaggttcagtcttcttgctcaggctcctgaagggttgattctcctgatagatggggccccactgatctggatttgaaaaggatttctagaaattgggggtaagaagtactaccaaaatgtaactgctaatcaagggtgatgcacagcaaaagcaatggaccccatccctctaaagcctgccctcctttgccttcaactgtatatgctgggtatttcatttgtctttttattttggagaaagcgtttttaactgcaactttctataatgccaaaatgacacatctgtgcaatagaatgatgtctgctctagggaaaccttcaaaagcaataaaaatgctgtgttgaaatgcc

SEQ ID NO: 65004 - DNA, 1311 bp, Artificial Sequence
  derived and/or modified sequence
atggagagctgggccgtgagccaccccctgaacaccgtgaccgaggatatgtacaccaacggctccccggcgccggggtccccagcacaggtgaaaggtcaggaagtgaggaaagtgcgactcatccagttcgaaaaggttacagaagaacccatggggatcacattgaaattaaatgagaaacaatcatgcaccgtggcaaggatcctgcacggcggaatgattcatcggcagggttctcttcacgtgggtgatgaaatcctggaaataaatggaactaatgtcacgaatcacagtgtggaccaactacagaaagcaatgaaagaaaccaaaggcatgatctctttgaaggtcatcccgaatcagcagtcccgccttcctgccctgcagatgttcatgcgagctcaatttgactatgatcccaaaaaggataatctcataccctgcaaggaggctgggctgaagtttgctaccggcgacatcatccagatcatcaacaaagatgatagcaattggtggcagggcagagtggagggcagctcaaaggagagcgccggacttatcccaagccctgagttacaggagtggagagtcgcctcaatggcccagagcgccccgtccgaggcaccttcttgcagccctttcggcaagaagaagaagtacaaggacaagtacttggctaagcactcttctatttttgatcaacttgacgtggtgagctacgaggaggtggtccggcttcctgcctttaaacgcaagaccttagtgctgattggtgcctctggagtgggccgctctcacatcaagaacgccttgctatcccagaatccggagaaatttgtttatcctgttccctacacaactcgtcctccccggaaaagtgaagaggacggcaaggagtaccattttatttctaccgaggaaatgacacggaatatctctgccaacgaattcttggagtttggctcatatcaaggaaacatgttcggcactaagtttgagactgttcatcaaatccataagcagaacaaaattgctatcctcgatatagagccacaaacattaaagattgtccgaacggcagaactgagtccttttattgtgttcatcgctcctaccgatcagggaactcaaacggaagctttacagcagctccagaaggattccgaggccattaggtcccaatacgctcattacttcgatctgtctctagtgaacaatggggtcgacgagacgctaaaaaaactccaagaggccttcgatcaggcgtgctcatccccccaatgggtccctgtgagttgggtatactag

SEQ ID NO: 65005 - DNA, 1311 bp, Artificial Sequence
  derived and/or modified sequence
atggaatcatgggctgtgagtcaccctctgaataccgtgactgaggacatgtataccaatgggagtcccgcaccaggttcacctgcccaggtgaagggccaggaggtgagaaaggttcgactgattcagtttgagaaggtgaccgaggagcctatgggtataactctgaaattgaacgagaagcagagttgtacagtcgcccgaatactgcacggcggaatgatccatcggcaggggtcgctgcacgtgggagacgagatactggagattaatggtaccaacgtcacaaaccacagcgtggatcaacttcagaaagccatgaaggagactaaggggatgattagcctgaaggtaattccaaatcagcaatctagactgccagccctgcagatgttcatgagagcgcaatttgactacgatcctaagaaggataacctgatcccctgcaaagaggctgggctgaaattcgctaccggggatatcattcagatcataaacaaggatgactccaactggtggcagggaagagtggaaggcagttccaaagaatccgcagggttgatcccttcacctgaattacaggaatggagggtggcatctatggcccagtcagcccctagtgaggccccatcttgttccccattcgggaagaagaaaaagtataaagacaagtacctggccaagcacagctctattttcgaccaactagatgtcgtgtcctatgaggaggtggtccgcctgccggcatttaagcgcaaaacccttgtgctgataggggcttcgggcgtgggcagatcccatattaaaaacgctcttctgagtcaaaatcctgaaaagttcgtgtatcccgtgccctacaccacaagacccccacgcaaatctgaagaggatgggaaggagtaccactttataagcaccgaggagatgactagaaatatttccgccaacgaattcttggagtttggctcatatcaggggaatatgtttggcactaagttcgaaactgttcaccagatccacaagcagaataaaatcgctattctggacattgaaccccagacactcaaaatcgtaaggacagccgaattgtcaccctttatcgtatttatcgcaccaacagaccagggcacccaaactgaagccttgcagcagcttcagaaggattcggaagcaattagaagtcagtatgctcattatttcgacttgtcgcttgtcaacaatggtgtagatgagactttgaaaaagcttcaagaggcctttgaccaggcttgctcttcccctcaatgggtgccagtaagctgggtgtactag

SEQ ID NO: 65006 - DNA, 1311 bp, Artificial Sequence
  derived and/or modified sequence
atggagagctgggccgtgagccaccccctgaacaccgtgaccgaggacatgtacaccaacggcagccccgcccccggcagccccgcccaggtgaagggccaggaggtgagaaaggtgagactgatccagttcgagaaggtgaccgaggagcccatgggcatcaccctgaagctgaacgagaagcagagctgcaccgtggccagaatcctgcacggcggcatgatccacagacagggcagcctgcacgtgggcgacgagatcctggagatcaacggcaccaacgtgaccaaccacagcgtggaccagctgcagaaggccatgaaggagaccaagggcatgatcagcctgaaggtgatccccaaccagcagagcagactgcccgccctgcagatgttcatgagagcccagttcgactacgaccccaagaaggacaacctgatcccctgcaaggaggccggcctgaagttcgccaccggcgacatcatccagatcatcaacaaggacgacagcaactggtggcagggcagagtggagggcagcagcaaggagagcgccggcctgatccccagccccgagctgcaggagtggagagtggccagcatggcccagagcgcccccagcgaggcccccagctgcagccccttcggcaagaagaagaagtacaaggacaagtacctggccaagcacagcagcatcttcgaccagctggacgtggtgagctacgaggaggtggtgagactgcccgccttcaagagaaagaccctggtgctgatcggcgccagcggcgtgggcagaagccacatcaagaacgccctgctgagccagaaccccgagaagttcgtgtaccccgtgccctacaccaccagaccccccagaaagagcgaggaggacggcaaggagtaccacttcatcagcaccgaggagatgaccagaaacatcagcgccaacgagttcctggagttcggcagctaccagggcaacatgttcggcaccaagttcgagaccgtgcaccagatccacaagcagaacaagatcgccatcctggacatcgagccccagaccctgaagatcgtgagaaccgccgagctgagccccttcatcgtgttcatcgcccccaccgaccagggcacccagaccgaggccctgcagcagctgcagaaggacagcgaggccatcagaagccagtacgcccactacttcgacctgagcctggtgaacaacggcgtggacgagaccctgaagaagctgcaggaggccttcgaccaggcctgcagcagcccccagtgggtgcccgtgagctgggtgtactag

SEQ ID NO: 65007 - protein, 469 aa, Artificial Sequence
  derived and/or modified sequence
MLLRSKPALPPPLMLLLLGPLGPLSPGALPRPAQAQDVVDLDFFTQEPLHLVSPSFLSVTIDANLATDPRFLILLGSPKLRTLARGLSPAYLRFGGTKTDFLIFDPKKESTFEERSYWQSQVNQDICKYGSIPPDVEEKLRLEWPYQEQLLLREHYQKKFKNSTYSRSSVDVLYTFANCSGLDLIFGLNALLRTADLQWNSSNAQLLLDYCSSKGYNISWELGNEPNSFLKKADIFINGSQLGEDFIQLHKLLRKSTFKNAKLYGPDVGQPRRKTAKMLKSFLKAGGEVIDSVTWHHYYLNGRTATKEDFLNPDVLDIFISSVQKVFQDYWLSLLFKKLVGTKVLMASVQGSKRRKLRVYLHCTNTDNPRYKEGDLTLYAINLHNVTKYLRLPYPFSNKQVDKYLLRPLGPHGLLSKSVQLNGLTLKMVDDQTLPPLMEKPLRPGSSLGLPAFSYSFFVIRNAKVAACI

SEQ ID NO: 65008 - DNA, 1410 bp, Artificial Sequence
  derived and/or modified sequence
atgctgctgagaagcaagcccgccctgcccccccccctgatgctgctgctgctgggccccctgggccccctgagccccggcgccctgcccagacccgcccaggcccaggacgtggtggacctggacttcttcacccaggagcccctgcacctggtgagccccagcttcctgagcgtgaccatcgacgccaacctggccaccgaccccagattcctgatcctgctgggcagccccaagctgagaaccctggccagaggcctgagccccgcctacctgagattcggcggcaccaagaccgacttcctgatcttcgaccccaagaaggagagcaccttcgaggagagaagctactggcagagccaggtgaaccaggacatctgcaagtacggcagcatcccccccgacgtggaggagaagctgagactggagtggccctaccaggagcagctgctgctgagagagcactaccagaagaagttcaagaacagcacctacagcagaagcagcgtggacgtgctgtacaccttcgccaactgcagcggcctggacctgatcttcggcctgaacgccctgctgagaaccgccgacctgcagtggaacagcagcaacgcccagctgctgctggactactgcagcagcaagggctacaacatcagctgggagctgggcaacgagcccaacagcttcctgaagaaggccgacatcttcatcaacggcagccagctgggcgaggacttcatccagctgcacaagctgctgagaaagagcaccttcaagaacgccaagctgtacggccccgacgtgggccagcccagaagaaagaccgccaagatgctgaagagcttcctgaaggccggcggcgaggtgatcgacagcgtgacctggcaccactactacctgaacggcagaaccgccaccaaggaggacttcctgaaccccgacgtgctggacatcttcatcagcagcgtgcagaaggtgttccaggactactggctgagcctgctgttcaagaagctggtgggcaccaaggtgctgatggccagcgtgcagggcagcaagagaagaaagctgagagtgtacctgcactgcaccaacaccgacaaccccagatacaaggagggcgacctgaccctgtacgccatcaacctgcacaacgtgaccaagtacctgagactgccctaccccttcagcaacaagcaggtggacaagtacctgctgagacccctgggcccccacggcctgctgagcaagagcgtgcagctgaacggcctgaccctgaagatggtggacgaccagaccctgccccccctgatggagaagcccctgagacccggcagcagcctgggcctgcccgccttcagctacagcttcttcgtgatcagaaacgccaaggtggccgcctgcatctag

SEQ ID NO: 65009 - DNA, 1410 bp, Artificial Sequence
  derived and/or modified sequence
atgcttttgcggtctaaaccagcactgccccctcccctcatgttgctactgcttgggcccttgggacctctatcccccggcgccctacctagacctgcccaggcccaggacgtcgtggatctggacttttttactcaagaacccttgcacttggtaagcccttcattcctttccgtaacaatagacgctaacctcgctacagatccacgttttcttatcctcttgggtagtccaaagctgcggacgctggcccgtgggttatctccagcataccttcgtttcggaggcaccaagacagacttcctaatctttgaccctaagaaggaatctacattcgaggaaaggagctattggcagagccaggtgaaccaggacatctgcaaatacgggtcaattccacccgacgtcgaagagaagttgaggctggaatggccttaccaggagcagctgctcctgagggaacattaccaaaagaagttcaagaactccacgtatagtaggagctcagtggacgtgttgtataccttcgccaattgctccggacttgacctcatcttcggtctgaatgctcttctgcgtactgccgatctccagtggaacagctctaatgcacagctgctgctggattattgctcatctaaggggtataacatttcttgggagctgggaaacgagccgaattcatttctaaagaaggctgatatttttatcaacggatctcagttgggtgaggacttcattcaactgcataagctgcttcgcaagagtacattcaagaatgcaaagctctacggacccgatgtgggacaaccccgaaggaagacagccaagatgctcaagtccttcctcaaggcagggggggaggtaatcgatagcgtcacatggcatcattattacctgaatgggcggaccgctacaaaggaagacttcttgaatcctgacgttctggacatctttatcagtagcgtgcagaaggtgttccaggactactggcttagcctgctgtttaagaagttagtggggaccaaggtcctgatggctagtgtgcagggctctaagagaagaaaactccgagtctatctgcattgtacaaacaccgataatccaaggtataaagaaggagatttaaccctttatgcgatcaacctgcataatgtaaccaagtacctgaggctcccataccctttcagtaataaacaagtagataaatatttattaagacccctgggccctcatggattgttaagcaagagcgttcagctgaatggcctgactctcaaaatggtcgacgaccagacacttccacctctgatggagaaacccctgagacctgggtcaagccttggtctgcctgctttcagttacagcttcttcgtgatccgcaatgcgaaggtggcagcctgcatatag

SEQ ID NO: 65010 - DNA, 1571 bp, Artificial Sequence
  derived and/or modified sequence
ccagcgctgctccccgggcgctcctccccgggcgctcctccccaggcctcccgggcgcttggatcccggccatctccgcacccttcaagtgggtgtgggtgatttcctggcggggggagcagccaggtgagcccaagatgctgctgcgctcgaagcctgcgctgccgccgccgctgatgctgctgctcctggggccgctgggtcccctctcccctggcgccctgccccgacctgcgcaagcacaggacgtcgtggacctggacttcttcacccaggagccgctgcacctggtgagcccctcgttcctgtccgtcaccattgacgccaacctggccacggacccgcggttcctcatcctcctgggttctccaaagcttcgtaccttggccagaggcttgtctcctgcgtacctgaggtttggtggcaccaagacagacttcctaattttcgatcccaagaaggaatcaacctttgaagagagaagttactggcaatctcaagtcaaccaggatatttgcaaatatggatccatccctcctgatgtggaggagaagttacggttggaatggccctaccaggagcaattgctactccgagaacactaccagaaaaagttcaagaacagcacctactcaagaagctctgtagatgtgctatacacttttgcaaactgctcaggactggacttgatctttggcctaaatgcgttattaagaacagcagatttgcagtggaacagttctaatgctcagttgctcctggactactgctcttccaaggggtataacatttcttgggaactaggcaatgaacctaacagtttccttaagaaggctgatattttcatcaatgggtcgcagttaggagaagattttattcaattgcataaacttctaagaaagtccaccttcaaaaatgcaaaactctatggtcctgatgttggtcagcctcgaagaaagacggctaagatgctgaagagcttcctgaaggctggtggagaagtgattgattcagttacatggcatcactactatttgaatggacggactgctaccaaggaagattttctaaaccctgatgtattggacatttttatttcatctgtgcaaaaagttttccaggattattggctatctcttctgttcaagaaattggtgggcaccaaggtgttaatggcaagcgtgcaaggttcaaagagaaggaagcttcgagtataccttcattgcacaaacactgacaatccaaggtataaagaaggagatttaactctgtatgccataaacctccataatgtcaccaagtacttgcggttaccctatcctttttctaacaagcaagtggataaataccttctaagacctttgggacctcatggattactttccaaatctgtccaactcaatggtctaactctaaagatggtggatgatcaaaccttgccacctttaatggaaaaacctctccggccaggaagttcactgggcttgccagctttctcatatagtttttttgtgataagaaatgccaaagttgctgcttgcatctgaaaataaaatatactagtcctgaca

SEQ ID NO: 65011 - DNA, 1410 bp, Artificial Sequence
  derived and/or modified sequence
atgctgctgcggagcaagccagccctgcccccacccctgatgctgctgctgctgggccccctgggccccctgagccctggggccctgcccaggcctgcccaggcccaggatgtggtggacctggacttcttcacccaggagcccctgcacctggtgagccccagcttcctgtctgtgaccattgatgccaacctggccacagacccccgcttcctgatcctgctgggcagccccaagctgcggaccctggcccggggcctgagccctgcctacctgcgctttggaggcaccaagacagacttcctgatctttgaccccaagaaggagagcacctttgaggagaggagctactggcagagccaggtgaaccaggacatctgcaagtatggcagcatccccccagatgtggaggagaagctgcggctggagtggccctaccaggagcagctgctgctgcgggagcactaccagaagaagttcaagaacagcacctacagccgcagctctgtggatgtgctgtacacctttgccaactgcagcggcctggacctgatcttcggcctgaatgccctgctgaggacagctgacctgcagtggaacagcagcaatgcccagctgctgctggactactgcagcagcaagggctacaacatctcctgggagctgggcaatgagcccaacagcttcctgaagaaggctgacatcttcatcaatggcagccagctgggggaggacttcatccagctgcacaagctgctgaggaagagcaccttcaagaatgccaagctgtatggcccagatgtgggccagcccaggaggaagacagccaagatgctgaagagcttcctgaaggccggcggggaggtgattgacagcgtgacctggcaccactactacctgaatggaagaacagccaccaaggaggacttcctgaacccagatgtgctggacatcttcatcagctctgtgcagaaggtgttccaggactactggctgagcctgctcttcaagaagctggtgggcaccaaggtgctgatggcctctgtgcagggcagcaagaggaggaagctgcgggtgtacctgcactgcaccaacacagacaacccccgctacaaggagggggacctgaccctgtatgccatcaacctgcacaacgtgaccaagtacctgcggctgccctaccccttcagcaacaagcaggtggacaagtacctgctgcggcccctgggcccccacggcctgctgagcaagtctgtgcagctgaatggcctgaccctgaagatggtggatgaccagaccctgccccccctgatggagaagcccctgcggcccggcagcagcctgggcctgcctgccttctcctacagcttcttcgtcatcagaaatgccaaggtggccgcctgcatctag

SEQ ID NO: 65012 - DNA, 1410 bp, Artificial Sequence
  derived and/or modified sequence
atgctgctgcggagcaagcccgccctgcccccccccctgatgctgctgcttcttggaccactaggccctctgagccctggagccctgcctaggcccgcccaagctcaggacgttgtggatcttgacttctttactcaagaacctctacatctggtgtccccgagtttccttagtgtgacaattgacgccaatcttgctacagacccgaggttccttatcctgctgggctctcccaaacttcggactctggctcggggactgagcccagcttacttgaggttcggcggaaccaagaccgattttctgatctttgaccccaaaaaggagtctactttcgaagagcgcagctattggcagtctcaggtgaaccaggatatctgtaaatacgggtctattccacccgacgtggaagaaaaactgcgactggaatggccctaccaagagcagttgctcctgagagagcactaccagaagaagtttaagaattccacatactcccgcagctctgtggacgttctctatacattcgcaaactgtagtgggcttgatctgatatttggtctgaatgccctgctgcgcaccgctgatctgcaatggaacagctccaacgcccagcttttgctcgactactgttccagcaagggttacaacatctcatgggagctgggtaacgagccaaactccttccttaaaaaagccgatatttttattaacggcagccaactgggtgaagactttatccaactgcacaagcttctgagaaaatctacctttaagaacgcaaagctgtatggccccgacgtcggtcagcccagacgaaaaacagcaaaaatgttgaagtctttcctcaaagcaggcggcgaggtgattgatagtgtcacttggcatcactattacctgaacggccgcacggccaccaaggaggactttctaaatccagatgtgctcgatatcttcatctcttcagtgcaaaaagtgttccaggattactggctgtctctcctattcaaaaagttggtggggaccaaagttctcatggcaagtgtccaaggctcaaaacgccggaaactgagagtgtacctccactgtacaaacacggacaatcctcgctataaagagggcgacctgacgctctacgccataaacctacacaatgttacaaaatatctgcggctgccataccccttctccaacaagcaggtggataaatatctcttaaggcctttgggccctcacggtctgctgtctaagtccgtgcagcttaacgggctcactctcaagatggtggacgatcaaaccctgccaccacttatggagaaacccctgaggcctggaagttccttgggacttccggcattctcgtatagtttctttgtgatccgcaacgcaaaagtggccgcctgcatatag

SEQ ID NO: 65013 - DNA, 1410 bp, Artificial Sequence
  derived and/or modified sequence
atgctcctacggagtaaaccggcactgccacccccacttatgctgttactgttgggaccactgggccctctgagcccaggtgccctgccacgcccagctcaggcgcaggatgtggttgatctagacttcttcacacaggagccattgcacttagtcagcccatccttcctgtccgtgaccatagacgccaatctcgcaactgacccacgattcctgattctgctcggctctcctaagctgcggactctggcccgaggcctgtcccctgcctatctgcggttcggaggcacgaagacggactttctcatctttgatccaaaaaaggaaagcacctttgaagaacggagctattggcagtctcaggtgaatcaggacatttgcaagtatggcagtattcccccagatgtggaagaaaagttgaggcttgagtggccttatcaggaacagctgctcctaagggagcattaccaaaagaaattcaaaaatagcacgtactcgagatcatcagttgatgtcctttataccttcgccaactgctccggactcgaccttatctttggcttgaatgcgctgctgagaactgcagatctgcagtggaattccagcaatgcccagctgctgttggattactgttcatcgaagggttataacattagttgggagttgggtaacgaaccgaacagcttcttaaagaaggccgatatctttattaatgggtcccagctcggcgaagattttatccaactgcataagcttctgcggaagtccacatttaagaatgctaagctttatgggcctgatgtaggacaaccccgaagaaagactgccaagatgctgaaaagtttcctaaaagcaggcggtgaggttatcgactccgttacctggcaccactactacctcaacggacgaaccgcaacaaaagaagactttctaaatcctgatgttctggatattttcatttcaagtgtgcagaaagtttttcaggattattggttgagtctacttttcaagaagctagtggggacaaaagtcctgatggcttccgtgcagggctcaaagcgacgcaaattacgtgtctatctgcattgcacaaataccgataaccctcgctataaggaaggtgacctcacactctacgctattaacttgcacaacgttacaaaatatttgcgcttaccatatccattttccaacaagcaggtcgataagtacctgttgaggccgcttgggcctcatgggctcctatcaaagtctgtacagctaaacggcttgacactgaaaatggtggatgaccagacacttccaccccttatggagaaaccactgagacccggatcatcactcggactgcctgcctttagctacagcttctttgtaattcgtaacgcaaaagtcgccgcatgcatttag

SEQ ID NO: 65014 - protein, 394 aa, Artificial Sequence
  derived and/or modified sequence
MKCLVSRHTVRETLDMVFQRMSVEAGVIKCKAAVLWEQKQPFSIEEIEVAPPKTKEVRIKILATGICRTDDHVIKGTMVSKFPVIVGHEATGIVESIGEGVTTVKPGDKVIPLFLPQCRECNACRNPDGNLCIRSDITGRGVLADGTTRFTCKGKPVHHFMNTSTFTEYTVVDESSVAKIDDAAPPEKVCLIGCGFSTGYGAAVKTGKVKPGSTCVVFGLGGVGLSVIMGCKSAGASRIIGIDLNKDKFEKAMAVGATECISPKDSTKPISEVLSEMTGNNVGYTFEVIGHLETMIDALASCHMNYGTSVVVGVPPSAKMLTYDPMLLFTGRTWKGCVFGGLKSRDDVPKLVTEFLAKKFDLDQLITHVLPFKKISEGFELLNSGQSIRTVLTF

SEQ ID NO: 65015 - DNA, 1185 bp, Artificial Sequence
  derived and/or modified sequence
atgaagtgtctcgtctcacgccacaccgtaagggagaccctagacatggtgttccaaaggatgtctgtggaggctggggtaatcaaatgtaaggcagccgtactgtgggagcagaaacaaccgtttagtattgaggagatcgaggtcgccccccctaaaaccaaggaggtgaggattaagattctggccaccggcatctgtagaactgatgaccatgtgattaaaggtacaatggtgtccaagtttcccgtgatcgtcggccacgaagccaccggcatcgtggaatccatcggggagggggtgaccaccgtgaagcctggtgataaggtaatccctctcttccttccccagtgccgagagtgcaacgcctgtagaaatccagatggcaacctttgcattcggtctgatatcacagggcggggtgtcctggcggatggtactacccgctttacctgcaaagggaagcctgtgcatcattttatgaatacaagcacctttacggaatatacagtcgtggacgagagttctgtggctaaaatcgatgatgccgctccacctgaaaaagtttgccttattggctgcggtttctcaactgggtacggggcagcagttaaaactggcaaggtgaagcctgggtctacctgtgtcgtattcgggcttgggggtgtggggctgtccgtaatcatgggatgcaaaagtgcaggggcgtcccgaattatcggtattgatctgaacaaggacaagttcgagaaagcaatggctgtgggcgccacagagtgtatctctcctaaagactctaccaagccaatttccgaggtactcagcgagatgaccgggaataacgtggggtatacatttgaagtgatcgggcacctggagaccatgatcgatgcactggccagctgccacatgaactacggaactagcgttgtagtgggcgttcctccgtccgctaagatgttgacttatgatccaatgctactcttcacagggagaacatggaagggctgcgtgttcggtggccttaagtctcgggacgatgttccaaaactggtgaccgaatttctcgccaaaaagttcgatctggatcagctgattacacacgttttacctttcaagaagatatctgaaggattcgagttactgaactccgggcagtcaatccgaaccgtgctgactttttag

SEQ ID NO: 65016 - DNA, 1185 bp, Artificial Sequence
  derived and/or modified sequence
atgaagtgcctggtgagccgccacacagtgcgggagaccctggacatggtgttccagaggatgtctgtggaggccggggtcatcaagtgcaaggctgctgtgctgtgggagcagaagcagcccttcagcattgaggagattgaggtggccccacccaagaccaaggaggtgcgcatcaagatcctggccaccggcatctgcaggacagatgaccacgtgatcaagggcaccatggtgtccaagtttcctgtgattgtgggccacgaggccactggaattgtggagagcattggagagggcgtgaccaccgtgaagccaggggacaaggtgatccccctcttcctgccccagtgccgggagtgcaatgcctgcagaaatccagatggcaacctgtgcatccgcagtgacatcaccggccggggcgtgctggctgatggcaccacccgcttcacctgcaagggcaagcctgtgcaccacttcatgaacaccagcaccttcacagagtacacagtggtggatgagagctctgtggccaagattgatgatgctgcccctcctgagaaggtgtgcctgattggctgcggcttcagcacaggctacggggctgctgtgaagacaggcaaggtgaagccaggcagcacctgtgtggtgtttggcctgggcggcgtgggcctgagcgtcatcatgggctgcaagtctgctggggccagccgcatcatcggcatcgacctgaacaaggacaagtttgagaaggccatggctgtgggcgccacagagtgcatcagccccaaggacagcaccaagcccatcagcgaggtgctgtctgagatgacaggcaacaacgtgggctacacctttgaggtgattggccacctggagaccatgattgatgccctggccagctgccacatgaactacggcacctctgtggtggtgggcgtgcccccatctgccaagatgctgacctatgaccccatgctgctcttcaccggccgcacctggaagggctgtgtgtttggaggcctgaagagcagagatgatgtgcccaagctggtgacagagttcctggccaagaagtttgacctggaccagctgatcacccacgtgctgcccttcaagaagatcagcgagggctttgagctgctgaacagcggccagagcatcagaacagtgctgaccttctag

SEQ ID NO: 65017 - DNA, 1325 bp, Artificial Sequence
  derived and/or modified sequence
aattaaacacttggagatattccttgaggaatgaaatgcttggtgagcaggcatacagtgagggaaacactggatatggtgtttcagagaatgtcagtggaagcaggggttattaaatgcaaagcagctgtgctttgggagcagaagcaacccttctccattgaggaaatagaagttgccccaccaaagactaaagaagttcgcattaagattttggccacaggaatctgtcgcacagatgaccatgtgataaaaggaacaatggtgtccaagtttccagtgattgtgggacatgaggcaactgggattgtagagagcattggagaaggagtgactacagtgaaaccaggtgacaaagtcatccctctctttctgccacaatgtagagaatgcaatgcttgtcgcaacccagatggcaacctttgcattaggagcgatattactggtcgtggagtactggctgatggcaccaccagatttacatgcaagggcaaaccagtccaccacttcatgaacaccagtacatttaccgagtacacagtggtggatgaatcttctgttgctaagattgatgatgcagctcctcctgagaaagtctgtttaattggctgtgggttttccactggatatggcgctgctgttaaaactggcaaggtcaaacctggttccacttgcgtcgtctttggcctgggaggagttggcctgtcagtcatcatgggctgtaagtcagctggtgcatctaggatcattgggattgacctcaacaaagacaaatttgagaaggccatggctgtaggtgccactgagtgtatcagtcccaaggactctaccaaacccatcagtgaggtgctgtcagaaatgacaggcaacaacgtgggatacacctttgaagttattgggcatcttgaaaccatgattgatgccctggcatcctgccacatgaactatgggaccagcgtggttgtaggagttcctccatcagccaagatgctcacctatgacccgatgttgctcttcactggacgcacatggaagggatgtgtctttggaggtttgaaaagcagagatgatgtcccaaaactagtgactgagttcctggcaaagaaatttgacctggaccagttgataactcatgttttaccatttaaaaaaatcagtgaaggatttgagctgctcaattcaggacaaagcattcgaacggtcctgacgttttgagatccaaagtggcaggaggtctgtgttgtcatggtgaactggagtttctcttgtgagagttccctcatctgaaatcatgtatctgtctcacaaatacaagcataagtaga

SEQ ID NO: 65018 - DNA, 1185 bp, Artificial Sequence
  derived and/or modified sequence
atgaagtgcctggtgagccggcacaccgtgcgggagaccctggacatggtttttcaacgaatgagcgtggaggccggcgtgatcaagtgcaaagccgccgtgctttgggagcagaaacaaccctttagcatcgaggagatcgaagtggctcctccaaagaccaaggaggtgagaatcaagatccttgctaccgggatctgtaggaccgatgaccatgttataaaagggacaatggtctccaagtttcccgtcatcgtgggtcacgaagcgacaggaattgtggagtcgataggggagggcgttacaactgtgaaaccaggagacaaggtgattccactgttcttaccacagtgcagagagtgcaacgcctgtagaaatccggatggcaacctgtgcataaggagcgatattacagggagaggcgtcctagctgatggcactacacgattcacatgcaagggcaaaccggtccatcattttatgaacacatctacgttcaccgaatacaccgttgtggatgagtccagcgtcgctaaaattgacgacgccgcccctcccgagaaagtgtgtctgattggctgtggattttccacagggtatggagccgccgtgaaaaccggcaaagtgaagcccgggtccacttgtgtcgtgttcggcctcggtggcgtgggcctgtctgttattatgggatgtaaaagcgccggcgcctcccggatcattggcattgacctgaataaggacaaatttgaaaaggccatggcggtgggggccaccgaatgcattagtccaaaggattctactaagcctatcagcgaagtgctcagtgagatgactgggaataatgttggttatacatttgaggtcataggccacctggaaacaatgatagatgcacttgcttcttgtcacatgaattacggcacttcagtcgtggtgggtgtcccacctagtgccaagatgcttacctacgatccgatgttactctttactggaaggacatggaaagggtgcgttttcggcggcttgaagagcagagacgacgttcccaaattggtgacagagttcctagctaagaaattcgaccttgaccagcttattactcatgttcttccattcaaaaaaatttcagagggattcgaactactgaactccggacaatccatcagaaccgttctgactttctag

SEQ ID NO: 65019 - DNA, 1185 bp, Artificial Sequence
  derived and/or modified sequence
atgaaatgcttagtgagccgacacacggtacgagaaacgctcgatatggtgtttcagaggatgtcggtcgaagcgggagtgatcaaatgtaaggccgctgtcctttgggaacaaaagcaacccttttcgattgaggagattgaggtagcacctcctaagacaaaggaggtgcgaataaaaatcctggctactggcatttgccgcaccgatgaccacgtgatcaaaggcacgatggtgtcgaagtttccagttatcgtggggcatgaggcaaccggcatcgtggagagtattggggagggcgtcacaacagtgaaaccgggtgacaaggtgatcccactattcctgccacagtgtcgtgagtgcaacgcctgccgaaacccagacggcaatctgtgtattagaagtgacatcaccggccgaggggttctggccgacggcactaccaggtttacatgtaaggggaaaccagtccaccacttcatgaatacctcaacttttaccgaatacactgtggtggatgaatcatccgtcgctaaaatcgacgacgcggcaccacctgaaaaggtgtgtcttattggctgtggcttttctaccggctacggcgcagcggtcaagaccgggaaagtgaaacctggaagcacatgcgttgtatttgggctcgggggagttggattatctgtgatcatgggatgcaagtcagcgggtgccagcagaatcattgggatagatttgaataaagataagtttgaaaaagcaatggcagtgggagctactgaatgcattagtcccaaggattccactaaacccatttcagaagtgctcagtgaaatgacaggcaataatgtgggctacaccttcgaggtaatcggacacctggagactatgatagacgccctcgcatcgtgtcatatgaactacgggaccagcgtggttgtgggagtacctccgagcgccaagatgctcacttatgatccgatgctcctcttcaccggacgcacctggaagggctgcgtttttgggggattgaaatccagagacgatgtgcccaagctcgtaactgaattcctggctaagaagttcgacttagaccagttaattacgcacgtcctgccattcaaaaagattagcgaaggcttcgagttgttgaacagcggccagagtatccgcaccgtcttgactttctag

SEQ ID NO: 65020 - DNA, 1185 bp, Artificial Sequence
  derived and/or modified sequence
atgaagtgcctggtgagcagacacaccgtgagagagaccctggacatggtgttccagagaatgagcgtggaggccggcgtgatcaagtgcaaggccgccgtgctgtgggagcagaagcagcccttcagcatcgaggagatcgaggtggccccccccaagaccaaggaggtgagaatcaagatcctggccaccggcatctgcagaaccgacgaccacgtgatcaagggcaccatggtgagcaagttccccgtgatcgtgggccacgaggccaccggcatcgtggagagcatcggcgagggcgtgaccaccgtgaagcccggcgacaaggtgatccccctgttcctgccccagtgcagagagtgcaacgcctgcagaaaccccgacggcaacctgtgcatcagaagcgacatcaccggcagaggcgtgctggccgacggcaccaccagattcacctgcaagggcaagcccgtgcaccacttcatgaacaccagcaccttcaccgagtacaccgtggtggacgagagcagcgtggccaagatcgacgacgccgccccccccgagaaggtgtgcctgatcggctgcggcttcagcaccggctacggcgccgccgtgaagaccggcaaggtgaagcccggcagcacctgcgtggtgttcggcctgggcggcgtgggcctgagcgtgatcatgggctgcaagagcgccggcgccagcagaatcatcggcatcgacctgaacaaggacaagttcgagaaggccatggccgtgggcgccaccgagtgcatcagccccaaggacagcaccaagcccatcagcgaggtgctgagcgagatgaccggcaacaacgtgggctacaccttcgaggtgatcggccacctggagaccatgatcgacgccctggccagctgccacatgaactacggcaccagcgtggtggtgggcgtgccccccagcgccaagatgctgacctacgaccccatgctgctgttcaccggcagaacctggaagggctgcgtgttcggcggcctgaagagcagagacgacgtgcccaagctggtgaccgagttcctggccaagaagttcgacctggaccagctgatcacccacgtgctgcccttcaagaagatcagcgagggcttcgagctgctgaacagcggccagagcatcagaaccgtgctgaccttctag

SEQ ID NO: 65021 - protein, 142 aa, Artificial Sequence
  derived and/or modified sequence
MGAPTLPPAWQPFLKDHRISTFKNWPFLEGCACTPERMAEAGFIHCPTENEPDLAQCFFCFKELEGWEPDDDPIEEHKKHSSGCAFLSVKKQFEELTLGEFLKLDRERAKNKIAKETNNKKKEFEETAEKVRRAIEQLAAMD

SEQ ID NO: 65022 - protein, 704 aa, Artificial Sequence
  derived and/or modified sequence
MGDEDWEAEINPHMSSYVPIFEKDRYSGENGDNFNRTPASSSEMDDGPSRRDHFMKSGFASGRNFGNRDAGECNKRDNTSTMGGFGVGKSFGNRGFSNSRFEDGDSSGFWRGYRDGNNSEASGPYRRGGRGSFRGCRGGFGLGSPNNDLDPDECMQRTGGLFGSRRPVLSGTGNGDTSQSRSGSGSERGGYKGLNEEVITGSGKNSWKSEAEGGESSDTQGPKVTYIPPPPPEDEDSIFAHYQTGINFDKYDTILVEVSGHDAPPAILTFEEANLCQTLNNNIAKAGYTKLTPVQKYSIPIILAGRDLMACAQTGSGKTAAFLLPILAHMMHDGITASRFKELQEPECIIVAPTRELVNQIYLEARKFSFGTCVRAVVIYGGTQLGHSIRQIVQGCNILCATPGRLMDIIGKEKIGLKQIKYLVLDEADRMLDMGFGPEMKKLISCPGMPSKEQRQTLMFSATFPEEIQRLAAEFLKSNYLFVAVGQVGGACRDVQQTVLQVGQFSKREKLVEILRNIGDERTMVFVETKKKADFIATFLCQEKISTTSIHGDREQREREQALGDFRFGKCPVLVATSVAARGLDIENVQHVINFDLPSTIDEYVHRIGRTGRCGNTGRAISFFDLESDNHLAQPLVKVLTDAQQDVPAWLEEIAFSTYIPGFSGSTRGNVFASVDTRKGKSTLNTAGFSSSQAPNPVDDESWD

SEQ ID NO: 65023 - DNA, 2115 bp, Artificial Sequence
  derived and/or modified sequence
atgggcgacgaagactgggaagccgaaatcaatccccatatgagctcctacgtccctatcttcgagaaagaccggtacagtggagaaaacggcgacaattttaacagaaccccagcttcttctagcgaaatggatgacgggccatcccgccgggaccactttatgaaaagtgggtttgccagcggccggaattttggcaatcgagacgctggtgaatgtaacaaacgggacaatacgtcgactatggggggcttcggtgtgggcaagagcttcggtaatcgaggttttagcaattcacgtttcgaggacggagatagtagtggattctggcggggataccgcgatgggaataactccgaagcaagtggaccttataggcggggaggccggggcagttttcgaggctgtaggggagggtttggacttgggagccctaacaatgacctggacccggatgagtgtatgcagaggacggggggcctgttcgggtctcgaaggcccgtgctgtcaggcaccggcaatggtgatacaagccaatcacggtccggcagtggaagcgagaggggcggttacaaagggctgaacgaagaagtaattactggctccggaaaaaatagttggaagtccgaggctgaaggtggggaatcgtctgatacccaaggtccaaaagtcacatacattcctcctccgccgcctgaggacgaagactcgatttttgctcattatcaaaccggaatcaattttgacaaatacgataccatcctggtagaggtgtccggacacgatgctcccccagctattttgacatttgaggaagcaaatctgtgccagaccctgaacaacaatattgcaaaggccggctacactaaattaacccccgtgcaaaaatactctatccccattatcctggccggcagggacctcatggcctgtgcccaaacaggctccggcaagacagcagcctttcttctgcccatactggctcatatgatgcatgacggtattactgcgtctaggtttaaggaactgcaggaaccagaatgtattatcgtcgccccaacacgagaattggtgaatcagatttatttagaagcccgtaagttcagcttcggcacctgcgtgcgcgctgtggtcatttacggcggcactcagctcggtcattcaattcgtcaaattgtgcaggggtgtaatatcttgtgtgctactcccggccggctcatggatatcatcggaaaagaaaagattggcctgaaacagataaagtacctggttctcgatgaggctgatcggatgttggacatgggattcgggccagagatgaaaaagctgatctcctgccccggcatgccctctaaggagcagcgtcagaccttaatgttctcagccactttcccggaagaaatccagcgcttggcagcagagtttctgaagagcaactatctattcgtagccgtcgggcaggtgggcggggcgtgtcgagatgtgcaacagaccgtcctgcaggttggccaattttcaaagcgagaaaagctggtcgaaatcctgaggaacatcggggacgagaggaccatggttttcgtcgaaactaagaagaaggccgactttattgccacctttttgtgccaagagaagatttctacaacttctattcacggtgatcgggaacagagggaacgggaacaagccctcggcgatttcaggttcggtaaatgtccagttcttgtggccacgagcgtcgctgcaaggggactggacattgagaacgtccagcatgttataaattttgatctgcctagcaccatcgatgagtacgtccatcgaattggtagaactggcaggtgtggaaacacagggcgtgccattagtttcttcgacctcgagtccgacaatcatctggctcagccacttgtgaaggtgctgacggacgcccaacaggatgtgccagcctggctcgaagagatcgctttttccacttacatccctggtttctcgggttcaactcgaggcaacgtcttcgccagtgttgatacacgtaaagggaagagcactctgaataccgctggcttcagttcatcgcaggccccaaaccctgtagacgacgagtcctgggattag

SEQ ID NO: 65024 - DNA, 2115 bp, Artificial Sequence
  derived and/or modified sequence
atgggagatgaggactgggaggccgagatcaacccccacatgagcagctatgtgcccatctttgagaaggaccgctacagcggagaaaatggagacaacttcaacagaacaccagccagcagcagcgagatggatgatggccccagccggcgggaccacttcatgaagagcggctttgccagcggcaggaactttggaaacagagatgctggggagtgcaacaagagggacaacaccagcaccatgggcggctttggagtgggcaagagctttggaaacagaggcttcagcaacagcagatttgaagatggagacagcagcggcttctggaggggctacagagatggcaacaacagcgaggccagcggcccctaccgccggggcggccggggcagcttccggggctgccggggcggcttcggcctgggcagccccaacaatgacctggaccctgatgagtgcatgcagaggactggaggcctgtttggcagcagaagacctgtgctgagcggcactggaaatggagacaccagccagagccgcagcggcagcggcagcgagcggggcggctacaagggcctgaatgaggaggtgatcaccggcagcggcaagaacagctggaagtctgaggccgagggcggggagagcagtgacacccagggccccaaggtgacctacatccccccacctcctccagaagatgaagattccatctttgcccactaccagacaggcatcaactttgacaagtatgacaccatcctggtggaggtgtctggccatgatgcccccccagccatcctgacctttgaggaggccaacctgtgccagaccctgaacaacaacatcgccaaggccggctacaccaagctgacccctgtgcagaagtacagcatccccatcatcctggccggccgggacctgatggcctgtgcccagacaggcagcggcaagacagctgccttcctgctgcccatcctggcccacatgatgcatgatggcatcacagccagccgcttcaaggagctgcaggagcctgagtgcatcatcgtggcccccacccgggagctggtgaaccagatctacctggaggccaggaagttctcctttggcacctgtgtgcgggctgtggtgatctacggcggcacccagctgggccacagcatccggcagatcgtgcagggctgcaacatcctgtgtgccaccccaggccgcctgatggacatcatcggcaaggagaagattggcctgaagcagatcaagtacctggtgctggatgaggccgacaggatgctggacatgggcttcggccctgagatgaagaagctgatcagctgccccggcatgcccagcaaggagcagaggcagaccctgatgttttctgccaccttccctgaggagatccagaggctggccgctgagttcctgaagagcaactacctgtttgtggccgtgggccaggtgggcggggcctgcagagatgtgcagcagacagtgctgcaggtgggccagttcagcaagcgggagaagctggtggagatcctgaggaacattggagatgagaggaccatggtgtttgtggagaccaagaagaaggctgacttcatcgccaccttcctgtgccaggagaagatcagcaccaccagcatccatggagaccgggagcagcgggagcgggagcaggccctgggggacttccgctttgggaagtgccctgtgctggtggccacctctgtggccgcccggggcctggacattgaaaatgtgcagcacgtgatcaactttgacctgcccagcaccattgatgaatatgtgcaccgcatcggccgcacaggccgctgtggcaacacaggccgggccatctccttctttgacctggagagtgacaaccacctggcccagcccctggtgaaggtgctgacagatgcccagcaggatgtgcctgcctggctggaggagatcgccttcagcacctacatccctggcttcagcggcagcaccagaggaaatgtgtttgcctctgtggacaccaggaagggcaagagcaccctgaacacagctggcttcagcagcagccaggcccccaaccctgtggatgatgagagctgggactag

SEQ ID NO: 65025 - DNA, 2115 bp, Artificial Sequence
  derived and/or modified sequence
atgggcgacgaggactgggaggccgagatcaacccccacatgagctcctatgtccccatttttgagaaggatagatatagcggggaaaatggggataatttcaatagaacacctgcttcctcttccgagatggatgatggccctagccgacgtgaccacttcatgaaatccggtttcgcaagcggtcgtaatttcggtaacagggacgctggggagtgcaacaaacgggataatacttcaacaatggggggctttggcgtcgggaagtctttcggcaatagaggtttctctaatagtaggttcgaagacggggatagttcaggattctggcgcgggtatcgagacggcaataactccgaggctagcggcccttaccgtcgtggcggaaggggcagtttccggggctgtcgggggggatttggtctgggatcccctaataatgacctggatccagacgagtgcatgcagaggaccggcgggctcttcggatctcggcgccccgtgctctcaggcaccggaaacggggacacctcacagagtcggtccgggtctgggagcgagagagggggctacaaagggctcaatgaagaagtcattacgggtagtgggaagaactcttggaaaagcgaagcagaagggggggaatcatctgatactcaggggcccaaggtaacatatatccccccaccaccccctgaggacgaagattccatctttgcacactaccagaccggaatcaacttcgacaagtatgacactatattggtggaggttagcggtcacgacgcccctcccgcgattctgacatttgaagaggccaatctgtgccagaccctcaataacaacattgccaaggccgggtacaccaaactgactcctgttcagaagtactccatacccatcatcttagccggacgagacctcatggcttgtgcccagacgggatctgggaagacagcagccttcctgctccccattttggctcacatgatgcatgatggcattaccgcttcaagattcaaagaattacaagagcctgagtgcatcattgtcgctcctacacgcgaactcgtgaatcaaatctatctggaggctcggaaatttagttttgggacatgcgtgcgggccgtagtgatttacgggggcacccagttggggcactcaatccgccagattgtccaaggctgcaatatcctgtgtgccacaccggggcggttaatggacataatcgggaaggaaaaaataggcttaaagcagatcaagtatctagtcttggatgaggccgaccgaatgttagatatggggttcggccctgagatgaagaagctgatctcatgtccaggcatgccatctaaagaacagagacaaacgttgatgtttagcgccaccttccctgaggagatacaacggctggctgccgaatttctgaagagtaactatctcttcgtcgctgtagggcaagtgggcggagcatgccgggacgtgcagcaaactgtgctgcaggtcggccagttcagcaagagggagaagctcgtggaaattttgcgaaatattggtgacgagagaaccatggtgtttgttgaaacaaagaaaaaggcggattttatcgccacatttctgtgtcaggaaaaaatctctaccacatcgatacacggcgatcgtgaacagagggagcgcgaacaagctctgggcgacttcagattcggtaaatgtccagtgcttgtggccacaagcgttgccgccagggggttggacattgagaacgtgcaacacgtaatcaactttgatttgcctagcacgattgatgaatacgtacacaggattggccggactgggcgctgcgggaacactggacgagccattagtttctttgacctcgaaagcgacaaccacctggctcaaccactagtaaaggtgttaactgatgcccagcaggacgtacctgcgtggctggaggaaatcgcatttagtacatacatccccggcttctcaggcagcacccgcggaaacgtctttgcgagcgtggacacaagaaagggaaaatcaactttaaatacggccgggtttagttctagtcaagcacccaatccagttgacgatgagtcatgggattag

SEQ ID NO: 65026 - DNA, 2115 bp, Artificial Sequence
  derived and/or modified sequence
atgggggatgaggactgggaggcggagattaatccccacatgtcaagctatgtccctatcttcgaaaaggacagatacagtggcgaaaacggcgataatttcaacagaactccagcgagctcctcagaaatggacgacggaccctccagaagagaccacttcatgaaatcaggcttcgcctcagggcgaaatttcgggaacagagacgctggtgaatgcaataaacgggacaatacctcaacaatgggcggattcggagttggaaagtcttttgggaacaggggcttttccaacagcaggttcgaggatggggattcctcagggttctggcggggataccgtgatggtaataactctgaagcttctggaccttatagacgaggaggaagggggtcattccgaggctgtagagggggatttggcctgggttccccaaataacgacttggatccagatgagtgcatgcagaggaccggtggcctcttcggctccaggcgccctgtccttagcggcacgggcaatggggacacctcccagtctcgatcaggctccgggtctgaaaggggcggatacaaggggcttaacgaagaagtgataaccggaagtgggaagaacagctggaaatctgaggccgaaggcggagagtccagtgacacccagggacccaaagtcacgtatattcctcctcctccacctgaggacgaggattccattttcgcgcactaccagaccggcatcaacttcgataagtatgacaccatcttagtcgaagtaagcggccatgacgccccaccagcaatcctgacattcgaggaagcaaatctctgccagactcttaacaacaatatagccaaggcgggatacacaaagctgacgcctgtgcagaagtattccatacctattatcttggcgggtcgtgacctcatggcctgtgcccagactggtagcggcaaaactgccgcttttctcttgccaatcctagcccacatgatgcacgatgggatcacagcgtcaaggttcaaagaattgcaagagcccgagtgcatcatcgtcgctcctacccgggagctcgtgaaccaaatttatctggaggccaggaagttctcattcggaacctgtgtgagggctgtcgttatatacggaggcacacagctcggtcacagtatccgtcaaattgtccaaggctgtaacatcctgtgcgctaccccaggacgtctgatggatatcatcggtaaggaaaaaatcggtctgaagcagatcaaatacctcgtattggacgaagcggatagaatgctggacatggggttcggtccagagatgaaaaagctgatctcctgtcctggaatgccctctaaggagcagagacaaacactgatgttcagcgcaacctttcctgaagagattcagagattggccgcagagttcctgaagtctaactaccttttcgtggccgtcggacaggttggcggagcgtgccgggacgtacagcagaccgtattgcaggtcgggcagttctccaagagagaaaaactggtggaaatcctgcgcaacataggggacgaacgtacaatggtcttcgttgagacaaaaaagaaggctgactttatagccaccttcttatgtcaagagaaaatttcgacgacatccattcatggtgatagggagcagagagagcgcgaacaggccctaggagatttccgcttcgggaaatgcccagtgctcgtggccacctccgtggccgcaaggggactggatattgaaaatgtccagcacgttatcaattttgacctcccttctaccatcgatgagtatgtgcacagaatcgggcgtacagggagatgcgggaataccggcagggccatctctttctttgatttggaatcagacaaccacctagcacaaccgctggtaaaggttctaaccgatgcccaacaagacgttccggcatggctcgaggagatcgcttttagcacatatatcccgggtttttccgggtcgaccagagggaacgtctttgcctcagtcgacactcgcaaggggaagtctaccttaaacacagccggatttagttcgagtcaggctcctaaccctgtggacgatgagtcctgggactag

SEQ ID NO: 65027 - DNA, 2451 bp, Artificial Sequence
  derived and/or modified sequence
acctgacgcagtgggcgtcttgcacgtgcagccgtttaagtcgcgtgggcgcctgcgagggcttgggagagcaagccgcggagagaacttgaagccaccatgggagatgaagattgggaagcagaaatcaaccctcatatgtcttcctatgttcccatatttgagaaggataggtattctggagaaaatggagacaattttaacaggactccagcttcatcatcagaaatggatgatggaccttctcgaagagatcatttcatgaaaagtggatttgcctctgggcggaattttggaaacagagatgctggtgagtgtaataagcgagataatacatccacaatgggtggttttggagttggaaagagttttggaaacagaggtttttcaaacagcaggtttgaagatggtgatagctctggtttctggagaggctatcgagatggaaataattcagaagcttcagggccatacagaagaggtggaagaggtagtttccgaggttgccgtggaggatttggtctaggaagtccaaataatgacttagacccagacgaatgtatgcagcgcactggtggcctttttggttctagaagaccagtattaagtggcacaggtaatggtgatacttctcaaagcagaagtggcagtggaagtgaacgaggtggttacaaaggtttaaatgaagaagtaataacaggctctggaaagaattcttggaagtcagaagcagaaggaggagaaagtagtgatactcaaggaccaaaagtgacctacataccccctcctccacctgaggatgaggactccatctttgcacattatcagacaggcataaacttcgacaaatacgacactattcttgtggaagtgtctggacatgatgcaccaccagcaattctgacttttgaagaagctaatctctgtcagacactgaataacaacattgctaaagctggttatactaagcttactcctgtgcaaaaatacagtattcctatcatacttgcaggacgagatttgatggcttgcgctcaaacagggtctgggaagactgcggcttttctcctaccaattttggctcatatgatgcatgatggaataactgccagtcgttttaaagagttgcaggaaccagagtgtattattgtagcaccaactcgagaattggtcaaccagatttatttggaagccagaaaattttcttttgggacttgtgtaagagctgttgttatatatgggggaacccagctgggacattcaattcgacaaatagtacaaggctgtaatatattatgtgctactcctggaagactgatggatatcataggcaaagaaaagattggtctcaaacagatcaaatacttagttttggatgaagctgatcgcatgttggatatgggttttggtccagaaatgaagaagttaatttcttgcccaggaatgccatcaaaggaacagcgccaaacccttatgttcagtgcaacttttccagaggaaattcaaaggttggctgcagagtttttaaagtcaaattatctgtttgttgctgttggacaagtgggtggagcatgtagagatgttcagcagaccgttctccaagttggccagttctcaaaaagagaaaagctcgttgaaattctgcgaaacataggggatgaaagaactatggtctttgttgaaactaagaaaaaagcagattttattgcaacttttctttgtcaagaaaaaatatcaactacaagtattcatggtgatcgggaacagagagagcgggagcaagctcttggagattttcgctttggaaagtgcccagttcttgttgctacttcagtagctgccagagggctggatattgaaaatgtgcaacatgttatcaattttgatcttccttctaccattgatgaatatgttcatcgaattgggcgtactggtcgttgtgggaatactggcagagcaatttccttttttgatcttgaatcggataaccatttagcacagcctctagtaaaagtattgacagatgctcaacaggatgttcctgcatggttggaagaaattgcctttagtacatacattcctggcttcagtggtagtacaagaggaaacgtgtttgcatcagttgataccagaaagggcaagagcactttgaacacagctgggttttcttcttcacaagctcccaatccagtagatgatgagtcatgggattaaagccaaaacatccttcaagtctgtggttttgatgcagagaagaaaatagttttgatttttgagtttttaacagaagtataaaacttaacattctcatagctcctgtccttgtattctcactcctacacttaaaaaaaaaatccttactgactagttatgtgagatgctaaaacttacaacattgcagttactgatacaaatggtgttaactgggaatattaaagcattctaaatgtc

SEQ ID NO: 65028 - DNA, 2115 bp, Artificial Sequence
  derived and/or modified sequence
atgggcgacgaggactgggaggccgagatcaacccccacatgagcagctacgtgcccatcttcgagaaggacagatacagcggcgagaacggcgacaacttcaacagaacccccgccagcagcagcgagatggacgacggccccagcagaagagaccacttcatgaagagcggcttcgccagcggcagaaacttcggcaacagagacgccggcgagtgcaacaagagagacaacaccagcaccatgggcggcttcggcgtgggcaagagcttcggcaacagaggcttcagcaacagcagattcgaggacggcgacagcagcggcttctggagaggctacagagacggcaacaacagcgaggccagcggcccctacagaagaggcggcagaggcagcttcagaggctgcagaggcggcttcggcctgggcagccccaacaacgacctggaccccgacgagtgcatgcagagaaccggcggcctgttcggcagcagaagacccgtgctgagcggcaccggcaacggcgacaccagccagagcagaagcggcagcggcagcgagagaggcggctacaagggcctgaacgaggaggtgatcaccggcagcggcaagaacagctggaagagcgaggccgagggcggcgagagcagcgacacccagggccccaaggtgacctacatccccccccccccccccgaggacgaggacagcatcttcgcccactaccagaccggcatcaacttcgacaagtacgacaccatcctggtggaggtgagcggccacgacgccccccccgccatcctgaccttcgaggaggccaacctgtgccagaccctgaacaacaacatcgccaaggccggctacaccaagctgacccccgtgcagaagtacagcatccccatcatcctggccggcagagacctgatggcctgcgcccagaccggcagcggcaagaccgccgccttcctgctgcccatcctggcccacatgatgcacgacggcatcaccgccagcagattcaaggagctgcaggagcccgagtgcatcatcgtggcccccaccagagagctggtgaaccagatctacctggaggccagaaagttcagcttcggcacctgcgtgagagccgtggtgatctacggcggcacccagctgggccacagcatcagacagatcgtgcagggctgcaacatcctgtgcgccacccccggcagactgatggacatcatcggcaaggagaagatcggcctgaagcagatcaagtacctggtgctggacgaggccgacagaatgctggacatgggcttcggccccgagatgaagaagctgatcagctgccccggcatgcccagcaaggagcagagacagaccctgatgttcagcgccaccttccccgaggagatccagagactggccgccgagttcctgaagagcaactacctgttcgtggccgtgggccaggtgggcggcgcctgcagagacgtgcagcagaccgtgctgcaggtgggccagttcagcaagagagagaagctggtggagatcctgagaaacatcggcgacgagagaaccatggtgttcgtggagaccaagaagaaggccgacttcatcgccaccttcctgtgccaggagaagatcagcaccaccagcatccacggcgacagagagcagagagagagagagcaggccctgggcgacttcagattcggcaagtgccccgtgctggtggccaccagcgtggccgccagaggcctggacatcgagaacgtgcagcacgtgatcaacttcgacctgcccagcaccatcgacgagtacgtgcacagaatcggcagaaccggcagatgcggcaacaccggcagagccatcagcttcttcgacctggagagcgacaaccacctggcccagcccctggtgaaggtgctgaccgacgcccagcaggacgtgcccgcctggctggaggagatcgccttcagcacctacatccccggcttcagcggcagcaccagaggcaacgtgttcgccagcgtggacaccagaaagggcaagagcaccctgaacaccgccggcttcagcagcagccaggcccccaaccccgtggacgacgagagctgggactag

SEQ ID NO: 65029 - protein, 575 aa, Artificial Sequence
  derived and/or modified sequence
MGSRNLFLTNSPESSNDCEDNPTRNRGFSKRGDNDLDPDECMQRTGGLFGSRRPVLSGTGNGDTSQSRSGSGSERDSWKSEAEGGESSDTQGPKVTYIPPPPPEDEDSIFAHYQTGINFDKYDTILVEVSGHDAPPAILTFEEANLCQTLNNNIAKAGYTKLTPVQKYSIPIILAGRDLMACAQTGSGKTAAFLLPILAHMMHDGITASRFKELQEPECIIVAPTRELVNQIYLEARKFSFGTCVRAVVIYGGTQLGHSIRQIVQGCNILCATPGRLMDIIGKEKIGLKQIKYLVLDEADRMLDMGFGPEMKKLISCPGMPSKEQRQTLMFSATFPEEIQRLAAEFLKSNYLFVAVGQVGGACRDVQQTVLQVGQFSKREKLVEILRNIGDERTMVFVETKKKADFIATFLCQEKISTTSIHGDREQREREQALGDFRFGKCPVLVATSVAARGLDIENVQHVINFDLPSTIDEYVHRIGRTGRCGNTGRAISFFDLESDNHLAQPLVKVLTDAQQDVPAWLEEIAFSTYIPGFSGSTRGNVFASVDTRKGKSTLNTAGFSSSQAPNPVDDESWD

SEQ ID NO: 65030 - DNA, 1728 bp, Artificial Sequence
  derived and/or modified sequence
atggggagtagaaacctcttcctgacaaattctcccgaatccagcaacgactgtgaagacaacccaacccgcaatcgcggatttagcaagcgcggggataatgatctcgatcctgatgagtgtatgcagcgcaccggtggcctgtttgggtcacgcagaccagtgctctccggaactggcaatggagatacaagccagtcccgttctggctcaggtagcgaaagagattcatggaaaagcgaggcagaagggggtgagagcagtgacacacagggacctaaagtgacctacataccacctccaccccccgaagacgaagactcaatctttgcccactatcagacgggcatcaattttgataaatatgacacaattctcgtggaagtatcaggacacgacgctccccctgctattttgacattcgaggaggccaatttgtgccaaaccctcaataataatattgccaaggcaggttatactaaactgacaccagtgcagaagtactcaatacccatcattctagccgggcgggatctcatggcctgtgcccaaaccggctctggcaagacggctgccttccttctgccaatcctcgcccacatgatgcacgacggcattacagcatctaggttcaaagagctgcaggagccagaatgcataattgttgcgcctacaagggaattagtgaatcagatctatctagaggcccgcaagttttccttcggtacgtgcgttagagcggtcgtgatctatggcgggactcagctgggacactccatcaggcaaatcgtccagggttgtaacattttgtgtgcaacacctggtcggctcatggacattatcggcaaggaaaaaatcggcctaaagcagattaagtacctcgtgctcgacgaagctgaccggatgctggacatgggctttggccctgaaatgaaaaagttgatctcatgtccgggcatgccaagtaaggagcagcggcagactctgatgtttagcgccacctttcccgaggagatccagagactggctgctgagtttctgaaaagcaactatctcttcgtggccgtggggcaggtgggcggggcctgtcgagacgttcagcagacggtcttgcaggtaggtcaatttagcaagcgtgaaaaacttgtggagatcctgcgcaatatcggcgacgagagaacaatggtgttcgtagagacgaagaagaaagccgactttatcgcaacattcctctgtcaggaaaaaattagcacaacgagcattcacggagatcgtgaacagagggaacgggaacaggcgctgggagatttccgttttggcaaatgtccggtgttagtggccaccagtgtagcagcgcgagggctcgacatcgagaatgtgcagcatgtgattaacttcgatcttccaagtaccattgatgagtacgtccataggatcggccgcactggaagatgtgggaatactggaagggccatctcattctttgatttggaatccgataaccatttggcacagccactggtgaaagtgctgacagacgcccagcaggacgtgcccgcttggctagaggagatcgcgttttctacttatataccaggcttcagtggttctaccaggggcaatgttttcgctagtgttgacaccaggaaaggcaagagtactctgaacaccgctgggttcagttccagccaggcaccgaaccccgtggatgatgaaagttgggattag

SEQ ID NO: 65031 - DNA, 1728 bp, Artificial Sequence
  derived and/or modified sequence
atgggcagcaggaacctcttcctgaccaacagccctgagagcagcaatgactgtgaggacaaccccaccaggaacagaggcttcagcaagagaggagacaatgacctggaccctgatgagtgcatgcagaggactggaggcctgtttggcagccggcggcctgtgctgtctggaactggaaatggagacaccagccagagccgcagcggcagcggcagcgagcgggacagctggaagtctgaggccgagggcggggagagcagtgacacccagggccccaaggtgacctacatccccccacctcctccagaagatgaggacagcatctttgcccactaccagacaggcatcaactttgacaagtatgacaccatcctggtggaggtgtctggccatgatgcccccccagccatcctgacctttgaggaggccaacctgtgccagaccctgaacaacaacatcgccaaggccggctacaccaagctgacccctgtgcagaagtacagcatccccatcatcctggccggccgggacctgatggcctgtgcccagacaggcagcggcaagacagctgccttcctgctgcccatcctggcccacatgatgcatgatggcatcacagccagccgcttcaaggagctgcaggagcctgagtgcatcatcgtggcccccacccgggagctggtgaaccagatctacctggaggccaggaagttctcctttggcacctgtgtgcgggctgtggtgatctatggaggcacccagctgggccacagcatccggcagatcgtgcagggctgcaacatcctgtgtgccaccccaggccgcctgatggacatcatcggcaaggagaagattggcctgaagcagatcaagtacctggtgctggatgaagctgacaggatgctggacatgggctttggacctgagatgaagaagctgatcagctgccccggcatgcccagcaaggagcagaggcagaccctgatgttcagcgccaccttccctgaggagatccagaggctggccgctgagttcctgaagagcaactacctgtttgtggccgtgggccaggtgggcggggcctgcagagatgtgcagcagacagtgctgcaggtgggccagttcagcaagcgggagaagctggtggagatcctgagaaatattggagatgagaggaccatggtgtttgtggagaccaagaagaaggctgacttcatcgccaccttcctgtgccaggagaagatcagcaccaccagcatccacggggaccgggagcagcgggagcgggagcaggccctgggggacttccgctttggaaaatgtcctgtgctggtggccacctctgtggccgcccggggcctggacattgaaaatgtgcagcacgtgatcaactttgacctgcccagcaccattgatgaatatgtgcacagaattggaagaacaggccgctgtggcaacacaggccgggccatctccttctttgacctggagagtgacaaccacctggcccagcccctggtgaaggtgctgacagatgcccagcaggatgtgcctgcctggctggaggagatcgccttcagcacctacatccctggcttcagcggcagcaccagaggaaatgtgtttgcctctgtggacaccaggaagggcaagagcaccctgaacacagctggcttcagcagcagccaggcccccaaccctgtggatgatgagagctgggactag

SEQ ID NO: 65032 - DNA, 1728 bp, Artificial Sequence
  derived and/or modified sequence
atgggcagccggaacctgttcctgaccaacagccccgagagcagcaacgactgtgaggacaatcccactagaaaccggggtttcagcaaaagaggggataacgaccttgacccagatgaatgcatgcagcggacaggggggctctttgggagccggcgccctgtcctgagcggcaccggtaacggcgacacaagccaaagtaggtctggctctggaagtgagcgggactcatggaagtctgaggctgagggcggcgaatctagtgacacccagggaccgaaggtcacctacatccctccaccaccgccagaggacgaggatagcatttttgcacattatcagacagggattaacttcgataagtacgacaccattttggttgaagtctcaggtcatgatgcccctcctgcgatactgacctttgaagaagctaatctgtgtcagactctgaacaataacatcgccaaggcaggctataccaaactgacccccgtccagaaatatagtatcccaattatccttgcggggagagaccttatggcatgcgcgcagacggggtccggcaagaccgccgcttttctcctgcccatccttgcacacatgatgcacgacggcattacagccagccggttcaaagaacttcaggaaccagaatgcatcattgtggcaccaactagggagctcgtgaaccagatctatttggaggccagaaaattttcattcggaacctgcgtcagggctgtagtgatctacggggggacacaactcgggcacagcatcagacagatcgtgcagggctgcaatatcctctgcgcaactcctgggcgtttaatggatattatcggaaaggaaaagatcggtctgaagcagattaaatatctggtcctggacgaggctgatcgcatgctggatatggggtttggccccgagatgaaaaaactaatcagctgtcccggcatgccatcgaaagagcagagacagacgctgatgttcagcgcgacatttcccgaggagatccagcggcttgctgctgagtttctgaaaagcaattacctgtttgtggccgtgggccaggttggcggtgcatgtcgagacgtacagcagacggtactccaagtcgggcaattctctaaaagggagaagctggttgagatcttacgcaatataggcgacgagcgtaccatggtctttgtcgaaacaaagaaaaaagccgactttattgctacctttctgtgccaggaaaagattagcaccacctctatacacggtgatagagaacaaagggagcgggagcaggcactgggggacttcaggtttggcaagtgccccgttctggtagcaacctccgtcgccgctcgtggtctggatatcgaaaacgtccagcatgtgattaattttgacctgccaagcacaattgacgagtacgtgcaccgcataggaaggactgggcgctgtggaaacacaggcagggctatatcattctttgacctggagagtgacaaccacctggcccagccccttgtgaaggtcctgacagatgcgcagcaggacgtgcccgcctggctagaggagatcgccttttcaacttacatccctggatttagcggaagcacccgcgggaacgtattcgccagcgtggacaccaggaaaggtaaatcaacgttgaatactgcaggcttctcttcatctcaggcccccaatcctgtggacgacgaaagctgggattag

SEQ ID NO: 65033 - DNA, 1728 bp, Artificial Sequence
  derived and/or modified sequence
atggggtcaaggaatctgttcctcaccaactccccagagagttcaaatgactgtgaggataaccccaccagaaaccgcggattcagtaaacgtggagataacgacctggaccccgatgaatgcatgcagaggactgggggtctatttgggtcacgcaggcctgttctgagcggaacggggaacggagacaccagccagagtcgaagcggctccggttctgagagggatagttggaagtctgaagctgaaggaggcgagagtagcgacacccaggggcctaaagtgacctacattccaccccctcctcccgaagacgaggatagtatcttcgcacactaccaaactgggatcaactttgacaaatatgataccatattagtggaagtaagtggacatgacgccccacctgccattctgactttcgaagaagctaatctctgccaaaccctaaataataacatcgctaaggccggttataccaagctcacgccagtgcagaagtattccatccctattatattagccggtcgagatttgatggcctgtgcccagactgggagtggaaagacagcggcattcttattgcctatcctggcccatatgatgcatgatggcatcactgcaagccgattcaaagaactgcaggaacccgagtgtatcatagtagcccctacacgcgaactggttaaccagatctatctggaagccaggaagttttcctttggcacttgcgtgagggccgtggtgatatacggaggaacgcagctcggacacagcatccgacagatcgtgcaggggtgcaatatattatgcgctaccccgggacgactgatggacattattgggaaggagaaaattgggcttaagcagatcaagtaccttgtgctggacgaggctgaccgaatgctcgatatgggtttcggtcctgagatgaaaaagctgatctcctgccctggcatgcctagtaaggagcagcgacaaacactcatgtttagtgccacattcccagaagagattcaacggctggcggcagaatttctcaagtcgaattacctttttgttgccgtgggccaggttggaggcgcatgcagggacgtgcagcaaactgtactacaggtcggccagttctccaagagagagaagctcgtagagatactacgcaatattggagacgagaggacaatggtttttgtcgagacaaagaaaaaagcagactttattgccacattcctctgtcaggaaaagatctctactaccagtattcatggggacagagagcagagggaaagggaacaggccttgggcgattttcggttcggaaagtgtcccgtgcttgtagccacctcagtggcagccaggggcttagatattgaaaatgtccaacatgtgatcaacttcgacctaccatccaccattgacgagtatgtgcacaggattgggaggactggaaggtgcggaaatactgggcgtgccatctcgttcttcgacttggagagtgataatcacctggcgcaacctttggtgaaggtgctgacagatgcccagcaggatgtccccgcatggctcgaggaaatagctttttcaacatacataccagggttctcagggtcaaccaggggtaatgtgtttgcctctgttgatacacgtaaaggtaaaagcacccttaatactgctggatttagttcctcacaagcaccaaatccggtggatgatgaatcctgggattag

SEQ ID NO: 65034 - DNA, 1984 bp, Artificial Sequence
  derived and/or modified sequence
agaataaacatttctgggaatggggtctaggaatttatttttaaccaactctccagagtctagtaatgactgcgaagataatccaacacggaacagagggttttccaagagaggcgataatgacttagacccagacgaatgtatgcagcgcactggtggcctttttggttctagaagaccagtattaagtggcacaggtaatggtgatacttctcaaagcagaagtggcagtggaagtgaacgagattcttggaagtcagaagcagaaggaggagaaagtagtgatactcaaggaccaaaagtgacctacataccccctcctccacctgaggatgaggactccatctttgcacattatcagacaggcataaacttcgacaaatacgacactattcttgtggaagtgtctggacatgatgcaccaccagcaattctgacttttgaagaagctaatctctgtcagacactgaataacaacattgctaaagctggttatactaagcttactcctgtgcaaaaatacagtattcctatcatacttgcaggacgagatttgatggcttgcgctcaaacagggtctgggaagactgcggcttttctcctaccaattttggctcatatgatgcatgatggaataactgccagtcgttttaaagagttgcaggaaccagagtgtattattgtagcaccaactcgagaattggtcaaccagatttatttggaagccagaaaattttcttttgggacttgtgtaagagctgttgttatatatgggggaacccagctgggacattcaattcgacaaatagtacaaggctgtaatatattatgtgctactcctggaagactgatggatatcataggcaaagaaaagattggtctcaaacagatcaaatacttagttttggatgaagctgatcgcatgttggatatgggttttggtccagaaatgaagaagttaatttcttgcccaggaatgccatcaaaggaacagcgccaaacccttatgttcagtgcaacttttccagaggaaattcaaaggttggctgcagagtttttaaagtcaaattatctgtttgttgctgttggacaagtgggtggagcatgtagagatgttcagcagaccgttctccaagttggccagttctcaaaaagagaaaagctcgttgaaattctgcgaaacataggggatgaaagaactatggtctttgttgaaactaagaaaaaagcagattttattgcaacttttctttgtcaagaaaaaatatcaactacaagtattcatggtgatcgggaacagagagagcgggagcaagctcttggagattttcgctttggaaagtgcccagttcttgttgctacttcagtagctgccagagggctggatattgaaaatgtgcaacatgttatcaattttgatcttccttctaccattgatgaatatgttcatcgaattgggcgtactggtcgttgtgggaatactggcagagcaatttccttttttgatcttgaatcggataaccatttagcacagcctctagtaaaagtattgacagatgctcaacaggatgttcctgcatggttggaagaaattgcctttagtacatacattcctggcttcagtggtagtacaagaggaaacgtgtttgcatcagttgataccagaaagggcaagagcactttgaacacagctgggttttcttcttcacaagctcccaatccagtagatgatgagtcatgggattaaagccaaaacatccttcaagtctgtggttttgatgcagagaagaaaatagttttgatttttgagtttttaacagaagtataaaacttaacattctcatagctcctgtccttgtattctcactcctacacttaaaaaaaaaatccttactgactagttatgtgagatgctaaaacttacaacattgcagttactgatacaaatggtgttaactgggaatattaaagcattctaaatgtc

SEQ ID NO: 65035 - DNA, 1728 bp, Artificial Sequence
  derived and/or modified sequence
atgggcagcagaaacctgttcctgaccaacagccccgagagcagcaacgactgcgaggacaaccccaccagaaacagaggcttcagcaagagaggcgacaacgacctggaccccgacgagtgcatgcagagaaccggcggcctgttcggcagcagaagacccgtgctgagcggcaccggcaacggcgacaccagccagagcagaagcggcagcggcagcgagagagacagctggaagagcgaggccgagggcggcgagagcagcgacacccagggccccaaggtgacctacatccccccccccccccccgaggacgaggacagcatcttcgcccactaccagaccggcatcaacttcgacaagtacgacaccatcctggtggaggtgagcggccacgacgccccccccgccatcctgaccttcgaggaggccaacctgtgccagaccctgaacaacaacatcgccaaggccggctacaccaagctgacccccgtgcagaagtacagcatccccatcatcctggccggcagagacctgatggcctgcgcccagaccggcagcggcaagaccgccgccttcctgctgcccatcctggcccacatgatgcacgacggcatcaccgccagcagattcaaggagctgcaggagcccgagtgcatcatcgtggcccccaccagagagctggtgaaccagatctacctggaggccagaaagttcagcttcggcacctgcgtgagagccgtggtgatctacggcggcacccagctgggccacagcatcagacagatcgtgcagggctgcaacatcctgtgcgccacccccggcagactgatggacatcatcggcaaggagaagatcggcctgaagcagatcaagtacctggtgctggacgaggccgacagaatgctggacatgggcttcggccccgagatgaagaagctgatcagctgccccggcatgcccagcaaggagcagagacagaccctgatgttcagcgccaccttccccgaggagatccagagactggccgccgagttcctgaagagcaactacctgttcgtggccgtgggccaggtgggcggcgcctgcagagacgtgcagcagaccgtgctgcaggtgggccagttcagcaagagagagaagctggtggagatcctgagaaacatcggcgacgagagaaccatggtgttcgtggagaccaagaagaaggccgacttcatcgccaccttcctgtgccaggagaagatcagcaccaccagcatccacggcgacagagagcagagagagagagagcaggccctgggcgacttcagattcggcaagtgccccgtgctggtggccaccagcgtggccgccagaggcctggacatcgagaacgtgcagcacgtgatcaacttcgacctgcccagcaccatcgacgagtacgtgcacagaatcggcagaaccggcagatgcggcaacaccggcagagccatcagcttcttcgacctggagagcgacaaccacctggcccagcccctggtgaaggtgctgaccgacgcccagcaggacgtgcccgcctggctggaggagatcgccttcagcacctacatccccggcttcagcggcagcaccagaggcaacgtgttcgccagcgtggacaccagaaagggcaagagcaccctgaacaccgccggcttcagcagcagccaggcccccaaccccgtggacgacgagagctgggactag

SEQ ID NO: 65036 - DNA, 5832 bp, Artificial Sequence
  derived and/or modified sequence
agaacccgccccggaggggagggacgcagggaagagtcgcacggacgcactcgcgctgcggccagcgcccgggcctgcgggcccgggcggcggctgtgttgcgcagtcttcatgggttcccgacgaggaggtctctgtggctgcggcggcggctgctaactgcgccacctgctgcagcctgtccccgccgctctgaagcggccgcgtcgaagccgaaatgccgccaccccggaccggccgaggccttctctggctgggtctggttctgagctccgtctgcgtcgccctcggatccgaaacgcaggccaactcgaccacagatgctctgaacgttcttctcatcatcgtggatgacctgcgcccctccctgggctgttatggggataagctggtgaggtccccaaatattgaccaactggcatcccacagcctcctcttccagaatgcctttgcgcaggagacctgacaccacccgcctgtacgacttcaactcctactggagggtgcacgctggaaacttctccaccatcccccagtacttcaaggagaatggctatgtgaccatgtcggtgggaaaagtctttcaccctgggatatcttctaaccataccgatgattctccgtatagctggtcttttccaccttatcatccttcctctgagaagtatgaaaacactaagacatgtcgagggccagatggagaactccatgccaacctgctttgccctgtggatgtgctggatgttcccgagggcaccttgcctgacaaacagagcactgagcaagccatacagttgttggaaaagatgaaaacgtcagccagtcctttcttcctggccgttgggtatcataagccacacatccccttcagataccccaaggaatttcagaagttgtatcccttggagaacatcaccctggcccccgatcccgaggtccctgatggcctaccccctgtggcctacaacccctggatggacatcaggcaacgggaagacgtccaagccttaaacatcagtgtgccgtatggtccaattcctgtggactttcagcggaaaatccgccagagctactttgcctctgtgtcatatttggatacacaggtcggccgcctcttgagtgctttggacgatcttcagctggccaacagcaccatcattgcatttacctcggatcatgggtgggctctaggtgaacatggagaatgggccaaatacagcaattttgatgttgctacccatgttcccctgatattctatgttcctggaaggacggcttcacttccggaggcaggcgagaagcttttcccttacctcgacccttttgattccgcctcacagttgatggagccaggcaggcaatccatggaccttgtggaacttgtgtctctttttcccacgctggctggacttgcaggactgcaggttccacctcgctgccccgttccttcatttcacgttgagctgtgcagagaaggcaagaaccttctgaagcattttcgattccgtgacttggaagaggatccgtacctccctggtaatccccgtgaactgattgcctatagccagtatccccggccttcagacatccctcagtggaattctgacaagccgagtttaaaagatataaagatcatgggctattccatacgcaccatagactataggtatactgtgtgggttggcttcaatcctgatgaatttctagctaacttttctgacatccatgcaggggaactgtattttgtggattctgacccattgcaggatcacaatatgtataatgattcccaaggtggagatcttttccagttgttgatgccttgagttttgccaaccatggatggcaaatgtgatgtgctcccttccagctggtgagaggaggagttagagctggtcgttttgtgattacccataatattggaagcagcctgagggctagttaatccaaacatgcatcaacaatttggcctgagaatatgtaacagccaaaccttttcgtttagtctttattaaaatttataattggtaattggaccagttttttttttaatttccctctttttaaaacagttacggcttatttactgaataaatacaaagcaaacaaactcaagttatgtcatacctttggatacgaagaccatacataataaccaaacataacattatacacaaagaatactttcattatttgtggaatttagtgcatttcaaaaagtaatcatatatcaaactaggcaccacactaagttcctgattattttgtttataatttaataatatatcttatgagccctatatattcaaaatattatgttaacatgtaatccatgtttctttttcaaatctaaagttaaaaaaaaatagcagaagccagtgtcttaaagtctatcttttgtttctaagaccatgggatttcataatctcaagataaaatatgtatgaagtaattaatgtagaatttttacaccaaataataaataatgcttaataaactagagatatgagatgtgtaggaaatttggttaaacttttttcagatactttctggcccaaataataatttgttagcaaataatatgacccttgaactcaatggccatctattaaaagactgttgttcacactggaaaacatttaaagatgtgactatatccatgggtggattgaatcactcaaaatatattagtatccttctttagggatggttggttacagacatgtatttattcaggaggcagaaaatattccattttaattgcttattaaagaaaacattaaattctaaattattttgaggactgtgaagacttttcattagtgtaatattaggtcattgtcaatctcccagaatgtagttctatattctctaaatatgaaagtatccagaaaggccagtggtagtaaaaagcttagtgtatataatctcaaaagggatggaatatttacagctcatatttataacatgttgaatcttctcagttatcagtagtcatcagaagtgtcaatagctttctaaataaatattaaatatctactgtcctgtagtgaaggagtaatttttagtaattttctctttacaaagtctccagtgtttccaggtaaatatttgtgaaacaaaatacagcaaactacattgttacttcagtgtattgttgccaaaaatgacaagatattatattaaaatcagtaaattttagacagattttaaaaattaattagcctacaatagaggttatatggtaacacggtgatcttctaagcagttaagtgactgactgttctggcaacaacgacttctccgtgactgaagggccctgttcatttcctgatcctgaagctcgtctctcttttgagcctccgcttgctttggtcgatggtttccctcagctttttctttgctgttcttcatcctcgttgttgctgtcatcatgttcactgtggcttttacaatacagcctgtaaattccttatgacatagttcagtgcatttggctttatcgcctgctccacagttctttacctttacttggcttagagaaactgtatctttgttgcttcatataacctttccccaaccccactaagctggacataacttattagtggtcctcccgtcactttatttgtagaaatctctctttcacatgagcaggggttctttcatgtggtttagctgacagcagaactagtgattctagacattttgcatggccctcattcagtggctcacaaacatgagggagcatcagaactacttgaggggcttgttaaaacccagtgcgttagaagtcggatgcggtggctcacacctgtaatcccagcactttgggaggcccaggcaggcggatcacttgaggttaggagttcaagaccagcctggccaacatggtgaaaccccgtctctactaaaaatacaaaagttagccgggtgtggtggtgcatgcctgtaatcccagcttcttgggaggccaaggcacaagaatcgcttgaaccaggagacggaggtttcagtgaatgaagatcgtgccattgtattccagcctcggcaacacagcaggactgtgattttctttggagactcctagattttctgtggttttgaactgaatttgttggatgttggcaagtgcctcttatgagctgtttctttatcctgcatttgccccacaaagacttatctggaggtgagcaaagtatgtttggtagtgaggtcacaaaggcaatcagccccttcctccccactcccattgccatcttctcagtccttctccctttctttccaagtagtttacccacccctcctctttcctcccctgtccctaaaataatccacgtgtcttcctaaaatctctctttgatcctgtcctttgataacaccgtcagtgcctactactgggtctagacagacctctgttgagcagtcagagtcttccctgactccacaatgcccctttccttggctgaccagtatgactactggtccccacctttcccttgcctatccctacctccctcctactaggttgtcccatccctctcttcacccattcattcatgaccatttttcactaccaagctccccccctcccgaaggaggctgaggtttttgtgactctctagactctattgtgggatggaatgaacattgctaaagaatcttgtgttcgctttactttaaaaaggtatttttttcctaattataaaactgatgtgtcagttacggaaaaattagaaatgcagcacaaatacatgaatattttaccacgaaattgccatataatatcttgtcttttttgggggtgtgaattttttgcattgttctgatcatattctttatcatgtaatttatgttcttttttactaagtattatgtgtggttattatagattttcacaaagatatattgctggtaatatattttattgtgtagtcttataatttacttaaccttctttcaattgttagaaatttaggctatttccagattttcagtattgtaaataatgctgtgatgaccaattttgtgaataaaatgtttttatgtatttcagattattcccttaggatagtctctcagtgccaagttgtcaaaaacatctctattttgcttatcttcctgctctcttgctgccttagggggtagtaaactgaaacataaagtaaacatgcatacaaataaaaaacataaaacaaaaataagcaacctgatggtaataggtgaaagtggtaacctgttttaactttgaattcttgccgggcgcggtggctcacgcctgtaatcccagcactttgggaggctgaggcgggtggatcacgaggtcaggagttcaaaaccagcctggccaagatggtgaaatcccgtctctactaaaaatacaaaaattagccgggcgtggtggcgggcgcctgtaatcccagctacttgggaggctgaggcagagaattgcttgaacccaggaggcggaggttgcagtgagccaagatcgcgccactgcactccagcctgggtgacagagcgagactccgtctcaaataaaaaacaacaaaaaacaaaaaaaacttaaaattctttgcttgttagtgaccttgatcatggttctctttgtacgatagttgggcatctgtatttccacttgtgtgaatttgcctttaaattttggttatgggtttcaccttttaaaataatcaaacatatttatcttttcctgtgtgataggtttttttctgtatcttttcctgttaaacacacagacccctccccaatctggacattgaataaatattcattttcctttgcattgttaaaaaaaaaaaaaaaaaaaaaaaa

SEQ ID NO: 65037 - DNA, 462 bp, Artificial Sequence
  derived and/or modified sequence
atggacctggtggagctggtgagcctgttccccaccctggccggcctggccggcctgcaggtgccccccagatgccccgtgcccagcttccacgtggagctgtgcagagagggcaagaacctgctgaagcacttcagattcagagacctggaggaggacccctacctgcccggcaaccccagagagctgatcgcctacagccagtaccccagacccagcgacatcccccagtggaacagcgacaagcccagcctgaaggacatcaagatcatgggctacagcatcagaaccatcgactacagatacaccgtgtgggtgggcttcaaccccgacgagttcctggccaacttcagcgacatccacgccggcgagctgtacttcgtggacagcgaccccctgcaggaccacaacatgtacaacgacagccagggcggcgacctgttccagctgctgatgccctag

SEQ ID NO: 65038 - DNA, 1020 bp, Artificial Sequence
  derived and/or modified sequence
atgaagaccagcgccagccccttcttcctggccgtgggctaccacaagccccacatccccttcagataccccaaggagttccagaagctgtaccccctggagaacatcaccctggcccccgaccccgaggtgcccgacggcctgccccccgtggcctacaacccctggatggacatcagacagagagaggacgtgcaggccctgaacatcagcgtgccctacggccccatccccgtggacttccagagaaagatcagacagagctacttcgccagcgtgagctacctggacacccaggtgggcagactgctgagcgccctggacgacctgcagctggccaacagcaccatcatcgccttcaccagcgaccacggctgggccctgggcgagcacggcgagtgggccaagtacagcaacttcgacgtggccacccacgtgcccctgatcttctacgtgcccggcagaaccgccagcctgcccgaggccggcgagaagctgttcccctacctggaccccttcgacagcgccagccagctgatggagcccggcagacagagcatggacctggtggagctggtgagcctgttccccaccctggccggcctggccggcctgcaggtgccccccagatgccccgtgcccagcttccacgtggagctgtgcagagagggcaagaacctgctgaagcacttcagattcagagacctggaggaggacccctacctgcccggcaaccccagagagctgatcgcctacagccagtaccccagacccagcgacatcccccagtggaacagcgacaagcccagcctgaaggacatcaagatcatgggctacagcatcagaaccatcgactacagatacaccgtgtgggtgggcttcaaccccgacgagttcctggccaacttcagcgacatccacgccggcgagctgtacttcgtggacagcgaccccctgcaggaccacaacatgtacaacgacagccagggcggcgacctgttccagctgctgatgccctag

SEQ ID NO: 65039 - DNA, 462 bp, Artificial Sequence
  derived and/or modified sequence
atggacctcgtggagctggtgtccctcttcccaacactggccgggcttgccggcctgcaggtgccacccagatgtccagtgccgtcattccacgtggaactctgcagagaagggaaaaatctccttaagcattttcgcttcagggatctggaggaagacccttatttgccagggaatcctcgagaactaattgcttatagccagtaccctcggccaagcgacatacctcaatggaactctgacaaaccaagcctaaaggacatcaagattatgggctatagcatcaggaccatcgattaccggtacactgtctgggtgggttttaaccctgacgagttcttagctaatttttccgatatccacgccggcgaattgtactttgtggacagtgacccgctacaggaccacaacatgtacaatgactcacagggcggggacttattccagttgctcatgccttag

SEQ ID NO: 65040 - DNA, 1020 bp, Artificial Sequence
  derived and/or modified sequence
atgaaaacgagcgcttccccttttttcctcgctgttggttaccataaaccacacatccccttccgttatccaaaggagttccagaagctgtatccgctggaaaacattaccctcgcaccggatcctgaagtccctgatgggctcccacctgtcgcctacaacccatggatggacatcaggcagagagaagacgtgcaggcattaaacatctctgtgccctatggaccaatccccgtcgattttcagcggaaaatccgccagagttatttcgcatccgtgtcttacttggacacgcaagtgggacgactcctgtcagctctggacgaccttcaactcgctaactcgaccattattgcgttcacctcggatcatggctgggctctcggcgaacatggcgagtgggcaaaatatagcaattttgacgtggctacccatgtacctctcattttttatgttccagggcgtaccgcctctctgcccgaggcaggcgagaaattgttcccttatctggaccccttcgacagcgcgagtcagcttatggaaccgggtagacagtctatggacctggttgaacttgtctctttgtttcctacgctggctggcttggccgggttacaggttccccctaggtgccccgttccaagttttcatgttgaactctgtcgggaaggaaagaacctgctcaaacatttcaggttccgggatctagaagaagatccataccttccggggaatcctcgggaactgatcgcctactcccaataccctagaccatccgacattccccagtggaactctgataagccttcgttaaaggatatcaaaattatgggatatagtatccgcactatcgattacagatacacagtgtgggttgggttcaatccagacgagttccttgccaacttctcagacatacacgctggtgagctgtattttgtggacagtgatccacttcaggaccacaatatgtataacgacagccagggcggagaccttttccagctgttgatgccttag

SEQ ID NO: 65041 - DNA, 462 bp, Artificial Sequence
  derived and/or modified sequence
atggacctggtggagctggtgtccctcttccccaccctggccggcctggccggcctgcaggtgcccccacgctgccctgtgcccagcttccacgtggagctgtgccgggagggcaagaacctgctgaagcacttccgcttccgggacctggaggaggacccctacctgcccggcaacccccgggagctgattgcctacagccagtacccccggcccagcgacatcccccagtggaacagcgacaagcccagcctgaaggacatcaagatcatgggctacagcatccgcaccatcgactaccgctacacagtgtgggtgggcttcaacccagatgagttcctggccaacttcagtgacatccacgccggggagctgtactttgtggacagcgaccccctgcaggaccacaacatgtacaatgacagccagggcggggacctcttccagctgctgatgccctag

SEQ ID NO: 65042 - DNA, 1020 bp, Artificial Sequence
  derived and/or modified sequence
atgaagaccagcgccagccccttcttcctggccgtgggctaccacaagccccacatccccttccgctaccccaaggagttccagaagctgtaccccctggagaacatcaccctggccccagaccctgaggtgcctgatggcctgccccctgtggcctacaacccctggatggacatccggcagagagaagatgtgcaggccctgaacatctctgtgccctacggccccatccctgtggacttccagaggaagatccggcagagctactttgcctctgtgtcctacctggacacccaggtgggccgcctgctgagcgccctggatgacctgcagctggccaacagcaccatcatcgccttcaccagtgaccacggctgggccctgggggagcacggggagtgggccaagtacagcaactttgatgtggccacccacgtgcccctcatcttctacgtgcccggccgcacagccagcctgcctgaggccggggagaagctgttcccctacctggacccctttgattctgccagccagctgatggagcccggccggcagagcatggacctggtggagctggtgtccctcttccccaccctggccggcctggccggcctgcaggtgcccccacgctgccctgtgcccagcttccacgtggagctgtgccgggagggcaagaacctgctgaagcacttccgcttccgggacctggaggaggacccctacctgcccggcaacccccgggagctgattgcctacagccagtacccccggcccagcgacatcccccagtggaacagcgacaagcccagcctgaaggacatcaagatcatgggctacagcatccgcaccatcgactaccgctacacagtgtgggtgggcttcaacccagatgagttcctggccaacttcagtgacatccacgccggggagctgtactttgtggacagcgaccccctgcaggaccacaacatgtacaatgacagccagggcggggacctcttccagctgctgatgccctag

SEQ ID NO: 65043 - DNA, 462 bp, Artificial Sequence
  derived and/or modified sequence
atggacctggtggagctggtgagcctgttccccaccctggccggcttggcaggcttgcaagtccctcctcgctgtccagttccaagttttcatgtggagctctgtcgtgagggaaagaatttgctaaagcactttcgttttagagatttggaagaggatccctacctgccggggaaccctagggagctgatcgcgtactcccagtacccccgccctagtgacattcctcagtggaactcagacaaaccatcccttaaagatattaagattatgggatacagtatccgcacaattgactaccggtatactgtttgggtgggcttcaatccagacgaatttctcgctaatttctctgacatccacgccggcgagttgtattttgtggactccgatccactgcaggatcataacatgtacaacgacagccagggtggagacctgtttcagttgctcatgccgtag

SEQ ID NO: 65044 - DNA, 1020 bp, Artificial Sequence
  derived and/or modified sequence
atgaagaccagcgccagccccttcttcctggccgtgggctaccacaagccccacattcccttccgatatcctaaggaatttcagaagctgtatcccttggaaaatataaccctggccccagatcccgaagttcctgacggactgccacctgtggcatacaacccctggatggacatccggcagagggaagatgtacaggcgcttaatatatcagtaccatatggacccataccggttgacttccagagaaagatccgtcagagttactttgcctcagtgagctacttagacacgcaggttggacgcctgctgagtgccttagatgatctgcaactggccaactctaccatcatcgcgttcacctctgatcacgggtgggctctgggtgagcatggtgaatgggctaagtacagtaactttgacgttgccacccacgtgcccctgatattctacgtgccaggccgtacggccagcctccccgaagctggcgagaagttatttccttatttagacccgttcgacagtgcgagccaactgatggaacccggacgacagtccatggatctggtggaactcgtaagtctgtttccaactctggctggcctggccggcttacaggtgccgcctagatgcccagtccccagcttccatgtcgaactgtgtagggaagggaaaaatctgctaaaacacttccgtttccgggatctcgaagaggatccctatctgcccggcaacccccgcgagctgattgcgtactcacagtatcctcgtccctccgacattccccagtggaactcagataagccctctcttaaagatattaaaatcatggggtactcaatcagaaccattgactatcgatacacggtttgggtgggctttaaccctgatgagtttctggcaaacttctcggatattcacgccggcgagctgtatttcgtagattcagatccattgcaggatcacaatatgtacaacgacagccaggggggcgacctcttccagcttttgatgccatag

SEQ ID NO: 65045 - DNA, 462 bp, Artificial Sequence
  derived and/or modified sequence
atggatttggttgagctagtttccctgttcccaacactggcgggtctggccggtctccaggtcccaccacgatgccctgttccgagcttccatgttgagctctgtcgggaagggaaaaatctcctaaaacacttcaggttcagagacctcgaagaggacccttatctccctggaaatcctagagagttgatcgcctattctcagtacccccgacccagtgacatcccacagtggaatagcgacaagccgtcactgaaagacattaaaatcatgggatatagcatcagaacaatcgactacagatacactgtttgggtgggatttaatccagacgaattcctggccaatttttccgacatccacgccggagaactgtactttgttgacagtgatcccctgcaggaccacaatatgtacaatgattcccagggtggggatcttttccagctgctcatgccctag

SEQ ID NO: 65046 - DNA, 1020 bp, Artificial Sequence
  derived and/or modified sequence
atgaagacatccgcctctcctttcttcctcgcggtcggatatcacaaaccacatatcccctttcgctatcctaaagaattccagaagctgtaccctctagagaatatcacgctggcccctgaccctgaagtaccagacggcctgccccctgtggcttataacccatggatggatataaggcagcgggaggacgttcaagctttaaatatttctgtgccatatggacctatccccgtggactttcagaggaaaatcagacagagttatttcgcctctgtttcctacctcgacacccaggtgggcaggctacttagcgccctggatgacctccaactcgccaattccactatcatagccttcacgagtgaccacggttgggctttaggcgagcacggcgagtgggccaaatattctaatttcgacgtggccacacacgtacctcttatcttctacgtcccaggcaggaccgcctcattacccgaggccggagagaagcttttcccatacctggatccttttgatagcgcgtcccagttgatggagccagggagacagtccatggatctcgtagagctagtcagcttattccccaccctggccggattggccggactgcaggtgcccccaaggtgtcctgtcccttcattccatgtagagctgtgcagggaaggcaagaatttgttgaagcacttccggtttagggatctcgaggaggacccctacctgcctggtaatcctcgagagttaatcgcgtattcgcaatatcctcgcccatctgacatacctcagtggaactccgataaaccctccctcaaagacataaagattatgggatactctatccggactatcgactataggtatactgtttgggtcggtttcaaccctgatgagtttctcgccaacttctcagatatacatgcgggagaactgtatttcgtggactctgatccattgcaagatcacaacatgtacaacgattctcaggggggagacctctttcagctactgatgccatag

SEQ ID NO: 65047 - DNA, 1032 bp, Artificial Sequence
  derived and/or modified sequence
ctggccaacagcaccatcattgcatttacctcggatcatggcaggcaatccatggaccttgtggaacttgtgtctctttttcccacgctggctggacttgcaggactgcaggttccacctcgctgccccgttccttcatttcacgttgagctgtgcagagaaggcaagaaccttctgaagcattttcgattccgtgacttggaagaggatccgtacctccctggtaatccccgtgaactgattgcctatagccagtatccccggccttcagacatccctcagtggaattctgacaagccgagtttaaaagatataaagatcatgggctattccatacgcaccatagactataggtatactgtgtgggttggcttcaatcctgatgaatttctagctaacttttctgacatccatgcaggggaactgtattttgtggattctgacccattgcaggatcacaatatgtataatgattcccaaggtggagatcttttccagttgttgatgccttgagttttgccaaccatggatggcaaatgtgatgtgctcccttccagctggtgagaggaggagttagagctggtcgttttgtgattacccataatattggaagcagcctgagggctagttaatccaaacatgcatcaacaatttggcctgagaatatgtaacagccaaaccttttcgtttagtctttattaaaatttataattggtaattggaccagttttttttttaatttccctctttttaaaacagttacggcttatttactgaataaatacaaagcaaacaaactcaagttatgtcatacctttggatacgaagaccatacataataaccaaacataacattatacacaaagaatactttcattatttgtggaatttagtgcatttcaaaaagtaatcatatatcaaactaggcaccacactaagttcctgattattttgtttataatttaataatatatcttatgagccctatatattcaaaatattatgttaacatgtaatccatgtttctttttc

SEQ ID NO: 65048 - DNA, 2635 bp, Artificial Sequence
  derived and/or modified sequence
ttggagttcagccaccttagcaagtcctgggtttgttcttcagactttgctgctcgcccattgcctggatcgggggctactttgtaaaccaccaggaagactccagtgtttctggttaatttttagatgtttgttaattgctcttggtctctcattaatcccctgtgggtcatccaggaaacatactcaccactgtctgttctctgagttttcatttccaggcatccgccctgcctggatctcctcacctgccaggaacttcctctccacaagccggccatcccagcaaaagttctaacaccaaaggtctggcaactagcctgccatcttgtgcctggagccgcctgcgtgccacctactcccgaagatgggaaccttgttgccagttgggcagatgcggggcaatcctgtaccaagaccccattttaccacctgctttctcagaccactctggaacccactgtctcagattgtgtcttccaggaagcagaccatgagagggagttggcagggccaaagatttactggggctaactaacactcaggaaagggataggaaggaaacagggctggagagcaggttgagcccgacctgacagtctcgagcagcccaacagggaggtgtggagcaagggttgcccactagaggggcctgcattgggtacgggtgatggggtccacatggtacctggcatatagcaggctgtgcaatccatattaactgactggataaattaatgctcagaaaaggtgccctggagaatgggtgcgtgctgaacacaatagggaagggcccagcatctgccttggcataggcagaactgtgctgtgccctgcaacaggccacctgagagctgctttgatcttgtgtgtacattagacgactgccaggggcatgaaggggatgtgcttccagggcatttgctggcagggcgtcttgtgatttcttggtattggtgtgagcatagcctggcaggagagggcagatctccgtgcaaagtatgtcagaaagcagatggaagccaggccccctcctgaaagaggctccttgaagataattctaacatctttgtcatcagtgttgacatctcttgattgtatcctgtcattccatttgagatcttcctggttctggctggcatcctctgacatcactccagcagaagaaagggaaggaacacgctgcattactgcgtgggatatcttctaaccataccgatgattctccgtatagctggtcttttccaccttatcatccttcctctgagaagtatgaaaacactaagacatgtcgagggccagatggagaactccatgccaacctgctttgccctgtggatgtgctggatgttcccgagggcaccttgcctgacaaacagagcactgagcaagccatacagttgttggaaaagatgaaaacgtcagccagtcctttcttcctggccgttgggtatcataagccacacatccccttcagataccccaaggaatttcagaagttgtatcccttggagaacatcaccctggcccccgatcccgaggtccctgatggcctaccccctgtggcctacaacccctggatggacatcaggcaacgggaagacgtccaagccttaaacatcagtgtgccgtatggtccaattcctgtggactttcagcggaaaatccgccagagctactttgcctctgtgtcatatttggatacacaggtcggccgcctcttgagtgctttggacgatcttcagctggccaacagcaccatcattgcatttacctcggatcatgggtgggctctaggtgaacatggagaatgggccaaatacagcaattttgatgttgctacccatgttcccctgatattctatgttcctggaaggacggcttcacttccggaggcaggcgagaagcttttcccttacctcgacccttttgattccgcctcacagttgatggagccaggcaggcaatccatggaccttgtggaacttgtgtctctttttcccacgctggctggacttgcaggactgcaggttccacctcgctgccccgttccttcatttcacgttgagctgtgcagagaaggcaagaaccttctgaagcattttcgattccgtgacttggaagaggatccgtacctccctggtaatccccgtgaactgattgcctatagccagtatccccggccttcagacatccctcagtggaattctgacaagccgagtttaaaagatataaagatcatgggctattccatacgcaccatagactataggtatactgtgtgggttggcttcaatcctgatgaatttctagctaacttttctgacatccatgcaggggaactgtattttgtggattctgacccattgcaggatcacaatatgtataatgattcccaaggtggagatcttttccagttgttgatgccttgagttttgccaaccatggatggcaaatgtgatgtgctcccttccagctggtgagaggaggagttagagctggtcgttttgtgattacccataatattggaagcagcctgagggctagttaatccaaacatgcatcaacaatttggcctgagaatatgtaacagccaaaccttttcgtttagtctttattaaaatttataattggt

SEQ ID NO: 65049 - DNA, 462 bp, Artificial Sequence
  derived and/or modified sequence
atggacctggtcgagcttgttagcttatttccgacgctggctggactcgccgggctgcaagtgcctcccagatgtcccgtgccctccttccatgtcgagctgtgcagagaggggaagaatctgctgaaacatttccgttttcgagacttggaagaagatccatatctccccggcaacccccgagaactcattgcttactctcaataccccaggccatccgatatcccgcagtggaactccgataagccaagcctcaaagatataaaaattatgggatactcaatcaggacaattgactatcggtacacggtgtgggtgggctttaatcctgatgagtttcttgctaacttctctgacattcacgcaggcgaactgtattttgtggattccgacccgctgcaagatcataatatgtataatgattcccagggcggtgatctttttcaactactgatgccctag

SEQ ID NO: 65050 - DNA, 1020 bp, Artificial Sequence
  derived and/or modified sequence
atgaaaacttctgcaagccctttctttctggcggttgggtaccacaagcctcacatcccatttagatacccaaaggagttccagaagctgtaccctttagagaacatcacactggccccagaccccgaggtaccggatgggctaccccccgttgcttacaacccgtggatggatattcggcagagagaagatgtgcaggcactcaatattagcgtcccctacggtccgattcctgtagacttccagagaaagatccgccagtcatacttcgcgagcgtttcatacctggatacccaggtgggcagattgcttagcgcgttggacgacctacaattagcaaacagcacaattatagcgttcaccagtgaccacggatgggccctgggtgaacacggtgagtgggccaagtattcaaactttgatgtggccacccatgtcccgctcattttttatgtgcctggacgcacagcatccttaccagaagcaggtgaaaaactgttcccatatctggatccattcgactccgcttcacagctgatggaacccgggcggcaatccatggatttggtggaacttgtttctctattcccaaccctcgctggccttgccggcctccaagtccccccccggtgccctgtgccatcatttcacgttgagctttgccgagagggcaaaaatctgctgaaacattttcgcttcagggacttggaggaagacccttacctacctggcaacccaagggaactgatagcttattcacagtatccacgtccatccgatatcccccaatggaatagcgataaacccagcctgaaggatattaagataatgggatactcaatccgcacaatcgattaccgctacactgtttgggtgggctttaatcccgatgagttcttggctaattttagcgacattcatgccggtgaactttacttcgtggattctgatcctctccaggaccacaacatgtataatgattctcaaggaggcgatctcttccaattactaatgccttag

SEQ ID NO: 65051 - DNA, 462 bp, Artificial Sequence
  derived and/or modified sequence
atggatctggtcgagctcgtctctctgttcccaaccctggccgggctggccggactccaggtgcctcctcgatgccccgtaccaagttttcacgttgagctgtgccgagagggaaaaaacttgctcaaacacttccggttcagagacctggaagaagatccttacctccccggcaatccccgcgaactcatcgcatactctcagtatcctcggccatccgacatcccgcagtggaactccgataaaccctcattgaaagatatcaagatcatgggatattcaattcgaacaattgactaccgctatactgtatgggttggttttaatcccgacgagtttttagccaatttttcagacattcatgccggcgagctgtatttcgtagattctgaccctttgcaggaccacaacatgtataatgatagccagggtggtgatctattccaactgctgatgccctag

SEQ ID NO: 65052 - DNA, 1020 bp, Artificial Sequence
  derived and/or modified sequence
atgaagacctctgcatccccttttttcctagcagttggataccacaagccacacattccattcagatacccaaaagaatttcagaagctgtacccgctggaaaatatcacacttgcacctgatcctgaagtaccggatggtctgccccccgtcgcctataatccgtggatggatattcggcagcgtgaggatgtacaagcactcaatatttccgttccatacggccctatccctgtcgacttccagagaaaaatcagacagtcatactttgccagcgtttcttatttagacacccaggttggccgcctcttgtccgcccttgacgacctgcaactggccaactctacaattatcgccttcactagcgatcatggctgggccctgggggaacacggagagtgggcaaagtattcaaatttcgatgtggcgacccatgtccccctgattttctacgtacccggacggactgcttccttgcccgaagcaggcgaaaaattgtttccctacttagaccctttcgactccgcttcacaacttatggaacccgggagacaatccatggacttggtggaattggtttctctgttcccaacgctcgcgggactggcaggactccaggtccccccacgatgtcccgtgccgtcattccacgttgaactttgtagagaaggcaagaatttacttaagcacttccgctttcgcgacttagaagaagatccctatttaccaggcaacccaagggagctgatagcatattcccagtatccgcgcccaagcgatatccctcaatggaacagcgacaagcctagtctgaaggacatcaagatcatgggctactccatccgcaccattgactacaggtacaccgtgtgggttggctttaaccctgacgaattcttagcaaacttttccgatattcacgcgggagaactttactttgtcgacagcgaccctcttcaagaccacaatatgtacaacgattcccaaggcggtgatttgtttcagctgctcatgccctag

SEQ ID NO: 65053 - RNA, 462 nt, Artificial Sequence
  derived and/or modified sequence
auggaccuggucgagcuuguuagcuuauuuccgacgcuggcuggacucgccgggcugcaagugccucccagaugucccgugcccuccuuccaugucgagcugugcagagaggggaagaaucugcugaaacauuuccguuuucgagacuuggaagaagauccauaucuccccggcaacccccgagaacucauugcuuacucucaauaccccaggccauccgauaucccgcaguggaacuccgauaagccaagccucaaagauauaaaaauuaugggauacucaaucaggacaauugacuaucgguacacggugugggugggcuuuaauccugaugaguuucuugcuaacuucucugacauucacgcaggcgaacuguauuuuguggauuccgacccgcugcaagaucauaauauguauaaugauucccagggcggugaucuuuuucaacuacugaugcccuag

SEQ ID NO: 65054 - RNA, 1020 nt, Artificial Sequence
  derived and/or modified sequence
augaaaacuucugcaagcccuuucuuucuggcgguuggguaccacaagccucacaucccauuuagauacccaaaggaguuccagaagcuguacccuuuagagaacaucacacuggccccagaccccgagguaccggaugggcuaccccccguugcuuacaacccguggauggauauucggcagagagaagaugugcaggcacucaauauuagcguccccuacgguccgauuccuguagacuuccagagaaagauccgccagucauacuucgcgagcguuucauaccuggauacccaggugggcagauugcuuagcgcguuggacgaccuacaauuagcaaacagcacaauuauagcguucaccagugaccacggaugggcccugggugaacacggugagugggccaaguauucaaacuuugauguggccacccaugucccgcucauuuuuuaugugccuggacgcacagcauccuuaccagaagcaggugaaaaacuguucccauaucuggauccauucgacuccgcuucacagcugauggaacccgggcggcaauccauggauuugguggaacuuguuucucuauucccaacccucgcuggccuugccggccuccaaguccccccccggugcccugugccaucauuucacguugagcuuugccgagagggcaaaaaucugcugaaacauuuucgcuucagggacuuggaggaagacccuuaccuaccuggcaacccaagggaacugauagcuuauucacaguauccacguccauccgauaucccccaauggaauagcgauaaacccagccugaaggauauuaagauaaugggauacucaauccgcacaaucgauuaccgcuacacuguuugggugggcuuuaaucccgaugaguucuuggcuaauuuuagcgacauucaugccggugaacuuuacuucguggauucugauccucuccaggaccacaacauguauaaugauucucaaggaggcgaucucuuccaauuacuaaugccuuag

SEQ ID NO: 65055 - RNA, 462 nt, Artificial Sequence
  derived and/or modified sequence
auggaucuggucgagcucgucucucuguucccaacccuggccgggcuggccggacuccaggugccuccucgaugccccguaccaaguuuucacguugagcugugccgagagggaaaaaacuugcucaaacacuuccgguucagagaccuggaagaagauccuuaccuccccggcaauccccgcgaacucaucgcauacucucaguauccucggccauccgacaucccgcaguggaacuccgauaaacccucauugaaagauaucaagaucaugggauauucaauucgaacaauugacuaccgcuauacuguauggguugguuuuaaucccgacgaguuuuuagccaauuuuucagacauucaugccggcgagcuguauuucguagauucugacccuuugcaggaccacaacauguauaaugauagccaggguggugaucuauuccaacugcugaugcccuag

SEQ ID NO: 65056 - RNA, 1020 nt, Artificial Sequence
  derived and/or modified sequence
augaagaccucugcauccccuuuuuuccuagcaguuggauaccacaagccacacauuccauucagauacccaaaagaauuucagaagcuguacccgcuggaaaauaucacacuugcaccugauccugaaguaccggauggucugccccccgucgccuauaauccguggauggauauucggcagcgugaggauguacaagcacucaauauuuccguuccauacggcccuaucccugucgacuuccagagaaaaaucagacagucauacuuugccagcguuucuuauuuagacacccagguuggccgccucuuguccgcccuugacgaccugcaacuggccaacucuacaauuaucgccuucacuagcgaucauggcugggcccugggggaacacggagagugggcaaaguauucaaauuucgauguggcgacccaugucccccugauuuucuacguacccggacggacugcuuccuugcccgaagcaggcgaaaaauuguuucccuacuuagacccuuucgacuccgcuucacaacuuauggaacccgggagacaauccauggacuugguggaauugguuucucuguucccaacgcucgcgggacuggcaggacuccagguccccccacgaugucccgugccgucauuccacguugaacuuuguagagaaggcaagaauuuacuuaagcacuuccgcuuucgcgacuuagaagaagaucccuauuuaccaggcaacccaagggagcugauagcauauucccaguauccgcgcccaagcgauaucccucaauggaacagcgacaagccuagucugaaggacaucaagaucaugggcuacuccauccgcaccauugacuacagguacaccguguggguuggcuuuaacccugacgaauucuuagcaaacuuuuccgauauucacgcgggagaacuuuacuuugucgacagcgacccucuucaagaccacaauauguacaacgauucccaaggcggugauuuguuucagcugcucaugcccuag

SEQ ID NO: 65057 - protein, 252 aa, Artificial Sequence
  derived and/or modified sequence
MEPQSMKGQKRPFGGPWRLKVLGGPPWLRRTLPKLGRPKEAPVARMSTQSTHPLKPEAPRLPPGIPESPSCQRRHTLPASEFRCLTPEDAVSAFEIEREAFISVLGVCPLYLDEIRHFLTLCPELSLGWFEEGCLVAFIIGSLWDKERLMQESLTLHRSGGHIAHLHVLAVHRAFRQQGRGPILLWRYLHHLGSQPAVRRAALMCEDALVPFYERFSFHAVGPCAITVGSLTFMELHCSLRGHPFLRRNSGC

SEQ ID NO: 65058 - DNA, 759 bp, Artificial Sequence
  derived and/or modified sequence
atggaacctcagtcaatgaaggggcagaagagaccatttggggggccttggcgtcttaaggtcctgggagggcctccctggcttaggcggaccctcccaaagctgggcagaccgaaggaagcacctgtggcacgcatgtctactcagagcacacatccactgaaacccgaggccccaaggctccccccagggatccccgagtctccgtcttgccaacggaggcacacccttcccgcaagcgagtttaggtgcttgacacccgaggatgccgtgtccgcattcgagattgaacgcgaggccttcatctcagttctgggagtgtgtcctctctaccttgatgaaattcggcactttttaacattgtgtccagagctgtcgttaggatggttcgaggaagggtgcctcgtggcatttatcattggcagcctgtgggataaagagcggcttatgcaagagtccctcacactgcatcggagcggagggcacatagcacatttgcacgtgttagctgtacacagagcttttcggcagcaggggcgcggtccaatattgctgtggcggtacttgcatcacctgggttcacagcctgcagtcaggcgggcggctctaatgtgcgaagatgcgctggtaccattctatgaaaggttcagtttccatgctgtcgggccatgcgctattaccgtagggtcactgaccttcatggaactgcactgctccctgaggggccacccatttctgcgacggaatagtggttgttag

SEQ ID NO: 65059 - DNA, 759 bp, Artificial Sequence
  derived and/or modified sequence
atggagccccagagcatgaagggccagaagaggccctttggaggcccctggaggctgaaggtgctgggcggccccccctggctgcggaggaccctgcccaagctgggccggcccaaggaggcccctgtggccaggatgagcacccagagcacccaccccctgaagccagaggccccccggctgcccccaggcatccctgagagccccagctgccagaggaggcacaccctgcctgccagcgagttccgctgcctgaccccagaagatgctgtgtctgcctttgaaattgaaagagaggccttcatctctgtgctgggcgtgtgccccctgtacctggatgagatccgccacttcctgaccctgtgcccagagctgagcctgggctggtttgaggagggctgcctggtggccttcatcatcggcagcctgtgggacaaggagcggctgatgcaggagagcctgaccctgcacaggtctgggggccacatcgcccacctgcacgtgctggccgtgcaccgggccttccggcagcagggccggggccccatcctgctgtggagatacctgcaccacctgggcagccagcctgctgtgagaagagctgccctgatgtgtgaagatgccctggtgcccttctatgagcgcttctccttccacgctgtgggcccctgtgccatcaccgtgggcagcctgaccttcatggagctgcactgcagcctgcggggccaccccttcctgcggaggaacagcggctgctag

SEQ ID NO: 65060 - DNA, 759 bp, Artificial Sequence
  derived and/or modified sequence
atggagccccagagcatgaagggccagaagcggcccttcggcggcccttggcgccttaaggttcttggcggcccaccttggcttagaagaaccctgcccaagctcgggcgaccgaaggaagcacccgttgcccggatgagcacccagagtacgcaccccttgaaacccgaggctccaagactacctcctggcattccggaatctccatcttgccagagaagacacacactgccagcgagtgagttccgttgcctgactcccgaagatgccgtatctgcgttcgagattgagcgcgaggcttttattagtgtgctgggagtgtgccccttataccttgacgagattcgacacttcctgacgttgtgccctgagctctctctagggtggttcgaagagggatgcctggtagctttcatcataggcagcctctgggacaaggaacgcctcatgcaggaaagcctcacactgcaccggtcaggcgggcatatcgcgcatctgcatgtgctggcggttcatagagcgttccgccaacagggacgggggcccatccttctctggcggtatctgcatcatctgggcagccagccagctgtgagacgcgcggcccttatgtgtgaagacgcccttgtgcccttctatgagagatttagtttccacgccgtggggccatgcgctatcactgtgggatccctgacctttatggagctgcattgttccctgagagggcacccatttcttaggaggaatagcggatgctag

SEQ ID NO: 65061 - DNA, 759 bp, Artificial Sequence
  derived and/or modified sequence
atggaaccacaatcaatgaaaggccagaaacgcccattcggaggtccatggcgcctgaaagttctcgggggacctccttggctgaggagaactctgcccaagcttgggcgtccaaaagaggccccagtagcgaggatgagtacccagagcacccacccgctcaaacctgaagcccctcgactgcccccaggaatcccggaaagtccttcctgtcagcgcaggcatacgttgcctgcttctgagtttaggtgtctcacccccgaagatgccgtgtcagccttcgagatcgaaagggaagcttttatttccgtgctgggcgtctgtccactgtacctggatgagatcagacactttctcacactgtgtcccgagcttagcctcgggtggtttgaggagggctgtttggttgcattcatcatcggctctctatgggataaagaacggctgatgcaagagtctctgacacttcaccggtcaggaggacacatcgcgcacttacacgtgctggctgttcaccgggcatttagacagcaggggagaggaccaatcttgctgtggcggtatctgcaccaccttgggtctcagccagcggtgcgacgggcagcactaatgtgtgaagacgctctcgtccccttctatgagcgcttctcgtttcacgccgtggggccatgcgctatcaccgtaggatccttgacattcatggagctccactgcagcttgaggggtcacccatttctgaggcggaactccgggtgttag

SEQ ID NO: 65062 - DNA, 1912 bp, Artificial Sequence
  derived and/or modified sequence
atggaatccactaagaaggggcgagaccagtgaggattcaactaaagggagcgagaaggggcggggacccgggaggaggaagtggagtggccaccgaggaagaggggagtggtcggggtggggcacaggatggtggagagactgtcaacaacttttaatgagctcccttggcgtcctagcctagcccccaggcactgggagcattgcagaaagagaaagatactgtccctgtcctctaggtgtttccagtctagttggggagacaaaacaaatacacattaaatagataacaaacaactccaacttgtaaggctataatagatacgtgtagagcatatgtataatgcactgtattcaggaattccaagcagttcgaacgtcatgacccctcagaagttgacccagaagctggtgaaggaggcccagagaaagatacagggtgaggcacagtgaatctgctggaccagcttcaagaacaatatgtcagcctatccactgccacctcccacagctccagactcgtgggtgcttcctggatgtgaccagccatagaatttatcaccctggcaaggaccctggtacttggaagcttggagaaagtgattcagggctcttacccgcagtgggcaggactgctgacggctcccagctggattttcctgcaactgccctcaatgaagcaagctgttccacccaaggttgatgcaggacaaagagggtctcgctctgtcgcccaggctggagtgcagtggcgagtcactacagcctcgacctctccggctcaagccatcctcccgtctctgtctcccaaagtgctgggattacagcggtgagccactgtgcctggcttactgcctcatcttgttccctgaggttctagacctctagggtgttgtccggaaagaacagggccatgtggaagtcagcaaagagagaggccgattgaacagcaggctcttctcaggcatcgccaagtgactgattaggattggccaccagggggtgccatggagccacagtctatgaagggacagaagaggccttttgggggaccctggaggttgaaggtgctgggaggccctccttggcttaggaggacacttccaaagctggggcgccccaaggaggcaccagtggccagaatgtccacgcagagcacccaccccctgaaacctgaggccccacgtctgccacctgggatccccgagtccccgagctgtcagcggcgccacacactccctgccagtgagtttcgctgcctcaccccggaggacgctgtcagcgcctttgagatcgagcgtgaagccttcatctccgtcttgggcgtctgccccctgtacctggatgagatccggcacttcctgaccctatgtccagagctgtccctgggctggttcgaggagggctgccttgtggccttcatcatcggctcgctctgggacaaggagagactcatgcaggagtcactgacgctgcacaggtctgggggccacatagcccacctgcatgtgctggccgtgcaccgcgccttccggcagcagggcaggggccccatcctgctgtggcgctacctgcaccacctgggcagccagccggccgtgcgccgggccgcgctcatgtgcgaggacgcgctggtacccttctatgagaggttcagcttccacgccgtgggcccctgcgccatcaccgtgggctccctcaccttcatggagctccactgctccctgcggggccaccccttcctgcgcaggaacagcggctgctgaactgggctgcccacctggctgccaacatgatccccgtctctgccctgggctcctcttagctcagctgagcatggagacagcagtttccagagagtggagagagcagggctaaataaagaggagataaggtggcttctcacggcctg

SEQ ID NO: 65063 - DNA, 759 bp, Artificial Sequence
  derived and/or modified sequence
atggagccccagagcatgaagggccagaagagacccttcggcggcccctggagactgaaggtgctgggcggccccccctggctgagaagaaccctgcccaagctgggcagacccaaggaggcccccgtggccagaatgagcacccagagcacccaccccctgaagcccgaggcccccagactgccccccggcatccccgagagccccagctgccagagaagacacaccctgcccgccagcgagttcagatgcctgacccccgaggacgccgtgagcgccttcgagatcgagagagaggccttcatcagcgtgctgggcgtgtgccccctgtacctggacgagatcagacacttcctgaccctgtgccccgagctgagcctgggctggttcgaggagggctgcctggtggccttcatcatcggcagcctgtgggacaaggagagactgatgcaggagagcctgaccctgcacagaagcggcggccacatcgcccacctgcacgtgctggccgtgcacagagccttcagacagcagggcagaggccccatcctgctgtggagatacctgcaccacctgggcagccagcccgccgtgagaagagccgccctgatgtgcgaggacgccctggtgcccttctacgagagattcagcttccacgccgtgggcccctgcgccatcaccgtgggcagcctgaccttcatggagctgcactgcagcctgagaggccaccccttcctgagaagaaacagcggctgctag

SEQ ID NO: 65064 - protein, 23 aa, Artificial Sequence
  derived and/or modified sequence
MASMAAVLTWALALLSAFSATQA

SEQ ID NO: 65065 - protein, 366 aa, Artificial Sequence
  derived and/or modified sequence
MASMAAVLTWALALLSAFSATQARKGFWDYFSQTSGDKGRVEQIHQQKMAREPATLKDSLEQDLNNMNKFLEKLRPLSGSEAPRLPQDPVGMRRQLQEELEEVKARLQPYMAEAHELVGWNLEGLRQQLKPYTMDLMEQVALRVQELQEQLRVVGEDTKAQLLGGVDEAWALLQGLQSRVVHHTGRFKELFHPYAESLVSGIGRHVQELHRSVAPHAPASPARLSRCVQVLSRKLTLKAKALHARIQQNLDQLREELSRAFAGTGTEEGAGPDPQMLSEEVRQRLQAFRQDTYLQIAAFTRAIDQETEEVQQQLAPPPPGHSAFAPEFQQTDSGKVLSKLQARLDDLWEDITHSLHDQGHSHLGDP

SEQ ID NO: 65066 - protein, 162 aa, Artificial Sequence
  derived and/or modified sequence
MASMAAVLTWALALLSAFSATQARKGFWDYFSQTSGDKGRVEQIHQQKMAREPATLKDSLEQDLNNMNKFLEKLRPLSGSEAPRLPQDPVGMRRQLQEELEEVKARLQPYMAEAHELVGWNLEGLRQQLKPYTMDLMEQVALRVQELQEQLRVVGEDTKAQL

SEQ ID NO: 65067 - DNA, 69 bp, Artificial Sequence
  derived and/or modified sequence
atggcaagcatggctgccgtgctcacctgggctctggctcttctttcagcgttttcggccacccaggca

SEQ ID NO: 65068 - DNA, 489 bp, Artificial Sequence
  derived and/or modified sequence
atggcgagcatggcagcagtattgacctgggcgttggcacttctctccgccttttcagccacccaagcacggaagggattttgggattacttctcacaaacttctggagacaaaggccgtgtcgagcagatacaccagcagaaaatggccagagaaccggctactctcaaagattcattggagcaggacctgaacaacatgaacaagttcctggaaaagttgcggccacttagcggcagcgaggcccctcgactccctcaagatccagtcggtatgcggcgacaactgcaggaggaactggaggaagtgaaggccaggctgcagccttacatggctgaagcccatgaactcgtcggctggaatctggagggcctgcgacagcagcttaaaccatatacgatggatctgatggagcaggtggccctacgggtgcaagaacttcaggagcagctgagagtggttggtgaagacaccaaggcacagctttag

SEQ ID NO: 65069 - DNA, 1101 bp, Artificial Sequence
  derived and/or modified sequence
atggctagcatggccgccgtcctgacttgggcgttggctctgctgtctgcattctctgctacacaagccagaaaaggcttctgggactacttctctcaaacctccggggacaaaggtcgtgtggaacagattcaccagcagaagatggctcgcgaaccggccaccctcaaggattccctggagcaggatctgaataacatgaacaaattcctggagaagcttagaccgttgtccggctctgaagctccgcgcctgccgcaggacccggtgggcatgaggaggcagctccaggaagagctggaggaagtgaaggccaggctgcagccatacatggccgaggctcatgagctcgtggggtggaacctcgagggattgcgtcagcagctgaaaccttacacgatggatctcatggaacaggtcgccttacgcgttcaggaactgcaggagcagcttagagttgtgggcgaagatacgaaagcccaactgctgggaggtgttgacgaggcatgggccttgttgcaagggctccagagcagagtggtccaccacactggtaggtttaaagaattattccatccgtacgccgaaagtttagtgagcgggattgggcggcacgtgcaggaattacaccgctccgtggccccacacgcgcccgcgagccctgccaggctgagtagatgcgtgcaagtgttatcaaggaaacttactcttaaagcgaaagcgctgcatgcacgtatccagcagaatctggaccagctaagagaagagctttcaagggccttcgccggcactggtacagaggaaggagctggcccagatcctcagatgttgagcgaggaagtccgccagagacttcaagcttttagacaggatacatatcttcagatcgcggctttcaccagagccatcgatcaggagacagaggaggtgcagcagcaactcgccccacccccgcccggacatagcgccttcgcccctgaattccagcagactgacagtggtaaggtgctgtccaagttacaagctagacttgacgatctctgggaggatatcacccattcactccatgaccagggacactctcaccttggcgacccatag

SEQ ID NO: 65070 - DNA, 1101 bp, Artificial Sequence
  derived and/or modified sequence
atggcctctatggccgcggtcctgacatgggccctcgcattgttgtctgcattctccgccactcaggcgcgcaaagggttttgggactattttagccagacctcaggcgacaaaggtcgagtggagcaaatccatcagcaaaagatggctcgcgagccggccaccctgaaagacagccttgaacaggacctcaataacatgaacaaattccttgagaaactgcggcctctgtcaggaagcgaagcaccaagattgccacaagacccagtgggtatgcgtaggcagctgcaggaggagctggaggaagtgaaggcaaggctgcaaccgtatatggccgaagcgcacgaactggtgggctggaatctggagggattaagacagcaactgaagccatacacaatggacctgatggagcaggtcgccctgcgtgtgcaggagttgcaagagcagctacgggtggttggggaggatactaaagcacaacttctcgggggtgtcgacgaagcatgggcactgcttcagggtttgcagagccgcgtggtccaccatacagggcgcttcaaagagctattccatccttacgcggagtcgctagtgagcggtataggccggcacgtccaagagctgcaccggagcgttgcccctcatgctcctgcaagtcccgcgagattgagcaggtgcgtacaggtcttgtctaggaagttgacactgaaggctaaagcgctgcacgcaaggattcagcagaatcttgaccagctgcgtgaagagctgtccagagcttttgctggcaccggaactgaagagggggccggcccagatccccagatgctatctgaagaggtcagacaacggctccaagcatttaggcaggacacttatctgcagatcgccgcattcacacgtgctatcgatcaggaaactgaagaagtccaacagcagctggctccaccaccccccgggcacagcgctttcgccccggaattccagcagaccgacagcggtaaggtgctttctaagttgcaggcacgcctcgacgacttatgggaggatataacgcacagtctccacgatcaaggccacagtcatttaggagatccgtag

SEQ ID NO: 65071 - DNA, 489 bp, Artificial Sequence
  derived and/or modified sequence
atggcctccatggctgctgtgctgacctgggccctggccctgctgagcgccttcagcgccacccaggccaggaagggcttctgggactacttcagccagaccagcggggacaagggccgggtggagcagatccaccagcagaagatggcccgggagcccgccaccctgaaggacagcctggagcaggacctgaacaacatgaacaagttcctggagaagctgcggcccctgagcggcagcgaggccccccggctgccccaggaccctgtgggcatgaggcggcagctgcaggaggagctggaggaggtgaaggcccggctgcagccctacatggccgaggcccacgagctggtgggctggaacctggagggcctgcggcagcagctgaagccctacaccatggacctgatggagcaggtggccctgcgggtgcaggagctgcaggagcagctgcgggtggtgggggaggacaccaaggcccagctgtag

SEQ ID NO: 65072 - DNA, 1101 bp, Artificial Sequence
  derived and/or modified sequence
atggcctccatggctgctgtgctgacctgggccctggccctgctgagcgccttcagcgccacccaggccaggaagggcttctgggactacttcagccagaccagcggggacaagggccgggtggagcagatccaccagcagaagatggcccgggagcccgccaccctgaaggacagcctggagcaggacctgaacaacatgaacaagttcctggagaagctgcggcccctgagcggcagcgaggccccccggctgccccaggaccctgtgggcatgaggcggcagctgcaggaggagctggaggaggtgaaggcccggctgcagccctacatggccgaggcccacgagctggtgggctggaacctggagggcctgcggcagcagctgaagccctacaccatggacctgatggagcaggtggccctgcgggtgcaggagctgcaggagcagctgcgggtggtgggggaggacaccaaggcccagctgctgggcggcgtggatgaggcctgggccctgctgcagggcctgcagagccgggtggtgcaccacacaggccgcttcaaggagctgttccacccctatgcagagagcctggtgtctggcatcggcagacatgtgcaggagctgcacaggtctgtggccccccacgccccagccagccctgcccggctgagccgctgtgtgcaggtgctgagcaggaagctgaccctgaaggccaaggccctgcacgcccgcatccagcagaacctggaccagctgcgggaggagctgagccgggcctttgctggcaccggcacagaggagggcgccggccctgacccccagatgctgtctgaggaggtgcggcagaggctgcaggccttccggcaggacacctacctgcagattgctgccttcacccgggccatcgaccaggagacagaggaggtgcagcagcagctggcccctcctcctcctggccacagcgcctttgcccctgagttccagcagacagattctgggaaggtgctgagcaagctgcaggcccggctggatgacctgtgggaggacatcacccacagcctgcatgaccagggccacagccacctgggggacccctag

SEQ ID NO: 65073 - DNA, 489 bp, Artificial Sequence
  derived and/or modified sequence
atggccagcatggccgccgtgctgacctgggccctggccctgctgagcgccttttccgccacccaggcccggaaaggcttctgggattacttctcccagacatctggagacaaagggcgggtagagcaaattcatcagcagaaaatggctcgtgaacctgcgacactgaaggactcgcttgaacaagatttgaataacatgaacaaatttttggagaagttgcgcccgttaagcggaagcgaagcgccccgtctgcctcaagatccagtgggaatgaggagacagcttcaggaggagcttgaagaagtcaaggcccgcctgcaaccctacatggcagaggcacacgagcttgtgggttggaatctggagggcctgcgccagcagctcaaaccttacacaatggacctgatggaacaggttgccctgagggtccaagaactgcaggagcagttgcgggtcgtgggtgaagacactaaggcgcaactttag

SEQ ID NO: 65074 - DNA, 1101 bp, Artificial Sequence
  derived and/or modified sequence
atggccagcatggccgccgtgctgacctgggccctggccctgctgtccgctttcagtgctacacaggccaggaaaggattctgggattatttttcccaaacgtctggagacaaagggcgggtggagcagatccaccagcaaaaaatggctcgggagcccgcaactctgaaagactctctggaacaggacctcaacaacatgaacaagtttctcgaaaaactcaggccactgagcgggtccgaagcgcctagactgccacaagacccagtaggcatgagacgtcagctgcaggaagagctagaggaagtaaaggctcgcttgcaaccctacatggccgaggctcacgagctcgtcggttggaatctggaaggattacgccagcagctgaaaccttataccatggacttaatggaacaggtggctctccgcgtccaggaactgcaagaacagttgagggtagttggggaagacaccaaagcgcagttgctgggtggagttgatgaggcttgggccctccttcaagggttgcaatctcgcgtggtacaccacaccggccgatttaaggagctgtttcacccgtacgccgagtccctggtcagtggcatcggccgccatgtgcaggaactgcatagatccgtagcacctcatgctcccgcttctccggcccggctgtctcggtgcgtgcaggtgcttagccggaagttgactctgaaggccaaggcgttgcacgctcggatccagcagaacttagaccagttacgggaggagctaagcagggccttcgcaggcacaggcacagaagagggcgccggacccgatccccagatgctatccgaagaagttagacagcgattgcaagcattccggcaggacacgtacctccaaatcgctgccttcactcgggctattgatcaagagactgaagaggtgcagcagcagctcgccccgcccccacccggacacagcgctttcgcgccagaattccagcagacagatagtgggaaggtgttgtctaaactgcaagctaggctggacgacctgtgggaagacatcacacacagcctgcacgatcagggtcacagccatctcggcgatccttag

SEQ ID NO: 65075 - DNA, 1101 bp, Artificial Sequence
  derived and/or modified sequence
atggccagcatggccgccgtgctgacctgggccctggccctgctgagcgcattcagtgctactcaggctaggaaaggtttctgggattacttttcccagacaagcggcgacaagggacgcgttgagcagatacaccagcaaaagatggcccgggaacctgccaccctcaaggattcgctggaacaggacttaaataatatgaataagtttctcgaaaagctccgcccactctcaggctctgaagcgcccagattaccccaggaccctgtgggaatgcgtcgacagctccaggaagagcttgaggaagtgaaggcccggcttcagccatatatggccgaggcacacgaactggtagggtggaacttagagggcctccggcagcagctgaagccttacacaatggatctcatggagcaggttgctcttagggttcaggagctgcaggagcagctgagagtggtcggtgaggacaccaaggcccagctgctgggtggagtagatgaagcttgggcgctgttgcaggggctgcaatcaagggtagtgcatcataccggcaggtttaaagagctgttccatccatacgctgaatcactggtgagtggcattgggcgccacgtccaggagctacatcggagcgtcgcacctcacgcgcccgcttctccagcccgcctcagtaggtgcgtgcaggtcctctctcgcaaattgaccctgaaagcaaaggccttacacgcacgcatccagcagaacctggatcagctccgcgaggagctcagccgagcgtttgctggaacggggacagaagagggcgcgggacccgatccacagatgctcagcgaagaagtacggcaaagactgcaggccttccggcaggatacatatctccagatcgctgcttttacgagagcaatcgatcaggaaaccgaagaagttcaacagcagctggcaccacccccccctgggcattctgcatttgcgccagagttccagcaaactgattcaggcaaggtgctgagcaagcttcaagcacgccttgatgatctgtgggaagatattacacattcgttgcatgaccagggccactcccacttgggggatccctag

SEQ ID NO: 65076 - DNA, 489 bp, Artificial Sequence
  derived and/or modified sequence
atggcttcgatggctgctgtgttgacttgggctctggctcttctgagtgcgtttagtgccactcaggccaggaagggcttctgggattacttctcgcagacatcaggtgataaaggccgagtcgagcagatacatcagcagaagatggcacgcgagcctgccaccctcaaggatagtctagagcaggatctgaacaatatgaataaattcctggagaagctgaggcccctcagcggaagtgaagctcccagactaccacaggatccggtcggcatgcggaggcagttacaagaagaactcgaggaagtaaaggccaggctgcagccctacatggccgaagcccatgagctggtcgggtggaatctcgagggccttcgacagcagctgaaaccttacaccatggatcttatggaacaggtggccctgagggtgcaggagcttcaagagcagttgagagtggtcggagaagacaccaaggcccagctgtag

SEQ ID NO: 65077 - DNA, 1101 bp, Artificial Sequence
  derived and/or modified sequence
atggcgtctatggctgccgtgctgacatgggccctcgcccttctgtctgcgttttccgctacccaggcccgtaaaggattctgggattacttttcgcagacatcgggcgataaaggacgcgtcgaacagattcaccagcaaaagatggccagagagccagccaccctgaaagattcgcttgagcaggatctgaacaacatgaacaagttcctcgaaaaattgaggccactgtccggatcagaagctccgagattgccgcaggaccctgtgggaatgcgcaggcagctccaggaggaacttgaagaggtgaaggcccgtttacagccctatatggccgaggcccacgaactggttggctggaacctggaaggcctcaggcagcagttgaaaccatacactatggacctcatggaacaggttgctctgcgcgtgcaggaactgcaggagcagctgcgggtagtaggggaggacactaaggcgcagctcctgggcggtgtcgatgaagcctgggccttgctgcaggggctgcagagccgggtggtacaccacacgggccgatttaaagagctgttccacccttacgcggagagtctggttagcggtatcggaaggcacgtgcaggaactgcaccggtctgtcgctcctcacgctccggctagccctgcccgtctgagcagatgcgtgcaggtgttaagtaggaagctcacattgaaagctaaggccctgcatgcaagaatccagcaaaatttggatcagcttcgggaagagctgagcagggccttcgctggaacaggaaccgaggagggggctgggccagacccacagatgttatcagaagaagtgcgccagaggctccaggccttcagacaggatacatatctgcagattgcagccttcacacgagctattgaccaggagaccgaggaagttcagcagcagctcgcacctccgcctccgggacatagcgccttcgcgcctgagttccagcaaactgattcaggaaaggtgctttccaagttgcaggcccgattagatgacctctgggaggacataacacactccttacacgatcaaggtcactctcacttgggcgacccctag

SEQ ID NO: 65078 - DNA, 1101 bp, Artificial Sequence
  derived and/or modified sequence
atggccagtatggctgcagtcctcacctgggcccttgctttgctcagcgctttctccgccacccaggcgaggaagggcttctgggattacttctcacagacatccggcgacaagggacgagtcgaacagatccaccagcagaaaatggctagggaacccgcaaccctgaaagatagtctggaacaggacctgaacaatatgaacaaatttctagaaaagctgcgcccactgagcggcagcgaagccccacggctgccacaggatccagttggaatgaggagacagcttcaggaagagttggaagaggtgaaggctcgcctgcagccgtatatggccgaagcccatgaactggtgggatggaacctggaagggctgcggcagcagctgaagccatatacgatggatctgatggagcaggtagccctcagagtccaagagcttcaggaacagctgagggtggttggggaagacactaaagctcagttgcttggtggcgtggatgaggcatgggctctgcttcagggactgcagagcagggtggtgcatcatacaggtaggttcaaggagctgtttcatccgtacgccgagtcactcgtcagcggcattgggaggcacgtgcaagagctgcataggtccgtcgccccacacgcacctgcgagcccagctcgcttgagtcggtgtgtgcaggtactaagtcgcaaacttactctcaaggccaaagctctgcatgcccgaatccagcagaatctggatcaactgagggaggagttgtcacgggcttttgctggaactggtacggaggagggggctggaccagatccccagatgctgtccgaggaggtcaggcagagactacaggcctttagacaggacacatacctgcagatcgcagctttcacccgagccatcgaccaagaaacagaggaggtacagcagcagctggctcctccccctcccggacattcggcattcgcccctgagttccagcagaccgacagcggaaaagtcctatctaaactgcaggcaaggcttgatgatctgtgggaagatataacgcatagcctccacgaccagggccactctcaccttggagacccttag

SEQ ID NO: 65079 - DNA, 1897 bp, Artificial Sequence
  derived and/or modified sequence
caggcctccctccacctgtcttctcagagcaggtaatggcaagcatggctgccgtgctcacctgggctctggctcttctttcagcgttttcggccacccaggcacggaaaggcttctgggactacttcagccagaccagcggggacaaaggcagggtggagcagatccatcagcagaagatggctcgcgagcccgcgaccctgaaagacagccttgagcaagacctcaacaatatgaacaagttcctggaaaagctgaggcctctgagtgggagcgaggctcctcggctcccacaggacccggtgggcatgcggcggcagctgcaggaggagttggaggaggtgaaggctcgcctccagccctacatggcagaggcgcacgagctggtgggctggaatttggagggcttgcggcagcaactgaagccctacacgatggatctgatggagcaggtggccctgcgcgtgcaggagctgcaggagcagttgcgcgtggtgggggaagacaccaaggcccagttgctggggggcgtggacgaggcttgggctttgctgcagggactgcagagccgcgtggtgcaccacaccggccgcttcaaagagctcttccacccatacgccgagagcctggtgagcggcatcgggcgccacgtgcaggagctgcaccgcagtgtggctccgcacgcccccgccagccccgcgcgcctcagtcgctgcgtgcaggtgctctcccggaagctcacgctcaaggccaaggccctgcacgcacgcatccagcagaacctggaccagctgcgcgaagagctcagcagagcctttgcaggcactgggactgaggaaggggccggcccggacccccagatgctctccgaggaggtgcgccagcgacttcaggctttccgccaggacacctacctgcagatagctgccttcactcgcgccatcgaccaggagactgaggaggtccagcagcagctggcgccacctccaccaggccacagtgccttcgccccagagtttcaacaaacagacagtggcaaggttctgagcaagctgcaggcccgtctggatgacctgtgggaagacatcactcacagccttcatgaccagggccacagccatctgggggacccctgaggatctacctgcccaggcccattcccagctccttgtctggggagccttggctctgagcctctagcatggttcagtccttgaaagtggcctgttgggtggagggtggaaggtcctgtgcaggacagggaggccaccaaaggggctgctgtctcctgcacatccagcctcctgcgactccccaatctggatgcattacattcaccaggctttgcaaacccagcctcccagtgctcatttgggaatgctcatgagttactccattcaagggtgagggagtagggagggagaggcaccatgcatgtgggtgattatctgcaagcctgtttgccgtgatgctggaagcctgtgccactacatcctggagtttggctctagtcacttctggctgcctggtggccactgctacagctggtccacagagaggagcacttgtctccccagggctgccatggcagctatcaggggaatagaagggagaaagagaatatcatggggagaacatgtgatggtgtgtgaatatccctgctggctctgatgctggtgggtacgaaaggtgtgggctgtgataggagagggcagagcccatgtttcctgacatagctctacacctaaataagggactgaaccctcccaactgtgggagctccttaaaccctctggggagcatactgtgtgctctccccatctccagcccctccctctgggttcccaagttgaagcctagacttctggctcaaatgaaatagatgtttatgatagaa

SEQ ID NO: 65080 - DNA, 526 bp, Artificial Sequence
  derived and/or modified sequence
aatgtctgctctctgtgcccagacgtgagcagagcaggtaatggcaagcatggctgccgtgctcacctgggctctggctcttctttcagcgttttcggccacccaggcacggaaaggcttctgggactacttcagccagaccagcggggacaaaggcagggtggagcagatccatcagcagaagatggctcgcgagcccgcgaccctgaaagacagccttgagcaagacctcaacaatatgaacaagttcctggaaaagctgaggcctctgagtgggagcgaggctcctcggctcccacaggacccggtgggcatgcggcggcagctgcaggaggagttggaggaggtgaaggctcgcctccagccctacatggcagaggcgcacgagctggtgggctggaatttggagggcttgcggcagcaactgaagccctacacgatggatctgatggagcaggtggccctgcgcgtgcaggagctgcaggagcagttgcgcgtggtgggggaagacaccaaggcccagttg

SEQ ID NO: 65081 - DNA, 1929 bp, Artificial Sequence
  derived and/or modified sequence
ataaagcagaatgtctgctctctgtgcccagacgtgagcaggcctccctccacctgtcttctcagagcaggtaatggcaagcatggctgccgtgctcacctgggctctggctcttctttcagcgttttcggccacccaggcacggaaaggcttctgggactacttcagccagaccagcggggacaaaggcagggtggagcagatccatcagcagaagatggctcgcgagcccgcgaccctgaaagacagccttgagcaagacctcaacaatatgaacaagttcctggaaaagctgaggcctctgagtgggagcgaggctcctcggctcccacaggacccggtgggcatgcggcggcagctgcaggaggagttggaggaggtgaaggctcgcctccagccctacatggcagaggcgcacgagctggtgggctggaatttggagggcttgcggcagcaactgaagccctacacgatggatctgatggagcaggtggccctgcgcgtgcaggagctgcaggagcagttgcgcgtggtgggggaagacaccaaggcccagttgctggggggcgtggacgaggcttgggctttgctgcagggactgcagagccgcgtggtgcaccacaccggccgcttcaaagagctcttccacccatacgccgagagcctggtgagcggcatcgggcgccacgtgcaggagctgcaccgcagtgtggctccgcacgcccccgccagccccgcgcgcctcagtcgctgcgtgcaggtgctctcccggaagctcacgctcaaggccaaggccctgcacgcacgcatccagcagaacctggaccagctgcgcgaagagctcagcagagcctttgcaggcactgggactgaggaaggggccggcccggacccccagatgctctccgaggaggtgcgccagcgacttcaggctttccgccaggacacctacctgcagatagctgccttcactcgcgccatcgaccaggagactgaggaggtccagcagcagctggcgccacctccaccaggccacagtgccttcgccccagagtttcaacaaacagacagtggcaaggttctgagcaagctgcaggcccgtctggatgacctgtgggaagacatcactcacagccttcatgaccagggccacagccatctgggggacccctgaggatctacctgcccaggcccattcccagctccttgtctggggagccttggctctgagcctctagcatggttcagtccttgaaagtggcctgttgggtggagggtggaaggtcctgtgcaggacagggaggccaccaaaggggctgctgtctcctgcacatccagcctcctgcgactccccaatctggatgcattacattcaccaggctttgcaaacccagcctcccagtgctcatttgggaatgctcatgagttactccattcaagggtgagggagtagggagggagaggcaccatgcatgtgggtgattatctgcaagcctgtttgccgtgatgctggaagcctgtgccactacatcctggagtttggctctagtcacttctggctgcctggtggccactgctacagctggtccacagagaggagcacttgtctccccagggctgccatggcagctatcaggggaatagaagggagaaagagaatatcatggggagaacatgtgatggtgtgtgaatatccctgctggctctgatgctggtgggtacgaaaggtgtgggctgtgataggagagggcagagcccatgtttcctgacatagctctacacctaaataagggactgaaccctcccaactgtgggagctccttaaaccctctggggagcatactgtgtgctctccccatctccagcccctccctctgggttcccaagttgaagcctagacttctggctcaaatgaaatagatgtttatg

SEQ ID NO: 65082 - DNA, 489 bp, Artificial Sequence
  derived and/or modified sequence
atggccagcatggccgccgtgctgacctgggccctggccctgctgagcgccttcagcgccacccaggccagaaagggcttctgggactacttcagccagaccagcggcgacaagggcagagtggagcagatccaccagcagaagatggccagagagcccgccaccctgaaggacagcctggagcaggacctgaacaacatgaacaagttcctggagaagctgagacccctgagcggcagcgaggcccccagactgccccaggaccccgtgggcatgagaagacagctgcaggaggagctggaggaggtgaaggccagactgcagccctacatggccgaggcccacgagctggtgggctggaacctggagggcctgagacagcagctgaagccctacaccatggacctgatggagcaggtggccctgagagtgcaggagctgcaggagcagctgagagtggtgggcgaggacaccaaggcccagctgtag

SEQ ID NO: 65083 - DNA, 1101 bp, Artificial Sequence
  derived and/or modified sequence
atggccagcatggccgccgtgctgacctgggccctggccctgctgagcgccttcagcgccacccaggccagaaagggcttctgggactacttcagccagaccagcggcgacaagggcagagtggagcagatccaccagcagaagatggccagagagcccgccaccctgaaggacagcctggagcaggacctgaacaacatgaacaagttcctggagaagctgagacccctgagcggcagcgaggcccccagactgccccaggaccccgtgggcatgagaagacagctgcaggaggagctggaggaggtgaaggccagactgcagccctacatggccgaggcccacgagctggtgggctggaacctggagggcctgagacagcagctgaagccctacaccatggacctgatggagcaggtggccctgagagtgcaggagctgcaggagcagctgagagtggtgggcgaggacaccaaggcccagctgctgggcggcgtggacgaggcctgggccctgctgcagggcctgcagagcagagtggtgcaccacaccggcagattcaaggagctgttccacccctacgccgagagcctggtgagcggcatcggcagacacgtgcaggagctgcacagaagcgtggccccccacgcccccgccagccccgccagactgagcagatgcgtgcaggtgctgagcagaaagctgaccctgaaggccaaggccctgcacgccagaatccagcagaacctggaccagctgagagaggagctgagcagagccttcgccggcaccggcaccgaggagggcgccggccccgacccccagatgctgagcgaggaggtgagacagagactgcaggccttcagacaggacacctacctgcagatcgccgccttcaccagagccatcgaccaggagaccgaggaggtgcagcagcagctggccccccccccccccggccacagcgccttcgcccccgagttccagcagaccgacagcggcaaggtgctgagcaagctgcaggccagactggacgacctgtgggaggacatcacccacagcctgcacgaccagggccacagccacctgggcgacccctag

SEQ ID NO: 65084 - protein, 269 aa, Artificial Sequence
  derived and/or modified sequence
MLLLINVILTLWVSCANGQVKPCDFPDIKHGGLFHENMRRPYFPVAVGKYYSYYCDEHFETPSGSYWDYIHCTQNGWSPAVPCLRKCYFPYLENGYNQNYGRKFVQGNSTEVACHPGYGLPKAQTTVTCTEKGWSPTPRCIRVNSSEKCGPPPPISNGDTTSFLLKVYVPQSRVEYQCQPYYELQGSNYVTCSNGEWSEPPRCIHPCIITEENMNKNNIKLKGRSDRKYYAKTGDTIEFMCKLGYNANTSILSFQAVCREGIVEYPRCE

SEQ ID NO: 65085 - DNA, 810 bp, Artificial Sequence
  derived and/or modified sequence
atgcttcttctgataaacgtaatcctcactctgtgggtatcgtgtgctaatgggcaggtaaagccttgcgatttccccgatataaaacacggtggcttgtttcacgagaacatgcgtcgtccttacttccccgtcgcagtggggaagtactactcatactattgcgacgagcacttcgagacgccgtcaggctcttactgggactatattcactgcacacaaaacggatggagtccagccgtgccttgtctacgcaagtgttattttccatatctagagaatggctataatcaaaactacggccggaaatttgttcaaggtaactccacagaggtggcctgtcaccctggatatggattgccaaaagctcagacaacagtgacctgtaccgaaaaaggctggagtcctaccccccgttgcatccgagtgaatagcagcgaaaagtgtggccctccaccccctatatctaatggcgacaccacttcattcctgctgaaggtgtacgttccccagtctagagtggagtatcagtgtcagccatactacgagctgcaaggatcgaattatgtgacatgctcgaatggtgagtggtctgagccgcctaggtgcattcatccttgcatcattactgaggaaaatatgaataagaacaatatcaagctcaaaggccgctcagataggaaatactatgctaagaccggggatacaattgaattcatgtgcaagctggggtacaacgcaaacacttccattctctcatttcaggcagtgtgtcgggaaggaatcgtggagtaccccaggtgcgagtag

SEQ ID NO: 65086 - DNA, 810 bp, Artificial Sequence
  derived and/or modified sequence
atgctgctgctgatcaacgtcatcctgaccctgtgggtgtcctgtgccaacggccaggtgaagccctgtgacttcccagacatcaagcacggcggcctcttccacgagaacatgagaagaccctacttccctgtggccgtgggcaagtactacagctactactgtgatgagcactttgagaccccatctggcagctactgggactacatccactgcacccagaatggctggagccctgctgtgccctgcctgaggaagtgctacttcccctacctggagaatggctacaaccagaactacggcaggaagtttgtgcagggcaacagcacagaggtggcctgccaccctggctacggcctgcccaaggcccagaccaccgtgacctgcacagagaagggctggagccccaccccccgctgcatccgggtgaacagcagcgagaagtgtggccccccaccacccatcagcaatggagacaccaccagcttcctgctgaaggtgtatgtgccccagagccgggtggagtaccagtgccagccctactatgagctgcagggcagcaactacgtgacctgcagcaatggagagtggagcgagcccccacgctgcatccacccctgcatcatcacagaggagaacatgaacaagaacaacatcaagctgaagggccgcagtgacaggaagtactatgccaagacaggagacaccatcgagttcatgtgcaagctgggctacaatgccaacaccagcatcctgtccttccaggccgtgtgccgggagggcatcgtggagtacccccgctgtgagtag

SEQ ID NO: 65087 - DNA, 810 bp, Artificial Sequence
  derived and/or modified sequence
atgctgctgctgatcaacgtgatcctgaccctgtgggtgagctgcgccaacggtcaggttaaaccgtgcgacttccctgacatcaaacacggcggactcttccatgaaaatatgcggcgcccatacttcccagtggccgttggcaaatattactcatattactgtgacgagcacttcgaaacaccaagcgggtcatactgggactatatccattgtacacaaaatggatggtccccagctgtgccttgtctgaggaaatgttattttccatatctcgaaaacggttataaccagaactatggcaggaaatttgttcagggaaactcaactgaagtggcctgccaccccgggtatggccttcccaaagcgcaaaccacggtgacatgcacggagaagggctggagccccacccctagatgtatcagggtgaacagcagtgagaagtgcgggccaccacctccaatctccaatggtgatacaacaagcttcctgctcaaggtgtacgttccccagtccagagtagagtaccagtgtcagccctactatgagctgcagggttccaactacgtaacatgttcaaatggtgaatggtcagagccaccaagatgtatccacccctgtatcatcacagaagaaaacatgaacaagaataatatcaagctcaagggaagatctgatcgcaaatattacgccaagacaggcgacaccatcgaattcatgtgcaagctcggatataatgccaacacatccatactctctttccaggccgtatgcagagagggaatcgtggaataccccagatgcgagtag

SEQ ID NO: 65088 - DNA, 810 bp, Artificial Sequence
  derived and/or modified sequence
atgctattgcttatcaatgtgattctgacactgtgggtcagttgcgcgaacggacaggtgaagccttgcgacttcccggacattaagcatggaggtctgtttcacgaaaatatgcgcagaccttattttcccgtggcggttggtaaatactatagctattactgtgatgaacatttcgaaaccccatccggttcatattgggactacatacactgtacgcagaacggttggagtcctgcggtgccatgcctgcgaaaatgttactttccatatttggaaaacggatacaaccagaattacgggcgaaaattcgtccagggcaattccactgaggtggcttgccatcccggttacggcctaccgaaagctcagactaccgttacatgcactgagaaggggtggtctccaaccccacggtgtattcgagtgaactcttccgagaagtgcgggccacctcctcccatttccaacggcgacacgactagttttctccttaaggtttacgtgccgcagtcaagggttgagtatcagtgtcagccatactatgaactacaggggtccaattatgtgacctgctcaaatggggaatggagtgagcctcccaggtgtatccatccatgtatcataaccgaggagaacatgaacaagaacaatatcaaactgaaaggtcgttccgaccgcaaatattacgctaagacaggggataccatagaatttatgtgcaaactgggctataatgccaatacctctattttgtcgttccaagccgtgtgtagggagggcattgttgaatacccacgttgtgagtag

SEQ ID NO: 65089 - DNA, 1043 bp, Artificial Sequence
  derived and/or modified sequence
aatgaaagatttcaaaccccaaacagtgcaactgaaacttttgtattagcatactactgagaatatctaacatgttgttactaatcaatgtcattctgaccttgtgggtttcctgtgctaatggacaagtgaaaccttgtgattttccagacattaaacatggaggtctatttcatgagaatatgcgtagaccatactttccagtagctgtaggaaaatattactcctattactgtgatgaacattttgagactccttcaggaagttactgggattacattcattgcacacaaaatgggtggtcaccagcagtaccatgtctcagaaaatgttattttccttatttggaaaatggatataatcaaaattatggaagaaagtttgtacagggtaactctacagaagttgcctgccatcctggctacggtcttccaaaagcgcagaccacagttacatgtacggagaaaggctggtctcctactcccagatgcatccgtgtcaattcttcagaaaagtgtgggcctcctccacctattagcaatggtgataccacctcctttctactaaaagtgtatgtgccacagtcaagagtcgagtaccaatgccagccctactatgaacttcagggttctaattatgtaacatgtagtaatggagagtggtcggaaccaccaagatgcatacatccatgtataataactgaagaaaacatgaataaaaataacataaagttaaaaggaagaagtgacagaaaatattatgcaaaaacaggggataccattgaatttatgtgtaaattgggatataatgcaaatacatcaattctatcatttcaagcagtgtgtcgggaagggatagtggaataccccagatgcgaataaggcagcattgttaccctaaatgtatgtccaacttccacttttccacttctcactcttatggtctcaaagcttgcaaagatagcttctgatattgttgtaatttctactttatttcaaagaaaattaatataatagtttcaatttgcaacttaatatattctc

SEQ ID NO: 65090 - DNA, 810 bp, Artificial Sequence
  derived and/or modified sequence
atgctgctgctgatcaacgtgatcctgaccctgtgggtgagctgcgccaacggccaggtgaagccctgcgacttccccgacatcaagcacggcggcctgttccacgagaacatgagaagaccctacttccccgtggccgtgggcaagtactacagctactactgcgacgagcacttcgagacccccagcggcagctactgggactacatccactgcacccagaacggctggagccccgccgtgccctgcctgagaaagtgctacttcccctacctggagaacggctacaaccagaactacggcagaaagttcgtgcagggcaacagcaccgaggtggcctgccaccccggctacggcctgcccaaggcccagaccaccgtgacctgcaccgagaagggctggagccccacccccagatgcatcagagtgaacagcagcgagaagtgcggcccccccccccccatcagcaacggcgacaccaccagcttcctgctgaaggtgtacgtgccccagagcagagtggagtaccagtgccagccctactacgagctgcagggcagcaactacgtgacctgcagcaacggcgagtggagcgagccccccagatgcatccacccctgcatcatcaccgaggagaacatgaacaagaacaacatcaagctgaagggcagaagcgacagaaagtactacgccaagaccggcgacaccatcgagttcatgtgcaagctgggctacaacgccaacaccagcatcctgagcttccaggccgtgtgcagagagggcatcgtggagtaccccagatgcgagtag

SEQ ID NO: 65091 - protein, 513 aa, Artificial Sequence
  derived and/or modified sequence
MWLRLGPPSLSLSPKPTVGRSLCLTLWFLSLALRASTQAPAPTVNTHFGKLRGARVPLPSEILGPVDQYLGVPYAAPPIGEKRFLPPEPPPSWSGIRNATHFPPVCPQNIHTAVPEVMLPVWFTANLDIVATYIQEPNEDCLYLNVYVPTEDDIRDSGAKPVMVYIHGGSYMEGTGNMIDGSILASYGNVIVITLNYRVGVLGFLSTGDQAAKGNYGLLDQIQALRWVSENIAFFGGDPRRITVFGSGIGASCVSLLTLSHHSEGLFQRAIIQSGSALSSWAVNYQPVKYTSLLADKVGCNVLDTVDMVDCLRQKSAKELVEQDIQPARYHVAFGPVIDGDVIPDDPEILMEQGEFLNYDIMLGVNQGEGLKFVEGVVDPEDGVSGTDFDYSVSNFVDNLYGYPEGKDTLRETIKFMYTDWADRDNPETRRKTLVALFTDHQWVEPSVVTADLHARYGSPTYFYAFYHHCQSLMKPAWSDAAHGDEVPYVFGVPMVGPTDLFPCNFSKNDVML

SEQ ID NO: 65092 - protein, 808 aa, Artificial Sequence
  derived and/or modified sequence
MWLRLGPPSLSLSPKPTVGRSLCLTLWFLSLALRASTQAPAPTVNTHFGKLRGARVPLPSEILGPVDQYLGVPYAAPPIGEKRFLPPEPPPSWSGIRNATHFPPVCPQNIHTAVPEVMLPVWFTANLDIVATYIQEPNEDCLYLNVYVPTEDDIRDSGAKPVMVYIHGGSYMEGTGNMIDGSILASYGNVIVITLNYRVGVLGFLSTGDQAAKGNYGLLDQIQALRWVSENIAFFGGDPRRITVFGSGIGASCVSLLTLSHHSEGLFQRAIIQSGSALSSWAVNYQPVKYTSLLADKVGCNVLDTVDMVDCLRQKSAKELVEQDIQPARYHVAFGPVIDGDVIPDDPEILMEQGEFLNYDIMLGVNQGEGLKFVEGVVDPEDGVSGTDFDYSVSNFVDNLYGYPEGKDTLRETIKFMYTDWADRDNPETRRKTLVALFTDHQWVEPSVVTADLHARYGSPTYFYAFYHHCQSLMKPAWSDAAHGDEVPYVFGVPMVGPTDLFPCNFSKNDVMLSAVVMTYWTNFAKTGDPNKPVPQDTKFIHTKANRFEEVAWSKYNPRDQLYLHIGLKPRVRDHYRATKVAFWKHLVPHLYNLHDMFHYTSTTTKVPPPDTTHSSHITRRPNGKTWSTKRPAISPAYSNENAQGSWNGDQDAGPLLVENPRDYSTELSVTIAVGASLLFLNVLAFAALYYRKDKRRQEPLRQPSPQRGAGAPELGAAPEEELAALQLGPTHHECEAGPPHDTLRLTALPDYTLTLRRSPDDIPLMTPNTITMIPNSLVGLQTLHPYNTFAAGFNSTGLPHSHSTTRV

SEQ ID NO: 65093 - DNA, 1542 bp, Artificial Sequence
  derived and/or modified sequence
atgtggctacgtctcggcccaccaagcttgtcattgtctcccaagcctactgtgggtaggtccctgtgtcttaccctgtggttcctaagtctcgcccttagggcttcaacgcaagcacccgccccaacggtgaacacgcattttggcaagcttcgaggtgcacgggtccctctcccttcagagatactcggacctgtagaccaatatcttggtgtgccctacgcagctcctccaatcggtgaaaagcggtttctgccccccgagcctcctccctcttggtctggaatccgcaacgctacacactttccacccgtgtgtccccaaaacatccacaccgccgttcccgaagtgatgttgccagtctggttcacagctaatctggacattgtggctacatacatccaagagccgaatgaggactgtctatatctgaacgtctatgtgccgaccgaagatgacattcgcgacagcggagccaaacctgtcatggtgtatatccatgggggttcgtacatggaaggcaccggcaatatgattgacgggtctatcctggcgagttatgggaacgtgatcgtgatcacactgaattatagagtgggagtgctagggtttttgtctaccggagatcaggctgctaaaggtaattatggccttctggaccaaattcaggctttacggtgggtctcagagaatatagccttctttggtggagatccccgccgcatcacagtatttggaagcggaatcggcgcctcttgcgtgagtcttttgactctgtcccaccactccgaggggctatttcagcgcgctattatccagtccggctcggcattgagctcctgggctgtgaactatcaaccagttaaatacaccagtctcctcgcagacaaggtggggtgcaacgtgctggacacagtagacatggtggactgtcttagacagaaatccgctaaggagcttgttgagcaggacatccaacctgcccggtaccacgttgctttcggacccgtgatcgacggcgacgtaattcctgatgacccagagattctcatggagcaaggagagttcctcaattacgatataatgctcggtgtgaaccagggcgaaggcttgaaatttgtcgagggtgtagtggacccagaggacggagtcagcggcaccgacttcgattactcagtttccaacttcgtggacaatttgtacggctatcctgaaggcaaagatacgctgcgggaaactattaagtttatgtataccgactgggctgatcgcgataaccctgaaacacgcaggaagacgcttgtcgccctgtttactgaccatcaatgggtggaacctagcgttgtgacagcggatctgcatgccagatacggcagtcccacctacttttatgccttctaccaccactgtcaaagccttatgaaacccgcttggtctgacgccgcccacggagacgaggtaccatacgtgttcggggtccctatggtggggccaaccgacttgtttccctgtaatttcagcaagaatgacgtgatgctgtag

SEQ ID NO: 65094 - DNA, 2427 bp, Artificial Sequence
  derived and/or modified sequence
atgtggcttcgtcttggcccaccatctctgtccctaagcccaaagccgacagtgggcaggtctctctgtctgacactgtggtttctcagtttggcactgcgcgcctctactcaggctccagcacctacagtgaacacccatttcgggaagctaagaggggctagggtccccttgccaagtgaaattctaggccccgttgatcagtacctgggggtgccctacgcagcacccccgattggcgagaaacggttcctgccccctgagccccctccgtcttggagcgggattagaaacgcaacgcattttccaccagtgtgcccacaaaacatacacaccgctgtcccggaggtcatgttgcccgtgtggttcacggcaaatctggacatcgtggccacgtacattcaagagcccaacgaggactgtctgtacctgaatgtgtacgtgccaactgaggacgacatccgcgactctggggccaagcctgtgatggtgtacattcatggcgggtcgtatatggagggtaccgggaatatgattgacggcagcatcctggctagttacggaaatgttatcgtcatcacacttaactaccgggtgggagtgctcggcttcctgtcaactggcgaccaagccgcaaagggaaattatggcctgcttgaccagatccaggcgctccggtgggtatctgagaatatcgccttctttggaggtgacccaagacggattaccgtgttcggctcagggatcggcgcttcctgtgtcagcctgctgacactctctcatcactcagagggtctgttccagcgcgcgattattcagtccggatccgcactgagctcttgggcagtaaactatcagcctgtaaagtatacttccctgctggccgataaggtgggctgtaacgtgttggacacagtggatatggtcgactgtctcaggcagaaatccgccaaggaattagtagaacaggacatacagcctgcccgctaccatgtggctttcgggcccgttattgatggcgatgtaataccggatgaccccgagattctgatggaacagggcgagttcctgaactacgacattatgctgggtgttaaccagggcgagggactgaaatttgttgaaggggttgttgacccagaggacggggtgagcggtacagacttcgactactccgtctcaaacttcgtcgacaacctgtatggatacccagaaggaaaggatacacttagagagacaatcaagttcatgtacaccgactgggccgacagagacaacccggaaactagacgcaagacattagtcgctctcttcactgaccatcagtgggtggaaccatcagtggtgacagcagacctgcacgccaggtatggcagccccacctacttctacgccttctatcatcactgccagtccctgatgaagccagcttggtccgacgcggctcacggcgatgaagttccctatgtatttggggtgccaatggtgggccctactgacctgtttccttgtaatttctcaaaaaatgatgtgatgctgtcagctgtagtcatgacatactggacaaattttgctaagaccggtgacccaaataaacctgttccccaggacacgaaatttatccacaccaaagcaaataggttcgaggaagtagcctggagcaagtacaacccacgggaccagttatacctgcatatcggccttaaacccagggtgagggatcactatcgcgcaaccaaggtagcgttctggaagcacctggttccacacttatataacttacatgacatgttccactatactagcacaaccactaaagtcccaccccccgataccactcacagttcacatattactcggcggccaaatggcaagacctggtcaacaaagagacccgcaatatctccagcatattccaatgaaaacgcccaaggctcttggaacggcgatcaggacgcaggcccactcctggttgagaacccacgggattactcaaccgagttaagtgtcaccatcgccgtgggggcctctctcttgttcctgaatgttctcgccttcgccgccctgtactatagaaaagacaagcggcggcaagagcctctaaggcaaccctctcctcaacggggagccggggcacccgaactaggcgctgcacctgaggaggaactggcggcactccaactgggaccgacccaccatgagtgcgaagcgggacctccccacgatacattgaggctgaccgccctcccggactacacattgacgctgaggagatcaccggacgacattcccttaatgacgccaaacaccatcaccatgattcctaatagtctcgtcggtttacagacgcttcatccatataacactttcgccgccggcttcaactcgacaggcctcccacactcacactccactactcgagtgtag

SEQ ID NO: 65095 - DNA, 1542 bp, Artificial Sequence
  derived and/or modified sequence
atgtggctgcggctgggcccccccagcctgagcctgagccccaagcccaccgtgggccgcagcctgtgcctgaccctgtggttcctgagcctggccctgcgggccagcacccaggccccagcccccaccgtgaacacccactttgggaagctgcggggggcccgggtgcccctgcccagcgagatcctgggccctgtggaccagtacctgggcgtgccctatgctgccccacccatcggggagaagcgcttcctgcccccagagcccccacccagctggagcggcatcagaaatgccacccacttcccccctgtgtgcccccagaacatccacacagctgtgcctgaggtgatgctgcctgtgtggttcaccgccaacctggacatcgtggccacctacatccaggagcccaatgaagactgcctgtacctgaatgtgtatgtgcccacagaagatgacatccgggacagcggggccaagcctgtgatggtgtacatccatggaggcagctacatggagggcactggaaacatgattgatggcagcatcctggccagctatggaaatgtgattgtcatcaccctgaactacagagtgggcgtgctgggcttcctgagcactggagaccaggccgccaagggcaactacggcctgctggaccagatccaggccctgcgctgggtgtctgagaacatcgccttctttggaggagacccccggcgcatcaccgtgtttggaagtggcattggagccagctgtgtgtccctgctgaccctgagccaccacagcgagggcctcttccagagggccatcatccagagcggcagcgccctgagctcctgggccgtgaactaccagcctgtgaagtacaccagcctgctggccgacaaggtgggctgcaatgtgctggacacagtggacatggtggactgcctgcggcagaagagcgccaaggagctggtggagcaggacatccagcctgcccgctaccacgtggccttcggccctgtgattgatggagatgtgatcccagatgatcctgagatcctgatggagcagggcgagttcctgaactatgacatcatgctgggcgtgaaccagggcgagggcctgaagtttgtggagggcgtggtggaccctgaagatggagtgtctggaacagactttgactacagcgtgagcaactttgtggacaacctgtatggctacccagagggcaaggacaccctgcgggagaccatcaagttcatgtacacagactgggccgaccgggacaaccctgagaccaggaggaagaccctggtggccctcttcacagaccaccagtgggtggagcccagcgtggtgacagctgacctgcacgcccgctatggcagccccacctacttctacgccttctaccaccactgccagagcctgatgaagccagcctggagcgatgctgcccatggagatgaggtgccctacgtgtttggagtgcccatggtgggccccacagacctcttcccctgcaacttcagcaagaatgatgtgatgctgtag

SEQ ID NO: 65096 - DNA, 2427 bp, Artificial Sequence
  derived and/or modified sequence
atgtggctgcggctgggcccccccagcctgagcctgagccccaagcccaccgtgggccgcagcctgtgcctgaccctgtggttcctgagcctggccctgcgggccagcacccaggccccagcccccaccgtgaacacccactttgggaagctgcggggggcccgggtgcccctgcccagcgagatcctgggccctgtggaccagtacctgggcgtgccctatgctgccccacccatcggggagaagcgcttcctgcccccagagcccccacccagctggagcggcatcagaaatgccacccacttcccccctgtgtgcccccagaacatccacacagctgtgcctgaggtgatgctgcctgtgtggttcaccgccaacctggacatcgtggccacctacatccaggagcccaatgaagactgcctgtacctgaatgtgtatgtgcccacagaagatgacatccgggacagcggggccaagcctgtgatggtgtacatccatggaggcagctacatggagggcactggaaacatgattgatggcagcatcctggccagctatggaaatgtgattgtcatcaccctgaactacagagtgggcgtgctgggcttcctgagcactggagaccaggccgccaagggcaactacggcctgctggaccagatccaggccctgcgctgggtgtctgagaacatcgccttctttggaggagacccccggcgcatcaccgtgtttggaagtggcattggagccagctgtgtgtccctgctgaccctgagccaccacagcgagggcctcttccagagggccatcatccagagcggcagcgccctgagctcctgggccgtgaactaccagcctgtgaagtacaccagcctgctggccgacaaggtgggctgcaatgtgctggacacagtggacatggtggactgcctgcggcagaagagcgccaaggagctggtggagcaggacatccagcctgcccgctaccacgtggccttcggccctgtgattgatggagatgtgatcccagatgatcctgagatcctgatggagcagggcgagttcctgaactatgacatcatgctgggcgtgaaccagggcgagggcctgaagtttgtggagggcgtggtggaccctgaagatggagtgtctggaacagactttgactacagcgtgagcaactttgtggacaacctgtatggctacccagagggcaaggacaccctgcgggagaccatcaagttcatgtacacagactgggccgaccgggacaaccctgagaccaggaggaagaccctggtggccctcttcacagaccaccagtgggtggagcccagcgtggtgacagctgacctgcacgcccgctatggcagccccacctacttctacgccttctaccaccactgccagagcctgatgaagccagcctggagcgatgctgcccatggagatgaggtgccctacgtgtttggagtgcccatggtgggccccacagacctcttcccctgcaacttcagcaagaatgatgtgatgctgtctgctgtggtgatgacctactggaccaactttgccaagacaggagaccccaacaagcctgtgccccaggacaccaagttcatccacaccaaggccaacagatttgaggaggtggcctggagcaagtacaacccccgggaccagctgtacctgcacatcggcctgaagccccgggtgcgggaccactaccgggccaccaaggtggccttctggaagcacctggtgccccacctgtacaacctgcatgacatgttccactacaccagcaccaccaccaaggtgcccccaccagacaccacccacagcagccacatcacccggcggcccaacgggaagacctggagcaccaagaggcctgccatcagccctgcctacagcaatgaaaatgcccagggctcctggaatggagaccaggatgctggccccctgctggtggagaacccccgggactacagcacagagctgtctgtgaccatcgctgtgggcgccagcctgctcttcctgaatgtgctggcctttgctgccctgtactacaggaaggacaagaggcggcaggagcccctgcggcagcccagcccccagagaggagctggggcccctgagctgggcgccgcccctgaggaggagctggccgccctgcagctgggccccacccaccatgaatgtgaggccggcccccctcatgacaccctgcggctgacagccctgcctgactacaccctgaccctgcggcgcagcccagatgacatccccctgatgacccccaacaccatcaccatgatccccaacagcctggtgggcctgcagaccctgcacccctacaacacctttgctgctggcttcaacagcacaggcctgccccacagccacagcaccaccagggtgtag

SEQ ID NO: 65097 - DNA, 1542 bp, Artificial Sequence
  derived and/or modified sequence
atgtggctgcggctgggcccccccagcctgagcctgagccccaagcccaccgtcggtcgaagtctgtgcttaacgttgtggttcctgagtctggcgcttagagcaagcacccaggcccccgccccaaccgtgaacacccactttgggaaactgaggggagccagagtccccctgcctagcgaaatattgggtccagtggaccagtatctcggagtaccctatgcggccccgcccatcggggaaaagcgctttctgcccccagaacctcctccaagctggagtgggattagaaacgccactcactttccccccgtctgcccacagaatatccacacagccgtgcccgaagttatgctacccgtttggtttactgccaacctggatatcgtagcgacatatatccaggaacccaacgaagactgcctttacctcaatgtgtacgtcccaaccgaagatgacataagggactctggggccaaaccggtgatggtctacatccacggtgggagctacatggagggaacaggaaatatgatagatggaagtatccttgcaagttacggtaatgtgatcgtgataacccttaactacagagtgggagtgttaggatttctgagtacaggggatcaagccgcaaaaggaaactacgggctgctggatcagattcaggccttgagatgggtgtcagaaaatattgcgttcttcggcggcgatcctaggagaataacagtttttggctctggcataggggcatcctgtgtcagtttacttactctgtctcatcactccgagggcctgttccaacgtgcaatcattcagtccggcagcgctcttagttcatgggcagtgaattaccagcctgtcaaatacacatccctgctggcggataaagtgggctgcaatgtgttggacaccgtggatatggtggactgtctccggcagaaaagcgctaaggagctcgtcgaacaggatattcagccagcccgttaccacgtggctttcggaccagtgatcgatggtgacgtcataccagatgatcccgagatcctgatggaacagggcgagtttttaaactatgacattatgctgggcgtgaaccagggtgaagggctgaaattcgtcgagggcgtcgtggatcccgaggatggcgtaagcggcacggactttgactattctgttagtaactttgtggataatctgtatggctatcccgaaggtaaggacacattacgggagacaatcaagtttatgtataccgattgggccgatagggataatcctgaaacccgcaggaaaaccctcgtcgccctgttcacagatcatcagtgggtggagccgagcgtagtaaccgccgacctgcacgcccgatatggcagtcctacctatttctatgcattttatcatcattgtcaaagcctcatgaagccagcttggagcgatgcagcacatggcgacgaagtgccttacgtcttcggagtgcccatggttggacctaccgatcttttcccgtgtaattttagcaagaacgatgtgatgctgtag

SEQ ID NO: 65098 - DNA, 2427 bp, Artificial Sequence
  derived and/or modified sequence
atgtggctgcggctgggcccccccagcctgagcctgagccccaagccaaccgttgggcgaagcttgtgtctcactctgtggttcctaagcctagcccttcgtgccagcacgcaggctcctgcacccacagtcaacacacattttggcaagctgcggggggctagagtccctcttccttcagagatactcggacccgtggaccagtatctaggggtgccatacgctgccccgcctatcggggaaaagagattcctccctcccgagccccctccgagttggagcggcatccgaaatgctacgcatttcccacccgtgtgtcctcagaatattcataccgcagtccctgaggtgatgctcccggtgtggttcacagctaacttggacatcgtcgccacctacattcaggaaccaaacgaagactgtctttacctgaatgtctacgttccaactgaagatgacatacgggattccggagcgaaacccgtcatggtgtatatccacggcgggtcatatatggaggggaccggcaacatgatcgacggcagcatcctcgcctcttatggcaacgtaatcgtgatcactctaaactacagagtcggcgtgttgggcttcctgtccactggggatcaggctgcaaaggggaattatgggctgctggatcagatccaggccctaaggtgggtttctgagaacatcgcctttttcggcggagacccccggcgaatcaccgtgtttgggtccggaatcggtgcctcatgcgtgtctttactgaccctgagtcaccactccgagggactctttcagcgcgctattatccaaagtggcagcgcattgtctagctgggctgtcaattaccagcctgtcaaatacacctccctgttggctgacaaggtgggctgcaatgtcctggacaccgtcgacatggttgactgtttaaggcagaagagtgctaaagagcttgtcgagcaggacatccagccagcccggtaccacgtggccttcggccccgttatcgatggcgacgtcattccagatgatccggaaatcctcatggaacagggggaattcttaaactatgatattatgctgggtgtgaaccagggcgaagggctcaagttcgtggagggagtcgtggaccccgaggatggagtttctggcacagactttgattatagtgtctccaatttcgttgataacctgtacggttaccctgagggcaaggacactttgagagaaacaataaagtttatgtataccgactgggcagaccgcgacaaccccgaaacacggcgaaagaccttagtcgcattgtttacggaccatcagtgggtcgaaccatccgtagtgaccgctgatctgcacgccaggtacggcagccccacttacttctacgccttctatcatcactgtcaatctctgatgaagcctgcctggtccgatgcagcccacggagatgaggtgccgtatgtcttcggtgtcccaatggtcggacccacggacttgtttccctgtaatttttccaaaaatgacgtaatgttgagtgcagtggtaatgacatactggactaatttcgccaagacaggcgaccccaacaaacccgtacctcaggatactaaattcatccatactaaggctaatcggttcgaggaggtagcgtggtccaaatataaccccagagaccagctctatctgcacatcgggctcaaaccccgggtccgggatcactatcgagccaccaaggtggcgttctggaagcacctagttcctcatctttacaacttacatgacatgttccattacacctccacaacaacaaaagtcccacccccggacactacacactcatctcacataactcggcgtcctaacgggaaaacatggtcgactaagcgcccagccatctccccagcatatagtaatgaaaatgctcagggttcatggaacggggaccaggacgccggacctctgcttgtcgaaaaccccagggattattccacggagctaagcgtcaccatcgccgttggtgcctctttgctcttccttaacgtccttgctttcgccgccctctactaccggaaagacaagagaaggcaagaaccccttagacagccttctccgcagaggggagccggcgcgcccgagctgggcgccgctcccgaggaggagttagctgcacttcagcttgggcctacgcatcacgaatgtgaagcaggcccaccccacgacaccctacgcctcactgcgctgcctgattatactctcacccttagacgcagccccgacgatattccacttatgacaccaaatacgattaccatgatccccaattcattggtgggtttacagacgctccacccctataacacatttgctgcggggtttaacagcaccgggttacctcactcccactcgacgacacgagtgtag

SEQ ID NO: 65099 - DNA, 1862 bp, Artificial Sequence
  derived and/or modified sequence
gggcacagcagccaggctgccggagagctgatctcggggattcgggtgcggagcccttggcctggaggcgatatgggtggtccgtggcccggttcagtcgcttgcagcagcccggggaacaggcctgtctggccctgagggagtcccctttctgaagctgtggtgcttggacgacctgctctctacattgctgggcacctgtaggtgtccctcgagagctcagttttgaggttcaagtcagtgtggccatgaaggggctgcctattgggctgatgctgtgaccctggagtctgcctctcctgccagtccccctgcccggaacatgtggctgcggcttggcccgccctcgctgtccctgagccccaagcccacggttggcaggagcctgtgcctcaccctgtggttcctcagtttggcgctgagggccagtacccaggccccagcacccacagtcaacactcactttgggaagctaaggggtgcccgagtaccactgcccagtgagatcctggggcctgtggaccaatacctgggggtgccctacgcagctcccccgatcggcgagaaacgtttcctgccccctgaaccacccccatcctggtcgggcatccggaacgccacacactttcccccagtgtgcccccagaacatccacacagctgtgcccgaagtcatgctgccggtctggttcactgccaacttggatatcgtcgctacttacatccaggagcccaacgaagactgtctctacctgaacgtctatgtgccgacggaggatgacatccgggacagtggtgctaaacccgtcatggtctacatccacggaggctcttacatggaagggacaggcaacatgattgatggcagcatcctcgccagttatggcaatgtcatcgtcatcaccctcaactatcgggttggagtgctaggtttcctgagtactggagatcaggctgccaagggcaactatgggctccttgaccagatccaggccctccgctgggtgagcgagaatattgccttcttcgggggagacccccgccggatcactgtctttggctcgggcattggtgcatcctgcgtcagcctcctcacgttgtcacatcactcagagggacttttccagagagccatcatccaaagtggctctgctctgtccagctgggctgtgaactaccaaccagtgaagtacaccagcctgctggcagacaaagtgggctgtaatgtgctggacaccgtggatatggtggactgtcttcggcaaaagagtgccaaggagctggtagagcaggacatccagccagcccgctaccacgtggcctttggccctgtgattgatggtgatgtcattcctgatgaccctgagatcctcatggagcagggcgagttcctcaactatgacatcatgctaggtgtcaaccagggcgagggtctcaagtttgtggaaggggtggtggaccctgaggatggtgtctctggcactgactttgactattccgtctccaattttgtggacaatctgtatggctatcctgagggtaaggacaccctgcgagagaccatcaagttcatgtatacagactgggcagaccgtgacaaccctgagacccgccgtaaaacactggtggcactcttcactgaccaccagtgggtggagccctcagtggtgacagccgatctgcatgcccgctacggctcgcctacctacttctacgccttctatcatcactgccagagcctcatgaagcctgcttggtcagatgcagctcatggggatgaagtaccctatgtttttggggttcctatggtaggccccactgaccttttcccctgcaacttctccaagaatgatgttatgctca

SEQ ID NO: 65100 - DNA, 3863 bp, Artificial Sequence
  derived and/or modified sequence
ccctcggtgcgcgggcacagcagccaggctgccggagagctgatctcggggattcgggtgcggagcccttggcctggaggcgatatgggtggtccgtggcccggttcagtcgcttgcagcagcccggggaacaggcctgtctggccctgagggagtcccctttctgaagctgtggtgcttggacgacctgctctctacattgctgggcacctgtaggtgtccctcgagagctcagttttgaggttcaagtcagtgtggccatgaaggggctgcctattgggctgatgctgtgaccctggagtctgcctctcctgccagtccccctgcccggaacatgtggctgcggcttggcccgccctcgctgtccctgagccccaagcccacggttggcaggagcctgtgcctcaccctgtggttcctcagtttggcgctgagggccagtacccaggccccagcacccacagtcaacactcactttgggaagctaaggggtgcccgagtaccactgcccagtgagatcctggggcctgtggaccaatacctgggggtgccctacgcagctcccccgatcggcgagaaacgtttcctgccccctgaaccacccccatcctggtcgggcatccggaacgccacacactttcccccagtgtgcccccagaacatccacacagctgtgcccgaagtcatgctgccggtctggttcactgccaacttggatatcgtcgctacttacatccaggagcccaacgaagactgtctctacctgaacgtctatgtgccgacggaggatgacatccgggacagtggtgctaaacccgtcatggtctacatccacggaggctcttacatggaagggacaggcaacatgattgatggcagcatcctcgccagttatggcaatgtcatcgtcatcaccctcaactatcgggttggagtgctaggtttcctgagtactggagatcaggctgccaagggcaactatgggctccttgaccagatccaggccctccgctgggtgagcgagaatattgccttcttcgggggagacccccgccggatcactgtctttggctcgggcattggtgcatcctgcgtcagcctcctcacgttgtcacatcactcagagggacttttccagagagccatcatccaaagtggctctgctctgtccagctgggctgtgaactaccaaccagtgaagtacaccagcctgctggcagacaaagtgggctgtaatgtgctggacaccgtggatatggtggactgtcttcggcaaaagagtgccaaggagctggtagagcaggacatccagccagcccgctaccacgtggcctttggccctgtgattgatggtgatgtcattcctgatgaccctgagatcctcatggagcagggcgagttcctcaactatgacatcatgctaggtgtcaaccagggcgagggtctcaagtttgtggaaggggtggtggaccctgaggatggtgtctctggcactgactttgactattccgtctccaattttgtggacaatctgtatggctatcctgagggtaaggacaccctgcgagagaccatcaagttcatgtatacagactgggcagaccgtgacaaccctgagacccgccgtaaaacactggtggcactcttcactgaccaccagtgggtggagccctcagtggtgacagccgatctgcatgcccgctacggctcgcctacctacttctacgccttctatcatcactgccagagcctcatgaagcctgcttggtcagatgcagctcatggggatgaagtaccctatgtttttggggttcctatggtaggccccactgaccttttcccctgcaacttctccaagaatgatgttatgctcagtgctgtcgtcatgacctattggaccaactttgccaagactggggatcccaacaagccggtcccccaggacaccaagttcattcacaccaaggccaaccgctttgaggaagtggcctggtccaaatacaatccccgagaccagctctaccttcacatcgggctgaaaccaagggtccgagatcattaccgggccactaaggtggccttttggaaacatctggtgccccacctatacaacctgcatgacatgttccactatacgtccaccaccaccaaagtgccgcctccggataccacccacagctcccacatcacccgcaggcccaatggcaagacctggagcaccaagcggccagccatctcacctgcctacagcaacgagaatgcccaggggtcctggaacggggaccaggatgcagggccactcctggtggagaaccctcgtgactactccactgaattaagtgtcaccatcgccgtgggggcctccctcctgttccttaacgttctggccttcgctgccctctactaccgtaaggacaaacggcgccaggagcccctgcggcagcctagccctcagcggggagccggggccccggagttgggagctgctccagaggaggagctggcagcattacaactgggccccacccaccacgagtgtgaggccggtcccccccatgacacgctgcgcctcactgcattgcccgactacaccctgaccctgcggcgctccccggatgacatcccactcatgacccccaacaccatcactatgatccccaactccctggtagggctgcagacattgcacccctataacacctttgccgcagggttcaacagtaccgggctgccccactcacactccactacccgggtatagctccaactcagagcacagccaatctccaggctccctccctcccagatccaggaacacatgcacacacacacacacacacacgcagacacacacacacacacacatatatgtatacgcacgcacccacaccctacagcagatccacctgcacaaacatagacagatgtggacatgcacccgcatgtacaaaaacacaaatacggaagtaaacctgaacaaaccctttaaatggggacgcagatgagtcctcggtaaaccgaggacccatgaaacagcagctgaagccagctccctgaatctgaccacagacactcctggggggcctgaaagcaacagctggacacccccttggtgctcgccttcggcctctcttggaactgcaccaccgaccaactccagacttgggagctttaaagagcaggatagctcttcctccccaggacttggtcttttttctgggtcttgttttgttgatttttcttttttaattttggaacaaatgcttttccaacccatgagtgctaagagcctctggaagggagggcttcaggcccgaaggtctctctggctctaggacccccagtgctcacacaatcagaccaaggaacaagacccccaggaaggaaacagatttaagcaagaccatggggtggaaggagaaaggggctagcactggatggagctggagggtcgtaggggagagatctccaactctctctgtgtccgtgtggagggctgcagagcctgcagggtgacctgcttccccaaaggccaacagcattggcctggccagaccaggtgaccttagatttggtgaacaacgtactatggaagccacatcactattgggcccccaggtctgatctgggttttgcctctgcccttggggaaatgctatcagaaattcgccccattttctttacagtcttttgtgtctgtcatttctctttcaaaaaggcggtgttttttgttgttgttggtttttttttttttttaaagaaaagttcttaaaacactaacggaaacccatggagtttgtcctttgtaaaaattttaaacacagtgtcttgatataaaaataaaaaatccagttagcactccc

SEQ ID NO: 65101 - DNA, 1542 bp, Artificial Sequence
  derived and/or modified sequence
atgtggctgcggctgggacctccttctctaagccttagcccaaagccaactgtaggacgatcactctgccttaccttgtggttcttgtcactcgccctgagagccagcacccaggctcctgcgccaaccgtgaatacgcacttcggtaagctgaggggcgctagggttcctctgccgagtgaaatcctcgggcctgtggatcagtatctgggggtcccttatgcagccccacccattggagaaaaacgtttcctgcctccagagccccctcccagctggtcgggaatcagaaatgctacccattttccccctgtgtgtcctcagaacatccacacggcagtccctgaggttatgttgcccgtgtggtttactgccaacctggatatcgtggccacatatattcaggagcctaatgaggactgtctgtatcttaacgtttacgtccccaccgaggatgacatacgcgatagtggggctaaacccgtcatggtgtacattcatggaggctcctacatggaaggtacgggaaatatgatagatggatcgattcttgcgtcttatggcaatgtcatcgttataacactgaattaccgggttggggtgctcgggttcttgagcacaggggaccaagctgccaaaggtaactatggcctcctagaccagatccaggccctgcgttgggtttccgagaatatcgcttttttcggcggagaccctcgcagaattactgtttttgggagtggaatcggagcctcatgtgtatccctgctgactttgtcccaccatagcgaagggttgttccagcgggctatcatccagtccggttcggccctctcttcttgggctgtgaattatcagcctgtcaagtacacttctttgctggctgacaaagtagggtgcaatgtgctcgataccgtggatatggtggactgcctccgccagaaatccgccaaggagcttgtggaacaagacatacaacctgccagatatcacgtggcctttggacccgtaattgatggggacgttatcccagacgacccagaaatcctgatggagcagggtgaattcctcaactacgatatcatgctcggggtgaatcaaggagagggcttgaaattcgtcgagggcgtcgtggacccagaagacggagtgtcaggaactgacttcgattacagtgtgagtaacttcgttgacaacctttatgggtatccggaaggaaaggatacgctgcgcgaaaccatcaaatttatgtatactgattgggcagatcgcgacaaccctgaaaccagacggaaaacccttgtggcattattcacagaccaccagtgggttgagcccagcgttgttaccgccgacttacacgctagatacgggtctcctacctatttctatgccttttaccaccactgccagtcactgatgaaacctgcctggagtgatgcagcccatggggatgaagtgccttacgttttcggggtgcccatggtggggccaacggatctgtttccctgtaacttctcaaaaaatgacgtcatgttgtag

SEQ ID NO: 65102 - DNA, 2427 bp, Artificial Sequence
  derived and/or modified sequence
atgtggctgaggcttgggccaccaagtcttagcctgagcccaaaacctacagttgggagatccttgtgcctaacactctggttcttatccctcgccctccgcgcatccacccaggcgccagctccaactgttaatacccattttggtaaactaaggggcgcaagggttcccctgcccagcgaaatactgggacctgtggaccagtatctaggagttccttacgcagccccacccatcggcgaaaagcgatttcttccacccgagcctccaccttcctggtctggtatccgtaatgcgacccactttccaccagtatgcccccagaacatccacacggcagtccctgaggttatgctgcctgtgtggtttacagccaacctcgatatagtggcgacctatattcaggagcctaatgaggattgcttgtacctgaatgtttatgtcccgactgaggatgatatacgagacagtggggctaagcctgtcatggtctatattcacggcggttcatatatggaggggaccggtaacatgatagatggctcgattctcgcaagttacggcaatgtgatcgtcatcactttgaactaccgtgtgggcgtgctaggctttttgtctaccggggatcaggcagcgaaggggaattatgggcttctggaccagatccaggctctgaggtgggttagtgagaatatcgcttttttcggcggtgacccacggaggatcactgttttcgggagcggaattggggcttcctgtgttagcctgttaacactgtctcaccactccgaaggcctattccagagagccatcattcagagtgggagcgctctgagtagctgggcggtcaactaccagccggtgaagtacacttccctgctagctgataaggtgggatgtaatgtgttagataccgtggatatggtcgactgcctcagacagaagtccgcgaaggaacttgtggaacaggatatccagccggctcgctatcacgtcgcgtttggtcctgtgatcgatggggatgtgattcctgatgaccctgaaatcctgatggagcagggggaatttctgaactatgatataatgctgggggtgaatcaaggagaagggctgaagtttgtggaaggggtggtcgaccccgaggatggcgtgtctggcaccgattttgactacagtgtgtctaacttcgtggataacttgtatggatatcctgaaggcaaggatactctgcgggagaccatcaaattcatgtatacagactgggccgatagggacaacccagaaaccagacgtaaaaccttggtcgcactgtttactgatcaccagtgggtagaaccatcagtggtgaccgcggacctccacgcgcgttatgggagccccacttacttttacgctttttatcaccactgccaaagcctgatgaaaccggcatggagcgatgccgctcacggtgatgaggttccctacgtattcggggtccctatggtaggtcccacggacctttttccatgtaacttcagtaagaacgacgtaatgctgtcggcagtggtgatgacttactggactaatttcgcgaagaccggagatcctaataagccggttcctcaggacacaaagttcatacatactaaggccaatcgtttcgaggaggtggcatggagcaagtacaacccgagagaccaactgtacttacatatcgggctgaagccgcgagtaagggaccactatagggcgactaaggtcgccttctggaaacacctagttccgcatctgtacaacttacacgatatgttccactacacgtctactacaaccaaagttccccctcccgacacaacccattcttctcatattactagacgcccaaacggaaagacttggtccacaaagcgccctgccatcagtcccgcatactccaacgagaatgctcaaggcagttggaatggtgatcaggatgcagggccactgctggtggagaacccccgtgactattccactgagctgtcagtgaccatcgccgttggagcatctttgctgtttctgaatgtgttggcttttgcagctctgtattataggaaagacaaaagacggcaggaaccgttacggcagcctagcccccagagaggcgctggcgctcctgagcttggggcagcaccggaggaggagctggcggctttgcagttggggccaacccatcacgaatgcgaggcagggccaccgcacgacaccctaaggctgacagccttaccagactacacattgactctgcgtagatcccctgatgacatacctctgatgactccaaataccattactatgattcctaacagcttggtgggccttcagaccttacacccttataacacgtttgccgctggcttcaacagtacaggcctcccccactctcattcgacgaccagggtatag

SEQ ID NO: 65103 - DNA, 1542 bp, Artificial Sequence
  derived and/or modified sequence
atgtggctgagactgggcccccccagcctgagcctgagccccaagcccaccgtgggcagaagcctgtgcctgaccctgtggttcctgagcctggccctgagagccagcacccaggcccccgcccccaccgtgaacacccacttcggcaagctgagaggcgccagagtgcccctgcccagcgagatcctgggccccgtggaccagtacctgggcgtgccctacgccgccccccccatcggcgagaagagattcctgccccccgagcccccccccagctggagcggcatcagaaacgccacccacttcccccccgtgtgcccccagaacatccacaccgccgtgcccgaggtgatgctgcccgtgtggttcaccgccaacctggacatcgtggccacctacatccaggagcccaacgaggactgcctgtacctgaacgtgtacgtgcccaccgaggacgacatcagagacagcggcgccaagcccgtgatggtgtacatccacggcggcagctacatggagggcaccggcaacatgatcgacggcagcatcctggccagctacggcaacgtgatcgtgatcaccctgaactacagagtgggcgtgctgggcttcctgagcaccggcgaccaggccgccaagggcaactacggcctgctggaccagatccaggccctgagatgggtgagcgagaacatcgccttcttcggcggcgaccccagaagaatcaccgtgttcggcagcggcatcggcgccagctgcgtgagcctgctgaccctgagccaccacagcgagggcctgttccagagagccatcatccagagcggcagcgccctgagcagctgggccgtgaactaccagcccgtgaagtacaccagcctgctggccgacaaggtgggctgcaacgtgctggacaccgtggacatggtggactgcctgagacagaagagcgccaaggagctggtggagcaggacatccagcccgccagataccacgtggccttcggccccgtgatcgacggcgacgtgatccccgacgaccccgagatcctgatggagcagggcgagttcctgaactacgacatcatgctgggcgtgaaccagggcgagggcctgaagttcgtggagggcgtggtggaccccgaggacggcgtgagcggcaccgacttcgactacagcgtgagcaacttcgtggacaacctgtacggctaccccgagggcaaggacaccctgagagagaccatcaagttcatgtacaccgactgggccgacagagacaaccccgagaccagaagaaagaccctggtggccctgttcaccgaccaccagtgggtggagcccagcgtggtgaccgccgacctgcacgccagatacggcagccccacctacttctacgccttctaccaccactgccagagcctgatgaagcccgcctggagcgacgccgcccacggcgacgaggtgccctacgtgttcggcgtgcccatggtgggccccaccgacctgttcccctgcaacttcagcaagaacgacgtgatgctgtag

SEQ ID NO: 65104 - DNA, 2427 bp, Artificial Sequence
  derived and/or modified sequence
atgtggctgagactgggcccccccagcctgagcctgagccccaagcccaccgtgggcagaagcctgtgcctgaccctgtggttcctgagcctggccctgagagccagcacccaggcccccgcccccaccgtgaacacccacttcggcaagctgagaggcgccagagtgcccctgcccagcgagatcctgggccccgtggaccagtacctgggcgtgccctacgccgccccccccatcggcgagaagagattcctgccccccgagcccccccccagctggagcggcatcagaaacgccacccacttcccccccgtgtgcccccagaacatccacaccgccgtgcccgaggtgatgctgcccgtgtggttcaccgccaacctggacatcgtggccacctacatccaggagcccaacgaggactgcctgtacctgaacgtgtacgtgcccaccgaggacgacatcagagacagcggcgccaagcccgtgatggtgtacatccacggcggcagctacatggagggcaccggcaacatgatcgacggcagcatcctggccagctacggcaacgtgatcgtgatcaccctgaactacagagtgggcgtgctgggcttcctgagcaccggcgaccaggccgccaagggcaactacggcctgctggaccagatccaggccctgagatgggtgagcgagaacatcgccttcttcggcggcgaccccagaagaatcaccgtgttcggcagcggcatcggcgccagctgcgtgagcctgctgaccctgagccaccacagcgagggcctgttccagagagccatcatccagagcggcagcgccctgagcagctgggccgtgaactaccagcccgtgaagtacaccagcctgctggccgacaaggtgggctgcaacgtgctggacaccgtggacatggtggactgcctgagacagaagagcgccaaggagctggtggagcaggacatccagcccgccagataccacgtggccttcggccccgtgatcgacggcgacgtgatccccgacgaccccgagatcctgatggagcagggcgagttcctgaactacgacatcatgctgggcgtgaaccagggcgagggcctgaagttcgtggagggcgtggtggaccccgaggacggcgtgagcggcaccgacttcgactacagcgtgagcaacttcgtggacaacctgtacggctaccccgagggcaaggacaccctgagagagaccatcaagttcatgtacaccgactgggccgacagagacaaccccgagaccagaagaaagaccctggtggccctgttcaccgaccaccagtgggtggagcccagcgtggtgaccgccgacctgcacgccagatacggcagccccacctacttctacgccttctaccaccactgccagagcctgatgaagcccgcctggagcgacgccgcccacggcgacgaggtgccctacgtgttcggcgtgcccatggtgggccccaccgacctgttcccctgcaacttcagcaagaacgacgtgatgctgagcgccgtggtgatgacctactggaccaacttcgccaagaccggcgaccccaacaagcccgtgccccaggacaccaagttcatccacaccaaggccaacagattcgaggaggtggcctggagcaagtacaaccccagagaccagctgtacctgcacatcggcctgaagcccagagtgagagaccactacagagccaccaaggtggccttctggaagcacctggtgccccacctgtacaacctgcacgacatgttccactacaccagcaccaccaccaaggtgcccccccccgacaccacccacagcagccacatcaccagaagacccaacggcaagacctggagcaccaagagacccgccatcagccccgcctacagcaacgagaacgcccagggcagctggaacggcgaccaggacgccggccccctgctggtggagaaccccagagactacagcaccgagctgagcgtgaccatcgccgtgggcgccagcctgctgttcctgaacgtgctggccttcgccgccctgtactacagaaaggacaagagaagacaggagcccctgagacagcccagcccccagagaggcgccggcgcccccgagctgggcgccgcccccgaggaggagctggccgccctgcagctgggccccacccaccacgagtgcgaggccggccccccccacgacaccctgagactgaccgccctgcccgactacaccctgaccctgagaagaagccccgacgacatccccctgatgacccccaacaccatcaccatgatccccaacagcctggtgggcctgcagaccctgcacccctacaacaccttcgccgccggcttcaacagcaccggcctgccccacagccacagcaccaccagagtgtag

SEQ ID NO: 65105 - protein, 370 aa, Artificial Sequence
  derived and/or modified sequence
MLGQVVTLILLLLLKVYQGKGCQGSADHVVSISGVPLQLQPNSIQTKVDSIAWKKLLPSQNGFHHILKWENGSLPSNTSNDRFSFIVKNLSLLIKAAQQQDSGLYCLEVTSISGKVQTATFQVFVFESLLPDKVEKPRLQGQGKILDRGRCQVALSCLVSRDGNVSYAWYRGSKLIQTAGNLTYLDEEVDINGTHTYTCNVSNPVSWESHTLNLTQDCQNAHQEFRFWPFLVIIVILSALFLGTLACFCVWRRKRKEKQSETSPKEFLTIYEDVKDLKTRRNHEQEQTFPGGGSTIYSMIQSQSSAPTSQEPAYTLYSLIQPSRKSGSRKRNHSPSFNSTIYEVIGKSQPKAQNPARLSRKELENFDVYS

SEQ ID NO: 65106 - DNA, 1113 bp, Artificial Sequence
  derived and/or modified sequence
atgctcggtcaggtggtgactcttattcttctcctcctgttaaaggtctatcaaggcaaagggtgccagggctcggcggatcatgtggtctcaataagcggagtcccattacagctgcaaccaaactccatccagaccaaggtggattccatcgcttggaaaaaactgctaccttcccaaaatgggtttcaccacattctcaagtgggaaaatggctccctccctagtaacacctcaaatgatagattcagcttcattgtcaaaaacctatctctgctcattaaggccgcccagcagcaggatagtgggctgtattgcctggaggtcacgtccatctctggcaaagtgcagaccgcaacattccaggtcttcgtgtttgagtccttgctaccggataaggtggagaagcctcgtcttcaggggcaggggaaaattttagaccgaggacgctgtcaggtcgctctcagctgcttggtctcgcgcgacggtaacgtgagctacgcttggtacagagggagcaaattgattcagactgctggcaatttgacttacctcgacgaagaggtcgatattaacggcacccacacatatacctgcaacgtctctaaccctgtgtcgtgggagagtcatacattgaatctaacgcaggattgccaaaacgctcatcaagagttcagattttggccttttctggtgatcatcgtgattctgtccgctctgttcctggggaccctggcctgtttctgcgtgtggcggcggaagcggaaagaaaagcaatcagaaacctcgccaaaggagttcctgacaatctacgaggatgtgaaagaccttaagaccaggcggaaccatgagcaggaacaaaccttccctggtggcggtagcaccatttattcaatgatccagtctcaaagttccgctccaacctcacaggagccagcttacacattatactcgctcattcagccaagccgcaagagcggcagtcggaaacggaaccattctcccagcttcaactccaccatttacgaggtgattggtaagagccagccgaaggcccagaaccctgcgcggctatctcggaaggagcttgagaacttcgacgtctatagctag

SEQ ID NO: 65107 - DNA, 1113 bp, Artificial Sequence
  derived and/or modified sequence
atgctgggccaggtggtgaccctcatcctgctgctgctgctgaaggtgtaccagggcaagggctgccagggcagcgctgaccacgtggtgtccatctctggagtgcccctgcagctgcagcccaacagcatccagaccaaggtggacagcatcgcctggaagaagctgctgcccagccagaatggcttccaccacatcctgaagtgggagaatggcagcctgcccagcaacaccagcaatgaccgcttctccttcatcgtgaagaacctgagcctgctgatcaaggccgcccagcagcaggacagcggcctgtactgcctggaggtgaccagcatcagcggcaaggtgcagacagccaccttccaggtgtttgtgtttgagagcctgctgcctgacaaggtggagaagccccggctgcagggccagggcaagatcctggaccggggccgctgccaggtggccctgagctgcctggtgtccagagatggaaatgtgtcctatgcctggtaccggggcagcaagctgatccagacagctggcaacctgacctacctggatgaggaggtggacatcaatggcacccacacctacacctgcaatgtgagcaaccctgtgtcctgggagagccacaccctgaacctgacccaggactgccagaatgcccaccaggagttccgcttctggcccttcctggtgatcatcgtcatcctgagcgccctcttcctgggcaccctggcctgcttctgtgtgtggaggaggaagaggaaggagaagcagagcgagaccagccccaaggagttcctgaccatctatgaagatgtgaaggacctgaagaccaggagaaatcatgagcaggagcagaccttccctgggggcggcagcaccatctacagcatgatccagagccagagcagcgcccccaccagccaggagcccgcctacaccctgtacagcctcatccagcccagcaggaagagcggcagcaggaagaggaaccacagccccagcttcaacagcaccatctatgaggtgattggcaagagccagcccaaggcccagaacccagcccggctgagcaggaaggagctggagaactttgatgtgtacagctag

SEQ ID NO: 65108 - DNA, 1113 bp, Artificial Sequence
  derived and/or modified sequence
atgctgggccaggtggtgaccctgatcctgctgctgctgctgaaggtgtatcaaggaaagggttgtcagggatccgcggatcacgtggtaagtatcagtggtgtgcccttacagctgcagcctaactcaattcagacaaaagtcgattcgattgcatggaaaaagctcttgccaagccagaatggttttcaccacatactgaagtgggagaacggaagtctgccatctaacacctcaaacgacagattcagtttcattgttaaaaaccttagcttgctcattaaagcagctcagcaacaggattccggtctgtactgcctagaggtgacctccatcagcgggaaggtccagacagccacattccaggtttttgtgtttgaatcccttctgcccgacaaggtggaaaagccccgactccaaggccagggcaaaatactggaccgagggcgttgccaggttgccctgtcatgtcttgtgagcagagacggcaatgtgagctacgcctggtatagaggctctaagttgatccagactgccggaaacttgacctatttggacgaggaagtagatattaatgggacacatacctacacgtgcaatgtgagcaaccccgtcagttgggagagtcacaccctgaacttgacacaggactgtcagaacgcccaccaggagtttagattctggccttttctcgtgatcatcgtgatactgtctgcattattcctaggcactctcgcctgtttttgtgtatggcgacgaaaacgaaaggagaaacagtcagagacatcaccaaaagagttcttgactatctatgaggacgtgaaggacctcaagacccggcgcaatcatgagcaagagcagacttttcccgggggaggaagtactatttacagcatgatacagagtcaaagttccgccccaacctcccaggagccggcatacacattgtactcactcattcagccaagtcgcaagtccggatcccgcaagcggaatcacagcccgtctttcaacagcaccatatatgaagtaatcggcaaatcccagccaaaagcacagaatccagcccggctgagccggaaagagctggagaacttcgatgtgtactcctag

SEQ ID NO: 65109 - DNA, 1113 bp, Artificial Sequence
  derived and/or modified sequence
atgctagggcaggtggtgaccctaatcctgctcctcttgctgaaggtttatcaaggcaagggatgtcagggcagcgcagatcatgtggtctcaatttccggcgtgcctctgcagctgcagccaaacagtatccaaacaaaagttgactctattgcgtggaagaagctcctgccctcccagaatggcttccatcacatacttaaatgggagaacggcagtttaccatccaacacttccaacgataggttcagcttcatcgtcaaaaacctgagtttgctgatcaaggcagcacagcagcaggactcaggactgtattgtctggaggttaccagcattagcgggaaagtgcagacggcaacctttcaggttttcgtattcgaaagtctccttcccgacaaagttgaaaaacctaggttgcagggtcagggcaagatcctggatcgcggacgctgtcaggtagcgctgtcttgcctggtctccagagatggaaatgtcagttatgcctggtatagagggtccaaactgatccagaccgccggaaacttgacctaccttgacgaagaggtagatatcaacggtactcacacatacacttgcaacgtgagtaaccccgtctcctgggagagtcacactttgaatcttacccaggattgccaaaatgcccaccaggagttcagattttggcccttcctggtcatcatcgtgattttgagtgctcttttcctgggcactctggcttgcttctgcgtgtggaggagaaagaggaaggaaaagcagagtgagacgtcacctaaagagtttcttactatttatgaggacgtcaaggatctaaaaacgaggaggaaccacgagcaggaacagacgttccccggagggggatccaccatatacagcatgatacagtcacagtcgagtgctccgacttcacaggaacccgcttacacattatacagcctgatacagcccagcaggaaatcgggctccaggaaacgtaatcatagtccctcattcaactccacaatctacgaggtgatcggcaaatcccaacccaaagcccagaacccggctcggctgagccggaaggagctcgaaaattttgacgtttactcctag

SEQ ID NO: 65110 - DNA, 1360 bp, Artificial Sequence
  derived and/or modified sequence
gctgactggggactgctgagcccgtgcacggcagagagtctggtggggtggaggggctggcctggcccctctgtcctgtggaaatgctggggcaagtggtcaccctcatactcctcctgctcctcaaggtgtatcagggcaaaggatgccagggatcagctgaccatgtggttagcatctcgggagtgcctcttcagttacaaccaaacagcatacagacgaaggttgacagcattgcatggaagaagttgctgccctcacaaaatggatttcatcacatattgaagtgggagaatggctctttgccttccaatacttccaatgatagattcagttttatagtcaagaacttgagtcttctcatcaaggcagctcagcagcaggacagtggcctctactgcctggaggtcaccagtatatctggaaaagttcagacagccacgttccaggtttttgtatttgaatctctgcttccagataaagttgagaaaccccgcctacaggggcaggggaagatcctggacagagggagatgccaagtggctctgtcttgcttggtctccagggatggcaatgtgtcctatgcttggtacagagggagcaagctgatccagacagcagggaacctcacctacctggacgaggaggttgacattaatggcactcacacatatacctgcaatgtcagcaatcctgttagctgggaaagccacaccctgaatctcactcaggactgtcagaatgcccatcaggaattcagattttggccgtttttggtgatcatcgtgattctaagcgcactgttccttggcacccttgcctgcttctgtgtgtggaggagaaagaggaaggagaagcagtcagagaccagtcccaaggaatttttgacaatttacgaagatgtcaaggatctgaaaaccaggagaaatcacgagcaggagcagacttttcctggaggggggagcaccatctactctatgatccagtcccagtcttctgctcccacgtcacaagaacctgcatatacattatattcattaattcagccttccaggaagtctggatccaggaagaggaaccacagcccttccttcaatagcactatctatgaagtgattggaaagagtcaacctaaagcccagaaccctgctcgattgagccgcaaagagctggagaactttgatgtttattcctagttgctgcagcaattctcacctttcttgcacatcagcatctgctttgggaattggcacagtggatgacggcacaggagtctctatagaacagttcctagtctggagaggatatggaaatttgttcttgttctatattttgttttgaaaatgatgtctaacaacca

SEQ ID NO: 65111 - DNA, 1113 bp, Artificial Sequence
  derived and/or modified sequence
atgctgggccaggtggtgaccctgatcctgctgctgctgctgaaggtgtaccagggcaagggctgccagggcagcgccgaccacgtggtgagcatcagcggcgtgcccctgcagctgcagcccaacagcatccagaccaaggtggacagcatcgcctggaagaagctgctgcccagccagaacggcttccaccacatcctgaagtgggagaacggcagcctgcccagcaacaccagcaacgacagattcagcttcatcgtgaagaacctgagcctgctgatcaaggccgcccagcagcaggacagcggcctgtactgcctggaggtgaccagcatcagcggcaaggtgcagaccgccaccttccaggtgttcgtgttcgagagcctgctgcccgacaaggtggagaagcccagactgcagggccagggcaagatcctggacagaggcagatgccaggtggccctgagctgcctggtgagcagagacggcaacgtgagctacgcctggtacagaggcagcaagctgatccagaccgccggcaacctgacctacctggacgaggaggtggacatcaacggcacccacacctacacctgcaacgtgagcaaccccgtgagctgggagagccacaccctgaacctgacccaggactgccagaacgcccaccaggagttcagattctggcccttcctggtgatcatcgtgatcctgagcgccctgttcctgggcaccctggcctgcttctgcgtgtggagaagaaagagaaaggagaagcagagcgagaccagccccaaggagttcctgaccatctacgaggacgtgaaggacctgaagaccagaagaaaccacgagcaggagcagaccttccccggcggcggcagcaccatctacagcatgatccagagccagagcagcgcccccaccagccaggagcccgcctacaccctgtacagcctgatccagcccagcagaaagagcggcagcagaaagagaaaccacagccccagcttcaacagcaccatctacgaggtgatcggcaagagccagcccaaggcccagaaccccgccagactgagcagaaaggagctggagaacttcgacgtgtacagctag

SEQ ID NO: 65112 - protein, 273 aa, Artificial Sequence
  derived and/or modified sequence
MLGQVVTLILLLLLKVYQGKGCQGSADHVVSISGVPLQLQPNSIQTKVDSIAWKKLLPSQNGFHHILKWENGSLPSNTSNDRFSFIVKNLSLLIKAAQQQDSGLYCLEVTSISGKVQTATFQVFVFEFRFWPFLVIIVILSALFLGTLACFCVWRRKRKEKQSETSPKEFLTIYEDVKDLKTRRNHEQEQTFPGGGSTIYSMIQSQSSAPTSQEPAYTLYSLIQPSRKSGSRKRNHSPSFNSTIYEVIGKSQPKAQNPARLSRKELENFDVYS

SEQ ID NO: 65113 - DNA, 822 bp, Artificial Sequence
  derived and/or modified sequence
atgctggggcaggtggtaaccctgattctcctgcttctcttaaaagtgtatcagggaaaagggtgtcaaggttcagcggaccatgtggtctctatctctggagtgcctttgcaattgcaaccgaatagtattcaaaccaaagttgatagcatagcatggaaaaagctcctgccatctcagaacggatttcaccacatcctgaagtgggagaatgggtcactcccctccaatacatctaatgaccggtttagctttattgtgaaaaacctgtctttgctaatcaaggccgctcagcagcaggatagtggtctctattgtctggaggtgacgagtatatcgggcaaagtgcagactgccacctttcaagtgtttgtatttgaattccgtttttggccgttcctcgtgataattgtcattttgtcagctctgtttctcggaactcttgcctgcttttgtgtgtggcgccggaagagaaaggaaaagcagagcgaaacaagtccaaaggagtttcttactatttatgaggatgtgaaggacctgaagacacggcgaaaccacgaacaagagcagacatttccaggtggcggttctaccatctacagcatgatacagtctcaatcctctgctcccacttctcaggagccagcctacaccctatattctctgattcagccttccaggaagtccggcagccgcaagcggaatcactccccttcattcaactcaaccatttacgaggtgataggtaagtctcaacctaaagctcaaaatccggctcggctgagcaggaaggagcttgagaattttgatgtctatagctag

SEQ ID NO: 65114 - DNA, 822 bp, Artificial Sequence
  derived and/or modified sequence
atgctgggccaggtggtgaccctcatcctgctgctgctgctgaaggtgtaccagggcaagggctgccagggcagcgctgaccacgtggtgtccatctctggagtgcccctgcagctgcagcccaacagcatccagaccaaggtggacagcatcgcctggaagaagctgctgcccagccagaatggcttccaccacatcctgaagtgggagaatggcagcctgcccagcaacaccagcaatgaccgcttctccttcatcgtgaagaacctgagcctgctgatcaaggccgcccagcagcaggacagcggcctgtactgcctggaggtgaccagcatcagcggcaaggtgcagacagccaccttccaggtgtttgtgtttgagttccgcttctggcccttcctggtgatcatcgtcatcctgagcgccctcttcctgggcaccctggcctgcttctgtgtgtggaggaggaagaggaaggagaagcagagcgagaccagccccaaggagttcctgaccatctatgaagatgtgaaggacctgaagaccaggaggaaccacgagcaggagcagaccttccctgggggcggcagcaccatctacagcatgatccagagccagagcagcgcccccaccagccaggagcccgcctacaccctgtacagcctcatccagcccagcaggaagagcggcagcaggaagaggaaccacagccccagcttcaacagcaccatctatgaagtcatcggcaagagccagcccaaggcccagaacccagcccggctgagcaggaaggagctggagaactttgatgtgtacagctag

SEQ ID NO: 65115 - DNA, 822 bp, Artificial Sequence
  derived and/or modified sequence
atgctgggccaggtggtgaccctgatcctgctgctgctgctgaaggtgtatcaaggtaagggatgccagggatccgcggatcacgttgtgtccatctcgggcgttcccctccagttgcagccgaactcaatccagaccaaggttgactccatcgcttggaaaaagctgctgccatctcaaaatggtttccaccacatcctgaaatgggaaaacggatcgctgccctctaacacttccaatgaccgcttcagcttcattgtgaaaaatctctctctgctgatcaaggccgcgcagcaacaggattctggattgtattgcctagaagtcacatcgattagtggaaaagtacaaaccgccacttttcaggtattcgtgttcgagtttcgtttttggccctttctcgtgatcatagtcatcctctcagccttatttctcggcactctcgcctgcttctgcgtctggcggagaaagcgcaaagaaaaacaatccgagacctcgcccaaggagttcctgaccatttacgaagacgtcaaagacctcaaaactaggaggaatcacgagcaggagcagactttcccaggagggggatcgacaatatatagtatgattcaaagtcagagctccgctcccacctctcaagaacctgcttatacattatacagccttatccagccctccagaaagtccggttcccgaaagcgcaaccacagtccttctttcaattctacaatttatgaggtgatagggaagtcccagcctaaggctcagaatcccgccagactctcccgaaaagaattggagaatttcgacgtgtactcttag

SEQ ID NO: 65116 - DNA, 822 bp, Artificial Sequence
  derived and/or modified sequence
atgctggggcaggtcgtgactttgattctgttactgctgttgaaagtttaccagggcaagggatgccagggctcagctgatcatgtggtctctattagcggcgtcccgctccagctgcagcccaattcaattcagactaaagtggactctatagcttggaagaagctactgcccagtcaaaacggcttccaccacatactcaaatgggaaaacgggtctctcccttccaatacctccaacgacaggttttctttcatcgttaagaacctgtcgctgctaataaaagccgctcagcagcaggattctgggctctactgtctggaggtgactagtatctcgggcaaagttcagacagcgaccttccaagtctttgtatttgaatttcgcttctggccatttcttgtaatcatcgtaattctgagcgccctgttcctgggaactctcgcgtgcttctgtgtgtggcggaggaagaggaaagagaagcaaagtgaaacatcacccaaagagtttctcactatatacgaggatgtcaaggacctcaagacgaggaggaaccatgagcaggagcaaacgttcccaggtggcggatcgaccatctactctatgatccagagccaatcttccgctccaacttcccaagagcccgcttatactttgtattccctgattcagcctagcaggaaaagcgggtcaagaaaaagaaatcactctccatctttcaattccaccatttatgaagtgattgggaagagtcagcccaaagcccagaatcccgctcgcctgtctcggaaggaactcgagaatttcgacgtatactcctag

SEQ ID NO: 65117 - DNA, 921 bp, Artificial Sequence
  derived and/or modified sequence
cctggcccctctgtcctgtggaaatgctggggcaagtggtcaccctcatactcctcctgctcctcaaggtgtatcagggcaaaggatgccagggatcagctgaccatgtggttagcatctcgggagtgcctcttcagttacaaccaaacagcatacagacgaaggttgacagcattgcatggaagaagttgctgccctcacaaaatggatttcatcacatattgaagtgggagaatggctctttgccttccaatacttccaatgatagattcagttttatagtcaagaacttgagtcttctcatcaaggcagctcagcagcaggacagtggcctctactgcctggaggtcaccagtatatctggaaaagttcagacagccacgttccaggtttttgtatttgaattcagattttggccgtttttggtgatcatcgtgattctaagcgcactgttccttggcacccttgcctgcttctgtgtgtggaggagaaagaggaaggagaagcagtcagagaccagtcccaaggaatttttgacaatttacgaagatgtcaaggatctgaaaaccaggagaaatcacgagcaggagcagacttttcctggaggggggagcaccatctactctatgatccagtcccagtcttctgctcccacgtcacaagaacctgcatatacattatattcattaattcagccttccaggaagtctggatccaggaagaggaaccacagcccttccttcaatagcactatctatgaagtgattggaaagagtcaacctaaagcccagaaccctgctcgattgagccgcaaagagctggagaactttgatgtttattcctagttgctgcagcaattctcacctttcttgcacatcagcatctgctttgggaattggcacagtggatgacggcacagga

SEQ ID NO: 65118 - DNA, 822 bp, Artificial Sequence
  derived and/or modified sequence
atgctgggccaggtggtgaccctgatcctgctgctgctgctgaaggtgtaccagggcaagggctgccagggcagcgccgaccacgtggtgagcatcagcggcgtgcccctgcagctgcagcccaacagcatccagaccaaggtggacagcatcgcctggaagaagctgctgcccagccagaacggcttccaccacatcctgaagtgggagaacggcagcctgcccagcaacaccagcaacgacagattcagcttcatcgtgaagaacctgagcctgctgatcaaggccgcccagcagcaggacagcggcctgtactgcctggaggtgaccagcatcagcggcaaggtgcagaccgccaccttccaggtgttcgtgttcgagttcagattctggcccttcctggtgatcatcgtgatcctgagcgccctgttcctgggcaccctggcctgcttctgcgtgtggagaagaaagagaaaggagaagcagagcgagaccagccccaaggagttcctgaccatctacgaggacgtgaaggacctgaagaccagaagaaaccacgagcaggagcagaccttccccggcggcggcagcaccatctacagcatgatccagagccagagcagcgcccccaccagccaggagcccgcctacaccctgtacagcctgatccagcccagcagaaagagcggcagcagaaagagaaaccacagccccagcttcaacagcaccatctacgaggtgatcggcaagagccagcccaaggcccagaaccccgccagactgagcagaaaggagctggagaacttcgacgtgtacagctag

SEQ ID NO: 65119 - protein, 851 aa, Artificial Sequence
  derived and/or modified sequence
MHKDEFHLKFFMCVIQSRQLVRTPQRTAGEASTSSMLIPKPPPKTDILKSLDTMDDPDTVGSIPVFKTEWIMTHEEHHAAKTLGIGKAIAVLTSGGDAQGMNAAVRAVVRVGIFTGARVFFVHEGYQGLVDGGDHIKEATWESVSMMLQLGGTVIGSARCKDFREREGRLRAAYNLVKRGITNLCVIGGDGSLTGADTFRSEWSDLLSDLQKAGKITDEEATKSSYLNIVGLVGSIDNDFCGTDMTIGTDSALHRIMEIVDAITTTAQSHQRTFVLEVMGRHCGYLALVTSLSCGADWVFIPECPPDDDWEEHLCRRLSETRTRGSRLNIIIVAEGAIDKNGKPITSEDIKNLVVKRLGYDTRVTVLGHVQRGGTPSAFDRILGSRMGVEAVMALLEGTPDTPACVVSLSGNQAVRLPLMECVQVTKDVTKAMDEKKFDEALKLRGRSFMNNWEVYKLLAHVRPPVSKSGSHTVAVMNVGAPAAGMNAAVRSTVRIGLIQGNRVLVVHDGFEGLAKGQIEEAGWSYVGGWTGQGGSKLGTKRTLPKKSFEQISANITKFNIQGLVIIGGFEAYTGGLELMEGRKQFDELCIPFVVIPATVSNNVPGSDFSVGADTALNTICTTCDRIKQSAAGTKRRVFIIETMGGYCGYLATMAGLAAGADAAYIFEEPFTIRDLQANVEHLVQKMKTTVKRGLVLRNEKCNENYTTDFIFNLYSEEGKGIFDSRKNVLGHMQQGGSPTPFDRNFATKMGAKAMNWMSGKIKESYRNGRIFANTPDSGCVLGMRKRALVFQPVAELKDQTDFEHRIPKEQWWLKLRPILKILAKYEIDLDTSDHAHLEHITRKRSGEAAV

SEQ ID NO: 65120 - DNA, 2343 bp, Artificial Sequence
  derived and/or modified sequence
atgacacacgaagagcatcacgcagctaaaacgttaggcataggcaaagccatcgccgtgctgacttcgggtggagatgcacagggaatgaatgccgcagtccgcgccgtcgttagggtcggtatcttcacaggagcccgggtgttttttgtccatgagggctaccagggactcgtagacgggggggatcacattaaggaagccacgtgggaatccgtttctatgatgctccaattgggcgggaccgttatagggtctgctcgttgcaaggatttcagagagcgggaggggcgactgagagcagcatacaaccttgttaaacgcgggataaccaatctctgtgtcattggcggagatgggtctctgaccggcgctgacacctttagatctgaatggtcagaccttttgagcgatctgcagaaggccggcaagattacagatgaagaggcgaccaagtcatcatacctcaacattgtgggcctcgtgggctcaatagataatgacttttgtggtaccgatatgaccattggaacagactcggccttgcaccggatcatggagatcgttgatgccattacgacaaccgcacaaagccaccagcgaactttcgtgttagaagtgatgggaaggcactgtggttatctggccctcgttacctccttaagctgtggggcagattgggtgttcatcccagagtgtccccccgacgatgactgggaggaacacctgtgtaggcgcctgagcgagactcggaccagaggctctagactgaacatcattatcgtggccgagggcgccatcgacaaaaatggtaagcccatcacgtcagaggacataaagaatctggtggtgaaacgtctcggctatgacacacgagtcaccgttctcggtcatgttcaacgaggtggcacgccaagcgcattcgaccggattctggggtctaggatgggagtggaggcggttatggctctactcgagggtacccccgacaccccagcctgtgtggtgagtctgtctgggaatcaggctgtgagattgcctctgatggagtgtgtgcaagtgaccaaagatgtcactaaggctatggacgagaagaaatttgatgaggccctgaagctgagggggcgaagcttcatgaacaactgggaggtgtataagctcttagcccatgttaggccacctgttagcaaatcaggctcccatacggtggctgtcatgaacgtcggcgctccagccgccggcatgaacgctgcggtgaggagcaccgtcagaatcggcctgatacaaggcaatagagtcctggttgttcatgacgggttcgaggggctggccaagggtcaaatagaggaagccggctggagctacgttggcgggtggactggacagggcggcagtaagctcgggacaaagcgcaccctgcctaaaaaatcatttgagcagataagcgctaacattactaagttcaatattcagggtctggtcattattggaggtttcgaggcctatactgggggacttgaactcatggaggggcggaagcagttcgacgaattgtgcattccgtttgtggttatcccagccacagtgtcgaacaatgttccaggctcagatttttcagtgggagccgataccgccctcaacaccatctgcacgacatgcgatcggattaagcagtcggccgctggcaccaaaaggcgtgtgttcatcatcgaaacaatgggagggtactgtggctatctagcgaccatggcaggattggccgcaggggccgacgcggcctacatattcgaagaaccgttcacaataagagatttacaagcgaacgtggaacacttggttcagaaaatgaaaactaccgtgaaacgaggactggtgctccggaacgaaaagtgcaacgaaaattacactaccgattttatcttcaacttgtatagcgaagagggcaaggggatttttgactctcggaagaatgttttgggccatatgcagcaggggggaagcccaacgccttttgacagaaacttcgctactaagatgggggcgaaggctatgaactggatgtccgggaaaatcaaagaaagctaccggaacgggagaatttttgcgaacacacccgacagcggctgcgtcttggggatgaggaagcgagcccttgtgttccagcccgtggccgaacttaaggatcagactgactttgaacaccggattccaaaggaacaatggtggttgaagctccgaccaatcctgaaaattctagctaaatatgagattgacttggacacttccgaccatgcccacctcgaacatataactaggaagcggtcaggcgaagccgccgtttag

SEQ ID NO: 65121 - DNA, 2556 bp, Artificial Sequence
  derived and/or modified sequence
atgcataaggatgagtttcaccttaagttttttatgtgtgttattcagagtcgtcagctggtgcggactccacaaagaacagcaggcgaggcatcaacctctagcatgctaatccccaagccacccccaaaaactgacatcctgaaaagtcttgataccatggatgatccggatacagtgggatcaatccccgtgtttaagacagagtggattatgactcatgaggagcaccacgctgccaaaacacttggaataggaaaggccattgccgtcctcacctcaggtggcgacgctcaggggatgaacgctgccgtgagggccgttgtgagggtaggcattttcaccggggctcgggtgttttttgttcacgaaggctaccagggactggtggatggtggcgatcatataaaggaagcgacctgggagtccgtttcaatgatgctgcagctgggcggaaccgtgattggaagtgcccggtgcaaggacttcagggagcgcgaggggagattaagagctgcttataatctggtaaaaagaggcattaccaatctttgcgttatcggcggcgacggcagcctaaccggggcggataccttccgctctgagtggagcgatctactgtccgatctgcaaaaagccgggaagattactgatgaagaggccactaagagctcttacttaaatattgttggactggtgggctccattgataatgatttttgtggaactgatatgaccattggtactgattctgccctccacagaatcatggaaatcgtcgatgccatcaccacaactgcacagagtcaccaacggactttcgtgctggaggtgatgggaagacactgcgggtatctggccctcgtcacaagtttgagttgcggcgctgattgggtgttcatccctgagtgcccgcccgacgacgattgggaagagcacctatgtagaagactcagtgagaccaggacacgaggtagtcgcctaaatattatcatcgttgcagagggagcaatcgataagaatggaaagcccattaccagcgaggatatcaaaaatttggttgtcaagagacttggctacgacaccagggtgacggtgctgggacatgtgcagagagggggaacaccgtccgccttcgatcgaattttgggctctcgcatgggagtggaagcagttatggctctgctggagggcacaccggacactccagcctgcgttgttagcttgtctggaaatcaggcggtaaggttgccgctgatggagtgcgttcaagtgacaaaagatgttacaaaagcaatggacgaaaaaaagttcgatgaggccctcaagctcagaggccgctcctttatgaacaactgggaggtgtataagctgctggcccatgtgcgtccccccgtctctaagagcggctcacacacagtggcagttatgaatgtcggcgcccctgctgccggtatgaacgcagctgtaaggagcactgttaggataggcctcatacagggtaacagagtgctagttgtgcacgatgggtttgagggcctcgcgaaaggacagattgaagaggcagggtggtcctacgtaggaggttggacaggccagggcggtagtaaattaggcaccaagcgcacactccccaagaaaagtttcgagcagataagtgcaaatattacgaaatttaacatccagggcctcgtgattataggcggcttcgaagcttacacaggggggctcgagttgatggagggtcgaaagcagtttgatgaactgtgcataccgttcgtagtcatcccagctactgtttccaataatgtgccaggctccgatttttccgtgggagctgataccgccttaaacacaatctgcaccacatgcgaccgaatcaaacagagcgcagccggtaccaaaaggcgcgtgttcatcatcgaaacgatgggcgggtactgtggctatctggctaccatggctggccttgctgccggggctgacgcagcatatatattcgaagagccatttacgatcagggacctgcaggctaatgtggagcacctggtacagaagatgaagacaactgttaaacgcgggctggttctccgtaacgagaaatgcaacgagaactataccaccgacttcatcttcaatctatactcagaggagggaaagggcatctttgactctcggaagaacgtgttggggcacatgcagcagggaggtagccccaccccgtttgatcgcaacttcgccacaaaaatgggcgctaaagccatgaactggatgagcggtaaaattaaggagagctacagaaacggaaggatctttgcaaacacgccagactctgggtgtgtactcggtatgaggaagagagcccttgtgtttcagcctgtagctgaacttaaggaccagactgactttgaacatcgcatcccgaaagaacagtggtggttaaagctgcggccaattcttaagatcctggcaaaatacgaaattgatctagataccagtgaccatgctcatctcgagcatatcacacgaaaacggtccggcgaggcggctgtgtag

SEQ ID NO: 65122 - DNA, 2343 bp, Artificial Sequence
  derived and/or modified sequence
atgacccacgaggaacatcatgcagccaagactctagggattggaaaagcgattgccgtcctcacatccggtggggacgcacaagggatgaacgctgcggtgagggcagtggtgcgcgtgggaatttttacgggggctcgcgttttttttgttcacgaagggtatcagggactggtagacgggggcgatcatatcaaagaagccacttgggagtccgtgtccatgatgctgcagttaggaggcacggtgatcggaagtgctcgctgtaaagacttccgagagcgcgagggccggctgcgggcggcatacaacctagtaaagcgaggaattactaatttgtgcgttataggaggtgacggatctcttaccggcgccgacacatttcgtagtgagtggtcggacctgctaagcgatctgcagaaagccggcaaaatcactgacgaagaggccacaaagagctcttacctgaacattgtggggctggttggcagcatcgataatgatttctgtggaacagacatgacgataggcaccgactctgcactgcacaggattatggagatcgtcgacgccatcactaccacagcccagtcccaccaacggacattcgtcctggaggtaatgggacgccactgcggctacctcgccttggttacttcactgtcatgcggcgctgactgggtctttatccctgagtgcccaccagatgacgactgggaggaacacctttgccgtagactgtctgagacccgaactagggggtcccgcctgaacataataattgtggcagaaggagccattgacaaaaatggaaagccaatcacatctgaggacattaagaatctcgtcgtgaagagattaggctacgacacaagggtgaccgtactggggcatgtccagaggggaggtaccccctcagcctttgatagaatcttaggcagccgcatgggagtggaagcagtgatggctctgttggaaggtacaccagacactcctgcgtgtgtggtgagcctcagtggcaatcaagcggtgcggctaccactcatggaatgcgttcaggtgaccaaagatgtgacaaaagctatggatgaaaaaaagttcgatgaagcccttaagctaagaggcagaagctttatgaacaactgggaggtgtacaaattgttggcacacgttaggccgccagtgagtaaatcgggaagtcatacggtcgcagtgatgaacgttggcgcgcctgccgcaggcatgaacgccgcagtgcggtcgacggttcggattggtttgatccaagggaatagagtccttgtggttcatgacgggttcgagggactagccaaagggcagatcgaggaagccggatggtcgtacgttggaggctggacgggccaaggtggttcaaaattgggaaccaaacggacacttcccaagaagtcctttgagcaaatctctgccaacatcacgaaatttaacatacaggggctcgtgataatcggtggctttgaggcctataccggtggcctagagttgatggaggggagaaagcagttcgatgagctttgcatccccttcgttgtcattcccgcgacggtgtctaacaatgtgcccgggagcgactttagcgtgggtgcagataccgccctgaacacgatctgcacaacatgtgaccggatcaaacagtctgccgccgggactaagagaagagtcttcattatcgagacgatggggggatattgcgggtacctggcaactatggccggactggctgccggtgccgatgccgcctatatctttgaggagccctttacaatccgagaccttcaggccaatgtggagcatcttgtgcagaaaatgaaaactacagtcaaaaggggactagtcctgcggaacgaaaagtgcaacgaaaattataccacagattttatttttaatctgtacagcgaggaaggcaagggaatcttcgactcccgcaagaacgtgttggggcacatgcaacaaggtggatcacctaccccctttgaccgaaacttcgccacgaaaatgggagctaaagcgatgaattggatgtcaggtaaaataaaagagtcatacaggaatggccggatttttgccaacacccccgactcaggatgtgttctggggatgaggaaaagagcccttgtattccagccagtcgccgagctgaaggatcagactgattttgagcatcgcattccgaaggagcagtggtggctgaagctgcgccctatcttgaagatcctggctaaatatgagatagatctcgatacaagcgaccacgcgcacctggagcacattacgcgcaaaagatctggagaagctgccgtctag

SEQ ID NO: 65123 - DNA, 2343 bp, Artificial Sequence
  derived and/or modified sequence
atgacccacgaagaacaccacgctgcaaaaacacttggcataggaaaagcaatagcagtccttactagtggaggagacgcccaggggatgaatgccgccgtgagagccgttgtgcgagttggcatttttaccggggctagggtctttttcgtgcacgagggataccagggcctggtggacggcggagatcatattaaagaagccacatgggagtctgtgtctatgatgttgcaactggggggaacagttataggctcggcccgttgcaaagattttcgggagagggagggccgcctgagagccgcgtacaatctagtaaaacggggcattaccaatctttgtgtaatcggcggagacgggtctcttactggcgccgacacattccgatccgaatggagtgaccttctgtctgacctgcagaaagcaggtaaaataaccgacgaggaggctacgaaaagcagctaccttaacatcgtgggtctcgtcggctcaatagacaatgacttttgcggaaccgatatgacgatcggaaccgacagtgccctgcataggatcatggaaatcgtggatgccatcaccaccacagcacagtcccatcaacgcacttttgtactcgaagtaatggggcgtcactgtggatatttggcccttgttactagcttgtcgtgtggcgcagattgggtgtttattccagagtgtccaccagacgacgattgggaggagcacttatgtcggcgcttgtctgagacaaggactcgcggaagcagactgaacattatcatcgtcgcggaaggggccattgataaaaatggcaaacctataactagcgaggatatcaaaaatctggtcgtaaaaaggttgggctatgacactcgggtgacggtgcttggacatgttcaaaggggcgggacgccatcagcctttgatagaatcctaggctcacgcatgggagtcgaggcagtgatggccctgctcgagggcacaccagatactccagcatgcgtcgtctcactttcgggcaatcaggccgtgaggctgcccctgatggagtgcgtgcaggtcacaaaggatgtaacgaaggcaatggacgagaagaagttcgacgaggccctaaagttgcgcggcagatcctttatgaacaattgggaggtttataagttactggcccacgtgagaccccctgtctcaaaatcagggtcccacaccgtggcggtcatgaatgttggagcccctgccgcagggatgaatgcagccgtccgcagcactgtacgcatcggactgatccagggtaaccgggtccttgtggtacacgatggctttgagggcctcgctaaaggtcagatcgaagaagccgggtggtcgtatgtgggagggtggacgggacaaggggggtctaaattaggcactaaacgcacactgccaaagaagagcttcgaacaaatcagcgcaaacataaccaaattcaatatacaaggcttagtgatcatcggcgggtttgaggcatacaccggtggactggaactgatggaaggaaggaaacagtttgacgagttgtgtatcccttttgttgtgatcccggcaaccgtgagcaataacgtccccggttccgacttctctgtcggggccgatactgcgctgaatacgatatgcaccacctgcgaccggattaaacagtctgcggccgggacaaagaggagagtattcatcatcgagacaatgggcgggtattgtggctatcttgccacaatggcagggctggccgccggcgctgacgcagcttatatttttgaagaacctttcaccatacgtgatctacaggcaaacgtagagcacctcgttcagaaaatgaagactactgtcaagcgcggattggtcttacggaatgaaaagtgcaacgagaactacactacagacttcattttcaacttgtattcagaggaaggcaaaggtatcttcgattctcggaagaatgtgctggggcatatgcagcaggggggctcaccaacaccgtttgatcgcaattttgcaacgaagatgggagctaaggcgatgaattggatgagcgggaaaataaaagagagttatcggaacgggaggatttttgcaaacacccccgacagtggctgcgtgttgggcatgagaaaaagagcgctcgtattccaaccagtggcagagctgaaggaccagaccgattttgagcaccggatccccaaggaacagtggtggcttaagttgagacccattctcaagatcttggctaagtacgagattgacctagacacgagtgaccacgctcaccttgagcacattacccggaaacgttctggcgaagccgcggtctag

SEQ ID NO: 65124 - DNA, 2343 bp, Artificial Sequence
  derived and/or modified sequence
atgacccatgaggagcaccacgccgccaagaccctgggcatcggcaaggccatcgctgtgctgaccagcggaggagatgcccagggcatgaatgctgctgtgcgggctgtggtgcgggtgggcatcttcaccggggcccgggtcttctttgtgcatgagggctaccagggcctggtggatggaggagaccacatcaaggaggccacctgggagagcgtgtccatgatgctgcagctgggcggcaccgtcatcggcagcgcccgctgcaaggacttccgggagcgggagggccgcctgcgggccgcctacaacctggtgaagaggggcatcaccaacctgtgtgtgattggaggagatggcagcctgactggagctgacaccttccgctctgagtggagcgacctgctgagtgacctgcagaaggccggcaagatcacagatgaggaggccaccaagagcagctacctgaacatcgtgggcctggtgggcagcattgacaatgacttctgtggcacagacatgaccatcggcacagacagcgccctgcaccgcatcatggagatcgtggatgccatcaccaccacagcccagagccaccagaggacctttgtgctggaggtgatgggccgccactgcggctacctggccctggtgaccagcctgagctgtggggctgactgggtgttcatccctgagtgccccccagatgatgactgggaggagcacctgtgccggcggctgtctgagaccaggacccggggcagccggctgaacatcatcatcgtggccgagggcgccatcgacaagaatggcaagcccatcaccagcgaggacatcaagaacctggtggtgaagaggctgggctatgacaccagggtgacagtgctgggccacgtgcagaggggcggcacccccagcgcctttgaccgcatcctgggcagcaggatgggcgtggaggccgtgatggccctgctggagggcaccccagacaccccagcctgtgtggtgtccctgagcggcaaccaggccgtgcggctgcccctgatggagtgtgtgcaggtgaccaaggatgtgaccaaggccatggatgagaagaagtttgatgaggccctgaagctgcggggccgctccttcatgaacaactgggaggtgtacaagctgctggcccacgtgcggccccctgtgtccaagagcggcagccacacagtggccgtgatgaatgtgggcgccccagctgctggcatgaatgctgctgtgcgcagcacagtgagaattggcctcatccagggcaacagagtgctggtggtgcatgatggctttgagggcctggccaagggccagatcgaggaggccggctggagctatgtgggcggctggacaggccagggcggcagcaagctgggcaccaagaggaccctgcccaagaagagctttgagcagatcagcgccaacatcaccaagttcaacatccagggcctggtgatcatcggcggctttgaggcctacacaggaggcctggagctgatggagggcaggaagcagtttgatgagctgtgcatcccctttgtggtgatcccagccaccgtgagcaacaacgtgcccggcagtgacttctctgtgggcgctgacacagccctgaacaccatctgcaccacctgtgaccgcatcaagcagagcgctgctggcaccaagagaagagtcttcatcatcgagaccatgggcggctactgcggctacctggccaccatggccggcctggccgccggggctgatgctgcctacatctttgaggagcccttcaccatccgggacctgcaggccaacgtggagcacctggtgcagaagatgaagaccaccgtgaagaggggcctggtgctgagaaatgagaagtgcaatgaaaactacaccacagacttcatcttcaacctgtacagcgaggagggcaagggcatctttgacagcaggaagaatgtgctgggccacatgcagcagggcggcagccccaccccatttgacaggaactttgccaccaagatgggcgccaaggccatgaactggatgtctgggaagatcaaggagagctacagaaatggccgcatctttgccaacaccccagattctggctgtgtgctgggcatgaggaagagggccctggtgttccagcctgtggccgagctgaaggaccagacagactttgagcaccgcatccccaaggagcagtggtggctgaagctgcggcccatcctgaagatcctggccaagtatgaaattgacctggacaccagtgaccacgcccacctggagcacatcaccaggaagaggtctggagaggccgctgtgtag

SEQ ID NO: 65125 - DNA, 2556 bp, Artificial Sequence
  derived and/or modified sequence
atgcacaaggatgagttccacctgaagttcttcatgtgtgtgatccagagccggcagctggtgaggaccccccagaggacagctggggaggccagcaccagctccatgctgatccccaagcccccacccaagacagacatcctgaagagcctggacaccatggatgatcctgacacagtgggcagcatccctgtgttcaagacagagtggatcatgacccatgaggagcaccacgccgccaagaccctgggcatcggcaaggccatcgctgtgctgaccagcggaggagatgcccagggcatgaatgctgctgtgcgggctgtggtgcgggtgggcatcttcaccggggcccgggtcttctttgtgcatgagggctaccagggcctggtggatggaggagaccacatcaaggaggccacctgggagagcgtgtccatgatgctgcagctgggcggcaccgtgattggcagcgcccgctgcaaggacttccgggagcgggagggccgcctgcgggccgcctacaacctggtgaagaggggcatcaccaacctgtgtgtgattggaggagatggcagcctgaccggggctgacaccttccgctctgagtggagcgacctgctgagtgacctgcagaaggccggcaagatcacagatgaggaggccaccaagagcagctacctgaacatcgtgggcctggtgggcagcattgacaatgacttctgtggcacagacatgaccatcggcacagattctgccctgcaccgcatcatggagatcgtggatgccatcaccaccacagcccagagccaccagaggacctttgtgctggaggtgatgggccgccactgcggctacctggccctggtgaccagcctgagctgtggggctgactgggtgttcatcccagaatgtcctccagatgatgactgggaggagcacctgtgccggcggctgtctgagaccaggacccggggcagccggctgaacatcatcatcgtggccgagggcgccatcgacaagaatggcaagcccatcaccagcgaggacatcaagaacctggtggtgaagaggctgggctatgacaccagggtgacagtgctgggccacgtgcagagaggaggcaccccatctgcctttgaccgcatcctgggcagcaggatgggcgtggaggccgtgatggccctgctggagggcaccccagacaccccagcctgtgtggtgtccctgagcggcaaccaggccgtgcggctgcccctgatggagtgtgtgcaggtgaccaaggatgtgaccaaggccatggatgagaagaagtttgatgaggccctgaagctgcggggccgctccttcatgaacaactgggaggtgtacaagctgctggcccacgtgcggccccctgtgtccaagagcggcagccacacagtggccgtgatgaatgtgggcgccccagctgctggcatgaatgctgctgtgcgcagcacagtgcgcatcggcctcatccagggcaacagagtgctggtggtgcatgatggctttgagggcctggccaagggccagatcgaggaggccggctggagctatgtgggcggctggacaggccagggcggcagcaagctgggcaccaagaggaccctgcccaagaagagctttgagcagatcagcgccaacatcaccaagttcaacatccagggcctggtgatcattggaggctttgaggcctacacaggaggcctggagctgatggagggcaggaagcagtttgatgagctgtgcatcccctttgtggtgatcccagccaccgtgagcaacaacgtgcccggcagtgacttctctgtgggcgctgacacagccctgaacaccatctgcaccacctgtgaccgcatcaagcagagcgctgctggcaccaagagaagagtcttcatcatcgagaccatgggcggctactgcggctacctggccaccatggccggcctggccgccggggctgatgctgcctacatctttgaggagcccttcaccatccgggacctgcaggccaacgtggagcacctggtgcagaagatgaagaccaccgtgaagaggggcctggtgctgagaaatgaaaaatgtaatgaaaactacaccacagacttcatcttcaacctgtacagcgaggagggcaagggcatctttgacagcaggaagaatgtgctgggccacatgcagcagggcggcagccccaccccatttgacaggaactttgccaccaagatgggcgccaaggccatgaactggatgtctgggaagatcaaggagagctacagaaatggccgcatctttgccaacaccccagacagcggctgtgtgctgggcatgaggaagagggccctggtgttccagcctgtggccgagctgaaggaccagacagactttgagcaccgcatccccaaggagcagtggtggctgaagctgcggcccatcctgaagatcctggccaagtatgaaattgacctggacaccagtgaccacgcccacctggagcacatcaccaggaagaggtctggagaggccgctgtgtag

SEQ ID NO: 65126 - DNA, 2343 bp, Artificial Sequence
  derived and/or modified sequence
atgacccacgaggagcaccacgccgccaagaccctgggcatcggcaaggctatcgctgtcctgactagtggtggggacgcacaaggaatgaacgccgcagtacgggcagtcgtccgagtggggatcttcacgggagctcgggtgtttttcgtacatgaggggtaccagggcctcgtcgacgggggcgaccacataaaggaagcaacttgggaaagtgtgtcgatgatgctgcagctcggcggaacagttattggctccgctaggtgcaaagatttccgcgagagagaggggaggctgagggcggcttacaatctggtgaaacggggaattacaaatctgtgtgtcatcgggggagacggcagcctcaccggtgccgacacctttcgatcagagtggtctgatttactatcggacctgcagaaggccggcaagataacggatgaggaagctaccaaaagctcttacttgaacatagtcgggctcgtcgggtcaatcgacaatgatttctgtggtactgatatgacaatcgggactgacagtgctctgcatcgtattatggaaatcgtggacgctattacgaccaccgcccagtcacatcaaagaaccttcgtgcttgaggtcatggggagacactgcgggtacctagcgctggtcacctcgctctcttgtggagcagattgggtgttcatacctgagtgcccacctgatgatgactgggaagagcatctgtgtaggcgactgtccgagacccgaactcgagggtccaggctcaacataattatcgtggctgaaggcgccatcgacaagaacggaaagccaattacatctgaggacattaagaatctggtagtgaaacgcttgggttacgatacccgcgtgaccgtgttgggtcatgtccagcgcggaggaacaccctcggcgttcgaccgcattctgggcagtaggatgggtgtggaggcggtaatggctctccttgaggggacacctgatacgcccgcctgtgtcgtgagtctgagcggtaaccaggcagtgcgactccctctgatggagtgcgtgcaagtaactaaggatgtcacgaaggccatggatgagaaaaagtttgacgaggctctgaagctgcgtggccgctctttcatgaataactgggaggtgtataagcttctggctcacgtccggccacctgtatccaaaagtggatcgcacaccgttgcagtcatgaatgtcggtgcccccgccgctggcatgaatgccgccgtgcgcagtacagtgagaattggactcattcagggcaatagggtgcttgtggtgcacgatggctttgaaggccttgcaaaaggccagattgaagaggcaggctggtcctatgtgggcgggtggacaggacaaggcggaagcaagctagggaccaaaaggaccctgcctaaaaaatctttcgaacagatctcagccaacatcaccaagttcaacatccagggactcgtcataattggtggcttcgaggcttacactggcgggctcgaactgatggagggcaggaagcagtttgatgagttatgcatccctttcgtggtgattcccgcaacagtgagcaataacgtgccaggttcagactttagcgtgggtgctgacacagcccttaacacaatttgcaccacctgtgacaggatcaagcagtcggcagccggcaccaagagacgggtgttcatcattgaaaccatgggtggatactgtggatacctggccacgatggcgggacttgcagctggcgccgacgccgcctatatctttgaggagccttttaccattcgcgatctgcaggcaaacgtggaacacctagtgcagaaaatgaaaacgaccgtgaagaggggactggtgcttagaaatgaaaagtgcaacgagaattacacaacagactttatttttaatctctacagtgaagaaggaaagggaatctttgacagccggaagaatgtgttaggtcacatgcaacaaggcgggagccccaccccattcgacaggaattttgccacgaagatgggtgccaaggcgatgaattggatgtctggcaagatcaaagaaagctacagaaatggcagaatctttgcaaacactccggacagcgggtgcgtgctggggatgagaaaacgggctctggtgtttcagccagtggccgaattaaaggaccagacggacttcgaacaccgcatccccaaggaacagtggtggctgaaactgagacctatacttaagatcttagccaagtacgaaatcgatctggatacgtccgatcacgctcacttggagcacatcacccggaagaggagtggcgaggccgcggtttag

SEQ ID NO: 65127 - DNA, 2556 bp, Artificial Sequence
  derived and/or modified sequence
atgcacaaggacgagttccacctgaagttcttcatgtgcgtgatccaatcccgtcaactggttcggaccccccagagaacggccggcgaggcctccacatcgtccatgctaattcccaagcccccacctaaaaccgacatcctcaagtccctggataccatggatgaccctgataccgtcggtagcatcccggtctttaaaacagagtggattatgacgcacgaggagcatcatgccgctaagaccttgggcatcgggaaggctatcgctgtcctgacgtcggggggggacgctcagggtatgaacgcagctgtgagggcggtggtacgtgtcggcatctttaccggagcccgagtcttcttcgttcacgagggttatcaagggctggtggacgggggtgaccacattaaagaggccacgtgggagagtgtttctatgatgctccaattgggtggaacagttatcggcagcgcaagatgtaaagattttagggaaagagaaggccggctcagagcagcttataatctggttaagaggggcataacaaacctgtgcgtgattggcggggatggctccctaacaggggctgataccttcaggtccgaatggagcgatctgctgagtgacctacagaaggccggcaagataacagatgaagaggctacgaaaagtagctatttgaacattgtgggcctcgttggctcaatcgataacgacttttgtggcacagatatgactatcggcactgattccgcccttcacagaatcatggagatcgtggacgcgataactacaaccgcacagagccaccagagaacattcgtgctggaggtgatgggccgtcactgtggctacctggccctcgtgacaagcctgtcatgcggcgctgattgggtctttattcccgaatgccctccagacgacgattgggaggaacacctgtgccgccgtctatccgagactaggactcgcgggagcagacttaatattataatagtggcggagggagccattgataaaaacggaaagccaattacctcagaggacatcaaaaacctcgtggtgaagagactcggctacgacacacgcgtcacggtcttgggccacgtgcagagaggcggaaccccttccgctttcgataggattcttgggtcccgtatgggcgttgaagccgtcatggcgctgttggagggcacgccagatacgcctgcgtgtgtggttagcttatcaggcaaccaggcagtcaggctgcccctgatggagtgtgttcaagtcacaaaagacgtcaccaaggcaatggatgagaagaagtttgatgaagcactcaaactgagaggacgatcatttatgaacaactgggaggtgtataagttactagcgcatgtccggccaccagtgagcaagtccggatcacatactgtggccgtcatgaatgtcggcgcccccgcggccggcatgaacgccgccgttcgatcaacagtcagaatcgggttgattcaaggcaacagggtgctggtggtgcacgacggctttgagggtctggctaaggggcagatcgaggaagccggttggtcatatgtaggaggatggactggtcagggggggtccaaattgggtaccaaaaggaccttgcctaaaaaatccttcgagcagatcagcgctaatatcactaaattcaacatccagggtctggtgatcattgggggattcgaagcctatactggcggcttggagcttatggagggcagaaagcagtttgacgagctctgtattccatttgttgtgattcctgccacagtgtccaataatgtgccaggcagcgacttctcagtcggcgccgacacggcattgaataccatttgtactacgtgtgaccggattaaacaatcagcagccggcactaaacgccgggtgttcattatagaaacaatgggcggatactgtggatatctggccaccatggccgggctggctgccggcgcggacgccgcctacatattcgaggaacccttcacaatccgtgacctgcaggcgaatgtcgagcacctcgtgcaaaaaatgaagactactgtcaagagagggctggtcctgagaaatgagaagtgtaatgagaactacacaacagactttattttcaatctgtactctgaagaaggcaaggggatcttcgacagtcggaaaaatgtcctagggcacatgcagcaaggggggagcccaaccccctttgacaggaatttcgcaaccaagatgggcgccaaggcaatgaactggatgtccgggaaaattaaggagagttatcgcaacggccgtatatttgccaacacccctgattctggatgtgtcctgggtatgaggaagcgcgctcttgtgtttcaacccgtggccgaactgaaggatcaaacagactttgaacaccggatccctaaagagcagtggtggctgaagctgcggcccatcttgaagattctagccaagtacgaaattgacctggataccagcgatcatgctcacctggaacacattactcgaaaaagaagcggagaggctgccgtgtag

SEQ ID NO: 65128 - DNA, 2343 bp, Artificial Sequence
  derived and/or modified sequence
atgacccacgaggagcaccacgccgccaagaccctgggcatcggcaaagctattgcggtgctgacctctgggggtgatgcacaggggatgaacgctgccgtgagagcagttgtgagggtcggtatttttactggtgcacgggtgtttttcgtgcacgagggataccagggactcgtggacggaggggaccacattaaagaagcgacgtgggaaagtgttagtatgatgttgcagctcggcggaaccgtgatcgggtctgccaggtgtaaagattttagagaaagggaaggacggctgagagccgcttacaatctggtaaagcgcgggatcactaacctttgcgtgataggcggtgatggaagcctgaccggggcggatacattcaggtccgaatggagcgaccttctaagcgacttgcagaaagccggaaagataactgacgaagaggccacaaagagctcttatctgaacatcgtgggtcttgttgggagcatcgataatgatttctgcggcacagatatgactattggtacagactcggcacttcatcggatcatggaaatcgtagacgccattacgaccaccgcccaatcccatcagcgtacttttgtgctcgaggttatgggacgtcattgcggctatctggcgttggtaaccagtctgtcttgcggagccgactgggtctttatccccgagtgccctccagatgacgattgggaagagcacctatgtaggaggcttagtgaaacacgaacccgggggagccgcctgaacatcatcatcgtggccgagggtgcaatcgacaaaaatggtaaacccattactagcgaggatattaaaaatctggttgtgaagcgccttgggtatgatacccgcgtgacggtcctaggccacgtccagcgaggagggaccccatctgcattcgaccgcatcctaggctcaagaatgggtgtcgaagcagtaatggctctgctcgaaggtacccctgatacacccgcctgcgtagtcagtctgagcggcaaccaggcagtgagactgccactaatggaatgtgtacaagtaaccaaggatgttacgaaagctatggatgagaagaagttcgatgaggctctaaagctgagaggtagatcctttatgaataattgggaggtttacaagctgcttgcccacgtgcgcccccccgtatccaaatccggctcgcacacggtggccgtcatgaatgtaggcgcccccgccgcagggatgaatgcagcggtcaggtcaacggttcgtattgggctgatacagggaaatcgcgttttggtggtgcacgacgggtttgagggtcttgccaagggacagattgaggaggccggttggtcctacgtcggcggctggactgggcaaggcgggtctaagctgggaacaaagagaacgctgcccaaaaagtcctttgagcagatctccgccaatataacaaaatttaatatacagggcctggtgatcatcggcggttttgaagcatacacaggagggcttgagctcatggaaggtagaaaacaatttgatgagttatgtatccccttcgtcgtgatccctgccactgtgagtaacaacgtccccggatccgacttctcggtgggagctgataccgccttaaatactatatgtactacttgcgacagaataaaacagagcgccgcagggacaaaaagacgggtgttcattatcgagaccatgggcgggtattgtggctacttagctaccatggcagggctggccgcaggggcggacgcagcctacatcttcgaagaaccctttactatccgtgacctgcaagccaacgttgagcatctggtgcaaaaaatgaaaactacagtgaagagaggacttgtgctcaggaacgagaagtgcaatgagaactacacaaccgatttcatttttaacctgtactctgaagagggaaaagggatctttgatagtcgtaagaacgtcttagggcatatgcaacaaggaggtagcccgactccctttgatcgtaatttcgctaccaagatgggcgccaaggcaatgaattggatgtccggtaaaattaaagaaagttaccgcaacgggagaattttcgctaatacccccgactccgggtgcgtactcgggatgcgcaagcgggctctcgtgttccagcctgtcgccgaactgaaggatcagaccgattttgagcacagaattccaaaagaacagtggtggctcaagcttagacctatcttgaaaatcttagctaagtatgagattgatcttgacaccagtgaccatgcccatctggagcatattactcgaaagagaagcggtgaagcagcagtttag

SEQ ID NO: 65129 - DNA, 2343 bp, Artificial Sequence
  derived and/or modified sequence
atgacccacgaggagcaccacgccgccaagaccctgggcatcggcaaagcaattgcagtgctcacctcaggtggcgatgctcagggtatgaatgctgctgtacgggcagtcgtccgggtgggcatttttacgggagctagggtgttcttcgtccatgagggatatcaagggctcgtggacggcggagaccatattaaagaggccacctgggaaagcgtcagtatgatgctgcagttaggaggtacggtgatcggcagcgctcggtgtaaagacttccgggagagggagggcaggttgagggccgcctacaacctggtgaaacgggggatcacaaatctttgtgtcatcggaggggatgggagcctcactggggctgatacgttccgttccgagtggagcgatctgctctctgacctacagaaggcaggtaagattacggacgaagaggcaaccaaatcctcctacttgaacatcgttgggttggttgggtctatcgacaatgacttttgtgggacagatatgacaatcggcaccgattcagcgctgcacagaataatggaaattgtggatgcaatcaccaccacagcccaaagtcatcaacgaacctttgtgctggaggtaatgggccggcattgcgggtacctggcgctcgtaacatctttgagctgcggcgctgattgggtgttcatccccgagtgtccacccgatgatgactgggaggaacatctgtgtcgacgcctgtcagagacacgcacacgagggtctagattaaacatcatcatagttgccgaaggcgccatcgacaaaaatggcaagcccatcacaagtgaggacataaaaaatctggtggtgaagcggctgggatacgatacaagggtcaccgtgctgggtcacgtgcaaaggggcgggaccccatcagcctttgaccggattcttgggtctaggatgggagtggaggctgtcatggcactgcttgaggggacccccgatacacctgcctgcgtggtctcactcagcggcaatcaggcagtccgactcccgttaatggaatgtgttcaggtaacaaaagatgttacaaaagctatggacgaaaagaaattcgatgaagcactcaagctgcgtggtcggtctttcatgaataattgggaagtatacaagcttctggcccatgtaaggccacctgtctccaaatctggttcccacaccgtcgctgtgatgaatgtgggcgcccctgccgcaggtatgaatgccgccgtgagaagtaccgtcaggattggcctgatccaggggaaccgggtcctcgtcgtgcacgacggcttcgagggcctggcaaaaggacagatcgaagaggccgggtggagctacgtcggtggctggaccggacaagggggatccaagctaggaaccaagagaacactaccaaaaaagagctttgagcagatatccgcgaatattacaaaatttaacatacaggggctggtgataatcgggggttttgaagcctatacggggggcctagagctgatggaaggccggaagcaatttgatgaattgtgcatccctttcgtagtaattccagctactgtttccaacaacgttcccggctcagacttctctgttggcgccgatactgcactcaacaccatctgcacaacatgtgatagaattaagcagagcgctgccgggaccaagcggagagtgttcattattgaaacaatgggcggttactgtgggtatctggccaccatggccggcttagctgctggcgccgatgcagcatatatctttgaggagccattcacaattcgggaccttcaggcgaatgtggagcacctggttcagaaaatgaaaacaacagtgaaaagagggttggtgctgaggaacgaaaaatgtaacgagaactacacaacggatttcatcttcaacctctactctgaggaaggaaaagggatatttgacagtcgtaaaaatgttcttggccatatgcaacagggcggcagtcccacccccttcgatcgcaacttcgccacaaagatgggggcaaaagctatgaattggatgagcggcaagatcaaggaatcttatcgcaacggtcgtatcttcgccaatacacctgattcaggctgtgtgctaggcatgaggaaaagggctctagtgttccaaccagttgccgaactaaaggatcagacggatttcgagcataggatccccaaagagcagtggtggcttaagctccgccccatcctgaaaattttggccaaatacgagattgaccttgacacctcggatcatgcccacctggagcacattacccggaagcgcagcggcgaagcagctgtctag

SEQ ID NO: 65130 - DNA, 3078 bp, Artificial Sequence
  derived and/or modified sequence
agacttggtatagtgggagagcctgactgagagtggatcatgacccatgaagagcaccatgcagccaaaaccctggggattggcaaagccattgctgtcttaacctctggtggagatgcccaaggtatgaatgctgctgtcagggctgtggttcgagttggtatcttcaccggtgcccgtgtcttctttgtccatgagggttatcaaggcctggtggatggtggagatcacatcaaggaagccacctgggagagcgtttcgatgatgcttcagctgggaggcacggtgattggaagtgcccggtgcaaggactttcgggaacgagaaggacgactccgagctgcctacaacctggtgaagcgtgggatcaccaatctctgtgtcattgggggtgatggcagcctcactggggctgacaccttccgttctgagtggagtgacttgttgagtgacctccagaaagcaggtaagatcacagatgaggaggctacgaagtccagctacctgaacattgtgggcctggttgggtcaattgacaatgacttctgtggcaccgatatgaccattggcactgactctgccctgcatcggatcatggaaattgtagatgccatcactaccactgcccagagccaccagaggacatttgtgttagaagtaatgggccgccactgtggatacctggcccttgtcacctctctgtcctgtggggccgactgggtttttattcctgaatgtccaccagatgacgactgggaggaacacctttgtcgccgactcagcgagacaaggacccgtggttctcgtctcaacatcatcattgtggctgagggtgcaattgacaagaatggaaaaccaatcacctcagaagacatcaagaatctggtggttaagcgtctgggatatgacacccgggttactgtcttggggcatgtgcagaggggtgggacgccatcagcctttgacagaattctgggcagcaggatgggtgtggaagcagtgatggcacttttggaggggaccccagataccccagcctgtgtagtgagcctctctggtaaccaggctgtgcgcctgcccctcatggaatgtgtccaggtgaccaaagatgtgaccaaggccatggatgagaagaaatttgacgaagccctgaagctgagaggccggagcttcatgaacaactgggaggtgtacaagcttctagctcatgtcagacccccggtatctaagagtggttcgcacacagtggctgtgatgaacgtgggggctccggctgcaggcatgaatgctgctgttcgctccactgtgaggattggccttatccagggcaaccgagtgctcgttgtccatgatggtttcgagggcctggccaaggggcagatagaggaagctggctggagctatgttgggggctggactggccaaggtggctctaaacttgggactaaaaggactctacccaagaagagctttgaacagatcagtgccaatataactaagtttaacattcagggccttgtcatcattgggggctttgaggcttacacagggggcctggaactgatggagggcaggaagcagtttgatgagctctgcatcccatttgtggtcattcctgctacagtctccaacaatgtccctggctcagacttcagcgttggggctgacacagcactcaatactatctgcacaacctgtgaccgcatcaagcagtcagcagctggcaccaagcgtcgggtgtttatcattgagactatgggtggctactgtggctacctggctaccatggctggactggcagctggggccgatgctgcctacatttttgaggagcccttcaccattcgagacctgcaggcaaatgttgaacatctggtgcaaaagatgaaaacaactgtgaaaaggggcttggtgttaaggaatgaaaagtgcaatgagaactataccactgacttcattttcaacctgtactctgaggaggggaagggcatcttcgacagcaggaagaatgtgcttggtcacatgcagcagggtgggagcccaaccccatttgataggaattttgccactaagatgggcgccaaggctatgaactggatgtctgggaaaatcaaagagagttaccgtaatgggcggatctttgccaatactccagattcgggctgtgttctggggatgcgtaagagggctctggtcttccaaccagtggctgagctgaaggaccagacagattttgagcatcgaatccccaaggaacagtggtggctgaaactgaggcccatcctcaaaatcctagccaagtacgagattgacttggacacttcagaccatgcccacctggagcacatcacccggaagcggtccggggaagctgccgtctaaacctctctggagtgaggggaatagattacctgatcatggtcagctcacaccctaataagtccacatcttctcagtgttttagctgtttttttcattaggtttccttttattctgtaccttgcagccatgaccagttctggccaggagctggaggagcaggcagtgggtgggagctccttttaggtagaatttaacatgacttctgccccagctttatctgtcacacaaggctgggcacctctagtgctactgctagatatcacttactcagttagaattttcctaaaaataagctttatttatttctttgtgataacaaagagtcttggttcctctactacttttactacagtgacaaattgtaactacactaataaatgccaactggtcactgtgcttttgcttctcctgttatcatcttcctaagtggaatgtaatactgtcagccccatgtatcagacacttgtctgatgaagcagtaaagacgttaagggtatcacagggggtggaggaagggattatctctagtacactacttgctggctgtctgaaaaattgtcactgccaaactctaaaaacagttctaaatagtgactgagaaggtttgttgctggagtcagggaataaggcagccaaatactctttgcacagttctttagtgggaagagaaattaacaataaatatcaagcactgtg

SEQ ID NO: 65131 - DNA, 3176 bp, Artificial Sequence
  derived and/or modified sequence
gcttccgcccagtccagcccgggccggctgaccgggtccgacacagtctcctggaccaggctccctccatcctcacccctcccccagcttcccgccgccactcaccgaaccggaaccggctgccatgcgaaggggtttccggccgggcgcggaacgcaaaacccgggaaccgccgcgaaccggaaccgccttcacagcaccggaagagtcgctaggaggcagccatgcataaagacgagtttcatctgaaatttttcatgtgtgtgattcagtctcgccagttagtcaggactcctcagagaacagctggggaagcttctacttccagcatgctcataccaaagccaccaccaaagacagacatcttgaagagtctagatactatggatgatccagacaccgtgggaagcatacctgttttcaaaactgagtggatcatgacccatgaagagcaccatgcagccaaaaccctggggattggcaaagccattgctgtcttaacctctggtggagatgcccaaggtatgaatgctgctgtcagggctgtggttcgagttggtatcttcaccggtgcccgtgtcttctttgtccatgagggttatcaaggcctggtggatggtggagatcacatcaaggaagccacctgggagagcgtttcgatgatgcttcagctgggaggcacggtgattggaagtgcccggtgcaaggactttcgggaacgagaaggacgactccgagctgcctacaacctggtgaagcgtgggatcaccaatctctgtgtcattgggggtgatggcagcctcactggggctgacaccttccgttctgagtggagtgacttgttgagtgacctccagaaagcaggtaagatcacagatgaggaggctacgaagtccagctacctgaacattgtgggcctggttgggtcaattgacaatgacttctgtggcaccgatatgaccattggcactgactctgccctgcatcggatcatggaaattgtagatgccatcactaccactgcccagagccaccagaggacatttgtgttagaagtaatgggccgccactgtggatacctggcccttgtcacctctctgtcctgtggggccgactgggtttttattcctgaatgtccaccagatgacgactgggaggaacacctttgtcgccgactcagcgagacaaggacccgtggttctcgtctcaacatcatcattgtggctgagggtgcaattgacaagaatggaaaaccaatcacctcagaagacatcaagaatctggtggttaagcgtctgggatatgacacccgggttactgtcttggggcatgtgcagaggggtgggacgccatcagcctttgacagaattctgggcagcaggatgggtgtggaagcagtgatggcacttttggaggggaccccagataccccagcctgtgtagtgagcctctctggtaaccaggctgtgcgcctgcccctcatggaatgtgtccaggtgaccaaagatgtgaccaaggccatggatgagaagaaatttgacgaagccctgaagctgagaggccggagcttcatgaacaactgggaggtgtacaagcttctagctcatgtcagacccccggtatctaagagtggttcgcacacagtggctgtgatgaacgtgggggctccggctgcaggcatgaatgctgctgttcgctccactgtgaggattggccttatccagggcaaccgagtgctcgttgtccatgatggtttcgagggcctggccaaggggcagatagaggaagctggctggagctatgttgggggctggactggccaaggtggctctaaacttgggactaaaaggactctacccaagaagagctttgaacagatcagtgccaatataactaagtttaacattcagggccttgtcatcattgggggctttgaggcttacacagggggcctggaactgatggagggcaggaagcagtttgatgagctctgcatcccatttgtggtcattcctgctacagtctccaacaatgtccctggctcagacttcagcgttggggctgacacagcactcaatactatctgcacaacctgtgaccgcatcaagcagtcagcagctggcaccaagcgtcgggtgtttatcattgagactatgggtggctactgtggctacctggctaccatggctggactggcagctggggccgatgctgcctacatttttgaggagcccttcaccattcgagacctgcaggcaaatgttgaacatctggtgcaaaagatgaaaacaactgtgaaaaggggcttggtgttaaggaatgaaaagtgcaatgagaactataccactgacttcattttcaacctgtactctgaggaggggaagggcatcttcgacagcaggaagaatgtgcttggtcacatgcagcagggtgggagcccaaccccatttgataggaattttgccactaagatgggcgccaaggctatgaactggatgtctgggaaaatcaaagagagttaccgtaatgggcggatctttgccaatactccagattcgggctgtgttctggggatgcgtaagagggctctggtcttccaaccagtggctgagctgaaggaccagacagattttgagcatcgaatccccaaggaacagtggtggctgaaactgaggcccatcctcaaaatcctagccaagtacgagattgacttggacacttcagaccatgcccacctggagcacatcacccggaagcggtccggggaagctgccgtctaaacctctctggagtgaggggaatagattacctgatcatggtcagctcacaccctaataagtccacatcttctcagtgttttagctgtttttttcattaggtttccttttattctgtaccttgcagccatgaccagttctggccaggagctggaggagcaggcagtgggtgggagctccttttaggtagaatttaacatgacttctgccccagctttatctgtcacacaaggctgggcacctctagtgctactgctagatatcacttactcagttagaattttcctaaaaataagctttatttatttctttgtgataacaaagagtcttggttcctctactacttttactacagtgacaaattgtaactacactaataaatgccaactggtcactgtg

SEQ ID NO: 65132 - DNA, 2867 bp, Artificial Sequence
  derived and/or modified sequence
agacttggtatagtgggagagcctgactgaggtggctctagccagtctaattgccgttcctttagctagtggcatcttgattcctgctgtgtcttaactgaccattgtcttaaattctagagtggatcatgacccatgaagagcaccatgcagccaaaaccctggggattggcaaagccattgctgtcttaacctctggtggagatgcccaaggtatgaatgctgctgtcagggctgtggttcgagttggtatcttcaccggtgcccgtgtcttctttgtccatgagggttatcaaggcctggtggatggtggagatcacatcaaggaagccacctgggagagcgtttcgatgatgcttcagctgggaggcacggtgattggaagtgcccggtgcaaggactttcgggaacgagaaggacgactccgagctgcctacaacctggtgaagcgtgggatcaccaatctctgtgtcattgggggtgatggcagcctcactggggctgacaccttccgttctgagtggagtgacttgttgagtgacctccagaaagcaggtaagatcacagatgaggaggctacgaagtccagctacctgaacattgtgggcctggttgggtcaattgacaatgacttctgtggcaccgatatgaccattggcactgactctgccctgcatcggatcatggaaattgtagatgccatcactaccactgcccagagccaccagaggacatttgtgttagaagtaatgggccgccactgtggatacctggcccttgtcacctctctgtcctgtggggccgactgggtttttattcctgaatgtccaccagatgacgactgggaggaacacctttgtcgccgactcagcgagacaaggacccgtggttctcgtctcaacatcatcattgtggctgagggtgcaattgacaagaatggaaaaccaatcacctcagaagacatcaagaatctggtggttaagcgtctgggatatgacacccgggttactgtcttggggcatgtgcagaggggtgggacgccatcagcctttgacagaattctgggcagcaggatgggtgtggaagcagtgatggcacttttggaggggaccccagataccccagcctgtgtagtgagcctctctggtaaccaggctgtgcgcctgcccctcatggaatgtgtccaggtgaccaaagatgtgaccaaggccatggatgagaagaaatttgacgaagccctgaagctgagaggccggagcttcatgaacaactgggaggtgtacaagcttctagctcatgtcagacccccggtatctaagagtggttcgcacacagtggctgtgatgaacgtgggggctccggctgcaggcatgaatgctgctgttcgctccactgtgaggattggccttatccagggcaaccgagtgctcgttgtccatgatggtttcgagggcctggccaaggggcagatagaggaagctggctggagctatgttgggggctggactggccaaggtggctctaaacttgggactaaaaggactctacccaagaagagctttgaacagatcagtgccaatataactaagtttaacattcagggccttgtcatcattgggggctttgaggcttacacagggggcctggaactgatggagggcaggaagcagtttgatgagctctgcatcccatttgtggtcattcctgctacagtctccaacaatgtccctggctcagacttcagcgttggggctgacacagcactcaatactatctgcacaacctgtgaccgcatcaagcagtcagcagctggcaccaagcgtcgggtgtttatcattgagactatgggtggctactgtggctacctggctaccatggctggactggcagctggggccgatgctgcctacatttttgaggagcccttcaccattcgagacctgcaggcaaatgttgaacatctggtgcaaaagatgaaaacaactgtgaaaaggggcttggtgttaaggaatgaaaagtgcaatgagaactataccactgacttcattttcaacctgtactctgaggaggggaagggcatcttcgacagcaggaagaatgtgcttggtcacatgcagcagggtgggagcccaaccccatttgataggaattttgccactaagatgggcgccaaggctatgaactggatgtctgggaaaatcaaagagagttaccgtaatgggcggatctttgccaatactccagattcgggctgtgttctggggatgcgtaagagggctctggtcttccaaccagtggctgagctgaaggaccagacagattttgagcatcgaatccccaaggaacagtggtggctgaaactgaggcccatcctcaaaatcctagccaagtacgagattgacttggacacttcagaccatgcccacctggagcacatcacccggaagcggtccggggaagctgccgtctaaacctctctggagtgaggggaatagattacctgatcatggtcagctcacaccctaataagtccacatcttctcagtgttttagctgtttttttcattaggtttccttttattctgtaccttgcagccatgaccagttctggccaggagctggaggagcaggcagtgggtgggagctccttttaggtagaatttaacatgacttctgccccagctttatctgtcacacaaggctgggcacctctagtgctactgctagatatcacttactcagttagaattttcctaaaaataagctttatttatttctttgtgataacaaagagtcttggttcctctactacttttactacagtgacaaattgtaactacactaataaatgccaactggtcactgtg

SEQ ID NO: 65133 - DNA, 594 bp, Artificial Sequence
  derived and/or modified sequence
tttctgatggtggcactagcgatatcacatctcagggagataccacagagtaggagagttggagaaatgtttacgtgagacgcagaagtagtcaagaaatatcactcgggtctcaaggaaggcgggagatgaagccggtaccacagaaagccgagcttcccggtgaaaacagctctccccagagaagacccagctctggcgggaaagccccggaatcgcaaccggcctttccccaaagtggatcatgacccatgaagagcaccatgcagccaaaaccctggggattggcaaagccattgctgtcttaacctctggtggagatgcccaaggtatgaatgctgctgtcagggctgtggttcgagttggtatcttcaccggtgcccgtgtcttctttgtccatgagggttatcaaggcctggtggatggtggagatcacatcaaggaagccacctgggagagcgtttcgatgatgcttcagctgggaggcacggtgattggaagtgcccggtgcaaggactttcgggaacgagaaggacgactccgagctgcctacaacctggtgaagcgtgggatcaccaatctctgtgtcattgg

SEQ ID NO: 65134 - DNA, 2343 bp, Artificial Sequence
  derived and/or modified sequence
atgacccacgaggagcaccatgctgcgaaaaccctcggaattggcaaagcgattgccgtgctgaccagcggtggcgatgctcagggaatgaacgcggcagttcgcgcagtggtgcgggtaggaatatttaccggcgctagggtgttcttcgtgcacgagggctaccagggattggtcgacgggggtgatcatatcaaagaagcgacctgggaaagtgtcagcatgatgttacagttgggaggaaccgttatcggtagtgctagatgcaaagacttccgcgagcgggaaggtaggctacgggcagcatataacctcgtgaagcggggaattactaacctgtgcgtaatcggtggagatggaagtctaacaggagctgacacctttcgaagcgagtggtcagatctgttgagtgatcttcagaaggctggcaagatcacagatgaggaagccacaaagtcatcctacctgaacattgtgggcttagttggaagcatcgacaatgacttttgtggcactgacatgacaatagggaccgatagcgctctgcatcggattatggaaatcgttgatgccatcactacaacggcccagagccatcaacgcaccttcgtgttggaggtgatgggtcggcattgtgggtatctcgccctcgttacaagcctgagttgcggggcagattgggtatttatcccagaatgtccaccagacgatgactgggaagaacatttgtgccgacgactgtctgagacaagaacccgagggagccgcctgaatatcatcattgtggcagagggagccatcgataagaatgggaagcctatcacctcagaggatattaaaaaccttgtggtgaagaggctgggctatgatacccgcgttactgttctgggtcacgtgcaacggggtggcactccttctgcgtttgaccgtatcttgggatcacgtatgggagtggaagcggtgatggcgcttttggagggaacaccagatacgcctgcgtgtgtggtgagcctgtcaggcaaccaagccgtgcggctgcccctaatggagtgtgtgcaagtcaccaaggacgtgactaaggctatggatgagaaaaaattcgacgaggccctgaagctgcggggacgaagtttcatgaataactgggaagtgtataaactcctagcacatgtcagaccaccggtgtccaaatcaggttcccacacggtggccgtgatgaacgttggagcccctgctgctggtatgaatgcggcagtccgcagcacagtgagaatcggacttatccagggtaacagggtgttagtggttcacgacggctttgaaggtcttgcaaagggccaaattgaggaggccggatggagttacgtgggaggctggaccggacaaggcggatcaaagctaggaacgaagcgaaccctgcccaaaaaaagctttgaacaaatcagtgccaacattaccaagtttaacatccagggcctggtgatcattggagggtttgaggcgtataccgggggacttgaattaatggaaggacgcaaacagttcgatgagctgtgcattcctttcgtggtgatcccagctactgtcagcaataatgtaccaggatcggattttagtgtgggggctgatactgccctgaacactatctgcactacctgtgacagaattaaacagagcgcggctgggacaaagcgcagggtttttattattgagacaatgggcggatactgcgggtatctggccacaatggctggactggccgcaggggctgatgcggcttacatcttcgaggaacctttcacaattagagatctacaggcaaacgtcgagcatttagtgcagaagatgaagaccactgtgaagcgaggacttgtattacgcaacgagaaatgtaacgagaattacactaccgattttatattcaacctgtattccgaggaggggaaaggtatcttcgatagtcgtaaaaatgtcttggggcatatgcagcaaggcggttccccaactccgtttgataggaattttgccacgaaaatgggtgcaaaggccatgaattggatgagcggcaagattaaggagtcttataggaacggacggatctttgcaaacaccccggattctgggtgcgttctcggcatgcgcaagcgcgctctggtcttccagcccgtcgccgaattgaaagaccagactgattttgaacacaggattccaaaagaacagtggtggctgaaactgcggccaatattgaaaattctggcaaagtacgagattgatctggacacgtcagaccatgcacacctggagcacatcaccaggaagaggtctggcgaagctgccgtttag

SEQ ID NO: 65135 - DNA, 2556 bp, Artificial Sequence
  derived and/or modified sequence
atgcacaaggatgaatttcatctcaaatttttcatgtgcgtcatccaaagccggcagctggtgcgcaccccccagcgcacagccggagaggcttcaaccagttctatgttaatcccaaaaccaccacccaaaactgacatcctcaaatcacttgatactatggatgaccccgatactgttgggtcgatacccgtctttaaaacggaatggatcatgacccacgaggaacatcacgcagccaagacccttggcatcgggaaagcaattgccgtgttgacaagtggtggagacgcacagggaatgaatgcagcggtccgggcagttgtccgcgtcggcattttcactggcgctcgagtgttctttgtgcatgaagggtatcagggcctggttgatggcggtgaccatattaaagaggctacatgggaatccgtgagcatgatgctacagctgggaggcaccgtcattggaagcgcaagatgtaaggattttcgggaacgcgaagggaggctgcgggctgcttacaacttggtgaagcggggtatcactaatctgtgcgtgatagggggtgacggaagtctcactggagcggatacattccgtagtgagtggagcgatctgctgagcgacttgcagaaagcaggaaaaataactgacgaagaggccactaagtcctcttacttaaatatcgttggtcttgtgggcagtattgacaacgacttctgtgggacagatatgaccataggcacagatagtgccctgcacaggatcatggagatagtggatgccattaccactacggctcagtcccaccagcgtacttttgtgctggaagttatggggcgtcactgcgggtatttagctttggttacatctctgtcttgcggcgcagactgggtattcattcctgaatgcccccctgatgacgactgggaggagcacctgtgtaggagactctctgagactcgaacacgcggaagtcgtttgaacatcataatcgtggccgagggcgcaatcgacaaaaatggcaaacctattacctcagaggacatcaaaaatcttgttgtaaagagactgggctatgacacccgggtgacagtgctaggccacgtccaacggggaggaacaccctccgcatttgacaggatcttagggtcccgaatgggcgtggaggctgtgatggctttactggaaggaacccctgatacaccagcctgtgtcgtgagcctttctggaaatcaagctgtaaggctgccactcatggagtgcgttcaggtgactaaagatgtgacaaaagccatggatgaaaaaaaattcgacgaagcactcaagctccgcggtagatccttcatgaacaactgggaggtgtacaagttattggcccatgtcaggccacctgtcagcaagagcggcagccatacagtggcagtcatgaatgtgggtgcgcctgcggctgggatgaacgcagctgtacggagcactgtgaggattggtctgattcagggcaacagggtcctagtggtgcacgatggctttgagggcctagcaaaagggcagatcgaggaagcagggtggtcatatgtgggtggctggaccggacagggaggtagtaagctgggaaccaagcgcacactcccaaagaagagtttcgagcagatcagcgccaatatcacaaagttcaatatacaaggtcttgtgattatcggagggtttgaggcgtatacggggggactggaactgatggaaggtcgaaagcagtttgatgagttatgcatccccttcgttgtaataccagctacagtaagcaataacgttcccggatctgacttctcagtgggggcagataccgctcttaacacgatctgtaccacgtgcgatcgtataaagcagagcgccgcagggaccaaacgccgtgtgttcattatcgaaactatggggggatactgtggctaccttgccaccatggctggccttgccgcaggtgctgacgccgcttacattttcgaagagcctttcactataagagacctgcaggcaaacgtggagcatttggtgcaaaaaatgaaaacaactgtcaaaagggggctggttctccggaatgagaagtgtaacgaaaactacaccacagacttcatcttcaacctgtattcagaggaaggtaagggcatatttgattcccggaaaaatgtgttagggcacatgcagcagggcggaagcccaaccccgttcgatcgcaattttgccacaaagatgggggctaaggctatgaattggatgtccgggaagattaaagaatcctaccgtaatggcaggatcttcgccaatactccagactccgggtgtgtgctggggatgcggaagagagcactggtttttcagcccgtggctgaattgaaagaccagacagacttcgagcatcggatcccaaaggagcaatggtggctcaagttgagaccaatactgaagatcctggccaagtatgaaatcgacctagatacctctgatcacgcgcacttagagcacattacgcgcaagcgctctggagaagccgctgtctag

SEQ ID NO: 65136 - DNA, 2343 bp, Artificial Sequence
  derived and/or modified sequence
atgactcacgaggaacatcatgctgctaagacccttgggattggtaaagccatcgcggtgctaactagtggcggagacgctcaggggatgaacgctgctgtaagggcagtggtcagagtgggtatttttacaggggctcgggtgttcttcgtacacgaaggctaccaagggctcgtagatgggggagaccacatcaaagaagcaacatgggagtctgtgtccatgatgctacaactgggcggtaccgtgattgggtcagccaggtgtaaggattttagggaaagggagggcaggctgcgggctgcatacaacctggttaagcggggaattaccaacctctgcgtgattggtggagacggatcccttactggggcagatacatttcgatccgagtggtctgacctgctcagcgatctgcaaaaggctggaaagatcacggacgaagaggcaaccaaatcaagctaccttaatatagtgggcttagtcggctcgatagacaacgacttttgcggaaccgacatgaccatcggaacagactcagccttacatagaattatggagatagtcgacgcaatcactaccacggctcagtcacaccagcgaacctttgtactggaagtcatgggcaggcattgtggttacctggcactggtgacgtccctttcttgcggtgccgactgggtgtttataccggaatgcccccctgacgacgactgggaagaacacctctgtcgtagactctctgaaacgcgaacccgtggctctcgccttaacattataattgtggccgaaggagcaatcgataagaatggcaaaccaattacgtctgaagacatcaaaaatcttgtcgttaaacgcctaggatacgatactcgggtaactgtcctcggtcatgtgcaaagaggaggaacgcctagtgccttcgatagaattctgggtagccgtatgggggttgaagccgttatggccttactggaaggcacacccgatacccccgcatgcgttgtgagcctctctggcaaccaggcggtcaggttgccgttaatggagtgcgtccaagtgaccaaagacgtcacgaaagcaatggatgagaagaagttcgatgaggctcttaagctcagaggaaggtctttcatgaataattgggaggtctataaactgctggcacacgttcgacccccagtcagcaaatctggaagccacacagtcgcggttatgaatgttggcgcacccgctgcgggaatgaacgccgctgtgcgctcgactgtcaggatcggcttgatccaggggaatcgagtgctggtggttcacgatggtttcgaaggacttgctaaaggccaaatagaggaagccggttggagctatgtgggcggatggactggccagggaggatccaagctcgggacaaagcgtacactacctaaaaagtccttcgaacagatctcagcgaatatcacaaaattcaatattcaagggctggtcatcattggagggtttgaagcctacactggcggtcttgagctcatggagggcaggaagcagtttgatgaactttgtattccctttgtggttatacccgcaaccgtctctaacaatgtgccaggatccgatttttccgtcggcgcagatacagccttgaatacgatatgtactacttgtgaccggattaagcaaagcgctgcgggaactaaaagacgggtgttcattatcgagacaatgggagggtactgcgggtacctggcgacgatggcaggattggcggcaggggctgacgcagcgtacattttcgaggagccttttactattagagatctgcaagcaaacgtggagcatctcgtccagaagatgaaaactacagtaaagaggggactggtgctgcgaaatgagaagtgtaacgaaaactatacaactgatttcatctttaacctctactcagaagaagggaaaggtatcttcgactcgaggaaaaacgtactcggccatatgcagcagggtgggagcccaacaccctttgacagaaactttgctactaaaatgggggcaaaggccatgaattggatgagcggaaaaattaaagaatcttatcggaacggcagaatatttgccaacacccctgattctggctgtgtgcttggaatgagaaaacgcgctctggtattccagccagtggctgagttaaaagaccagacggactttgaacatcgtattccgaaagaacaatggtggttgaaactgcggccaattcttaaaatcctcgcaaaatacgagatcgatctggacacgtcagatcacgctcacctggaacatattaccagaaagagatctggagaggccgcagtttag

SEQ ID NO: 65137 - DNA, 2343 bp, Artificial Sequence
  derived and/or modified sequence
atgacgcacgaggagcaccacgccgcaaagacactgggtattggcaaagctatcgcagttctgacgtccggaggggacgcccagggcatgaacgccgcagtgagagccgttgtgcgcgtaggcatttttaccggagccagagtgtttttcgtccacgaggggtaccagggcttagtggacggaggcgaccatattaaagaagcaacttgggaaagcgtgtctatgatgctgcagttaggtggcacagtcattggctccgccaggtgcaaggacttccgggagcgcgaggggagactgcgcgctgcatataacctggtaaagcgcggaataacaaatttatgcgtgatcggaggggacggttcccttactggggctgatacttttaggtccgagtggtcagatttgctgtccgaccttcagaaggctgggaagattactgacgaagaagccaccaaaagtagctacctaaatatagtcgggctggtgggctctatagataacgatttctgtggaactgatatgaccatcggtacggattccgcactccatcgtattatggagatcgtggatgccatcacaaccactgcccagtcgcatcagagaacattcgtgctcgaagtcatggggagacactgcggctatctcgctctcgtgaccagtctgtcttgtggggcagactgggtcttcatcccagagtgccctccggatgacgattgggaagagcatctttgcaggcgcttatccgaaactaggactagaggttcacggctgaacatcattatcgtggctgagggcgctatcgataagaatgggaaacccatcacaagtgaagacattaagaacctcgtcgtcaagcggttggggtatgatacccgcgtgactgtgctcggacatgtgcagcggggtgggactccaagtgcctttgaccgcatcctgggatcaagaatgggcgtggaggccgtaatggctctgctggagggaacaccagacacacctgcttgcgtagtgtctttatctggcaaccaggctgtaagactgccgctgatggagtgtgtgcaggtgactaaagacgtgaccaaagcgatggacgaaaagaagtttgacgaagctctaaaactgaggggaaggtcattcatgaataactgggaggtctacaaactcctggctcacgtgcgccctcccgtgagcaagtctggcagccacacagtcgccgttatgaacgtaggagctcccgcagctggtatgaacgctgcagttcggagtaccgtgagaattgggctaattcaaggcaatcgcgtgctggtggtgcacgatggctttgagggtctcgccaaaggccaaattgaagaggctggatggtcctatgtcggaggatggactggacagggaggaagcaagctcgggacaaagcgcacccttcccaagaagtcttttgaacagattagcgccaacatcaccaagtttaacatccaggggctggtgatcatcggaggtttcgaagcctacacaggcggattagaattgatggagggacgaaaacagtttgatgagctctgtatccctttcgttgtgatccccgctaccgtaagcaacaatgtccccggatctgactttagtgttggggcagataccgccctgaatacaatttgtaccacatgcgacaggattaaacaatcagcagcagggaccaagaggagagtgttcattatagagactatgggagggtactgtggctacctagctaccatggccggtcttgctgcaggcgcagacgccgcatatatatttgaggagcctttcacaatccgggacctccaagcaaacgtagagcatctggtgcaaaaaatgaagactaccgtgaaacgagggctggttcttagaaatgaaaaatgcaacgagaattacacaaccgactttatcttcaacttatactcggaggaaggcaagggcattttcgatagccggaaaaacgttctggggcacatgcagcagggtgggagccccaccccattcgaccgcaattttgctaccaaaatgggagctaaggccatgaattggatgagtggaaagattaaagagagctatcgtaatggaaggatctttgcaaacacccctgatagcgggtgtgtcttaggcatgaggaaacgagccctagtcttccagccagtagctgagctgaaggatcagacagattttgaacaccgtatccccaaagagcagtggtggctgaagttacgacccattctcaaaattctcgccaagtacgagattgacctggacaccagtgaccatgcacacctggagcacattactcggaaaagatccggagaggccgcagtgtag

SEQ ID NO: 65138 - DNA, 2343 bp, Artificial Sequence
  derived and/or modified sequence
atgacccacgaggagcaccacgccgccaagaccctgggcatcggcaaggccatcgccgtgctgaccagcggcggcgacgcccagggcatgaacgccgccgtgagagccgtggtgagagtgggcatcttcaccggcgccagagtgttcttcgtgcacgagggctaccagggcctggtggacggcggcgaccacatcaaggaggccacctgggagagcgtgagcatgatgctgcagctgggcggcaccgtgatcggcagcgccagatgcaaggacttcagagagagagagggcagactgagagccgcctacaacctggtgaagagaggcatcaccaacctgtgcgtgatcggcggcgacggcagcctgaccggcgccgacaccttcagaagcgagtggagcgacctgctgagcgacctgcagaaggccggcaagatcaccgacgaggaggccaccaagagcagctacctgaacatcgtgggcctggtgggcagcatcgacaacgacttctgcggcaccgacatgaccatcggcaccgacagcgccctgcacagaatcatggagatcgtggacgccatcaccaccaccgcccagagccaccagagaaccttcgtgctggaggtgatgggcagacactgcggctacctggccctggtgaccagcctgagctgcggcgccgactgggtgttcatccccgagtgcccccccgacgacgactgggaggagcacctgtgcagaagactgagcgagaccagaaccagaggcagcagactgaacatcatcatcgtggccgagggcgccatcgacaagaacggcaagcccatcaccagcgaggacatcaagaacctggtggtgaagagactgggctacgacaccagagtgaccgtgctgggccacgtgcagagaggcggcacccccagcgccttcgacagaatcctgggcagcagaatgggcgtggaggccgtgatggccctgctggagggcacccccgacacccccgcctgcgtggtgagcctgagcggcaaccaggccgtgagactgcccctgatggagtgcgtgcaggtgaccaaggacgtgaccaaggccatggacgagaagaagttcgacgaggccctgaagctgagaggcagaagcttcatgaacaactgggaggtgtacaagctgctggcccacgtgagaccccccgtgagcaagagcggcagccacaccgtggccgtgatgaacgtgggcgcccccgccgccggcatgaacgccgccgtgagaagcaccgtgagaatcggcctgatccagggcaacagagtgctggtggtgcacgacggcttcgagggcctggccaagggccagatcgaggaggccggctggagctacgtgggcggctggaccggccagggcggcagcaagctgggcaccaagagaaccctgcccaagaagagcttcgagcagatcagcgccaacatcaccaagttcaacatccagggcctggtgatcatcggcggcttcgaggcctacaccggcggcctggagctgatggagggcagaaagcagttcgacgagctgtgcatccccttcgtggtgatccccgccaccgtgagcaacaacgtgcccggcagcgacttcagcgtgggcgccgacaccgccctgaacaccatctgcaccacctgcgacagaatcaagcagagcgccgccggcaccaagagaagagtgttcatcatcgagaccatgggcggctactgcggctacctggccaccatggccggcctggccgccggcgccgacgccgcctacatcttcgaggagcccttcaccatcagagacctgcaggccaacgtggagcacctggtgcagaagatgaagaccaccgtgaagagaggcctggtgctgagaaacgagaagtgcaacgagaactacaccaccgacttcatcttcaacctgtacagcgaggagggcaagggcatcttcgacagcagaaagaacgtgctgggccacatgcagcagggcggcagccccacccccttcgacagaaacttcgccaccaagatgggcgccaaggccatgaactggatgagcggcaagatcaaggagagctacagaaacggcagaatcttcgccaacacccccgacagcggctgcgtgctgggcatgagaaagagagccctggtgttccagcccgtggccgagctgaaggaccagaccgacttcgagcacagaatccccaaggagcagtggtggctgaagctgagacccatcctgaagatcctggccaagtacgagatcgacctggacaccagcgaccacgcccacctggagcacatcaccagaaagagaagcggcgaggccgccgtgtag

SEQ ID NO: 65139 - DNA, 2556 bp, Artificial Sequence
  derived and/or modified sequence
atgcacaaggacgagttccacctgaagttcttcatgtgcgtgatccagagcagacagctggtgagaaccccccagagaaccgccggcgaggccagcaccagcagcatgctgatccccaagcccccccccaagaccgacatcctgaagagcctggacaccatggacgaccccgacaccgtgggcagcatccccgtgttcaagaccgagtggatcatgacccacgaggagcaccacgccgccaagaccctgggcatcggcaaggccatcgccgtgctgaccagcggcggcgacgcccagggcatgaacgccgccgtgagagccgtggtgagagtgggcatcttcaccggcgccagagtgttcttcgtgcacgagggctaccagggcctggtggacggcggcgaccacatcaaggaggccacctgggagagcgtgagcatgatgctgcagctgggcggcaccgtgatcggcagcgccagatgcaaggacttcagagagagagagggcagactgagagccgcctacaacctggtgaagagaggcatcaccaacctgtgcgtgatcggcggcgacggcagcctgaccggcgccgacaccttcagaagcgagtggagcgacctgctgagcgacctgcagaaggccggcaagatcaccgacgaggaggccaccaagagcagctacctgaacatcgtgggcctggtgggcagcatcgacaacgacttctgcggcaccgacatgaccatcggcaccgacagcgccctgcacagaatcatggagatcgtggacgccatcaccaccaccgcccagagccaccagagaaccttcgtgctggaggtgatgggcagacactgcggctacctggccctggtgaccagcctgagctgcggcgccgactgggtgttcatccccgagtgcccccccgacgacgactgggaggagcacctgtgcagaagactgagcgagaccagaaccagaggcagcagactgaacatcatcatcgtggccgagggcgccatcgacaagaacggcaagcccatcaccagcgaggacatcaagaacctggtggtgaagagactgggctacgacaccagagtgaccgtgctgggccacgtgcagagaggcggcacccccagcgccttcgacagaatcctgggcagcagaatgggcgtggaggccgtgatggccctgctggagggcacccccgacacccccgcctgcgtggtgagcctgagcggcaaccaggccgtgagactgcccctgatggagtgcgtgcaggtgaccaaggacgtgaccaaggccatggacgagaagaagttcgacgaggccctgaagctgagaggcagaagcttcatgaacaactgggaggtgtacaagctgctggcccacgtgagaccccccgtgagcaagagcggcagccacaccgtggccgtgatgaacgtgggcgcccccgccgccggcatgaacgccgccgtgagaagcaccgtgagaatcggcctgatccagggcaacagagtgctggtggtgcacgacggcttcgagggcctggccaagggccagatcgaggaggccggctggagctacgtgggcggctggaccggccagggcggcagcaagctgggcaccaagagaaccctgcccaagaagagcttcgagcagatcagcgccaacatcaccaagttcaacatccagggcctggtgatcatcggcggcttcgaggcctacaccggcggcctggagctgatggagggcagaaagcagttcgacgagctgtgcatccccttcgtggtgatccccgccaccgtgagcaacaacgtgcccggcagcgacttcagcgtgggcgccgacaccgccctgaacaccatctgcaccacctgcgacagaatcaagcagagcgccgccggcaccaagagaagagtgttcatcatcgagaccatgggcggctactgcggctacctggccaccatggccggcctggccgccggcgccgacgccgcctacatcttcgaggagcccttcaccatcagagacctgcaggccaacgtggagcacctggtgcagaagatgaagaccaccgtgaagagaggcctggtgctgagaaacgagaagtgcaacgagaactacaccaccgacttcatcttcaacctgtacagcgaggagggcaagggcatcttcgacagcagaaagaacgtgctgggccacatgcagcagggcggcagccccacccccttcgacagaaacttcgccaccaagatgggcgccaaggccatgaactggatgagcggcaagatcaaggagagctacagaaacggcagaatcttcgccaacacccccgacagcggctgcgtgctgggcatgagaaagagagccctggtgttccagcccgtggccgagctgaaggaccagaccgacttcgagcacagaatccccaaggagcagtggtggctgaagctgagacccatcctgaagatcctggccaagtacgagatcgacctggacaccagcgaccacgcccacctggagcacatcaccagaaagagaagcggcgaggccgccgtgtag

SEQ ID NO: 65140 - DNA, 534 bp, Artificial Sequence
  derived and/or modified sequence
atgactcacgaagagcaccacgccgctaaaactctgggaattggcaaagcaattgcagtgctcacgagtggaggagacgcccaaggcatgaacgcggcagtgagatctacagtgcgcataggtctgatccaaggaaatcgagtgttggttgtacacgacgggtttgaaggtctggccaaggggcaaatcgaggaagccggctggtcttatgttggcggttggacaggacaaggcggatctaagctaggcaccaaaagaacgctaccgaaaaagagcttcgagcagatttccgcaaatataacaaagtttaacatacagggcctggtgataatcggcggctttgaggcttacacgggcggcctagaactgatggaagggcgtaagcaatttgatgagttgtgtatcccttttgtcgtgataccagccacagtttctaataatgtccctgggtccgacttcagcgtcggagccgacaccgctctcaacaccatttgtaccacctgtgacaggatcaagcaatcagccgccggatag

SEQ ID NO: 65141 - DNA, 354 bp, Artificial Sequence
  derived and/or modified sequence
atgacccatgaagagcatcacgctgccaaaacactgggaatcggcaaagcgattgcagtgctcaccagtggcggagacgcccagggcatgaacgcggccgttagggctgtcgtacgcgtcgggatctttactggggctagagtgttttttgtccacgaaggctaccaagggctggtggacggcggtgaccatatcaaggaggcgacttgggagtccgtgagcatgatgctccagcttggagggactgtgatcgggagcgcccgttgcaaagattttagggaacgagaaggacgcctgcgggccgcatacaacctggtaaaacggggcatcacgaatctctgcgtcattgggtag

SEQ ID NO: 65142 - DNA, 486 bp, Artificial Sequence
  derived and/or modified sequence
atgacacacgaagagcaccacgccgcaaaaactttgggcatcgggaaggccatcgctgtgttgacctctgggggagatgctcagggcatgaacgctgctgttagggccgttgtgcgggtgggtatcttcacaggggctcgggttttctttgtacatgagggttatcagggtctggtggatgggggagaccatatcaaggaagccacctgggaatccgtatctatgatgctccagctcggtggaaccgtgatcggatctgctagatgtaaagactttagggagcgtgaaggccgcctcagagcagcctacaatctagttaagagggggattacaaacctttgcgttatagggggggacggctctctcacaggcgccgacacattccggtccgaatggtcagacctgctgtctgatcttcagaaggctggcaaaataacagacgaggaagctaccaaaagttcgtatttaaacattgtcggactttag

SEQ ID NO: 65143 - DNA, 474 bp, Artificial Sequence
  derived and/or modified sequence
atgacccatgaggaacatcatgccgccaaaaccctgggaatcggcaaagccattgcagtattaacaagtggaggcgacgcccagggcatgaacgcagcagtccgtgctgtggtgagggtgggcatctttactggggcgagagtcttttttgtgcatgagggataccagggccttgtcgacggcggtgaccacatcaaagaagctacatgggaaagtgttagtatgatgctgcagctgggtggtaccgtaatcggttccgcccggtgtaaggactttagagagcgagagggtcgacttcgggctgcatacaacctcgtcaaacgagggatcaccaatctatgtgtcatcggaggcgatgggtccttaacgggcgccgatactttccggtccgaatggtccgacctcctgagtgatctgcagaaagctggtaaaatcacagacgaggaagcaaccaaatcttcttatctgaattag

SEQ ID NO: 65144 - DNA, 258 bp, Artificial Sequence
  derived and/or modified sequence
atgactcacgaagaacatcatgcagccaagacgctgggtattgggaaggctattgcggtgctgacaagcggaggagatgcacagggaatgaacgccgcggtcagagcagtggtgagggtcggtatctttaccggagctcgagtcttttttgtgcacgagggctaccaaggactggtggacggcggcgaccacattaaagaagccacctgggaaagtgtcagcatgatgctgcaactcggagggacggttattggctag

SEQ ID NO: 65145 - DNA, 420 bp, Artificial Sequence
  derived and/or modified sequence
atgacgcacgaggagcatcatgccgccaagacactcggcatcggaaaagccatcgccgtcttgacatccgggggcgatgcccaagggatgaacgccgccgtccgcgctgtggtcagggttggaattttcaccggagcgcgcgtgttttttgtgcatgagggataccaaggactggtcgatggaggtgatcacattaaggaagcaacctgggagagtgtatccatgatgctgcaacttggaggaaccgtgatcggcagtgcccgctgcaaggactttagagagcgtgaagggcgcctccgagctgcctacaatctagtgaagcgaggcataaccaatctgtgcgtcatcggcggcgatgggagcctgacaggggctgacacatttaggtccgaatggtcagatctcctgtctgatctgtag

SEQ ID NO: 65146 - DNA, 534 bp, Artificial Sequence
  derived and/or modified sequence
atgacccatgaggagcaccacgccgccaagaccctgggcatcggcaaggccatcgctgtgctgaccagcggaggagatgcccagggcatgaatgctgctgtgcgcagcacagtgcgcatcggcctcatccagggcaacagagtgctggtggtgcatgatggctttgagggcctggccaagggccagatcgaggaggccggctggagctatgtgggcggctggacaggccagggcggcagcaagctgggcaccaagaggaccctgcccaagaagagctttgagcagatcagcgccaacatcaccaagttcaacatccagggcctggtgatcattggaggctttgaggcctacacaggaggcctggagctgatggagggcaggaagcagtttgatgagctgtgcatcccctttgtggtgatcccagccaccgtgagcaacaacgtgcccggcagtgacttctctgtgggcgctgacacagccctgaacaccatctgcaccacctgtgaccgcatcaagcagagcgctgctggatag

SEQ ID NO: 65147 - DNA, 354 bp, Artificial Sequence
  derived and/or modified sequence
atgacccatgaggagcaccacgccgccaagaccctgggcatcggcaaggccatcgctgtgctgaccagcggaggagatgcccagggcatgaatgctgctgtgcgggctgtggtgcgggtgggcatcttcaccggggcccgggtcttctttgtgcatgagggctaccagggcctggtggatggaggagaccacatcaaggaggccacctgggagagcgtgtccatgatgctgcagctgggcggcaccgtcatcggcagcgcccgctgcaaggacttccgggagcgggagggccgcctgcgggccgcctacaacctggtgaagaggggcatcaccaacctgtgtgtgattggatag

SEQ ID NO: 65148 - DNA, 486 bp, Artificial Sequence
  derived and/or modified sequence
atgacccatgaggagcaccacgccgccaagaccctgggcatcggcaaggccatcgctgtgctgaccagcggaggagatgcccagggcatgaatgctgctgtgcgggctgtggtgcgggtgggcatcttcaccggggcccgggtcttctttgtgcatgagggctaccagggcctggtggatggaggagaccacatcaaggaggccacctgggagagcgtgtccatgatgctgcagctgggcggcaccgtcatcggcagcgcccgctgcaaggacttccgggagcgggagggccgcctgcgggccgcctacaacctggtgaagaggggcatcaccaacctgtgtgtgattggaggagatggcagcctgactggagctgacaccttccgctctgagtggagcgacctgctgagtgacctgcagaaggccggcaagatcacagatgaggaggccaccaagagcagctacctgaacatcgtgggcctgtag

SEQ ID NO: 65149 - DNA, 474 bp, Artificial Sequence
  derived and/or modified sequence
atgacccatgaggagcaccacgccgccaagaccctgggcatcggcaaggccatcgctgtgctgaccagcggaggagatgcccagggcatgaatgctgctgtgcgggctgtggtgcgggtgggcatcttcaccggggcccgggtcttctttgtgcatgagggctaccagggcctggtggatggaggagaccacatcaaggaggccacctgggagagcgtgtccatgatgctgcagctgggcggcaccgtcatcggcagcgcccgctgcaaggacttccgggagcgggagggccgcctgcgggccgcctacaacctggtgaagaggggcatcaccaacctgtgtgtgattggaggagatggcagcctgactggagctgacaccttccgctctgagtggagcgacctgctgagtgacctgcagaaggccggcaagatcacagatgaggaggccaccaagagcagctacctgaactag

SEQ ID NO: 65150 - DNA, 258 bp, Artificial Sequence
  derived and/or modified sequence
atgacccatgaggagcaccacgccgccaagaccctgggcatcggcaaggccatcgctgtgctgaccagcggaggagatgcccagggcatgaatgctgctgtgcgggctgtggtgcgggtgggcatcttcaccggggcccgggtcttctttgtgcatgagggctaccagggcctggtggatggaggagaccacatcaaggaggccacctgggagagcgtgtccatgatgctgcagctgggcggcaccgtcatcggctag

SEQ ID NO: 65151 - DNA, 420 bp, Artificial Sequence
  derived and/or modified sequence
atgacccatgaggagcaccacgccgccaagaccctgggcatcggcaaggccatcgctgtgctgaccagcggaggagatgcccagggcatgaatgctgctgtgcgggctgtggtgcgggtgggcatcttcaccggggcccgggtcttctttgtgcatgagggctaccagggcctggtggatggaggagaccacatcaaggaggccacctgggagagcgtgtccatgatgctgcagctgggcggcaccgtcatcggcagcgcccgctgcaaggacttccgggagcgggagggccgcctgcgggccgcctacaacctggtgaagaggggcatcaccaacctgtgtgtgattggaggagatggcagcctgactggagctgacaccttccgctctgagtggagcgacctgctgagtgacctgtag

SEQ ID NO: 65152 - DNA, 534 bp, Artificial Sequence
  derived and/or modified sequence
atgacccacgaggagcaccacgccgccaagaccctgggcatcggcaaagccattgctgtcctgacctccggtggcgatgctcaaggtatgaatgctgcggtcaggtctaccgttcgcatcggccttattcagggcaatcgggttctggtagtgcatgacggctttgaggggctcgctaagggacaaattgaagaggctgggtggtcatacgtgggcggctggaccgggcagggtgggagcaagctcggcaccaaaagaaccctacctaagaaaagctttgaacagatttctgccaatataactaagttcaatattcaggggcttgtgatcattggcgggttcgaagcatacaccgggggactcgaacttatggaaggcagaaaacagtttgacgaactctgcatcccttttgtggtgattcctgccacagtatctaataacgtccccggttccgatttcagcgtcggtgccgataccgcactgaacaccatctgcacgacatgcgatagaataaaacagagcgcagcaggctag

SEQ ID NO: 65153 - DNA, 354 bp, Artificial Sequence
  derived and/or modified sequence
atgacccacgaggagcaccacgccgccaagaccctgggcatcggcaaggccatcgccgtactgacttccggtggagacgcccagggtatgaacgcagcggtacgggccgtcgtccgagtgggcatatttacaggggcccgtgtgttcttcgtccatgagggctaccaggggctggtggacggaggagatcatatcaaggaggccacttgggagagtgtctccatgatgctgcagctgggaggtacagtaattggcagcgcacggtgcaaggacttccgggagagagaaggtaggctcagggcagcatacaatctcgtgaaacgggggataactaatctgtgtgtgataggctag

SEQ ID NO: 65154 - DNA, 486 bp, Artificial Sequence
  derived and/or modified sequence
atgacccacgaggagcaccacgccgccaagaccctgggcatcggcaaagccatcgcggttctgacgagtggcggcgatgcccaagggatgaatgcggcagtccgtgcggtcgtgagggttgggatttttaccggcgctcgcgtgttttttgttcacgagggctaccaggggcttgtggacggaggagatcacattaaggaagctacgtgggagagcgtctccatgatgctccagcttggcggaacggtgattggaagcgcaagatgtaaggactttcgcgaaagagaggggcgattgagggccgcgtataacctggttaaacgcggcatcaccaacctgtgcgtgatagggggagacgggagtctgactggagccgacacctttcggtctgaatggagtgacctgctgtctgatctccagaaggcaggtaaaatcacagacgaagaagctaccaaaagcagttatttgaacattgttgggctgtag

SEQ ID NO: 65155 - DNA, 474 bp, Artificial Sequence
  derived and/or modified sequence
atgacccacgaggagcaccacgccgccaagaccctgggcatcggcaaggctatcgccgtactgacgagtggcggtgacgctcagggtatgaatgccgcagttcgcgccgttgttagagtggggatttttactggagcgagggtgttcttcgtgcacgaaggataccaaggtcttgtggatgggggcgaccatattaaagaagctacatgggaaagcgtgtcaatgatgttacagctcggcggtaccgtgataggctcagctcggtgcaaggacttccgggaacgcgaaggaaggctcagggcggcttacaacctggtcaagcgaggtattactaacctgtgcgtgatcgggggcgatgggtcactgactggtgccgacaccttcagatcagagtggagtgacttgctgtctgatctccaaaaggccggcaagataacggatgaggaggcgacaaaatctagctatctcaactag

SEQ ID NO: 65156 - DNA, 258 bp, Artificial Sequence
  derived and/or modified sequence
atgacccacgaggagcaccacgccgccaagaccctgggcatcggcaaagcaatcgccgtcctgactagcggaggggatgcccaaggcatgaacgcagcagtgcgagcagtcgtgcgggtgggtatatttacgggcgcgcgtgtgttcttcgttcacgagggttaccaggggctcgtagacggcggtgatcacatcaaggaggcaacctgggagtccgtttcaatgatgctccaactgggaggcactgtgatcggttag

SEQ ID NO: 65157 - DNA, 420 bp, Artificial Sequence
  derived and/or modified sequence
atgacccacgaggagcaccacgccgccaagaccctgggcatcggcaaggcgatcgccgtgctgacttccggcggggacgcgcaggggatgaatgctgccgtgagggctgtcgtcagagtcggaatctttacgggcgcccgtgtgttttttgtacatgagggctatcaaggtctcgtggacggaggagaccacatcaaagaggccacctgggagagcgtgtccatgatgctgcagctggggggcaccgtgatcgggagcgcacgctgcaaggattttcgcgaaagagaggggcggttacgggcggcgtacaatctcgtgaagaggggtattaccaatctttgcgttattgggggggatgggtccctgaccggtgctgatacttttaggtccgagtggtcggacttactttctgatctgtag

SEQ ID NO: 65158 - DNA, 585 bp, Artificial Sequence
  derived and/or modified sequence
atcttgattcctgctgtgtcttaactgaccattgtcttaaattctagagtggatcatgacccatgaagagcaccatgcagccaaaaccctggggattggcaaagccattgctgtcttaacctctggtggagatgcccaaggcatgaatgctgctgttcgctccactgtgaggattggccttatccagggcaaccgagtgctcgttgtccatgatggtttcgagggcctggccaaggggcagatagaggaagctggctggagctatgttgggggctggactggccaaggtggctctaaacttgggactaaaaggactctacccaagaagagctttgaacagatcagtgccaatataactaagtttaacattcagggccttgtcatcattgggggctttgaggcttacacagggggcctggaactgatggagggcaggaagcagtttgatgagctctgcatcccatttgtggtcattcctgctacagtctccaacaatgtccctggctcagacttcagcgttggggctgacacagcactcaatactatctgcacaacctgtgaccgcatcaagcagtcagcagctgg

SEQ ID NO: 65159 - DNA, 534 bp, Artificial Sequence
  derived and/or modified sequence
atgacccacgaggagcatcacgctgcaaaaactctgggtatcgggaaggccattgcggtgttaactagtggcggagacgcacaaggcatgaacgctgcggtgcgatcaaccgttcgtatcggtttaattcagggaaacagggtcctagtcgttcatgatggctttgagggacttgccaaagggcagatcgaagaagctggctggtcatatgtgggtgggtggaccggacaggggggtagcaaactgggtacaaagagaaccttgccaaagaagagttttgagcagatcagtgctaacatcaccaaatttaacatccagggcctggttatcatcgggggttttgaggcttataccggcggtctggaacttatggaagggagaaagcagtttgacgaattgtgcattcccttcgtcgtcattcctgcaaccgtgagtaataacgttccaggctctgatttcagtgtgggcgcagacaccgccctgaacactatctgtactacctgtgataggattaaacaatccgctgccggatag

SEQ ID NO: 65160 - DNA, 354 bp, Artificial Sequence
  derived and/or modified sequence
atgactcatgaggaacaccatgccgctaagaccctgggtataggtaaggcaattgccgtgctaacctccgggggagatgctcagggtatgaacgccgctgtccgagctgttgtgcgggtggggatttttactggcgcacgcgtatttttcgtgcatgaggggtatcagggactggtcgacggaggcgaccatattaaagaggccacatgggagtctgtcagtatgatgctacagctggggggaacagtaattggcagcgctaggtgtaaggacttccgggagagggaagggcgtttaagagccgcatataacctggtcaagaggggcataaccaacctctgtgtcattgggtag

SEQ ID NO: 65161 - DNA, 486 bp, Artificial Sequence
  derived and/or modified sequence
atgacccatgaagagcatcatgcggctaaaaccctcggtattgggaaagcgattgccgtactgaccagtgggggagacgcccaaggcatgaatgctgcagttagggctgttgttcgggtcggtatcttcacaggtgccagggtgttttttgtacatgaaggctaccaaggactggtggatggtggcgaccatattaaggaggctacttgggagtcggtatctatgatgctacagctgggaggcaccgtcattgggtctgcacggtgtaaagactttagggagcgtgagggacgactgagagcagcttacaacctagtgaaaagaggcattacaaatctatgcgtcatcggcggagatgggtctcttactggagccgatacctttcggtcagagtggtctgacctgttgagcgacctgcagaaagcaggcaaaatcactgacgaggaagccacaaagtcaagttacctcaacatagtcggtctctag

SEQ ID NO: 65162 - DNA, 474 bp, Artificial Sequence
  derived and/or modified sequence
atgacacacgaagagcatcacgccgctaagaccttgggtatcggcaaagccatcgccgtcctcacctctggcggagatgctcaggggatgaacgcagcggtgcgtgcagtcgtaagagtagggatcttcacaggggctagggtgtttttcgtccacgagggctatcagggcctggttgatggcggtgaccatataaaggaggccacctgggaatcagtctccatgatgctgcaactgggcggtacggtcattggcagtgctcgctgtaaggatttccgcgagcgggaagggcgactccgggcagcatataatctggtcaagcgcggtatcaccaacctgtgtgttatcgggggagatgggagcttgaccggtgccgatacattccgcagcgaatggtcagatctgctttccgatctgcaaaaggccggaaaaattactgatgaagaggctactaagtcttcttatctgaattag

SEQ ID NO: 65163 - DNA, 258 bp, Artificial Sequence
  derived and/or modified sequence
atgacacacgaggaacaccatgcggctaaaacattgggcatcgggaaagctatcgcagtactgacaagcgggggagatgctcaggggatgaacgccgctgtcagagctgtggttagggtgggaatctttactggtgcccgagtgtttttcgtgcacgagggttaccaggggctggttgatggaggcgaccacataaaagaggctacttgggaatcagtcagcatgatgctgcaattagggggtacagttatcggatag

SEQ ID NO: 65164 - DNA, 420 bp, Artificial Sequence
  derived and/or modified sequence
atgactcacgaagagcatcatgccgctaaaaccctcggtatcgggaaagccattgctgtgctgacatcaggaggggatgctcagggcatgaatgcagcagtgcgagccgtggtgcgtgtgggtatttttactggtgcccgagtcttcttcgtccacgagggatatcagggtttggttgatgggggtgatcacatcaaggaggcaacctgggagtccgttagcatgatgctgcagctgggaggaactgttataggtagtgccaggtgcaaagactttcgcgagagagagggtcgcctgcgtgctgcctataatctggtcaaaaggggtattacaaatttgtgcgtcatcgggggagatggcagcctgacaggagctgacacctttcggtcagagtggtccgaccttttatcagacctgtag

SEQ ID NO: 65165 - DNA, 534 bp, Artificial Sequence
  derived and/or modified sequence
atgacccacgaggagcaccacgccgccaagaccctgggcatcggcaaggccatcgccgtgctgaccagcggcggcgacgcccagggcatgaacgccgccgtgagaagcaccgtgagaatcggcctgatccagggcaacagagtgctggtggtgcacgacggcttcgagggcctggccaagggccagatcgaggaggccggctggagctacgtgggcggctggaccggccagggcggcagcaagctgggcaccaagagaaccctgcccaagaagagcttcgagcagatcagcgccaacatcaccaagttcaacatccagggcctggtgatcatcggcggcttcgaggcctacaccggcggcctggagctgatggagggcagaaagcagttcgacgagctgtgcatccccttcgtggtgatccccgccaccgtgagcaacaacgtgcccggcagcgacttcagcgtgggcgccgacaccgccctgaacaccatctgcaccacctgcgacagaatcaagcagagcgccgccggctag

SEQ ID NO: 65166 - DNA, 354 bp, Artificial Sequence
  derived and/or modified sequence
atgacccacgaggagcaccacgccgccaagaccctgggcatcggcaaggccatcgccgtgctgaccagcggcggcgacgcccagggcatgaacgccgccgtgagagccgtggtgagagtgggcatcttcaccggcgccagagtgttcttcgtgcacgagggctaccagggcctggtggacggcggcgaccacatcaaggaggccacctgggagagcgtgagcatgatgctgcagctgggcggcaccgtgatcggcagcgccagatgcaaggacttcagagagagagagggcagactgagagccgcctacaacctggtgaagagaggcatcaccaacctgtgcgtgatcggctag

SEQ ID NO: 65167 - DNA, 486 bp, Artificial Sequence
  derived and/or modified sequence
atgacccacgaggagcaccacgccgccaagaccctgggcatcggcaaggccatcgccgtgctgaccagcggcggcgacgcccagggcatgaacgccgccgtgagagccgtggtgagagtgggcatcttcaccggcgccagagtgttcttcgtgcacgagggctaccagggcctggtggacggcggcgaccacatcaaggaggccacctgggagagcgtgagcatgatgctgcagctgggcggcaccgtgatcggcagcgccagatgcaaggacttcagagagagagagggcagactgagagccgcctacaacctggtgaagagaggcatcaccaacctgtgcgtgatcggcggcgacggcagcctgaccggcgccgacaccttcagaagcgagtggagcgacctgctgagcgacctgcagaaggccggcaagatcaccgacgaggaggccaccaagagcagctacctgaacatcgtgggcctgtag

SEQ ID NO: 65168 - DNA, 474 bp, Artificial Sequence
  derived and/or modified sequence
atgacccacgaggagcaccacgccgccaagaccctgggcatcggcaaggccatcgccgtgctgaccagcggcggcgacgcccagggcatgaacgccgccgtgagagccgtggtgagagtgggcatcttcaccggcgccagagtgttcttcgtgcacgagggctaccagggcctggtggacggcggcgaccacatcaaggaggccacctgggagagcgtgagcatgatgctgcagctgggcggcaccgtgatcggcagcgccagatgcaaggacttcagagagagagagggcagactgagagccgcctacaacctggtgaagagaggcatcaccaacctgtgcgtgatcggcggcgacggcagcctgaccggcgccgacaccttcagaagcgagtggagcgacctgctgagcgacctgcagaaggccggcaagatcaccgacgaggaggccaccaagagcagctacctgaactag

SEQ ID NO: 65169 - DNA, 258 bp, Artificial Sequence
  derived and/or modified sequence
atgacccacgaggagcaccacgccgccaagaccctgggcatcggcaaggccatcgccgtgctgaccagcggcggcgacgcccagggcatgaacgccgccgtgagagccgtggtgagagtgggcatcttcaccggcgccagagtgttcttcgtgcacgagggctaccagggcctggtggacggcggcgaccacatcaaggaggccacctgggagagcgtgagcatgatgctgcagctgggcggcaccgtgatcggctag

SEQ ID NO: 65170 - DNA, 420 bp, Artificial Sequence
  derived and/or modified sequence
atgacccacgaggagcaccacgccgccaagaccctgggcatcggcaaggccatcgccgtgctgaccagcggcggcgacgcccagggcatgaacgccgccgtgagagccgtggtgagagtgggcatcttcaccggcgccagagtgttcttcgtgcacgagggctaccagggcctggtggacggcggcgaccacatcaaggaggccacctgggagagcgtgagcatgatgctgcagctgggcggcaccgtgatcggcagcgccagatgcaaggacttcagagagagagagggcagactgagagccgcctacaacctggtgaagagaggcatcaccaacctgtgcgtgatcggcggcgacggcagcctgaccggcgccgacaccttcagaagcgagtggagcgacctgctgagcgacctgtag

SEQ ID NO: 65171 - protein, 421 aa, Artificial Sequence
  derived and/or modified sequence
MAFTERVNSSGNSLYNDDRNLLRIREKERRNQEAHQEKEAFPEKIPLFGEPYKTAKGDELSSRIQNMLGNYEEVKEFLSTKSHTHRLDASENRLGKPKYPLIPDKGSSIPSSSFHTSVHHQSIHTPASGPLSVGNISHNPKMAQPRTEPMPSLHAKSCGPPDSQHLTQDRLGQEGFGSSHHKKGDRRADGDHCASVTDSAPERELSPLISLPSPVPPLSPIHSNQQTLPRTQGSSKVHGSSNNSKGYCPAKSPKDLAVKVHDKETPQDSLVAPAQPPSQTFPPPSLPSKSVAMQQKPTAYVRPMDGQDQAPSESPELKPLPEDYRQQTFEKTDLKVPAKAKLTKLKMPSQSVEQTYSNEVHCVEEILKDSQHVSSVTQNQKQYDTSSKTHSNSQQGTSSMLEDDLQLSDSEDSDSEQTPAP

SEQ ID NO: 65172 - protein, 1218 aa, Artificial Sequence
  derived and/or modified sequence
MAFTERVNSSGNSLYNDDRNLLRIREKERRNQEAHQEKEAFPEKIPLFGEPYKTAKGDELSSRIQNMLGNYEEVKEFLSTKSHTHRLDASENRLGKPKYPLIPDKGSSIPSSSFHTSVHHQSIHTPASGPLSVGNISHNPKMAQPRTEPMPSLHAKSCGPPDSQHLTQDRLGQEGFGSSHHKKGDRRADGDHCASVTDSAPERELSPLISLPSPVPPLSPIHSNQQTLPRTQGSSKVHGSSNNSKGYCPAKSPKDLAVKVHDKETPQDSLVAPAQPPSQTFPPPSLPSKSVAMQQKPTAYVRPMDGQDQAPSESPELKPLPEDYRQQTFEKTDLKVPAKAKLTKLKMPSQSVEQTYSNEVHCVEEILKEMTHSWPPPLTAIHTPSTAEPSKFPFPTKDSQHVSSVTQNQKQYDTSSKTHSNSQQGTSSMLEDDLQLSDSEDSDSEQTPEKPPSSSAPPSAPQSLPEPVASAHSSSAESESTSDSDSSSDSESESSSSDSEENEPLETPAPEPEPPTTNKWQLDNWLTKVSQPAAPPEGPRSTEPPRRHPESKGSSDSATSQEHSESKDPPPKSSSKAPRAPPEAPHPGKRSCQKSPAQQEPPQRQTVGTKQPKKPVKASARAGSRTSLQGEREPGLLPYGSRDQTSKDKPKVKTKGRPRAAASNEPKPAVPPSSEKKKHKSSLPAPSKALSGPEPAKDNVEDRTPEHFALVPLTESQGPPHSGSGSRTSGCRQAVVVQEDSRKDRLPLPLRDTKLLSPLRDTPPPQSLMVKITLDLLSRIPQPPGKGSRQRKAEDKQPPAGKKHSSEKRSSDSSSKLAKKRKGEAERDCDNKKIRLEKEIKSQSSSSSSSHKESSKTKPSRPSSQSSKKEMLPPPPVSSSSQKPAKPALKRSRREADTCGQDPPKSASSTKSNHKDSSIPKQRRVEGKGSRSSSEHKGSSGDTANPFPVPSLPNGNSKPGKPQVKFDKQQADLHMREAKKMKQKAELMTDRVGKAFKYLEAVLSFIECGIATESESQSSKSAYSVYSETVDLIKFIMSLKSFSDATAPTQEKIFAVLCMRCQSILNMAMFRCKKDIAIKYSRTLNKHFESSSKVAQAPSPCIARSTGTPSPLSPMPSPASSVGSQSSAGSVGSSGVAATISTPVTIQNMTSSYVTITSHVLTAFDLWEQAEALTRKNKEFFARLSTNVCTLALNSSLVDLVHYTRQGFQQLQELTKTP

SEQ ID NO: 65173 - DNA, 9279 bp, Artificial Sequence
  derived and/or modified sequence
gagcttgccagccagctagcgagcgacgggcgcgcgcggcccctgcgcactcggccgccgcctgcgcgcgttgcggccgcagctgcacctttgcctccgcggttccgcagccgagccccgggaggaggcgctcccctgcgtcgtccgcacttgcgccctttcccaccgcaacaggtcaggggagggcggaggtgacgagggcgcccgacccgggactagaggacggaagggtctggaagatgaacagactagccactttgcattgactggaaacaatggcatttacagaaagagtcaacagcagtggcaacagtttgtacaatgacgacagaaacctgcttcgaattagagagaaggaaagacgcaaccaggaagcccaccaagagaaagaggcatttcctgaaaagattcccctttttggagagccctacaagacagcaaaaggtgatgagctgtctagtcgaatacagaacatgttgggaaactacgaagaagtgaaggagttccttagtactaagtctcacactcatcgcctggatgcttctgaaaataggttgggaaagccgaaatatcctttaattcctgacaaagggagcagcattccatccagctccttccacactagtgtccaccaccagtccattcacactcctgcgtctggaccactttctgttggcaacattagccacaatccaaagatggcgcagccaagaactgaaccaatgccaagtctccatgccaaaagctgcggcccaccggacagccagcacctgacccaggatcgccttggtcaggaggggttcggctctagtcatcacaagaaaggtgaccgaagagctgacggagaccactgtgcttcggtgacagattcggctccagagagggagctttctcccttaatctctttgccttccccagttccccctttgtcacctatacattccaaccagcaaactcttccccggacgcaaggaagcagcaaggttcatggcagcagcaataacagtaaaggctattgcccagccaaatctcccaaggacctagcagtgaaagtccatgataaagagacccctcaagacagtttggtggcccctgcccagccgccttctcagacatttccacctccctccctcccctcaaaaagtgttgcaatgcagcagaagcccacggcttatgtccggcccatggatggtcaagatcaggcccctagtgaatcccctgaactgaaaccactgccggaggactatcgacagcagacctttgaaaaaacagacttgaaagtgcctgccaaagccaagctcaccaaactgaagatgccttctcagtcagttgagcagacctactccaatgaagtccattgtgttgaagagattctgaaggaaatgacccattcatggccgcctcctttgacagcaatacatacgcctagtacagctgagccatccaagtttcctttccctacaaaggactctcagcatgtcagttctgtaacccaaaaccaaaaacaatatgatacatcttcaaaaactcactcaaattctcagcaaggaacgtcatccatgctcgaagacgaccttcagctcagtgacagtgaggacagtgacagtgaacaaaccccagagaagcctccccatctgcacctccaagtgctccacagtcccttccagaaccagtggcatcagcacattccagcagtgcagagtcagaaagcaccagtgactcagacagttcctcagactcagagagcgagagcagttcaagacagcgaagaaaatgagcccctagaaaccccagctccggagcctgagcctccaacaacaaacaaatggcagctggacaactggctgaccaaagtcagccagccagctgcgccaccagagggccccaggagcacagagcccccacggcggcacccagagagtaagggcagcagcgacagtgccacgagtcaggagcattctgaatccaaagatcctccccctaaaagctccagcaaagccccccgggccccacccgaagccccccaccccggaaagaggagctgtcagaagtctccggcacagcaggagcccccacaaaggcaaaccgttggaaccaaacaacccaaaaaacctgtcaaggcctctgcccgggcaggttcacggaccagcctgcagggggaaagggagccagggcttcttccctatggctcccgagaccagacttccaaagacaagcccaaggtgaagacgaaaggacggccccgggccgcagcaagcaacgaacccaagccagcagtgcccccctccagtgagaagaagaagcacaagagctccctccctgccccctctaaggctctctcaggcccagaacccgcgaaggacaatgtggaggacaggacccctgagcactttgctcttgttcccctgactgagagccagggcccaccccacagtggcagcggcagcaggactagtggctgccgccaagccgtggtggtccaggaggacagccgcaaagacagactcccattgcctttgagagacaccaagctgctctcaccgctcagggacactcctcccccacaaagcttgatggtgaagatcaccctagacctgctctctcggataccccagcctcccgggaaggggagccgccagaggaaagcagaagataaacagccgcccgcagggaagaagcacagctctgagaagaggagctcagacagctcaagcaagttggccaaaaagagaaagggtgaagcagaaagagactgtgataacaagaaaatcagactggagaaggaaatcaaatcacagtcatcttcatcttcatcctcccacaaagaatcttctaaaacaaagccctccaggccctcctcacagtcctcaaagaaggaaatgctccccccgccacccgtgtcctcgtcctcccagaagccagccaagcctgcacttaagaggtcaaggcgggaagcagacacctgtggccaggaccctcccaaaagtgccagcagtaccaagagcaaccacaaagactcttccattcccaagcagagaagagtagaggggaagggctccagaagctcctcggagcacaagggttcttccggagatactgcaaatccttttccagtgccttctttgccaaatggtaactctaaaccagggaagcctcaagtgaagtttgacaaacaacaagcagaccttcacatgagggaggcaaaaaagatgaagcagaaagcagagttaatgacggacagggttggaaaggcttttaagtacctggaagccgtcttgtccttcattgagtgcggaattgccacagagtctgaaagccagtcatccaagtcagcttactctgtctactcagaaactgtagatctcattaaattcataatgtcattaaaatccttctcagatgccacagcgccaacacaagagaaaatatttgctgttttatgcatgcgttgccagtccattttgaacatggcgatgtttcgttgtaaaaaagacatagcaataaagtattctcgtactcttaataaacacttcgagagttcttccaaagtcgcccaggcaccttctccatgcattgcaagaagcacaggcacaccatcccctctttccccaatgccttctcctgccagctccgtagggtcccagtcaagtgctggcagtgtggggagcagtggggtggctgccactatcagcaccccagtcaccatccagaatatgacatcttcctatgtcaccatcacatcccatgttcttaccgcctttgacctttgggaacaggccgaggccctcacgaggaagaataaagaattctttgctcggctcagcacaaatgtgtgcaccttggccctcaacagcagtttggtggacctggtgcactatacacgacagggttttcagcagctacaagaattaaccaaaacaccttaatggagccccaggttgattcaatgccttgggaactatttttgcacattggaagcctcaaaaacagtccagacatttgtttcatcaggacaccaaactctaaaaaagaagcaccacgagatggccaggacatttgtccacttaaactctcaacaacagtgtgatcattggttggacactgtggttatgcagaagcagagatgaggaggctggccccagagatgatcttgcccttcctaactaaaggacagaagtgcaatttagcttaaatgggtgtatgaatggtctagaaacatttctattttttttttaaaccagcaggatacaagttgcaaatgaaatgaggagaaacagtttcaactctgaaagtgaatttcacgtcatctcagtagccacgctagtccattcccagaaggaaatttttttttttaacaatgacttttggtaaagggttttgtggatgattttttttcttttgagttttgggagaaatatttgtttagtaacttctaatggccatctgtaaaccataagtaatgaaggactccactgtgccccactttctgccaatgaacagtggcttgataataccaagtattgttgtaatttataaaattgaaggcaacccccgctcctgccgcccccaatctccccattgcctagagcgctgcacattgaccccagctctgacttctcattactgtgctgaaagtcagcccacgtcggagcggtgaggaggagccacagcacatggggtgccacctcgaggtctgcacaggaggacttggcgctgccatttcctacccctgccatttcccacccctgcttcagcgaaagggactctctaacagggcagtcactgttgactctattctgaatttcctcccttggggaagaagggaaccaacatttatacctgaccagatggctaaagtgcttttaaagttttgtttaagtagagctggaatttgaggtgctgatctgtggtctacagttatgtggtaactcatgttgtccagccaactcagagtttcgtcagtgaacaagaaacatgaaatctgcttcttagagaggctatatttttctgctacaaatattttatatttatagcaaaactagactttcagagtccttgattgtctaggggaagttaactccctgagaggatgtagagatttggggtggttgattagacttttgaaaaactcatcaccacatgccttcactccagagtgttctcagctagatttgatttggttgaggaggaactgtggccctccgtaagttattgccatagtgtatgcattaaaccaagtccattttgaatgacctaaaatgaagtaacacaatcagaaatcccatgtgcccataagcacagatttttctttttcattgaaactttaaaggttattattggaaacattactttgagtgcagtgtttttaaaagccaattcttttttatcccttttagaagtagaatttgcacacttactacaattgaggagtgtcatctctataactttttctccgcctttgtcccattctgcccctgtacatgtttcctaccaagcatgtttcacattttcctattagtggaggagggagaaccatatttatttataatgaagacatctaagatccctatgatgaatgcaggaactctcttggtagtttgtaaatacacaaagggatgtgtcgagggatgggagcgatgcttatctctcacagtgtgagtggtctgtgtgaggctgttccttcagtttcttctccagactgttctttggttgtcactaagtcagaggtctggtccctcatgtttaggtgaaagccagagaatgacagctgtagtcatatctgagcataagaccttgatgtgtgattcctgatgaccggtttcatttattcatgttataaagcaaagccctggtcctttttaaactactagttttaaaaacctgtgttaaatgaacagtaattgcctggtaggtttggtgtgtgtgtagcattgtgtgtccatctgttatatgtaaaggacaaggcaccagaatcaggctttatttcgatattgaagatgttatttaacatctttcttttttccttactcccttagccatcccctccccttttgtcctatcattccctagaacaagccacctgtcaattgtgaagggttgtgttctttatggcaggttctatgcagattgtgccagagcatgtgcgtgttctgttggcaagccacagtgctcccttgactgaagacatttccaggtagatttctcagccagctctaaaacagattgctttttcagtggccttactctttgtgggtttttttttttttctctgaacttgatataaagattttatttgtcccttgaaaaagtaacaaatgtgcatagatcaatttgtactactttggtcattggatatttctgatccttattgcattgtacctaaaggagagtaactaatggtaacctttttaatagagtatgtgaaaggtagtggctgatgaatccttaacgttcatagggtctttttgctgttacggttgtatatagaggtctgaaggatttttaaaatgatttgcactttttcactgcatgcttacaattcccaaaggcaaaatctgtactgaggtagatcatttgaaagggctagattataaaattaagccttagagtatggaaagttcttataacaataatagtacacacttcagagtaagacaaatgcaaagcatcttaaggagtgaaaatagagtgtaaatcttgcctttggcactacaaggtgtgtgtgtgtgtgtgtgtgtgtgtgtgtgtctttagtaggaaatggaagaacactgttttattttttaaagtgtttaatgtttctgtcctttctgtgaattattgaatttaagagccctgctaaataatgaaaaaacactttactaaaatttatcaaattatactgggttcggattgtgaaaacattggccacctagtagcagtggtgaggagtgggagggcccagcaagcatttatcagaaatagaatcacaataggaggagaatttgactgtctgatattatgatttgattacaatactgaatgggaaaagtatctaatattttgtaacaaaaagaccttcatattatctgttttgaccaaaatatgtagctatttcccttacacagattggaccgcacttatctcccttgtcctgtatcctttaatttcaggtctcaggatgtttagaaagctaaaaccccctacccctttctggctgaaaacttgccttatttggtatcttacacattaatgttactagcatcaggagcttactgttttattatgattcatcttcagtaatttttagaagcaagaagaaagccattgtgtcctctacaattaacaaaacttatctctgatatacaaagggatataaatatatacacttaaatagagaaaaagaggttgattgaattgtgcctttgagtgaacccagtttttaaataccgctgtgtttgtttcgccatggcttcagggatgctacatggctcttgcaccttttactcctctgctttatgaagtttgagttgtatttgtgcatcttaaagtaggttgaggcttgaggctgggctttcgggtttttttgttttttgttttgttttgttttgttttgttttcttgtacttaaacctgcttgcttcctaccacagattctttattttcccaaacactacaaaaaaacttttaaaactttgccatttcatctgtttacactctttgccactgattagcagtatttaaatcttgcaagaatattttgtgctttctttagaaacacaagagtatagatttttctcactgaaaagtgagagttacgcattgcagccatgaagggatgctaggatcaattatggcagtaccttttttcccctcctgttcttgagccagttgtctcttttgttttgggtcccacttaggattaatggatgtaaggtattttcctgtgcctttattttgtgtcattctattggaaggaggtgtaacggcagaatagcatcgtgttgggggttttccttcaaacactgcaagtgatattgccaccatgtgaacctcaaatatgcaatccagttgtgttggtttctcggtgacttggagtgttcatctcttcatgaattgtgagcactgaccatgttcttcagttcttaattatggtgagttgacaaataccaactactgcttttctttaggtggctataaatttcttactgtcaggaggaaatgacattatattctgttccactgaacgtcagagatcagcaggcactgtactgggtagagaagtgcctatacttctctacctaagagggcaggagggaaaccctacagctccttgtgagcctatatattagtatatcggcctggagaggacaagggaataagaccactcatagtgaggctggccaagctgcactggtcggaccaggcagtggctgacctaaggaagacaacttgctttgcttaaaagtagattttttaagcaatgcttaacacaggcagcattcacctttgttcaggccatcgacatgtattgttaaaattactgcatatccccctcagatatcaagtatacactgttcatgttggggttgtgtgtgtgtatgtgtgtatgtacgcacgcatgtgtcccaaatcttgttttaattttttttttctgaatgtgatcatgttttggatgatacctgagcagggttgccttttttttatttattaccattatatattatattatattatattatatattttttgctttcttataactttggaggaaagtcaaatcttggtattattaaaattgttttaaaaaggagtaaattttccagttgataaatgaaaatcactggcctatgtttaataagtttttctttaattactgtggaataacgtgccagctatcatcaacacaatgattttgtacatagggtagggaagcagtgatgctctcaatgggaagatgtgcaacacaaattaaggggaactccatgtattttacctacttcagcaatggaactgcaacttggggctttgtgaataaaatttagctgccttgtatagtcgtttgaaagaatatgtgatctgtgagagaattatagtttttttttagaagaaaaatctgcaaaagatctttccaaagacaatgtgccacagatcttttgttctctgtaatgaggattaattgctgtttaaacaaaaatgtaattgttcatctttaaattctttccttttcataagaggatcaagctgtaaaaaaacaaaaaaattaataaaaatttcgagaaatcattggggttgaatcca

SEQ ID NO: 65174 - protein, 489 aa, Artificial Sequence
  derived and/or modified sequence
MGSGPLSLPLALSPPRLLLLLLLSLLPVARASEAEHRLFERLFEDYNEIIRPVANVSDPVIIHFEVSMSQLVKVDEVNQIMETNLWLKQIWNDYKLKWNPSDYGGAEFMRVPAQKIWKPDIVLYNNAVGDFQVDDKTKALLKYTGEVTWIPPAIFKSSCKIDVTYFPFDYQNCTMKFGSWSYDKAKIDLVLIGSSMNLKDYWESGEWAIIKAPGYKHDIKYNCCEEIYPDITYSLYIRRLPLFYTINLIIPCLLISFLTVLVFYLPSDCGEKVTLCISVLLSLTVFLLVITETIPSTSLVIPLIGEYLLFTMIFVTLSIVITVFVLNVHYRTPTTHTMPSWVKTVFLNLLPRVMFMTRPTSNEGNAQKPRPLYGAELSNLNCFSRAESKGCKEGYPCQDGMCGYCHHRRIKISNFSANLTRSSSSESVDAVLSLSALSPEIKEAIQSVKYIAENMKAQNEAKEEQKAQEIQQLKRKEKSTETSDQEPGL

SEQ ID NO: 65175 - DNA, 1470 bp, Artificial Sequence
  derived and/or modified sequence
atgggctcaggtccactgtctttgcctctggcattatccccccctcggcttctgttgctactccttctgtctcttctgcctgtggcccgtgcatcagaggccgaacatcgcttgttcgagcgtctgttcgaggattataacgagatcatcaggccagtcgctaacgtgtctgaccccgtgatcattcactttgaggtatcgatgagccagcttgttaaggtggacgaagtgaatcagattatggagacgaatctgtggctcaagcagatttggaacgactacaaactcaagtggaatccctcggattatgggggcgcagagttcatgcgagttcccgcccaaaaaatctggaagcccgacatcgtgttgtataataacgccgttggcgacttccaggtcgatgacaagaccaaagccctgctgaaatacaccggtgaggtcacctggatcccacccgccattttcaagtctagctgtaaaattgacgtcacctatttccccttcgactaccagaactgcaccatgaaattcggctcatggtcttatgacaaagcgaaaattgatctggtattaattggcagtagtatgaatttaaaagattattgggagtccggcgagtgggcaattatcaaggctcccggatacaagcacgatatcaaatataactgctgcgaagagatttatccagacattacctacagcctgtatatcaggaggctccccctgttctataccatcaacctcatcataccttgcttgttgatttctttcctgacggtgctagttttttacttgcccagtgattgcggagagaaggtgacactgtgtatctcggtactcctgagcctcacggtcttcttgctcgtcatcactgagaccattccaagcacaagcctggtaatccccctgataggcgaatacctcctgttcaccatgatcttcgttacgctcagcatagtgatcactgtttttgtactgaatgtgcactatcgtacacctaccacccacactatgccatcttgggtgaaaactgtgtttttgaatcttctgcccagagtgatgtttatgacacggccgacgtctaatgaaggcaacgctcaaaagcctaggccactgtatggggcagagctgtcgaatttgaattgtttttccagggccgagtctaagggctgtaaggagggatacccgtgccaggacgggatgtgcggatactgtcatcacaggagaataaagatttccaacttctccgcaaatctgactaggagcagctctagcgagtcagtcgacgcagtcctgtccctgagcgcacttagcccagaaatcaaggaggccattcaatctgtaaagtatatcgctgagaatatgaaggcgcagaatgaagcaaaagaggagcagaaggcccaagaaatccagcagctgaagagaaaagagaaaagcactgaaacatcggatcaggaaccaggactctag

SEQ ID NO: 65176 - DNA, 1470 bp, Artificial Sequence
  derived and/or modified sequence
atgggcagcggccccctgagcctgcccctggccctgagccccccccggctgctgctgctgctgctgctgagcctgctgcctgtggcccgggccagcgaggccgagcaccggctgtttgagcggctgtttgaggactacaatgagatcatccggcctgtggccaacgtgtctgaccctgtgatcatccactttgaggtgtccatgagccagctggtgaaggtggatgaggtgaaccagatcatggagaccaacctgtggctgaagcagatctggaatgactacaagctgaagtggaaccccagcgactatggaggagctgagttcatgagggtgcctgcccagaagatctggaagccagacatcgtgctgtacaacaatgctgtgggggacttccaggtggatgacaagaccaaggccctgctgaagtacaccggggaggtgacctggatccccccagccatcttcaagagcagctgcaagattgatgtgacctacttcccctttgactaccagaactgcaccatgaagtttggctcctggagctatgacaaggccaagattgacctggtgctgattggcagctccatgaacctgaaggactactgggagagcggggagtgggccatcatcaaggcccctggctacaagcatgacatcaagtacaactgctgtgaggagatctacccagacatcacctacagcctgtacatccggcggctgcccctcttctacaccatcaacctgatcatcccctgcctgctgatctccttcctgactgtgctggtgttctacctgcccagcgactgtggggagaaggtgaccctgtgcatctctgtgctgctgagcctgaccgtcttcctgctggtgatcacagagaccatccccagcaccagcctggtgatccccctcatcggggagtacctgctcttcaccatgatctttgtgaccctgagcatcgtcatcaccgtgtttgtgctgaatgtgcactaccgcacccccaccacccacaccatgcccagctgggtgaagacagtgttcctgaacctgctgccccgggtgatgttcatgacccggcccaccagcaatgaaggaaatgcccagaagccccggcccctgtatggagctgagctgagcaacctgaactgcttcagcagagctgagagcaagggctgcaaggagggctacccctgccaggacggcatgtgtggctactgccaccaccggcgcatcaagatcagcaacttcagcgccaacctgaccaggagcagcagcagcgagagcgtggatgctgtgctgagcctgagcgccctgagccctgagatcaaggaggccatccagagcgtgaagtacatcgccgagaacatgaaggcccagaatgaggccaaggaggagcagaaggcccaggagatccagcagctgaagaggaaggagaagagcacagagaccagtgaccaggagcccggcctgtag

SEQ ID NO: 65177 - DNA, 1470 bp, Artificial Sequence
  derived and/or modified sequence
atgggcagcggccccctgagcctgcccctggccctgagccccccccgtcttctgctgctgttgctgctctccctgctgccagtagcccgtgcaagtgaggccgagcatcggcttttcgagagattattcgaggattacaatgagataatccgcccggtggcaaatgtctctgatcccgtaatcatccactttgaggtctccatgagccaactagtgaaggtggatgaagttaatcagatcatggagaccaacctctggctgaagcagatttggaacgattataagttgaagtggaatccctccgactacgggggcgcggaatttatgcgcgttcctgctcagaagatttggaagcccgatattgtgctgtacaataacgctgtcggtgacttccaggtcgatgacaagactaaggctcttctcaaatacacgggggaagtgacctggataccaccggctatcttcaaatcttcgtgtaaaattgacgtgacatatttcccgttcgattaccagaattgtactatgaaattcggctcttggtcctacgataaggctaagattgatctcgtcctcatcgggagctccatgaatctgaaggattactgggagagtggtgagtgggcgatcatcaaggcccctggctataagcatgacattaagtacaattgttgcgaagagatttaccctgacatcacttacagcctttatatcaggcggttaccactgttctatacgatcaatttgatcattccctgtctactgatttcattcctcaccgtgctagtattctacctgcccagcgactgtggggaaaaagtcaccctgtgcattagcgtgcttcttagtttgaccgtatttctgcttgtgatcaccgagactatcccctccacttccttagtcatcccactgatcggcgaatacctgctgttcaccatgatcttcgtcaccctgtccattgtcatcaccgtattcgttctcaacgttcattacaggaccccaacaactcacaccatgccgtcctgggtcaaaactgtatttctcaatcttctcccccgcgtgatgttcatgactaggcccaccagtaatgaaggcaatgctcaaaagcctcgccctctgtatggggcggagctgtccaatctcaattgtttctcccgagctgagtctaaggggtgtaaagaggggtatccttgtcaggatggtatgtgcgggtactgtcaccacagacgaatcaagatcagcaatttttctgccaacctgaccaggtcctcttcttccgagagtgttgatgcagtcctgagcctgtctgcgctgtctccagagattaaagaggcaatacagtctgtgaagtatattgccgagaatatgaaggcgcaaaacgaggccaaggaagaacagaaggctcaagagattcaacaactgaaacggaaagagaaaagcaccgagacaagtgaccaggagccgggcctgtag

SEQ ID NO: 65178 - DNA, 1470 bp, Artificial Sequence
  derived and/or modified sequence
atgggctctggtcctctgagtctgcccttggccctgtcgcctcccaggttactcctgctgctgttgttgtcccttttgcctgtggcccgtgcatccgaggcagagcataggctctttgaacgactgttcgaagattacaatgaaatcattaggcccgtggcaaacgtgagcgatcctgttatcatacactttgaagtctccatgagtcagctggtcaaagttgatgaagttaatcagatcatggaaaccaatttatggctgaaacagatctggaatgattacaaactgaaatggaatccttcggattatggtggagcggaattcatgcgggtccctgcccagaaaatttggaaacccgacatcgttctgtataacaacgccgtgggcgacttccaagtagacgacaagaccaaagcgttgttgaaatacacaggagaggtcacctggataccaccggcaatctttaaaagctcctgcaaaatcgacgtgacctactttccatttgactatcagaactgcacaatgaagttcggttcctggtcctacgacaaggccaagatcgatctggtgctgataggaagctccatgaatctgaaggactactgggaaagcggcgagtgggccatcataaaagcccctgggtacaagcacgatatcaaatataattgctgcgaggagatctaccccgacatcacttactccttatatattcgccgtctccccttattctatacaataaacctgattattccttgtcttctcatcagcttccttaccgtgctagtcttctacctcccttcagactgtggagagaaggtgactctttgcatctccgtgttgctgagcctgaccgttttcctcctggtcatcacagagacaattccaagcacgtcactagtgattcctttgatcggcgagtacctgcttttcaccatgattttcgtgactctatctattgtgatcacagtgtttgtgctgaatgtacattatagaacccctacgacccacactatgccatcatgggttaagacggtgttcctgaatcttctgccacgtgtcatgttcatgaccaggccaacatccaacgaagggaacgctcagaaaccccgtccactctacggtgccgagctgtctaatctaaactgcttttccagagccgagagtaaaggctgcaaggaaggctacccttgccaggatggaatgtgcgggtactgccatcatcggcgaatcaaaatttcaaatttctccgccaatctcacgcgctcaagcagctccgaaagtgtggatgccgttctgtcgctgagcgcactctccccagagattaaggaggccatacaatcagtaaagtatattgctgaaaatatgaaggcccagaacgaggctaaggaagaacagaaggcccaagagatacagcaattgaagcgaaaagagaaaagcaccgagacttctgaccaggaaccaggattgtag

SEQ ID NO: 65179 - DNA, 2030 bp, Artificial Sequence
  derived and/or modified sequence
gtccttcccagggtgtgttagcgtctctcctacggcgcccgcctagcccggtggtcccaaccccctgcgggagctgcacacgccccggaaacctgggacagaaactgagtccctctccttcctggtggtggtgacagcacctgctcagatctggtcggacgccgccggccggagcacccagcccggcggagaaggagctcgcccggcgctggggactgggacctggagccccttcccctaccgcacgtacgccccgccccgcgcacgcccgcccgcccgcccgcgcctggcgcagcttcactccggatggttcctgtcctcccgcgggtccgagggcgctggaaacccagcggcggcgaagcggagaggagccccgcgcgtctccgcccgcacggctccaggtctggggtctgcgctggagccgcgcggggagaggccgtctctgcgaccgccgcgcccgctcccgaccgtccgggtccgcggccagcccggccaccagccatgggctctggcccgctctcgctgcccctggcgctgtcgccgccgcggctgctgctgctgctgctgctgtctctgctgccagtggccagggcctcagaggctgagcaccgtctatttgagcggctgtttgaagattacaatgagatcatccggcctgtagccaacgtgtctgacccagtcatcatccatttcgaggtgtccatgtctcagctggtgaaggtggatgaagtaaaccagatcatggagaccaacctgtggctcaagcaaatctggaatgactacaagctgaaatggaacccctctgactatggtggggcagagttcatgcgtgtccctgcacagaagatctggaagccagacattgtgctgtataacaatgctgttggggatttccaggtggacgacaagaccaaagccttactcaagtacactggggaggtgacttggatacctccggccatctttaagagctcctgtaaaatcgacgtgacctacttcccgtttgattaccaaaactgtaccatgaagttcggttcctggtcctacgataaggcgaaaatcgatctggtcctgatcggctcttccatgaacctcaaggactattgggagagcggcgagtgggccatcatcaaagccccaggctacaaacacgacatcaagtacaactgctgcgaggagatctaccccgacatcacatactcgctgtacatccggcgcctgcccttgttctacaccatcaacctcatcatcccctgcctgctcatctccttcctcactgtgctcgtcttctacctgccctccgactgcggtgagaaggtgaccctgtgcatttctgtcctcctctccctgacggtgtttctcctggtgatcactgagaccatcccttccacctcgctggtcatccccctgattggagagtacctcctgttcaccatgatttttgtaaccttgtccatcgtcatcaccgtcttcgtgctcaacgtgcactacagaaccccgacgacacacacaatgccctcatgggtgaagactgtattcttgaacctgctccccagggtcatgttcatgaccaggccaacaagcaacgagggcaacgctcagaagccgaggcccctctacggtgccgagctctcaaatctgaattgcttcagccgcgcagagtccaaaggctgcaaggagggctacccctgccaggacgggatgtgtggttactgccaccaccgcaggataaaaatctccaatttcagtgctaacctcacgagaagctctagttctgaatctgttgatgctgtgctgtccctctctgctttgtcaccagaaatcaaagaagccatccaaagtgtcaagtatattgctgaaaatatgaaagcacaaaatgaagccaaagaggaacaaaaagcccaagagatccaacaattgaaacgaaaagaaaagtccacagaaacatccgatcaagaacctgggctatgaatttccaatcttcaacaacctgttaggaaaaaaataaaaatgcattaaataattgtaaa

SEQ ID NO: 65180 - DNA, 1470 bp, Artificial Sequence
  derived and/or modified sequence
atgggcagcggccccctgagcctgcccctggccctgagcccccccagactgctgctgctgctgctgctgagcctgctgcccgtggccagagccagcgaggccgagcacagactgttcgagagactgttcgaggactacaacgagatcatcagacccgtggccaacgtgagcgaccccgtgatcatccacttcgaggtgagcatgagccagctggtgaaggtggacgaggtgaaccagatcatggagaccaacctgtggctgaagcagatctggaacgactacaagctgaagtggaaccccagcgactacggcggcgccgagttcatgagagtgcccgcccagaagatctggaagcccgacatcgtgctgtacaacaacgccgtgggcgacttccaggtggacgacaagaccaaggccctgctgaagtacaccggcgaggtgacctggatcccccccgccatcttcaagagcagctgcaagatcgacgtgacctacttccccttcgactaccagaactgcaccatgaagttcggcagctggagctacgacaaggccaagatcgacctggtgctgatcggcagcagcatgaacctgaaggactactgggagagcggcgagtgggccatcatcaaggcccccggctacaagcacgacatcaagtacaactgctgcgaggagatctaccccgacatcacctacagcctgtacatcagaagactgcccctgttctacaccatcaacctgatcatcccctgcctgctgatcagcttcctgaccgtgctggtgttctacctgcccagcgactgcggcgagaaggtgaccctgtgcatcagcgtgctgctgagcctgaccgtgttcctgctggtgatcaccgagaccatccccagcaccagcctggtgatccccctgatcggcgagtacctgctgttcaccatgatcttcgtgaccctgagcatcgtgatcaccgtgttcgtgctgaacgtgcactacagaacccccaccacccacaccatgcccagctgggtgaagaccgtgttcctgaacctgctgcccagagtgatgttcatgaccagacccaccagcaacgagggcaacgcccagaagcccagacccctgtacggcgccgagctgagcaacctgaactgcttcagcagagccgagagcaagggctgcaaggagggctacccctgccaggacggcatgtgcggctactgccaccacagaagaatcaagatcagcaacttcagcgccaacctgaccagaagcagcagcagcgagagcgtggacgccgtgctgagcctgagcgccctgagccccgagatcaaggaggccatccagagcgtgaagtacatcgccgagaacatgaaggcccagaacgaggccaaggaggagcagaaggcccaggagatccagcagctgaagagaaaggagaagagcaccgagaccagcgaccaggagcccggcctgtag

SEQ ID NO: 65181 - protein, 497 aa, Artificial Sequence
  derived and/or modified sequence
MTKSNGEEPKMGGRMERFQQGVRKRTLLAKKKVQNITKEDVKSYLFRNAFVLLTVTAVIVGTILGFTLRPYRMSYREVKYFSFPGELLMRMLQMLVLPLIISSLVTGMAALDSKASGKMGMRAVVYYMTTTIIAVVIGIIIVIIIHPGKGTKENMHREGKIVRVTAADAFLDLIRNMFPPNLVEACFKQFKTNYEKRSFKVPIQANETLVGAVINNVSEAMETLTRITEELVPVPGSVNGVNALGLVVFSMCFGFVIGNMKEQGQALREFFDSLNEAIMRLVAVIMWYAPVGILFLIAGKIVEMEDMGVIGGQLAMYTVTVIVGLLIHAVIVLPLLYFLVTRKNPWVFIGGLLQALITALGTSSSSATLPITFKCLEENNGVDKRVTRFVLPVGATINMDGTALYEALAAIFIAQVNNFELNFGQIITIRDRLRTTTNVLGDSLGAGIVEHLSRHELKNRDVEMGNSVIEENEMKKPYQLIAQDNETEKPIDSETKM

SEQ ID NO: 65182 - DNA, 1494 bp, Artificial Sequence
  derived and/or modified sequence
atgaccaagtcaaatggggaggagccaaagatgggtgggcggatggagagattccagcagggcgtccgaaaacgcacactgctggccaagaagaaagtacagaacatcaccaaagaggatgtcaaaagctatcttttcaggaacgccttcgttttgctgactgtgaccgctgtgatagtgggaaccattctcggtttcactctgaggccttatcggatgagctatcgcgaagttaagtatttttccttccctggagaactgctcatgcgcatgctccagatgttagtgttgcccttgatcatctcttccttggtcacaggcatggcagcactggacagcaaggcctccggaaagatgggaatgagggctgtcgtgtactatatgacgaccaccatcattgcagttgtgatcggaatcattattgtgattattattcacccagggaagggcacaaaggaaaatatgcatagggaaggtaagatcgttcgagtaacggctgccgacgccttcctggacctcatccgcaacatgtttccccccaatctcgtcgaggcctgcttcaaacagttcaaaacaaactacgaaaaacggtctttcaaagtccccatccaggctaatgaaaccctggtgggggccgtcattaacaatgtaagcgaggctatggagaccctgacgaggatcactgaagaactggtcccggttcccgggtccgttaatggcgtgaacgcgctcggcctcgtcgtgttctccatgtgctttgggtttgtgatcgggaacatgaaggagcagggacaggctctgagagaattctttgacagcttgaatgaggcaattatgcgtcttgtggccgtcataatgtggtatgcccctgtggggatcctgtttttgattgcagggaagattgttgaaatggaggacatgggtgtcatcggtgggcagctcgctatgtatactgtcacggtgatagtaggccttctgatccacgcagtgatcgtcctgccgctcttgtacttcctggtcacacggaagaacccctgggtattcatcgggggtttactgcaggcattaatcactgccctaggtacgtcatcctcttctgccacactgccaatcacgtttaagtgtctcgaggaaaacaatggggttgacaagcgggtcactcgctttgttctgcccgtaggcgctacaattaacatggacggaacggccctgtacgaggcgctggccgctattttcatagcacaggtaaataatttcgagcttaacttcggtcagatcatcactatcagagatagactgcgcaccacaactaatgtcctgggggactcccttggagcgggtattgtagaacatctatcacgacacgagctgaagaatagagatgtggaaatgggtaactctgtaatagaggagaacgagatgaaaaagccgtatcagctgattgcgcaagataacgagactgagaagccaatcgacagcgagaccaaaatgtag

SEQ ID NO: 65183 - DNA, 1494 bp, Artificial Sequence
  derived and/or modified sequence
atgaccaagagcaatggagaggagcccaagatgggcggccgcatggagcgcttccagcagggcgtgaggaagaggaccctgctggccaagaagaaggtgcagaacatcaccaaggaggatgtgaagagctacctgttcagaaatgcctttgtgctgctgactgtgacagctgtgattgtgggcaccatcctgggcttcaccctgcggccctacaggatgagctaccgggaggtgaagtacttctccttccctggagagctgctgatgaggatgctgcagatgctggtgctgcccctcatcatcagcagcctggtgacaggcatggccgccctggacagcaaggccagcggcaagatgggcatgagagctgtggtgtactacatgaccaccaccatcatcgctgtggtgattggcatcatcatcgtcatcatcatccaccctgggaagggcaccaaggagaacatgcaccgggagggcaagatcgtgcgggtgacagctgctgatgccttcctggacctgatccggaacatgtttcctcccaacctggtggaggcctgcttcaagcagttcaagaccaactatgagaagaggagcttcaaggtgcccatccaggccaatgagaccctggtgggcgccgtcatcaacaacgtgtctgaggccatggagaccctgacccgcatcacagaggagctggtgcctgtgcccggctctgtgaatggagtgaatgccctgggcctggtggtgttctccatgtgctttggatttgtgattggcaacatgaaggagcagggccaggccctgcgggagttctttgacagcctgaatgaggccatcatgaggctggtggccgtcatcatgtggtacgcccctgtgggcatcctcttcctgattgctgggaagatcgtggagatggaggacatgggcgtcatcggcggccagctggccatgtacacagtgaccgtcatcgtgggcctgctgattcatgctgtgattgtgctgcccctgctgtacttcctggtgaccaggaagaacccctgggtgttcatcggcggcctgctgcaggccctgatcacagccctgggcaccagcagcagcagcgccaccctgcccatcaccttcaagtgcctggaggagaacaacggggtggacaagagggtgaccaggtttgtgctgcctgtgggcgccaccatcaacatggatggaacagccctgtatgaggccctggccgccatcttcatcgcccaggtgaacaactttgagctgaactttggccagatcatcaccatccgggaccggctgcggaccaccaccaacgtgctgggggacagcctgggcgccggcatcgtggagcacctgagcagacatgagctgaagaacagagatgtggagatgggcaacagcgtgattgaagaaaatgagatgaagaagccctaccagctgattgcccaggacaatgaaacagagaagcccattgattctgagaccaagatgtag

SEQ ID NO: 65184 - DNA, 1494 bp, Artificial Sequence
  derived and/or modified sequence
atgaccaagagcaacggcgaggagcccaagatgggcggccggatggagcgcttccagcagggcgtaaggaaaagaaccctgctggctaagaagaaggtccagaatattactaaagaagacgtgaagtcatacctcttcagaaatgcgtttgtcctcctgactgtgactgcggtaatcgtcgggaccattctaggcttcacactgaggccttataggatgagctatcgggaagtcaagtatttctcatttcccggagaactgctgatgaggatgctgcagatgctcgtacttcccctaatcatcagctctctggtcaccgggatggcggcgctggactccaaagcttctggcaaaatgggtatgagggctgttgtctattacatgacaacaaccattatcgctgtggtcatcggtatcattatcgtgattatcatccatcccgggaagggcaccaaggagaatatgcaccgagaagggaaaattgtacgcgtaacagccgccgatgcctttttagacttgatcaggaacatgtttcccccaaatctggttgaggcttgcttcaagcagtttaagacaaactacgaaaaaaggagctttaaagtcccaatccaagccaatgagactctcgtcggtgccgttataaataacgtttcagaggctatggagacattgacccggatcactgaagaattagttcccgtacctggtagcgtcaacggcgtgaatgccttgggactggtagtttttagtatgtgcttcggttttgttattggaaatatgaaagaacaaggtcaagccctccgagagttcttcgattcactcaacgaggcgattatgagattggtggccgttatcatgtggtacgctcccgtcggcattctctttcttattgcaggaaaaatagtcgaaatggaagacatgggggtcattggagggcaactggcaatgtataccgtgactgtgattgtggggctgctgatccacgctgtgatagttttaccactcttgtattttcttgtgaccaggaaaaatccatgggtgttcataggcggcctgcttcaggcattgattactgcgctgggtaccagttcctcatctgccactctgcccatcacctttaaatgtttggaagagaataacggggtggataaaagggtcactaggttcgtgctacctgtcggcgctacgataaacatggacgggactgccttgtacgaagccctggcagctatattcatcgcacaagtcaataattttgagctcaacttcgggcagattataactatccgggatagattgagaaccaccacaaatgtgctgggagactctcttggggccggaatagtggagcatctgtccagacacgagcttaagaatcgggatgtggaaatgggaaattccgtcattgaggagaacgagatgaagaagccctatcagttgatcgcacaggataatgagacagaaaaacccatcgattcggagaccaaaatgtag

SEQ ID NO: 65185 - DNA, 1494 bp, Artificial Sequence
  derived and/or modified sequence
atgaccaagtctaatggagaggagcccaagatgggaggtaggatggaacgattccaacagggcgtcagaaaacgtacactgctggctaaaaaaaaggtgcagaatataaccaaagaggacgtgaagagttacctgtttagaaatgccttcgttctcctgacagtgacagctgtgatcgtcgggacaatcctgggtttcaccctgagaccgtacaggatgtcctacagggaggtgaagtatttctcattccctggggagctactgatgaggatgctgcagatgctagtgctcccactaatcatctctagtcttgtgactggaatggccgctctggattccaaagctagcggaaagatgggaatgcgggctgtggtgtactatatgacgaccacaatcatcgccgtggtcatcggcattatcattgtgatcattattcatccgggaaaaggaacgaaggagaacatgcaccgagaaggcaagatagtgagggtgacagctgcggatgcttttctagacctgatacgtaatatgttcccacccaacttggtagaggcatgcttcaagcagttcaagactaactatgagaaacggagtttcaaagtgccgatacaggccaacgagacccttgtgggcgcagtaattaacaatgtaagtgaagccatggagacactcactagaataactgaggagttggtgcccgtccctggcagcgtgaatggagtaaatgctttggggctagtggtgttctctatgtgtttcgggttcgttattggtaatatgaaagagcaggggcaagcgctgcgcgaattctttgattctctcaacgaagctatcatgcgtctcgtcgcagtcatcatgtggtacgcccctgtgggcatactgttcttgatagcaggcaaaatcgtggaaatggaggatatgggggtaatcgggggtcagctcgcaatgtacactgtcactgtcattgttggactgttaatccatgccgtgatcgtgctgcccctgctgtacttcctcgtaactaggaagaatccctgggtgtttattggaggactgctgcaggcactgattacagcactcggtacctcctctagcagtgccactctgcccatcacattcaagtgtctggaagagaacaacggcgtggataaacgcgtaactcgcttcgtgctgcctgttggcgcaacgatcaacatggacgggacagcgctctacgaagcactggctgcaatttttattgcacaggtcaataattttgagttaaatttcggacagatcataaccatcagggaccgcctccgcaccaccactaacgtcttaggggatagtctgggggcaggtattgtcgagcacctgtctcgccatgaattgaaaaatcgggatgtggagatgggaaattcggttattgaggaaaacgaaatgaaaaagccgtatcagctgatcgcccaggataatgagactgagaagcccatcgacagcgagactaagatgtag

SEQ ID NO: 65186 - DNA, 3652 bp, Artificial Sequence
  derived and/or modified sequence
ttgtgttttctaataccaaagaggaggtttggctttctgtgggtgattcccagacactgaagtgcaaagaagagaccctcctagaaaagtaaaatatgactaaaagcaatggagaagagcccaagatggggggcaggatggagagattccagcagggagtccgtaaacgcacacttttggccaagaagaaagtgcagaacattacaaaggaggatgttaaaagttacctgtttcggaatgcttttgtgctgctcacagtcaccgctgtcattgtgggtacaatccttggatttaccctccgaccatacagaatgagctaccgggaagtcaagtacttctcctttcctggggaacttctgatgaggatgttacagatgctggtcttaccacttatcatctccagtcttgtcacaggaatggcggcgctagatagtaaggcatcagggaagatgggaatgcgagctgtagtctattatatgactaccaccatcattgctgtggtgattggcataatcattgtcatcatcatccatcctgggaagggcacaaaggaaaacatgcacagagaaggcaaaattgtacgagtgacagctgcagatgccttcctggacttgatcaggaacatgttccctccaaatctggtagaagcctgctttaaacagtttaaaaccaactatgagaagagaagctttaaagtgcccatccaggccaacgaaacgcttgtgggtgctgtgataaacaatgtgtctgaggccatggagactcttacccgaatcacagaggagctggtcccagttccaggatctgtgaatggagtcaatgccctgggtctagttgtcttctccatgtgcttcggttttgtgattggaaacatgaaggaacaggggcaggccctgagagagttctttgattctcttaacgaagccatcatgagactggtagcagtaataatgtggtatgcccccgtgggtattctcttcctgattgctgggaagattgtggagatggaagacatgggtgtgattggggggcagcttgccatgtacaccgtgactgtcattgttggcttactcattcacgcagtcatcgtcttgccactcctctacttcttggtaacacggaaaaacccttgggtttttattggagggttgctgcaagcactcatcaccgctctggggacctcttcaagttctgccaccctacccatcaccttcaagtgcctggaagagaacaatggcgtggacaagcgcgtcaccagattcgtgctccccgtaggagccaccattaacatggatgggactgccctctatgaggctttggctgccattttcattgctcaagttaacaactttgaactgaacttcggacaaattattacaatcagggatcgcctccggaccaccaccaacgtactgggagactccctgggagctgggattgtggagcacttgtcacgacatgaactgaagaacagagatgttgaaatgggtaactcagtgattgaagagaatgaaatgaagaaaccatatcaactgattgcacaggacaatgaaactgagaaacccatcgacagtgaaaccaagatgtagactaacataaagaaacactttcttgagcaccaggtgttaaaaaccattataaaatctttccatctcattacagctcattcgctccagcaagcccgtcatcttccctttcctcccttctgataagactggaaaatagtcctccaaaacacaagggaggattttgggtggccaaagtgtacaattttcatcccacaattgaaatttttaaatcatttcatgttagtcttaccgaataaggtaccaagatcacaaatagtgttgatcagatcttacaagtttatgtggcacacaatcctataaatgtgatttttttatataagttaaagagacaaatagtaggctaaaaacattttaaaatcaacttttgaaatttaaaaatctttcagaatacaattcagttttagtttcaaaatgttaacaacttgaattacaaccggttatcagttggacagtaagattttatccctttctcttctgactggtatacctatttcattagtagctaggtgcacatatacatctagcacagctgtgaggacagacagaaggcaaagtttccatgtggccttgagcaagtcccatctcacctctaggcctcagtgtcctcatctataaaatgagggacttccctagaagtcttcatggtctcttccagcccagacatcctgtgatgtcatgaaagcacctgccctctgtttcccctcagaacaccctgtaccatccatggagcacgaggccttcagaaaagacacttcaatgggagtgaacatttctaactaaggacaggatggctgtgtgtggtggtcaccaggtcctgtgagcaaagtgcaggttatgcaagtcgccaggcaggaggccattccaggagtgggattattcatcaaactctttgcccagttcatcccaatgggggaagtattcccttctttcctactctgggaagaatgtctcctgccactcctcaactgatgatagacttcgaaaacagatgagaagactagcagctagcaagggtgcttgtggtcacactgtggaacactaaagagctaggaaagagttgagcacaggcaacattacaaacaaaggatttgaaaacaccaagagtacaggtcttctttaaggaagaataaaaaagaagaggttcatttttctggctttttttttcacctgaaacactttttctcgagtccaaaatcattccccccgtgaagtctgcttaccaaaacataagacgacttatatatttgaaagaagtcaaatgaatgagctctctaatagaagtccatgagttgagtgggtatttcttatttgaaagtgtttttctttaatcaaaagtccttagaatgagggaaacaaaatatttatttgttttggaatcccacttatcaaatcattcaaaactttcagctggagtggggtttgcttttgttttgtttgtgtccataagagaaatggtagaagatgaatcagtatgaagacactgtcaatgaggttatgagaaaaaaacagcaggggcattagtttcaggcaaggcagctcccaggtttagagattaatttttaccccctaaggaatatccagtcaaagacgctgagtgggagctgtcaggcagtagcagctgtgtttgagtttctggctgaaaatggtgaagaatggacttaattatgctaacaaactgaaaaatctagacatagatcctctgatatacaattagagatatttttatatagaccccaagcattctgtgcataaaagttaacattaggctgtggtgcagtaaccatttaatgtcgaggctctatttcggaaatacactacaaatgttaaagtacgtggctgtcctcttaagacactagtagagcaaagacttaatcatatcaacttaattctgttacacaatatgtgttttttaatatactaaccatttcttatggaaaggtcctgtggggagcccatcctctcgccaagccatcacaggctctgcatacacatgcactcagtgtggactgggaagcattactttgtagatgtattttcaataaagaaaaaaatagttttacatt

SEQ ID NO: 65187 - DNA, 1494 bp, Artificial Sequence
  derived and/or modified sequence
atgaccaagagcaacggcgaggagcccaagatgggcggcagaatggagagattccagcagggcgtgagaaagagaaccctgctggccaagaagaaggtgcagaacatcaccaaggaggacgtgaagagctacctgttcagaaacgccttcgtgctgctgaccgtgaccgccgtgatcgtgggcaccatcctgggcttcaccctgagaccctacagaatgagctacagagaggtgaagtacttcagcttccccggcgagctgctgatgagaatgctgcagatgctggtgctgcccctgatcatcagcagcctggtgaccggcatggccgccctggacagcaaggccagcggcaagatgggcatgagagccgtggtgtactacatgaccaccaccatcatcgccgtggtgatcggcatcatcatcgtgatcatcatccaccccggcaagggcaccaaggagaacatgcacagagagggcaagatcgtgagagtgaccgccgccgacgccttcctggacctgatcagaaacatgttcccccccaacctggtggaggcctgcttcaagcagttcaagaccaactacgagaagagaagcttcaaggtgcccatccaggccaacgagaccctggtgggcgccgtgatcaacaacgtgagcgaggccatggagaccctgaccagaatcaccgaggagctggtgcccgtgcccggcagcgtgaacggcgtgaacgccctgggcctggtggtgttcagcatgtgcttcggcttcgtgatcggcaacatgaaggagcagggccaggccctgagagagttcttcgacagcctgaacgaggccatcatgagactggtggccgtgatcatgtggtacgcccccgtgggcatcctgttcctgatcgccggcaagatcgtggagatggaggacatgggcgtgatcggcggccagctggccatgtacaccgtgaccgtgatcgtgggcctgctgatccacgccgtgatcgtgctgcccctgctgtacttcctggtgaccagaaagaacccctgggtgttcatcggcggcctgctgcaggccctgatcaccgccctgggcaccagcagcagcagcgccaccctgcccatcaccttcaagtgcctggaggagaacaacggcgtggacaagagagtgaccagattcgtgctgcccgtgggcgccaccatcaacatggacggcaccgccctgtacgaggccctggccgccatcttcatcgcccaggtgaacaacttcgagctgaacttcggccagatcatcaccatcagagacagactgagaaccaccaccaacgtgctgggcgacagcctgggcgccggcatcgtggagcacctgagcagacacgagctgaagaacagagacgtggagatgggcaacagcgtgatcgaggagaacgagatgaagaagccctaccagctgatcgcccaggacaacgagaccgagaagcccatcgacagcgagaccaagatgtag

SEQ ID NO: 65188 - protein, 115 aa, Artificial Sequence
  derived and/or modified sequence
MTKSNGEEPKMGGRMERFQQGVRKRTLLAKKKVQNITKEDVKSYLFRNAFVLLTVTAVIVDEKTEAQILTTQLMNTEWDSNPPFRLQVLIHHTVLGAITPILALLQQFAEGLPEV

SEQ ID NO: 65189 - DNA, 348 bp, Artificial Sequence
  derived and/or modified sequence
atgaccaagtcgaatggagaagaacccaaaatgggtggccgcatggagcggtttcagcagggggttcggaagcgcacccttctggccaagaaaaaagtccaaaacataacaaaagaagatgtcaagagttatctctttagaaatgcctttgtgctgctgactgtgaccgcagtgattgtggacgaaaagaccgaggcacagatcctgaccactcagttgatgaacaccgagtgggactctaaccccccattccggctgcaagtactgatccaccacaccgtgctgggagcaataacaccgatccttgccctgctgcagcagtttgctgagggtctgcctgaggtgtag

SEQ ID NO: 65190 - DNA, 348 bp, Artificial Sequence
  derived and/or modified sequence
atgaccaagagcaatggagaggagcccaagatgggcggccgcatggagcgcttccagcagggcgtgaggaagaggaccctgctggccaagaagaaggtgcagaacatcaccaaggaggatgtgaagagctacctgttcagaaatgcctttgtgctgctgactgtgacagctgtgattgtggatgagaagacagaggcccagatcctgaccacccagctgatgaacacagagtgggacagcaacccccccttccggctgcaggtgctgatccaccacacagtgctgggcgccatcacccccatcctggccctgctgcagcagtttgctgagggcctgcctgaggtgtag

SEQ ID NO: 65191 - DNA, 348 bp, Artificial Sequence
  derived and/or modified sequence
atgaccaagagcaacggcgaggagcccaagatgggcggccggatggaacgattccagcaaggtgttcggaaacggactctgttagcaaaaaagaaggtccagaatattacaaaggaggacgtgaagagctacctctttagaaacgccttcgtgctcctgacagtcaccgccgtaatagtcgatgagaagaccgaggcacaaattctgaccactcagctgatgaataccgagtgggactctaacccaccttttagactgcaagtcctgatccatcataccgtccttggcgccatcacaccgatcctggcactgctacagcagtttgccgaaggtcttcccgaggtgtag

SEQ ID NO: 65192 - DNA, 348 bp, Artificial Sequence
  derived and/or modified sequence
atgactaagagcaacggtgaagaaccgaagatgggaggacgcatggaaaggttccaacagggcgttagaaaacggaccttactggccaaaaagaaagtgcagaacattactaaggaagacgtgaagtcctatctgttccgcaacgctttcgtgcttctcacagtcacagcagttatagttgatgaaaagaccgaggcccagatcttgaccactcagctcatgaatacggagtgggactcaaatcctccttttagattacaggtactgattcaccatacagtcttgggtgcaattactccaatactcgcactacttcagcagttcgccgagggtctccccgaagtctag

SEQ ID NO: 65193 - DNA, 558 bp, Artificial Sequence
  derived and/or modified sequence
acactgtcagggctagcctgcctgcttacgcgcgctgcggattgttgctccgttgtacctgctggggaattcacctcgttactgcttgatatcttccaccccttacaaaatcagaaaagttgtgttttctaataccaaagaggaggtttggctttctgtgggtgattcccagacactgaagtgcaaagaagagaccctcctagaaaagtaaaatatgactaaaagcaatggagaagagcccaagatggggggcaggatggagagattccagcagggagtccgtaaacgcacacttttggccaagaagaaagtgcagaacattacaaaggaggatgttaaaagttacctgtttcggaatgcttttgtgctgctcacagtcaccgctgtcattgtggatgaaaaaactgaagcccaaatccttaccacacagctgatgaatactgagtgggattcaaatccaccattccggctccaggtgctcattcaccacactgttctgggtgctataacacccattctggctttactccagcaatttgctgagggtctgcctgaggt

SEQ ID NO: 65194 - DNA, 348 bp, Artificial Sequence
  derived and/or modified sequence
atgaccaagagcaacggcgaggagcccaagatgggcggcagaatggagagattccagcagggcgtgagaaagagaaccctgctggccaagaagaaggtgcagaacatcaccaaggaggacgtgaagagctacctgttcagaaacgccttcgtgctgctgaccgtgaccgccgtgatcgtggacgagaagaccgaggcccagatcctgaccacccagctgatgaacaccgagtgggacagcaacccccccttcagactgcaggtgctgatccaccacaccgtgctgggcgccatcacccccatcctggccctgctgcagcagttcgccgagggcctgcccgaggtgtag

SEQ ID NO: 65195 - protein, 501 aa, Artificial Sequence
  derived and/or modified sequence
MGNFKSRKPKSIFKAESGRSHGESQETEHVVSSQSECQVRAGTPAHESPQNNAFKCQETVRLQPRIDQRTAISPKDAFETRQDLNEEEAAQVHGVKDPAPASTQSVLADGTDSADPSPVHKDGQNEADSAPEDLHSVGTSRLLYHITDGDNPLLSPRCSIFSQSQRFNLDPESAPSPPSTQQFMMPRSSSRCSCGDGKEPQTITQLTKHIQSLKRKIRKFEEKFEQEKKYRPSHGDKTSNPEVLKWMNDLAKGRKQLKELKLKLSEEQGSAPKGPPRNLLCEQPTVPRENGKPEAAGPEPSSSGEETPDAALTCLKERREQLPPQEDSKVTKQDKNLIKPLYDRYRIIKQILSTPSLIPTIEEEDSDEDRPQGSQQPSLADPASHLPVGDHLTYSNETEPVRALLPDEKKEVKPPALSMSNLHEATMPVLLDHLRETRADKKRLRKALREFEEQFFKQTGRSPQKEDRIPMADEYYEYKHIKAKLRLLEVLISKQDVAKTI

SEQ ID NO: 65196 - DNA, 1506 bp, Artificial Sequence
  derived and/or modified sequence
atgggcaacttcaagagcagaaagcccaagagcatcttcaaggccgagagcggcagaagccacggcgagagccaggagaccgagcacgtggtgagcagccagagcgagtgccaggtgagagccggcacccccgcccacgagagcccccagaacaacgccttcaagtgccaggagaccgtgagactgcagcccagaatcgaccagagaaccgccatcagccccaaggacgccttcgagaccagacaggacctgaacgaggaggaggccgcccaggtgcacggcgtgaaggaccccgcccccgccagcacccagagcgtgctggccgacggcaccgacagcgccgaccccagccccgtgcacaaggacggccagaacgaggccgacagcgcccccgaggacctgcacagcgtgggcaccagcagactgctgtaccacatcaccgacggcgacaaccccctgctgagccccagatgcagcatcttcagccagagccagagattcaacctggaccccgagagcgcccccagcccccccagcacccagcagttcatgatgcccagaagcagcagcagatgcagctgcggcgacggcaaggagccccagaccatcacccagctgaccaagcacatccagagcctgaagagaaagatcagaaagttcgaggagaagttcgagcaggagaagaagtacagacccagccacggcgacaagaccagcaaccccgaggtgctgaagtggatgaacgacctggccaagggcagaaagcagctgaaggagctgaagctgaagctgagcgaggagcagggcagcgcccccaagggcccccccagaaacctgctgtgcgagcagcccaccgtgcccagagagaacggcaagcccgaggccgccggccccgagcccagcagcagcggcgaggagacccccgacgccgccctgacctgcctgaaggagagaagagagcagctgcccccccaggaggacagcaaggtgaccaagcaggacaagaacctgatcaagcccctgtacgacagatacagaatcatcaagcagatcctgagcacccccagcctgatccccaccatcgaggaggaggacagcgacgaggacagaccccagggcagccagcagcccagcctggccgaccccgccagccacctgcccgtgggcgaccacctgacctacagcaacgagaccgagcccgtgagagccctgctgcccgacgagaagaaggaggtgaagccccccgccctgagcatgagcaacctgcacgaggccaccatgcccgtgctgctggaccacctgagagagaccagagccgacaagaagagactgagaaaggccctgagagagttcgaggagcagttcttcaagcagaccggcagaagcccccagaaggaggacagaatccccatggccgacgagtactacgagtacaagcacatcaaggccaagctgagactgctggaggtgctgatcagcaagcaggacgtggccaagaccatctag

SEQ ID NO: 65197 - DNA, 1506 bp, Artificial Sequence
  derived and/or modified sequence
atgggcaactttaagtcccgtaaacccaagagtatctttaaggccgaaagcgggaggagtcatggagaaagccaagaaaccgaacatgtggtgtcgtcacagagcgagtgccaggtacgcgctggcactccagctcatgaaagtccccagaataatgcctttaagtgtcaagaaactgtccggttgcagcctcgaatcgaccagcgaacagccatctctcccaaggatgccttcgagaccaggcaggacctgaatgaggaggaagcggctcaggtgcacggcgtcaaagaccctgcacccgccagcactcaaagtgtccttgccgacggcactgatagcgccgaccccagccccgttcacaaggatggacagaacgaagccgactccgctccagaagacctccatagcgtgggcacctcgcgattgctctatcacattacagatggagacaacccgctgctcagccctcggtgttccatctttagccagagtcagcggttcaacttggacccagaatctgcaccatctcctccgtcaactcagcagtttatgatgccaaggtctagctcccggtgttcctgcggcgacgggaaggagccacagactattacccagctgaccaaacacatccagtcactgaaaagaaaaatcaggaaatttgaggaaaaattcgagcaggagaagaaatatagaccatcacacggcgataaaacctctaacccagaggtgctgaaatggatgaacgacttagctaagggccgcaagcaactaaaggaactgaagctgaagctgagcgaggaacaaggttcagctcctaagggcccaccgcgcaatctcctctgtgagcagccaaccgttcccagggaaaacggcaagcctgaggccgcgggaccagagccctccagctccggggaagagacgcctgacgctgcactcacttgcctgaaagaacgccgcgagcagctgcccccccaggaggattctaaggtcaccaagcaggacaagaatctgatcaagcctctttacgataggtaccgtattataaagcaaattctttccacaccctccttgatccctactatcgaagaggaggactccgacgaggacaggccacagggctcacagcagcccagcctcgctgatcccgcttctcacctgccggtgggggaccacctgacttacagcaatgagactgagcctgttagagccctgctgcctgatgaaaaaaaggaggttaagccaccagctctgtccatgagtaatttgcacgaggcgacaatgcctgtattgctggatcacctgagagaaacccgggccgacaaaaagcgcttgcgcaaggcactacgagagttcgaagaacaatttttcaagcagacaggaagatccccgcagaaggaggaccgcatccctatggcagacgaatactacgaatataaacatataaaggccaagttgaggttactggaggtgctcattagtaaacaggatgtcgctaagaccatttag

SEQ ID NO: 65198 - DNA, 1506 bp, Artificial Sequence
  derived and/or modified sequence
atgggcaacttcaagagcaggaagcccaagagcatcttcaaggccgagagcggccgcagccatggagagagccaggagacagaacatgtggtgagcagccagagcgagtgccaggtgcgggccggcaccccagcccacgagagcccccagaacaatgccttcaagtgccaggagaccgtgcggctgcagcccagaattgaccagaggacagccatcagccccaaggatgcctttgagacccggcaggacctgaatgaggaggaggccgcccaggtgcatggagtgaaggaccctgccccagccagcacccagagcgtgctggctgatggaacagattctgctgaccccagccctgtgcacaaggatggccagaatgaagctgacagcgcccctgaggacctgcacagcgtgggcaccagccggctgctgtaccacatcacagatggagacaaccccctgctgagcccccgctgcagcatcttcagccagagccagcgcttcaacctggaccctgagagcgcccccagcccccccagcacccagcagttcatgatgcccaggagcagcagccgctgcagctgtggagatggcaaggagccccagaccatcacccagctgaccaagcacatccagagcctgaagaggaagatcaggaagtttgaggagaagtttgagcaggagaagaagtaccggcccagccacggggacaagaccagcaaccctgaggtgctgaagtggatgaatgacctggccaagggcaggaagcagctgaaggagctgaagctgaagctgtctgaggagcagggcagcgcccccaagggccccccaagaaacctgctgtgtgagcagcccaccgtgcccagagaaaatggcaagccagaggccgccggccctgagcccagcagcagtggagaggagaccccagatgctgccctgacctgcctgaaggagcggcgggagcagctgcccccccaggaggacagcaaggtgaccaagcaggacaagaacctgatcaagcccctgtatgaccgctaccgcatcatcaagcagatcctgagcacccccagcctcatccccaccatcgaggaggaggacagtgatgaggaccggccccagggcagccagcagcccagcctggccgaccctgccagccacctgcctgtgggggaccacctgacctacagcaatgaaacagagcctgtgcgggccctgctgcctgatgagaagaaggaggtgaagcccccagccctgtccatgagcaacctgcacgaggccaccatgcctgtgctgctggaccacctgcgggagaccagggctgacaagaagaggctgaggaaggccctgcgggagtttgaggagcagttcttcaagcagacaggccgcagcccccagaaggaggaccgcatccccatggctgatgagtactatgagtacaagcacatcaaggccaagctgcggctgctggaggtgctgatcagcaagcaggatgtggccaagaccatctag

SEQ ID NO: 65199 - DNA, 1506 bp, Artificial Sequence
  derived and/or modified sequence
atgggcaacttcaagagccggaagcccaagagcatcttcaaggccgagagcgggagatcccatggggaatctcaggaaaccgagcacgttgtgagttcccagtctgaatgccaggtgcgggctggaactcccgcccatgagtcaccccaaaacaacgcgtttaagtgtcaagagactgttcggctgcagccaagaatagaccagagaactgctatttctccaaaggacgcgtttgagacgagacaagacttgaatgaggaagaggcggcgcaagtgcacggcgttaaagacccagccccagcgagcacccagagtgtgctcgccgatggcactgatagcgccgacccctctcccgtgcacaaggatggccagaatgaggcagactctgcccctgaagatctgcatagcgtagggacgagccgactgctttaccatatcactgatggcgataatcctttgctgtcaccccgatgctcaattttctcacagtcccaaagatttaatcttgacccagaatctgccccctctcctccaagtacacagcaattcatgatgcccagatcgtcctccagatgtagctgcggagatggcaaggaacctcagactatcacccaacttaccaagcacatccagtctctcaagcgaaagattcggaaattcgaggaaaaattcgagcaagagaaaaagtatcggcccagccacggagacaaaacatcaaaccctgaagtgctcaagtggatgaacgatttagccaaggggcggaagcagctgaaggagctgaaactgaaactttccgaagagcaagggtcagctccaaaaggtcctcctaggaatctcctctgcgaacagccgaccgtcccccgagaaaacggcaagcccgaggcagcgggtccggaaccctcttcatccggcgaggagacaccagacgccgccctaacctgtcttaaggagagaagggagcagctgcccccgcaagaggattcaaaagtgactaagcaagataagaacctgattaagcctttgtatgaccggtatcggatcattaaacagatcctgtccactccctctcttattcccactatcgaagaagaggattcggacgaggaccgcccgcaggggtcgcaacaacctagtctggccgatcccgcgtctcacctccccgtcggcgatcatcttacttactccaacgagacagagcccgtgcgggctctcctccctgatgagaaaaaggaagtaaaaccacctgcactgagcatgtctaacctgcatgaggctactatgccagtgctactggatcatctccgcgaaaccagggcagacaaaaaacgtttaagaaaagctctgagggagttcgaggaacagttcttcaagcaaaccggcaggtcccctcagaaagaggaccgaattcctatggcagatgaatattatgaatataaacatattaaagcaaaactcaggcttctggaggtgctgatctccaagcaagatgtggccaagactatttag

SEQ ID NO: 65200 - DNA, 1506 bp, Artificial Sequence
  derived and/or modified sequence
atgggcaactttaagagccgcaagccgaagtctatctttaaggccgagagcggacgatcgcatggcgagtcccaggaaacagaacacgttgtcagctcccagagcgaatgccaggtgcgcgctgggactccagcccatgagagcccccagaacaacgcttttaaatgtcaggagaccgtgagactgcagccccgaattgaccaaagaaccgccatatcacctaaggatgctttcgaaacccgtcaagaccttaacgaggaggaggccgcacaggtacacggcgtgaaggatcccgctcctgctagcacccagagcgtgcttgccgacgggactgattccgcggacccatcacccgtgcataaagatggacagaacgaagccgattctgcgccagaggacctgcattcggttggcacaagcagattgctgtaccatatcacggacggggataaccctctgctgagtcctcggtgttccatcttttcccagagtcagaggtttaatctcgacccggaaagtgccccttctcctccttccacacagcagtttatgatgccgcgttcgtccagcaggtgttcgtgtggagacggcaaggagccccaaaccataactcagctgaccaaacacattcaaagtctgaaacggaaaattagaaaattcgaggagaagttcgaacaggagaagaagtacagaccctcgcatggggacaaaacaagtaatccagaagtccttaaatggatgaatgatctggcaaaaggtaggaaacagcttaaggaactgaaactgaaattaagtgaagaacagggttctgcgcctaagggccctccaaggaacctcttgtgtgaacagcccacagtgccccgtgaaaacggtaaacctgaggccgcagggcctgagccttcttcgtctggcgaagaaacgcctgatgccgctttgacctgtttgaaggaacggagagagcagctcccccctcaggaagacagcaaggtcacgaagcaagataagaacctgattaagccattgtatgaccggtaccgcattatcaagcagattctctctacgccttccctcatcccaaccatcgaggaagaggactctgatgaggaccgaccgcaggggagtcagcagccctctcttgctgatcccgcttcacacctgccagtcggtgaccatttgacgtacagcaatgagacagaacccgtgcgggcactcctgccagatgaaaaaaaggaggtgaagcctcctgcactgagtatgtctaacctgcatgaagccaccatgcctgttctcctggaccacttaagggagacgcgcgctgacaagaagagactccgcaaggcgctgcgcgaatttgaagagcaatttttcaaacaaactgggaggtctccccagaaggaggaccggatacccatggccgacgagtactatgagtataaacacattaaagccaaattgcgtctcctggaggtgctgatctccaaacaagacgtcgccaaaactatctag

SEQ ID NO: 65201 - protein, 166 aa, Artificial Sequence
  derived and/or modified sequence
MPPLWALLALGCLRFGSAVNLQPQLASVTFATNNPTLTTVALEKPLCMFDSKEALTGTHEVYLYVLVDSVTPYSTIDTWPGRRSGGMIVITSILGSLPFFLLVGFAGAIALSLVDMGSSDGETTHDSQITQEAVPKSLGASESSYTSVNRGPPLDRAEVYSSKLQD

SEQ ID NO: 65202 - DNA, 501 bp, Artificial Sequence
  derived and/or modified sequence
atgccccccctgtgggccctgctggccctgggctgcctgagattcggcagcgccgtgaacctgcagccccagctggccagcgtgaccttcgccaccaacaaccccaccctgaccaccgtggccctggagaagcccctgtgcatgttcgacagcaaggaggccctgaccggcacccacgaggtgtacctgtacgtgctggtggacagcgtgaccccctacagcaccatcgacacctggcccggcagaagaagcggcggcatgatcgtgatcaccagcatcctgggcagcctgcccttcttcctgctggtgggcttcgccggcgccatcgccctgagcctggtggacatgggcagcagcgacggcgagaccacccacgacagccagatcacccaggaggccgtgcccaagagcctgggcgccagcgagagcagctacaccagcgtgaacagaggcccccccctggacagagccgaggtgtacagcagcaagctgcaggactag

SEQ ID NO: 65203 - DNA, 501 bp, Artificial Sequence
  derived and/or modified sequence
atgccaccgctctgggcactcttagccctcgggtgcttgcggtttggctccgctgttaatttgcagccacagctggcatctgtgactttcgccactaacaaccccaccctcaccactgtggcactagaaaagccactgtgcatgtttgacagcaaggaggctttaaccggcactcatgaggtctacctctatgtccttgtggacagtgttaccccatacagtaccatagacacctggccaggaaggaggtccggagggatgatcgtgattacatcaatcctgggtagtttgcctttctttctcttggtcggatttgccggcgctatcgcactttctctggtggacatgggctcatctgacggtgaaacgacgcatgactcgcagatcacccaggaggcagttcctaagtcactgggggcaagcgagtcctcatacacatctgtcaacagaggaccccctctggatagggccgaggtttattcatcaaagcttcaagactag

SEQ ID NO: 65204 - DNA, 501 bp, Artificial Sequence
  derived and/or modified sequence
atgccacccctgtgggccctgctggccctgggctgcctgcgctttggatctgctgtgaacctgcagccccagctggcctctgtgacctttgccaccaacaaccccaccctgaccaccgtggccctggagaagcccctgtgcatgtttgacagcaaggaggccctgaccggcacccatgaggtgtacctgtatgtgctggtggacagcgtgaccccctacagcaccatcgacacctggccaggccgccgcagcggcggcatgatcgtcatcaccagcatcctgggcagcctgcccttcttcctgctggtgggctttgctggggccatcgccctgagcctggtggacatgggcagcagtgatggagagaccacccatgacagccagatcacccaggaggccgtgcccaagagcctgggcgccagcgagagcagctacacctctgtgaacagaggcccccccctggacagagctgaggtgtacagcagcaagctgcaggactag

SEQ ID NO: 65205 - DNA, 501 bp, Artificial Sequence
  derived and/or modified sequence
atgccccccctgtgggccctgctggccctgggctgcctgcggttcggctcagcagtcaacctacaaccccaactcgcctctgtgacctttgccaccaacaacccaacccttacaacagtggccctggaaaaaccgctctgtatgtttgatagcaaggaagccctcacagggacccacgaggtttacttgtacgtcctcgttgactctgtcaccccttacagtactatagacacatggcccggtcgccggagtggtggcatgattgtgattactagtattctgggctcgctaccgttttttctgttggtggggttcgctggggctatcgcactatcgttagtcgatatgggcagctccgatggagagacaacgcatgacagtcagatcacccaggaagctgtccctaagagtctaggcgcgagtgagtccagctacacttctgttaatagagggcctcccctcgacagagccgaggtctatagtagcaaattgcaggactag

SEQ ID NO: 65206 - DNA, 501 bp, Artificial Sequence
  derived and/or modified sequence
atgcctccactgtgggctctcctcgccctgggttgcctgcgctttggcagcgctgtgaatttgcagccgcagctagccagtgtcaccttcgctacaaataaccctactctgacgacagtggcactcgaaaagccattatgtatgttcgatagtaaggaggccctgactggcacgcatgaggtgtacctgtacgtgttagtggattctgttactccctattctaccatcgacacctggcccggtagaaggtccggcggtatgatcgtaataaccagcatactaggatcactccctttcttcttgctggtggggtttgccggtgccattgcactgtctttggtggacatgggcagttctgatggtgagaccacccatgactcccaaatcactcaggaggccgtgcccaagtctctcggggcaagcgaatctagttacactagcgtgaacaggggcccaccattagatagagccgaggtgtactcaagcaagctgcaggactag

SEQ ID NO: 65207 - DNA, 627 bp, Artificial Sequence
  derived and/or modified sequence
gctctggcggctcctcccgggcgatgcctccgctctgggccctgctggccctcggctgcctgcggttcggctcggctgtgaacctgcagccccaactggccagtgtgactttcgccaccaacaaccccacacttaccactgtggccttggaaaagcctctctgcatgtttgacagcaaagaggccctcactggcacccacgaggtctacctgtatgtcctggtcgactcagtcaccccatactcgacgatcgacacgtggccaggccggcggagcggaggcatgatcgtcatcacttccatcctgggctccctgcccttctttctacttgtgggttttgctggcgccattgccctcagcctcgtggacatggggagttctgatggggaaacgactcacgactcccaaatcactcaggaggctgttcccaagtcgctgggggcctcggagtcttcctacacgtccgtgaaccgggggccgccactggacagggctgaggtgtattccagcaagctccaagactgagcccagcaccacccctgggcagcagcatcctcctctctggccttgccccaggccctgcagcggtggttgtcacaccctgacttcagggaaggtgaaacagggc

SEQ ID NO: 65208 - protein, 815 aa, Artificial Sequence
  derived and/or modified sequence
MSQSPAFGPRRGSSPRGAAGAAARRNESQDYLLMDSELGEDGCPQAPLPCYGYYPCFRGSDNRLAHRRQTVLREKGRRLANRGPAYMFSDRSTSLSIEEERFLDAAEYGNIPVVRKMLEECHSLNVNCVDYMGQNALQLAVANEHLEITELLLKKENLSRVGDALLLAISKGYVRIVEAILSHPAFAEGKRLATSPSQSELQQDDFYAYDEDGTRFSHDVTPIILAAHCQEYEIVHTLLRKGARIERPHDYFCKCNDCNQKQKHDSFSHSRSRINAYKGLASPAYLSLSSEDPVMTALELSNELAVLANIEKEFKMGKIMRGPFMKFVAHAASFTIFLGLLVMNAADRFEGTKLLPNETSTDNAKQLFRMKTSCFSWMEMLIISWVIGMIWAECKEIWTQGPKEYLFELWNMLDFGMLAIFAASFIARFMAFWHASKAQSIIDANDTLKDLTKVTLGDNVKYYNLARIKWDPSDPQIISEGLYAIAVVLSFSRIAYILPANESFGPLQISLGRTVKDIFKFMVIFIMVFVAFMIGMFNLYSYYIGAKQNEAFTTVEESFKTLFWAIFGLSEVKSVVINYNHKFIENIGYVLYGVYNVTMVIVLLNMLIAMINSSFQEIEDDADVEWKFARAKLWFSYFEEGRTLPVPFNLVPSPKSLFYLLLKLKKWISELFQGHKKGFQEDAEMNKINEEKKLGILGSHEDLSKLSLDKKQVGHNKQPSIRSSEDFHLNSFNNPPRQYQKIMKRLIKRYVLQAQIDKESDEVNEGELKEIKQDISSLRYELLEEKSQNTEDLAELIRELGEKLSMEPNQEETNR

SEQ ID NO: 65209 - protein, 746 aa, Artificial Sequence
  derived and/or modified sequence
MLRNSTFKNMQRRHTTLREKGRRQAIRGPAYMFNEKGTSLTPEEERFLDSAEYGNIPVVRKMLEESKTLNFNCVDYMGQNALQLAVGNEHLEVTELLLKKENLARVGDALLLAISKGYVRIVEAILNHPAFAQGQRLTLSPLEQELRDDDFYAYDEDGTRFSHDITPIILAAHCQEYEIVHILLLKGARIERPHDYFCKCNECTEKQRKDSFSHSRSRMNAYKGLASAAYLSLSSEDPVLTALELSNELARLANIETEFKLGRTLRSPFMKFVAHAVSFTIFLGLLVVNASDRFEGVKTLPNETFTDYPKQIFRVKTTQFSWTEMLIMKWVLGMIWSECKEIWEEGPREYVLHLWNLLDFGMLSIFVASFTARFMAFLKATEAQLYVDQHVQDDTLHNVSLPPEVAYFTYARDKWWPSDPQIISEGLYAIAVVLSFSRIAYILPANESFGPLQISLGRTVKDIFKFMVIFIMVFVAFMIGMFNLYSYYRGAKYNPAFTTVEESFKTLFWSIFGLSEVISVVLKYDHKFIENIGYVLYGVYNVTMVVVLLNMLIAMINNSYQEIEEDADVEWKFARAKLWLSYFDEGRTLPAPFNLVPSPKSFYYLIMRIKMCLIKLCKSKAKSCENDLEMGMLNSKFKKTRYQAGMRNSENLTANNTLSKPTRYQKIMKRLIKRYVLKAQVDRENDEVNEGELKEIKQDISSLRYELLEEKSQATGELADLIQQLSEKFGKNLNKDHLRVNKGKDI

SEQ ID NO: 65210 - DNA, 2448 bp, Artificial Sequence
  derived and/or modified sequence
atgagccagagccccgccttcggccccagaagaggcagcagccccagaggcgccgccggcgccgccgccagaagaaacgagagccaggactacctgctgatggacagcgagctgggcgaggacggctgcccccaggcccccctgccctgctacggctactacccctgcttcagaggcagcgacaacagactggcccacagaagacagaccgtgctgagagagaagggcagaagactggccaacagaggccccgcctacatgttcagcgacagaagcaccagcctgagcatcgaggaggagagattcctggacgccgccgagtacggcaacatccccgtggtgagaaagatgctggaggagtgccacagcctgaacgtgaactgcgtggactacatgggccagaacgccctgcagctggccgtggccaacgagcacctggagatcaccgagctgctgctgaagaaggagaacctgagcagagtgggcgacgccctgctgctggccatcagcaagggctacgtgagaatcgtggaggccatcctgagccaccccgccttcgccgagggcaagagactggccaccagccccagccagagcgagctgcagcaggacgacttctacgcctacgacgaggacggcaccagattcagccacgacgtgacccccatcatcctggccgcccactgccaggagtacgagatcgtgcacaccctgctgagaaagggcgccagaatcgagagaccccacgactacttctgcaagtgcaacgactgcaaccagaagcagaagcacgacagcttcagccacagcagaagcagaatcaacgcctacaagggcctggccagccccgcctacctgagcctgagcagcgaggaccccgtgatgaccgccctggagctgagcaacgagctggccgtgctggccaacatcgagaaggagttcaagatgggcaagatcatgagaggccccttcatgaagttcgtggcccacgccgccagcttcaccatcttcctgggcctgctggtgatgaacgccgccgacagattcgagggcaccaagctgctgcccaacgagaccagcaccgacaacgccaagcagctgttcagaatgaagaccagctgcttcagctggatggagatgctgatcatcagctgggtgatcggcatgatctgggccgagtgcaaggagatctggacccagggccccaaggagtacctgttcgagctgtggaacatgctggacttcggcatgctggccatcttcgccgccagcttcatcgccagattcatggccttctggcacgccagcaaggcccagagcatcatcgacgccaacgacaccctgaaggacctgaccaaggtgaccctgggcgacaacgtgaagtactacaacctggccagaatcaagtgggaccccagcgacccccagatcatcagcgagggcctgtacgccatcgccgtggtgctgagcttcagcagaatcgcctacatcctgcccgccaacgagagcttcggccccctgcagatcagcctgggcagaaccgtgaaggacatcttcaagttcatggtgatcttcatcatggtgttcgtggccttcatgatcggcatgttcaacctgtacagctactacatcggcgccaagcagaacgaggccttcaccaccgtggaggagagcttcaagaccctgttctgggccatcttcggcctgagcgaggtgaagagcgtggtgatcaactacaaccacaagttcatcgagaacatcggctacgtgctgtacggcgtgtacaacgtgaccatggtgatcgtgctgctgaacatgctgatcgccatgatcaacagcagcttccaggagatcgaggacgacgccgacgtggagtggaagttcgccagagccaagctgtggttcagctacttcgaggagggcagaaccctgcccgtgcccttcaacctggtgcccagccccaagagcctgttctacctgctgctgaagctgaagaagtggatcagcgagctgttccagggccacaagaagggcttccaggaggacgccgagatgaacaagatcaacgaggagaagaagctgggcatcctgggcagccacgaggacctgagcaagctgagcctggacaagaagcaggtgggccacaacaagcagcccagcatcagaagcagcgaggacttccacctgaacagcttcaacaacccccccagacagtaccagaagatcatgaagagactgatcaagagatacgtgctgcaggcccagatcgacaaggagagcgacgaggtgaacgagggcgagctgaaggagatcaagcaggacatcagcagcctgagatacgagctgctggaggagaagagccagaacaccgaggacctggccgagctgatcagagagctgggcgagaagctgagcatggagcccaaccaggaggagaccaacagatag

SEQ ID NO: 65211 - DNA, 2241 bp, Artificial Sequence
  derived and/or modified sequence
atgctgagaaacagcaccttcaagaacatgcagagaagacacaccaccctgagagagaagggcagaagacaggccatcagaggccccgcctacatgttcaacgagaagggcaccagcctgacccccgaggaggagagattcctggacagcgccgagtacggcaacatccccgtggtgagaaagatgctggaggagagcaagaccctgaacttcaactgcgtggactacatgggccagaacgccctgcagctggccgtgggcaacgagcacctggaggtgaccgagctgctgctgaagaaggagaacctggccagagtgggcgacgccctgctgctggccatcagcaagggctacgtgagaatcgtggaggccatcctgaaccaccccgccttcgcccagggccagagactgaccctgagccccctggagcaggagctgagagacgacgacttctacgcctacgacgaggacggcaccagattcagccacgacatcacccccatcatcctggccgcccactgccaggagtacgagatcgtgcacatcctgctgctgaagggcgccagaatcgagagaccccacgactacttctgcaagtgcaacgagtgcaccgagaagcagagaaaggacagcttcagccacagcagaagcagaatgaacgcctacaagggcctggccagcgccgcctacctgagcctgagcagcgaggaccccgtgctgaccgccctggagctgagcaacgagctggccagactggccaacatcgagaccgagttcaagctgggcagaaccctgagaagccccttcatgaagttcgtggcccacgccgtgagcttcaccatcttcctgggcctgctggtggtgaacgccagcgacagattcgagggcgtgaagaccctgcccaacgagaccttcaccgactaccccaagcagatcttcagagtgaagaccacccagttcagctggaccgagatgctgatcatgaagtgggtgctgggcatgatctggagcgagtgcaaggagatctgggaggagggccccagagagtacgtgctgcacctgtggaacctgctggacttcggcatgctgagcatcttcgtggccagcttcaccgccagattcatggccttcctgaaggccaccgaggcccagctgtacgtggaccagcacgtgcaggacgacaccctgcacaacgtgagcctgccccccgaggtggcctacttcacctacgccagagacaagtggtggcccagcgacccccagatcatcagcgagggcctgtacgccatcgccgtggtgctgagcttcagcagaatcgcctacatcctgcccgccaacgagagcttcggccccctgcagatcagcctgggcagaaccgtgaaggacatcttcaagttcatggtgatcttcatcatggtgttcgtggccttcatgatcggcatgttcaacctgtacagctactacagaggcgccaagtacaaccccgccttcaccaccgtggaggagagcttcaagaccctgttctggagcatcttcggcctgagcgaggtgatcagcgtggtgctgaagtacgaccacaagttcatcgagaacatcggctacgtgctgtacggcgtgtacaacgtgaccatggtggtggtgctgctgaacatgctgatcgccatgatcaacaacagctaccaggagatcgaggaggacgccgacgtggagtggaagttcgccagagccaagctgtggctgagctacttcgacgagggcagaaccctgcccgcccccttcaacctggtgcccagccccaagagcttctactacctgatcatgagaatcaagatgtgcctgatcaagctgtgcaagagcaaggccaagagctgcgagaacgacctggagatgggcatgctgaacagcaagttcaagaagaccagataccaggccggcatgagaaacagcgagaacctgaccgccaacaacaccctgagcaagcccaccagataccagaagatcatgaagagactgatcaagagatacgtgctgaaggcccaggtggacagagagaacgacgaggtgaacgagggcgagctgaaggagatcaagcaggacatcagcagcctgagatacgagctgctggaggagaagagccaggccaccggcgagctggccgacctgatccagcagctgagcgagaagttcggcaagaacctgaacaaggaccacctgagagtgaacaagggcaaggacatctag

SEQ ID NO: 65212 - DNA, 2448 bp, Artificial Sequence
  derived and/or modified sequence
atgtctcagagccctgctttcggtccacgccgcggaagtagccctcggggcgcagccggtgctgcagcccggaggaacgagagccaggactaccttcttatggattctgagttgggagaggatggctgcccccaagccccactgccctgctatggctattatccatgcttccgtggctcagataacaggttggcccacagacgccagactgtcctcagggagaaggggagaaggttagccaacagaggacccgcctatatgttttctgatcgaagcacttcgttgtctattgaggaagaacggttcctggatgcggccgaatacgggaatataccagtggtgcgtaagatgctggaagaatgtcatagtctgaatgtgaattgcgttgactatatggggcagaacgccttacagttggcggtcgcgaacgaacacctggaaatcaccgaactgcttttaaagaaggaaaacctgagcagagtcggggacgccctgcttctggcaatctctaaaggctacgtaagaatcgtcgaggccattctctcccacccagcatttgccgagggcaagagactagccacctctccgagtcagagcgaactacagcaggacgacttttacgcatatgatgaggatgggacccgcttcagccatgacgtgacccccatcattctggcggcacattgccaggagtatgaaatcgtgcacacgctgctacgcaaaggagcccggattgagcggcctcacgactatttctgcaagtgcaacgattgtaatcaaaagcagaaacacgattctttttcccattcacgtagcagaataaacgcctacaagggactggcatcgcccgcctacctttccttaagctccgaagacccggtgatgacagccctggagttgtctaacgagctggcggttctggccaatatcgagaaggagtttaaaatgggtaagataatgcgcggaccatttatgaaatttgttgcccatgcggccagctttacgatattcctaggcctgctggtgatgaacgcagctgaccgttttgagggcactaaacttttgcccaacgaaacctccaccgacaacgccaaacaactctttagaatgaagactagttgcttctcctggatggaaatgctgattatctcttgggtgattggcatgatttgggctgagtgcaaggaaatttggacgcaagggcctaaggagtatctgttcgaactttggaacatgctcgacttcggcatgttggccatcttcgcagcctcatttatagcccgcttcatggccttttggcacgcttccaaagcccagtctattatagacgcaaatgacacccttaaggatcttacaaaggtcacactaggcgacaatgttaagtactataacctggcccgaataaaatgggatcctagtgacccgcaaataatctcagaggggctgtatgccatcgctgtcgtgctttcattttcgcgaatcgcatacattctcccggccaacgagtcctttggacctctccagatcagcctgggtagaactgtaaaggatatatttaaattcatggtgatctttattatggtattcgtggccttcatgattggtatgtttaatctctattcctactacatcggtgccaaacagaatgaagccttcaccactgtagaggaatcttttaaaactcttttctgggccatttttggattgagcgaggtcaagtcagtggtgatcaattacaaccataagtttatcgaaaacattgggtacgtgctgtacggcgtgtataacgtcactatggtgattgttctgttgaatatgctcattgccatgattaattcgtcatttcaggaaatagaggacgatgccgacgtagaatggaaattcgcccgtgccaaattatggttttcgtactttgaagaaggtcgaactctgcctgtgcccttcaacctagtaccatcgccaaaaagtcttttttaccttctgctcaagctcaaaaaatggatcagtgagctgtttcaagggcataagaagggcttccaggaagacgcagagatgaataagattaacgaggagaagaaattaggcatcctcggctcccacgaagatctgtctaagctaagcttggataagaagcaggtgggccataataagcaaccctctattcggtcctccgaagattttcatctcaactcctttaacaacccgcctaggcagtaccaaaagataatgaagcggcttattaaaaggtatgtattgcaggctcaaatcgataaggagagtgacgaggtgaatgagggagagctcaaggaaattaaacaggatatctcatccctgcggtacgaactgttggaagaaaagtctcagaatacagaagatctggctgagttaatccgggaactaggtgagaagttgagcatggagcccaaccaggaagaaacaaacagatag

SEQ ID NO: 65213 - DNA, 2241 bp, Artificial Sequence
  derived and/or modified sequence
atgctacggaatagcacctttaagaacatgcagaggagacacactacattgagggagaaaggacgcagacaagcgattaggggacctgcatacatgttcaacgaaaagggcacgtccttaacccccgaagaggagaggttcctggacagcgccgagtacggtaacatccctgtggtgcgtaagatgcttgaggaaagtaagactctcaactttaattgtgtggactacatgggtcagaacgcactgcagctggcggttggtaacgagcacttggaggtgacagagctgttgctgaaaaaagagaatctggcacgagtcggcgatgccctgcttttagcaattagcaagggatatgtgaggattgtcgaggccatactgaatcatccggccttcgctcagggacaacgcctgactctttcgcctctcgaacaggaattgcgggacgatgatttctacgcttacgatgaggacggaactcgattttcacatgacatcactccaattattctcgccgctcactgtcaggagtatgagatagttcatattctgctcctgaaaggcgctagaatcgagagaccccatgactacttttgcaagtgtaatgagtgtacagaaaaacaaaggaaagatagcttttctcacagtcgctctcggatgaacgcctacaaaggtctggcgtctgccgcttatctgtcactgtcaagtgaggaccccgttttgaccgccctcgagctgagtaatgaattagcaagactcgctaacatcgagaccgaattcaagctggggcgcacgcttcggtccccttttatgaaattcgttgcccacgctgtgtctttcacaatattcttaggcttactggtcgtgaatgcatccgatcggttcgagggcgtgaaaacactgcctaatgagacttttaccgattaccccaagcagattttcagagtgaaaacaacacagttctcttggacagaaatgttgatcatgaagtgggtcctcggtatgatctggtcagaatgcaaagaaatatgggaggagggaccgagggagtacgtgctgcacctctggaacctgttggacttcggcatgttgtcaatattcgtggcttctttcacagcgcgcttcatggcctttttgaaggctacggaagcccaactctatgtggatcagcacgtccaggacgatacgctgcacaacgtgtccctgcctcctgaagtggcttacttcacatacgcgagagacaagtggtggccttccgacccacagatcattagcgagggcttatatgccatcgccgtcgtgctttcattctcccggattgcgtacattctccctgcaaacgagtctttcggccctctccaaatctcactgggacgtaccgtaaaggatatcttcaaatttatggtaatctttatcatggtgttcgtggcttttatgatcggaatgtttaacctatattcatactacaggggtgcaaaatataaccctgcatttaccaccgtcgaagagtcctttaagacccttttctggagcatttttggactgtccgaggtcatctccgtagtgctgaaatatgaccacaagtttatagaaaacataggatatgttctctatggggtgtacaacgtcactatggttgtcgtactgcttaacatgctgattgcaatgatcaacaactcttaccaggagatagaggaggatgccgatgtcgaatggaaattcgcacgggccaaactttggttgtcctatttcgacgagggtcggactctccctgctccattcaatctcgtgccatccccgaagagcttttactacctgattatgcgcattaagatgtgcctgatcaagctttgcaaatccaaagccaagagctgcgagaatgacctcgagatggggatgttaaatagtaaattcaaaaaaacccgatatcaggcagggatgagaaactccgagaacctgacggccaacaacacgctgagcaaacccacacgctaccagaagattatgaagcgcctgatcaagcgatatgtgctgaaagcacaagttgaccgggaaaatgatgaggtcaatgagggcgaactgaaagaaatcaagcaggatattagctccctcaggtatgaacttctggaagaaaagtcccaggccactggggagctcgccgatctgatacagcagctgagcgagaaattcggaaaaaacttgaacaaggatcatctgcgtgttaataaagggaaggacatttag

SEQ ID NO: 65214 - DNA, 2448 bp, Artificial Sequence
  derived and/or modified sequence
atgagccagagccctgccttcggcccccggcggggcagcagccccagaggagctgctggagctgctgccaggagaaatgaaagccaggactacctgctgatggacagcgagctgggggaggatggctgcccccaggcccccctgccctgctacggctactacccctgcttccggggcagtgacaaccggctggcccaccggcggcagacagtgctgcgggagaagggccgccgcctggccaacagaggccctgcctacatgttcagtgacaggagcaccagcctgagcattgaggaggagcgcttcctggatgctgctgaatatggcaacatccctgtggtgaggaagatgctggaggagtgccacagcctgaatgtgaactgtgtggactacatgggccagaatgccctgcagctggccgtggccaatgagcacctggagatcacagagctgctgctgaagaaggagaacctgagccgggtgggagatgccctgctgctggccatcagcaagggctacgtgcgcatcgtggaggccatcctgagccacccagcctttgctgagggcaagaggctggccaccagccccagccagagcgagctgcagcaggatgacttctacgcctatgatgaagatggcacccgcttcagccatgatgtgacccccatcatcctggccgcccactgccaggagtatgagatcgtgcacaccctgctgaggaaaggagccagaattgagcggccccatgactacttctgcaagtgcaatgactgcaaccagaagcagaagcatgacagcttcagccacagccgcagccgcatcaatgcctacaagggcctggccagccctgcctacctgagcctgagcagtgaagatcctgtgatgacagccctggagctgagcaatgagctggccgtgctggccaacatcgagaaggagttcaagatgggcaagatcatgaggggccccttcatgaagtttgtggcccatgctgccagcttcaccatcttcctgggcctgctggtgatgaatgctgctgacagatttgagggcaccaagctgctgcccaatgagaccagcacagacaatgccaagcagctgttcaggatgaagaccagctgcttctcctggatggagatgctgatcatctcctgggtgattggcatgatctgggccgagtgcaaggagatctggacccagggccccaaggagtacctgtttgagctgtggaacatgctggactttggcatgctggccatctttgctgccagcttcatcgcccgcttcatggccttctggcacgccagcaaggcccagagcatcattgatgccaatgacaccctgaaggacctgaccaaggtgaccctgggggacaacgtgaagtactacaacctggcccgcatcaagtgggaccccagcgacccccagatcatcagcgagggcctgtatgccatcgctgtggtgctgtccttcagccgcatcgcctacatcctgcctgccaatgaaagctttggccccctgcagatcagcctgggccgcacagtgaaggacatcttcaagttcatggtgatcttcatcatggtgtttgtggccttcatgattggcatgttcaacctgtacagctactacatcggggccaagcagaatgaggccttcaccaccgtggaggagagcttcaagaccctcttctgggccatcttcggcctgtctgaggtgaagtctgtggtgatcaactacaaccacaagttcattgaaaatattggctacgtgctgtatggagtgtacaacgtgaccatggtgattgtgctgctgaacatgctgattgccatgatcaacagcagcttccaggagattgaagatgatgctgatgtggagtggaagtttgcccgggccaagctgtggttctcctactttgaggagggccgcaccctgcctgtgcccttcaacctggtgcccagccccaagagcctcttctacctgctgctgaagctgaagaagtggatcagcgagctgttccagggccacaagaagggcttccaggaggatgctgagatgaacaagatcaatgaggagaagaagctgggcatcctgggcagccatgaggacctgagcaagctgagcctggacaagaagcaggtgggccacaacaagcagcccagcatccgcagcagcgaggacttccacctgaacagcttcaacaaccccccccggcagtaccagaagatcatgaagaggctcatcaagcgctacgtgctgcaggcccagattgacaaggagagtgatgaggtgaatgaaggagagctgaaggagatcaagcaggacatcagcagcctgcgctatgagctgctggaggagaagagccagaacacagaggacctggccgagctgatccgggagctgggggagaagctgtccatggagcccaaccaggaggagaccaacagatag

SEQ ID NO: 65215 - DNA, 2241 bp, Artificial Sequence
  derived and/or modified sequence
atgctgaggaacagcaccttcaagaacatgcagaggaggcacaccaccctgcgggagaagggccggcggcaggccatccggggccctgcctacatgtttaatgagaagggcaccagcctgaccccagaggaggagcgcttcctggacagcgcagaatatggcaacatccctgtggtgaggaagatgctggaggagagcaagaccctgaacttcaactgtgtggactacatgggccagaatgccctgcagctggccgtgggcaatgagcacctggaggtgacagagctgctgctgaagaaggagaacctggcccgggtgggagatgccctgctgctggccatcagcaagggctacgtgagaattgtggaggccatcctgaaccacccagcctttgcccagggccagaggctgaccctgagccccctggagcaggagctgagagatgatgacttctacgcctatgatgaagatggcacccgcttcagccatgacatcacccccatcatcctggccgcccactgccaggagtatgaaattgtgcacatcctgctgctgaagggggcccgcatcgagcggccccatgactacttctgcaagtgcaatgaatgtacagagaagcagaggaaggacagcttcagccacagccgcagcaggatgaatgcctacaagggcctggccagcgctgcctacctgagcctgagcagcgaggaccctgtgctgacagccctggagctgagcaatgagctggcccggctggccaacattgaaacagagttcaagctgggccgcaccctgcggagccccttcatgaagtttgtggcccatgctgtgtccttcaccatcttcctgggcctgctggtggtgaatgccagtgacagatttgagggcgtgaagaccctgcccaatgagaccttcacagactaccccaagcagatcttccgggtgaagaccacccagttctcctggacagagatgctgatcatgaagtgggtgctgggcatgatctggagcgagtgcaaggagatctgggaggagggcccccgggagtatgtgctgcacctgtggaacctgctggactttggcatgctgagcatctttgtggccagcttcaccgcccgcttcatggccttcctgaaggccacagaggcccagctgtatgtggaccagcacgtgcaggatgacaccctgcacaacgtgtccctgcccccagaggtggcctacttcacctacgcccgggacaagtggtggcccagcgacccccagatcatcagcgagggcctgtatgccatcgctgtggtgctgtccttcagcagaattgcctacatcctgcctgccaatgaaagctttggccccctgcagatcagcctgggccgcacagtgaaggacatcttcaagttcatggtgatcttcatcatggtgtttgtggccttcatgattggcatgttcaacctgtacagctactacagaggagccaagtacaacccagccttcaccaccgtggaggagagcttcaagaccctcttctggagcatcttcggcctgtctgaggtgatctctgtggtgctgaagtatgaccacaagttcatcgagaacatcggctacgtgctgtatggagtgtacaacgtgaccatggtggtggtgctgctgaacatgctgattgccatgatcaacaacagctaccaggagattgaagaagatgctgatgtggagtggaagtttgcccgggccaagctgtggctgagctactttgatgagggccgcaccctgcctgcccccttcaacctggtgcccagccccaagagcttctactacctgatcatgaggatcaagatgtgcctgatcaagctgtgcaagagcaaggccaagagctgtgaaaatgacctggagatgggcatgctgaacagcaagttcaagaagacccgctaccaggccggcatgagaaattctgagaacctgacagccaacaacaccctgagcaagcccacccgctaccagaagatcatgaagaggctcatcaagagatatgtgctgaaggcccaggtggaccgggagaatgatgaggtgaatgaaggagagctgaaggagatcaagcaggacatcagcagcctgcgctatgagctgctggaggagaagagccaggccactggagagctggccgacctgatccagcagctgtctgagaagtttgggaagaacctgaacaaggaccacctgcgggtgaacaagggcaaggacatctag

SEQ ID NO: 65216 - DNA, 2448 bp, Artificial Sequence
  derived and/or modified sequence
atgagccagagccccgccttcggcccccggcggggcagcagcccccgcggcgccgcaggtgctgccgctcggcgaaacgagtcacaagactaccttttgatggattctgagctaggtgaggacgggtgcccacaggcccctctgccgtgttatggctactatccttgtttcaggggatccgacaacagactcgcacataggcgccagaccgtgctgcgggaaaaaggcaggaggctggccaatcggggacctgcttacatgtttagtgatcgctctacatcattgtcaattgaggaagagaggttccttgatgctgcagagtatggcaatatccccgtggtccgaaaaatgctggaggaatgccacagcctcaacgttaattgtgtggactacatgggccagaatgctctccagttggccgtcgctaatgagcatctggagattaccgagctccttctgaaaaaagagaatctatctagggtaggcgatgccctgcttctcgccatttccaagggatatgtaagaattgtggaagccatactgagccatcccgccttcgctgagggaaagcggcttgctacaagtcccagccagagcgagcttcagcaggacgacttctacgcctacgatgaggacgggacaaggttctctcacgacgtaactccaattattctggcagcccactgtcaggagtacgagattgtccatacactgctgcggaagggtgctcgtatcgagagaccacacgactatttttgtaaatgcaatgactgcaatcagaagcagaagcacgattccttttcacattctcgatctaggattaatgcctacaagggcttggcaagtccggcttatctgagcctgagttctgaggatccagtcatgaccgccttggaactgagcaacgaactcgctgtgctagcaaacatcgagaaggaatttaagatggggaagattatgcggggccctttcatgaaattcgtggcccatgcggcctccttcactatcttcctgggcttactggtgatgaacgcggccgatagatttgaaggaaccaagctgctacccaatgagacatccaccgacaacgccaaacaactgtttaggatgaagacgtcttgcttcagttggatggaaatgctcattatctcatgggtcattgggatgatttgggctgagtgtaaagaaatctggacccaaggcccaaaggaatacctcttcgagctgtggaatatgctggacttcggaatgctggctatatttgccgccagctttatcgcaagatttatggcattttggcatgcttccaaggcacagagcatcattgatgccaatgacaccttaaaagacctcaccaaggtgacgttaggtgacaatgtcaagtactacaacctggcgaggattaaatgggatccatctgacccacagattattagcgagggtctctatgccattgctgtggtgctgtctttttcccggattgcctatatcttaccagccaacgagtcttttgggccacttcaaatctccctgggtcggacggtgaaagatatatttaagttcatggtcatattcatcatggtgttcgtggcatttatgattggcatgtttaacctgtacagttactacattggagcgaaacagaacgaggcattcacaactgtcgaagagagcttcaagaccctgttctgggctattttcggcctgtcggaggtgaagtccgtcgtgatcaattataaccacaaattcatagaaaatattgggtacgtcctgtacggggtctataatgtgaccatggtgatagtgctgctcaatatgcttattgccatgataaactcatcatttcaggagatagaggatgatgcagatgttgaatggaagttcgctcgggcgaaattatggttttcatacttcgaagaagggcgtaccttgccagtcccattcaatctggttccaagccctaaatccctcttctatcttttgttaaaactgaaaaagtggatttccgaactcttccagggtcataagaaaggctttcaggaagacgccgagatgaataaaatcaacgaggaaaagaagctgggaattctcggcagccacgaggacctcagcaaattgagtctggataagaaacaagtcgggcacaataaacaacctagcatacggtcttcagaagactttcatctgaactcctttaacaacccccctagacagtatcagaaaatcatgaaacgtttaattaagcggtatgtgctgcaggcccagatagataaggaatccgacgaggtcaacgagggcgagctaaaggaaatcaagcaggacatttccagcttacgctatgagctgttggaggaaaaatcgcagaataccgaagatttggcagagcttataagagagcttggagaaaagctgagtatggaacctaaccaggaagagacaaataggtag

SEQ ID NO: 65217 - DNA, 2241 bp, Artificial Sequence
  derived and/or modified sequence
atgctgcggaacagcaccttcaagaacatgcagcggcggcacaccactctgcgtgagaagggacggcggcaagctatccgcggtcccgcatatatgttcaacgagaaaggcacaagtcttacgccggaagaagagcggttcctcgacagtgccgagtatggcaatattcctgtagtgagaaaaatgcttgaggagtcaaagacactgaatttcaactgcgtggactacatgggccaaaacgccctgcagctggcggtcgggaatgagcacctcgaggtcacagagctactgcttaagaaggagaatttggcccgcgtcggggatgccctgcttcttgcaatctcaaaaggctacgtgcgcattgtggaggccatcttaaaccaccccgccttcgcacaggggcagcggctgacacttagcccattagagcaggaacttcgcgacgatgatttttatgcctatgacgaggatggaacaagattcagtcacgatattacccccattatcctcgccgctcattgccaagagtacgagattgtgcatatcctgcttctaaaaggtgcgcgcattgagagacctcatgactacttttgtaaatgcaatgagtgcaccgagaaacagcgcaaggacagctttagccactcaaggtcaaggatgaacgcgtacaagggtctggcgtcagctgcctatttgtccttgtcgtcagaggatcctgttctcactgcactcgaattgagtaacgagctcgctcgactcgctaacatcgagacagagttcaaacttggccgcactcttagaagtccgtttatgaagtttgtggcccacgcagtcagctttacaatcttcctgggcctcctagtggtgaatgcgagcgatcgcttcgagggagtcaagaccctgcccaacgaaactttcaccgattaccccaagcaaatattccgagtgaaaactacacagttcagctggaccgagatgctaatcatgaagtgggtgctaggaatgatatggtctgagtgtaaggaaatttgggaggaggggccccgggaatacgtccttcacctgtggaatttgctcgacttcggcatgctgtcgatctttgttgctagctttacggcgagattcatggcattcctaaaagccacagaagcccagctgtatgtggatcaacacgtgcaggatgacactctgcacaatgtttccctcccccctgaagtcgcgtattttacttatgcacgcgacaagtggtggcccagtgacccacagatcatcagtgaggggttatacgctatagcagttgtgctttctttcagtagaattgcctatatccttcctgccaacgaaagttttggccctctgcagatttccctgggacggactgtaaaagacatcttcaagtttatggttatctttattatggtgtttgtcgccttcatgattggaatgttcaatctgtatagctattaccgcggtgccaagtataaccctgcattcaccacagtggaggagagtttcaagaccttattctggtctattttcggtctgtccgaggtaatttcagtcgtgctgaagtacgaccacaagttcattgaaaatatcgggtatgtgctgtacggcgtgtacaacgtcactatggtagtcgtgctactgaatatgctgattgcaatgataaataattcttatcaggaaattgaggaggacgccgatgttgaatggaaattcgcccgcgcaaaactctggcttagctatttcgatgaaggccggactctccccgctccctttaatttggtacctagccctaaaagtttttattacttgattatgcgaattaaaatgtgtctgattaagctctgcaaaagcaaagctaaaagctgcgaaaatgatctagagatggggatgctaaattccaagttcaagaaaacgcggtatcaagcaggcatgcgcaactcagagaatctgactgcaaataacaccttgtccaaacctaccagatatcagaagattatgaagaggcttattaagaggtacgtcctgaaggcccaggtcgatcgcgagaatgacgaggtgaacgagggagagttaaaggaaatcaagcaggatattagtagcctgaggtacgaacttctggaagaaaagtctcaagctaccggagagcttgcggacctgatacagcagctgtccgaaaagtttggcaaaaacttaaacaaggatcaccttagagtgaacaaaggaaaagacatttag

SEQ ID NO: 65218 - DNA, 2448 bp, Artificial Sequence
  derived and/or modified sequence
atgtcacagagtccagccttcggtccaaggcgcggatccagtcctaggggagccgctggcgcagccgctagaaggaacgagagtcaggattacctgctgatggattcagaacttggcgaggatggatgcccacaggcacccctgccatgctacggctattacccctgcttcagagggagtgataaccgcttagctcaccgccgacaaactgttctccgcgagaagggcaggaggttagccaatcggggacctgcatatatgtttagtgatcggtcaacatccctgtctattgaagaagagcgattccttgacgccgcagaatacggcaatatcccggtggtacgcaagatgctggaagaatgtcactctttgaatgtgaactgcgttgactatatgggccaaaatgccctccaattggcagtggcaaacgaacatctggagattacggagttgcttcttaagaaggagaacctatctagagtgggagacgctctgctgctcgcgatttcaaaagggtatgttcggatagtggaggccatcctatcccaccccgcatttgctgagggtaagcgactcgccactagcccttcacagtcagagcttcagcaggacgacttctacgcatacgacgaagatggaacaagattctcccatgacgtgactcccatcatactggcagcccactgtcaggagtatgagattgtgcacacactgcttcgcaagggggcaaggatcgaacgcccacacgattacttttgcaaatgcaatgactgcaatcaaaagcagaagcatgattctttcagtcatagtcggagcaggattaacgcttataaaggcttggcgagtccggcttacttatcactttcatctgaggatccagtgatgacggccctggagctaagcaatgagctggccgtgttggctaacatcgaaaaagaatttaagatgggcaaaatcatgaggggaccttttatgaagttcgtggcccacgccgctagtttcaccatctttctgggcttgctggttatgaatgcagccgatagatttgagggaacaaagctcctaccaaatgagacctccactgataatgcaaagcaattatttaggatgaagacctcttgttttagttggatggagatgcttatcatctcatgggttattggcatgatttgggctgaatgtaaggagatctggacacagggcccaaaagagtacttatttgagttgtggaacatgctggactttgggatgctggcaatatttgccgcttcttttatcgcacgcttcatggcgttctggcacgccagtaaagcgcagtctattattgatgccaatgacacactcaaagatctcaccaaagtcactctgggggataatgtcaagtattataatttggcgaggatcaagtgggatccctccgacccacagatcattagtgagggcctttatgctattgcggtcgtgctgagctttagtagaatcgcgtacattcttccagctaacgaaagcttcggacctttgcaaatctccttaggacgcactgtgaaggatattttcaagttcatggtgatctttatcatggtgttcgtcgctttcatgatagggatgttcaatctatactcctactacatcggcgcaaagcaaaatgaggccttcacaactgtggaagagtcttttaaaacactgttttgggccatcttcggtctgtccgaggtgaagtccgtcgttatcaactataaccataaattcattgaaaacattggctatgtcctgtacggggtgtataacgtcacgatggtgatcgtgctcttgaacatgctgattgctatgatcaactcttccttccaggaaattgaagatgacgctgatgtggaatggaagttcgcaagggcgaagctgtggttcagctatttcgaggaaggaagaactctgccagttcctttcaatttggtccctagcccaaaatccctgttttatctgctgctgaaactcaagaaatggatctcggagctttttcagggtcataagaagggattccaggaagatgccgagatgaacaagattaatgaggaaaaaaagctgggcatcttggggtctcacgaggatctttcgaagttgtcactcgacaagaagcaagtcggccacaataaacagccttccattagaagctcggaggattttcatctgaactcctttaacaaccccccaagacagtaccagaaaattatgaagagattgataaagaggtatgtgctgcaggcccagatcgacaaagagtctgacgaggtgaatgagggcgaactcaaagaaataaaacaagatatttcatccctgaggtatgagctcttggaagagaagtctcaaaacactgaagatctggcggaactgattagagaactgggtgaaaagttgtcaatggagccgaaccaggaggaaaccaaccggtag

SEQ ID NO: 65219 - DNA, 2241 bp, Artificial Sequence
  derived and/or modified sequence
atgctgcgtaactccacctttaagaacatgcagcggagacataccacactgcgagaaaaaggtagaagacaagccatccggggacccgcatacatgttcaacgagaagggtacctcgctcaccccagaggaagaaagattcctcgattctgccgagtatggaaacattccagttgtgaggaagatgttggaggaatccaaaactttaaacttcaactgcgtcgactatatgggccagaatgctctgcaattggccgtcggcaacgaacacctggaggtaactgagctgctcctgaaaaaagaaaatctggcccgagtgggcgacgccctgctgttagccatttccaagggatacgtgagaatcgtagaggccatcctgaatcaccccgcttttgcacagggacaacgcctgacactcagcccactggaacaggagctcagagatgacgatttttatgcatacgacgaagatgggacacggttcagccatgacatcactcccataatcctggctgcccattgtcaagaatacgaaatcgtgcacatacttctgttgaaaggggcaagaatagaacgcccacacgactatttctgcaagtgcaatgagtgcacagagaaacagcggaaggactcattttcacacagtcgttctcgcatgaacgcatataaaggccttgccagcgccgcttacctttctctctcaagcgaggatcccgtactaacagctctcgagctctctaatgagctcgcacggttggccaacattgaaaccgagtttaaattaggtcggactttgcgatcaccatttatgaaattcgtcgctcatgccgtgagttttacaatctttctgggtctgcttgtggtcaatgccagcgaccgattcgaaggcgttaaaaccctccccaatgagaccttcacagattatccgaaacagatctttagggtgaaaaccactcaatttagctggactgagatgctgataatgaagtgggtccttggaatgatctggagtgagtgtaaggaaatttgggaggaaggtcctcgtgaatacgtgttgcacctgtggaacctgctggattttggcatgctcagcatttttgttgcttcctttactgcgaggtttatggccttccttaaggctaccgaggcccagctgtacgtggaccagcacgtgcaggacgacaccctgcataacgtcagtcttccccctgaggttgcatacttcacttatgcacgggacaagtggtggccatctgatcctcaaataatcagcgagggactctacgctattgctgttgttctgagcttctccagaatcgcatacatcctccccgctaatgagtcgttcgggcctctgcagatcagcctgggacgtacggtgaaagacatcttcaaattcatggtgatttttatcatggtatttgtggccttcatgatcggtatgtttaatctgtacagctattataggggtgccaaatataatccggcattcactacagtagaagaaagctttaaaacactgttttggagcatattcgggttaagcgaggttatttctgtggttctcaagtacgaccataaattcattgaaaacatagggtatgtactgtacggtgtctacaatgtgaccatggttgtagtcctcttgaacatgctgattgccatgatcaataatagctaccaggagattgaggaagatgccgatgtggagtggaagtttgcacgcgctaaactctggttgtcgtactttgatgaaggccgtacccttccagcgccattcaacctagtccccagccctaaaagtttctactatctgattatgcggataaaaatgtgcctcattaagctctgcaagagtaaagcaaaatcttgtgaaaatgatttggaaatgggcatgctgaattccaagtttaagaagacaaggtaccaagctggcatgaggaatagtgagaacttaacggcgaacaatacactttccaagcccaccaggtatcagaaaatcatgaagaggcttataaagcggtacgtgctgaaagcacaggtggaccgagagaacgacgaggtgaatgaaggcgagcttaaggagataaagcaagacatctcctctctaagatatgagctgctcgaagaaaagtcccaggccaccggcgagttagcagatcttattcagcagttgagtgagaagtttgggaagaatctaaacaaggaccatcttcgggttaacaagggaaaggacatctag

SEQ ID NO: 65220 - DNA, 2448 bp, Artificial Sequence
  derived and/or modified sequence
atgagccagagcccggcgttcgggccccggaggggcagttctccccggggcgctgccggagccgctgcgcggcgcaacgagagccaggactatctgctcatggactcggagctgggagaagacggctgcccgcaagccccgctgccttgctacggctactacccctgcttccggggatctgacaacagactggctcaccggcggcagacagttctccgtgagaaggggagaaggttagctaatcgaggaccagcatacatgtttagtgatcgctccacaagcctatctatagaggaggaacgctttttggatgcagctgaatatggtaacatcccagtggtgcggaagatgttagaagaatgccactcactcaacgttaactgtgtggattacatgggccagaatgccctacagttggcagtggccaatgagcatctggaaattacagaacttcttctcaagaaagaaaacctctctcgagttggggatgctttgcttctagctattagtaaaggttatgttcggattgtggaagcaattctcagtcatccggcttttgctgaaggcaagaggttagcaaccagccctagccagtctgaactccagcaagatgatttttatgcctatgatgaagatgggacacggttctcccatgatgtgactccaatcattctggctgcccactgccaggaatatgaaattgtgcataccctcctgcggaagggtgctaggattgaacggcctcatgattatttctgcaagtgcaatgactgcaaccagaaacagaagcatgactcgtttagccactccagatctaggattaatgcctataaaggcctggcaagtccggcttacctgtcattgtctagtgaagatccagtcatgacggctttagaacttagcaatgaactggcagttctggccaatattgagaaagagttcaagatggggaagataatgcgtggaccattcatgaagtttgtagcacacgcagcctccttcaccatttttctgggactgctagtcatgaatgcagctgacagatttgaaggcacaaaactccttcctaatgaaaccagcacagataatgcaaaacagctgttcaggatgaaaacatcctgcttctcatggatggagatgctcattatatcctgggtaataggcatgatatgggctgaatgtaaagaaatctggactcagggccccaaggaatatttgtttgagttgtggaacatgcttgattttggtatgttagcaattttcgcagcatcattcattgcgagattcatggcattttggcatgcttccaaagcccagagcatcattgacgcaaatgatactttgaaggacttgacgaaagtaacattgggagacaatgtgaaatactacaatttggccaggataaagtgggacccctctgatcctcaaataatatctgaaggtctttatgcaattgctgtagttttaagtttctctaggatagcttatattttaccagcaaatgaaagctttggacctctgcagatatcacttggaagaacagtcaaagacatcttcaagttcatggtcatattcattatggtgtttgtggcctttatgattggaatgttcaatctctactcctactacattggtgcaaaacaaaatgaagccttcacaacagttgaagagagttttaagacactgttctgggctatatttggactttctgaagtgaaatcagtggtcatcaactataaccacaaattcattgaaaacattggttacgttctttatggagtctataatgttacgatggtcattgttttgctaaatatgttaattgccatgatcaacagttcattccaggaaattgaggatgacgctgatgtggagtggaaatttgcaagggccaaactctggttttcctactttgaggagggcagaacacttcctgtacccttcaatctggtgccgagtccaaagtccctgttttatctcttactgaagcttaaaaaatggatttctgagctgttccagggccataaaaaaggtttccaggaagatgcagagatgaacaagataaatgaagaaaagaaacttggaattttaggaagtcatgaagacctttcaaaattatcacttgacaaaaaacaggttgggcacaataaacaaccaagtataaggagctcagaagatttccatctaaatagtttcaataatcctccaagacaatatcagaaaataatgaaaaggctcattaaaagatatgtactgcaggcccagatagataaggagagtgatgaagtgaacgaaggggaactgaaggaaattaagcaggacatctcaagtctccgctatgaactccttgaagaaaaatctcagaatacagaagacctagcagaacttattagagaacttggagagaaattatccatggaaccaaatcaagaggaaaccaatagataa

SEQ ID NO: 65221 - DNA, 2587 bp, Artificial Sequence
  derived and/or modified sequence
cacggttctgcctcggaaggcgagtttttaccactgcaacacaaagaacagaggagcgcgctttcacatcgttgcaacttaactcacttgaccagctctatacttcagcaccacggagagcggtacatccttggctaccacccatggggagccagcttctggcgactcaacaccggattccggtcatctagaggaggaacaagcctgcgtattacaccctcaatgttgaggaacagcaccttcaaaaacatgcagcgccggcacacaacgctgagggagaagggccgtcgccaggccatccggggtcccgcctacatgttcaacgagaagggcaccagtctgacgcccgaggaggagcgcttcctggactcggctgagtatggcaacatcccggtggtccggaaaatgctggaggagtccaagacccttaacttcaactgtgtggactacatggggcagaacgctctgcagctggccgtgggcaacgagcacctagaggtcacggagctgctgctgaagaaggagaacctggcacgggtgggggacgcgctgctgctggccatcagcaagggctatgtgcgcatcgtggaggccatcctcaaccacccggccttcgcgcagggccagcgcctgacgctcagcccgctggaacaggagctgcgcgacgacgacttctatgcctacgacgaggacggcacgcgcttctcccacgacatcacgcccatcatcctggcggcgcactgccaggagtatgagatcgtgcacatcctgctgctcaagggcgcccgcatcgagcggccccacgactacttctgcaagtgcaatgagtgcaccgagaaacagcggaaagactccttcagccactcgcgctcgcgcatgaacgcctacaaaggactggcgagtgctgcctacttgtccctgtccagcgaagaccctgtcctcaccgccctggagctcagcaacgagttagccagactagccaacattgagactgaatttaagctaggacgaaccctgaggagccctttcatgaagtttgtagctcatgcagtttcttttacaatcttcttgggattattagttgtgaatgcatctgaccgatttgaaggtgttaaaaccctgccaaacgaaaccttcacagactacccaaaacaaatcttcagagtgaaaaccacacagttctcctggacagaaatgctcattatgaagtgggtcttaggaatgatttggtccgaatgcaaggaaatctgggaggaggggccacgggagtacgtgctgcacttgtggaacctgctagatttcgggatgctgtccatcttcgtggcctccttcacagcacgcttcatggccttcctgaaggccacggaggcacagctgtacgtggaccagcacgtgcaggacgacacgctgcacaatgtctcgcttccgccggaagtggcatacttcacctacgccagggacaagtggtggccttcagaccctcagatcatatcggaagggctctacgcgatagccgtcgtgctgagcttctctcgcattgcatacattctgccagccaacgagagttttgggcccctgcagatctcgctagggagaactgtgaaagatatcttcaagttcatggtcattttcatcatggtatttgtggccttcatgattgggatgttcaacctgtactcttactaccgaggtgccaaatacaacccagcgtttacaacggttgaagaaagttttaaaactttgttttggtccatattcggcttatctgaagtaatctcagtggtgctgaaatacgaccacaaattcatcgagaacattggctacgttctctacggcgtttataacgtcaccatggtggtagtgttgctcaacatgctaatagccatgataaacaactcctatcaggaaattgaggaggatgcagatgtggaatggaagttcgcccgagcaaaactctggctgtcttactttgatgaaggaagaactctacctgctccttttaatctagtgccaagtcctaaatcattttattatctcataatgagaatcaagatgtgcctcataaaactctgcaaatctaaggccaaaagctgtgaaaatgaccttgaaatgggcatgctgaattccaaattcaagaagactcgctaccaggctggcatgaggaattctgaaaatctgacagcaaataacactttgagcaagcccaccagataccagaaaatcatgaaacggctcataaaaagatacgtcctgaaagcccaggtggacagagaaaatgacgaagtcaatgaaggcgagctgaaggaaatcaagcaagatatctccagcctgcgctatgagcttcttgaggaaaaatctcaagctactggtgagctggcagacctgattcaacaactcagcgagaagtttggaaagaacttaaacaaagaccacctgagggtgaacaagggcaaagacatttagcagcccacatcggcgtctgtgacttctaccagcattccaaggccaggttggatgccctcgcccccatccttggtggggaggggtccccagcccactcctctaggacacgaaggggatctcctgg

SEQ ID NO: 65222 - protein, 801 aa, Artificial Sequence
  derived and/or modified sequence
MLRNSTFKNMQRRHTTLREKGRRQAIRGPAYMFNEKGTSLTPEEERFLDSAEYGNIPVVRKMLEESKTLNFNCVDYMGQNALQLAVGNEHLEVTELLLKKENLARVGDALLLAISKGYVRIVEAILNHPAFAQGQRLTLSPLEQELRDDDFYAYDEDGTRFSHDITPIILAAHCQEYEIVHILLLKGARIERPHDYFCKCNECTEKQRKDSFSHSRSRMNAYKGLASAAYLSLSSEDPVLTALELSNELARLANIETEFKFVAHPNCQQQLLTMWYENLSGLRQQSIAVKFLAVFGVSIGLPFLAIAYWIAPCSKLGRTLRSPFMKFVAHAVSFTIFLGLLVVNASDRFEGVKTLPNETFTDYPKQIFRVKTTQFSWTEMLIMKWVLGMIWSECKEIWEEGPREYVLHLWNLLDFGMLSIFVASFTARFMAFLKATEAQLYVDQHVQDDTLHNVSLPPEVAYFTYARDKWWPSDPQIISEGLYAIAVVLSFSRIAYILPANESFGPLQISLGRTVKDIFKFMVIFIMVFVAFMIGMFNLYSYYRGAKYNPAFTTVEESFKTLFWSIFGLSEVISVVLKYDHKFIENIGYVLYGVYNVTMVVVLLNMLIAMINNSYQEIEEDADVEWKFARAKLWLSYFDEGRTLPAPFNLVPSPKSFYYLIMRIKMCLIKLCKSKAKSCENDLEMGMLNSKFKKTRYQAGMRNSENLTANNTLSKPTRYQKIMKRLIKRYVLKAQVDRENDEVNEGELKEIKQDISSLRYELLEEKSQATGELADLIQQLSEKFGKNLNKDHLRVNKGKDI

SEQ ID NO: 65223 - DNA, 2406 bp, Artificial Sequence
  derived and/or modified sequence
atgctgagaaacagcaccttcaagaacatgcagagaagacacaccaccctgagagagaagggcagaagacaggccatcagaggccccgcctacatgttcaacgagaagggcaccagcctgacccccgaggaggagagattcctggacagcgccgagtacggcaacatccccgtggtgagaaagatgctggaggagagcaagaccctgaacttcaactgcgtggactacatgggccagaacgccctgcagctggccgtgggcaacgagcacctggaggtgaccgagctgctgctgaagaaggagaacctggccagagtgggcgacgccctgctgctggccatcagcaagggctacgtgagaatcgtggaggccatcctgaaccaccccgccttcgcccagggccagagactgaccctgagccccctggagcaggagctgagagacgacgacttctacgcctacgacgaggacggcaccagattcagccacgacatcacccccatcatcctggccgcccactgccaggagtacgagatcgtgcacatcctgctgctgaagggcgccagaatcgagagaccccacgactacttctgcaagtgcaacgagtgcaccgagaagcagagaaaggacagcttcagccacagcagaagcagaatgaacgcctacaagggcctggccagcgccgcctacctgagcctgagcagcgaggaccccgtgctgaccgccctggagctgagcaacgagctggccagactggccaacatcgagaccgagttcaagttcgtggcccaccccaactgccagcagcagctgctgaccatgtggtacgagaacctgagcggcctgagacagcagagcatcgccgtgaagttcctggccgtgttcggcgtgagcatcggcctgcccttcctggccatcgcctactggatcgccccctgcagcaagctgggcagaaccctgagaagccccttcatgaagttcgtggcccacgccgtgagcttcaccatcttcctgggcctgctggtggtgaacgccagcgacagattcgagggcgtgaagaccctgcccaacgagaccttcaccgactaccccaagcagatcttcagagtgaagaccacccagttcagctggaccgagatgctgatcatgaagtgggtgctgggcatgatctggagcgagtgcaaggagatctgggaggagggccccagagagtacgtgctgcacctgtggaacctgctggacttcggcatgctgagcatcttcgtggccagcttcaccgccagattcatggccttcctgaaggccaccgaggcccagctgtacgtggaccagcacgtgcaggacgacaccctgcacaacgtgagcctgccccccgaggtggcctacttcacctacgccagagacaagtggtggcccagcgacccccagatcatcagcgagggcctgtacgccatcgccgtggtgctgagcttcagcagaatcgcctacatcctgcccgccaacgagagcttcggccccctgcagatcagcctgggcagaaccgtgaaggacatcttcaagttcatggtgatcttcatcatggtgttcgtggccttcatgatcggcatgttcaacctgtacagctactacagaggcgccaagtacaaccccgccttcaccaccgtggaggagagcttcaagaccctgttctggagcatcttcggcctgagcgaggtgatcagcgtggtgctgaagtacgaccacaagttcatcgagaacatcggctacgtgctgtacggcgtgtacaacgtgaccatggtggtggtgctgctgaacatgctgatcgccatgatcaacaacagctaccaggagatcgaggaggacgccgacgtggagtggaagttcgccagagccaagctgtggctgagctacttcgacgagggcagaaccctgcccgcccccttcaacctggtgcccagccccaagagcttctactacctgatcatgagaatcaagatgtgcctgatcaagctgtgcaagagcaaggccaagagctgcgagaacgacctggagatgggcatgctgaacagcaagttcaagaagaccagataccaggccggcatgagaaacagcgagaacctgaccgccaacaacaccctgagcaagcccaccagataccagaagatcatgaagagactgatcaagagatacgtgctgaaggcccaggtggacagagagaacgacgaggtgaacgagggcgagctgaaggagatcaagcaggacatcagcagcctgagatacgagctgctggaggagaagagccaggccaccggcgagctggccgacctgatccagcagctgagcgagaagttcggcaagaacctgaacaaggaccacctgagagtgaacaagggcaaggacatctag

SEQ ID NO: 65224 - DNA, 2406 bp, Artificial Sequence
  derived and/or modified sequence
atgttgcgaaatagtacctttaaaaacatgcaaagaagacacaccaccctgcgggaaaaaggaagaagacaagctatacgcggcccagcgtacatgttcaacgagaaggggacttccctaacacccgaagaagaacggtttctagattcagctgagtatggaaatatcccggtcgtgagaaaaatgttagaggaaagtaaaaccctgaacttcaattgtgtagactacatgggccagaacgccttgcagcttgctgtcgggaatgagcacttggaagttaccgagctgcttcttaaaaaggaaaatcttgctcgcgtcggggacgcactgctgctggccatctcgaagggctacgttcgaattgtggaagcaattctgaatcaccctgcgtttgcacagggacagaggcttacgttgagccccctggaacaagagctgcgagacgacgatttttatgcatacgacgaggacggcacccgtttttcccacgacatcacacctatcattctggcagcgcattgccaggaatacgaaattgttcatatcctgctactcaaaggtgcacggatagagagaccccatgattatttctgcaagtgcaacgagtgtaccgaaaaacagcgcaaggactcctttagtcactcaaggagtcgtatgaacgcttacaaggggctcgcttctgccgcatatttatcactatcttccgaggaccctgtcctgactgctctggagctgtccaatgaactggcccggcttgctaatatcgagactgagttcaaattcgttgcccatcctaattgtcagcagcagttgttaactatgtggtacgaaaatctgtctggcctccgccagcagtccatcgcggtgaagtttctcgctgtttttggcgtgtccatcgggcttccttttctggcaattgcgtattggatcgctccatgttccaaactcggacgaaccctgcggagccccttcatgaagttcgtggcacatgcagtgtccttcacgatcttcttaggtttgctggtcgtcaacgcctccgatcgcttcgaaggggtgaagaccctgcccaacgagacatttacggattacccaaaacagatctttcgggttaagaccacgcagttttcgtggacagagatgcttattatgaagtgggtgctcgggatgatctggtcggaatgtaaagaaatttgggaagaggggccccgcgaatatgtcttacatctctggaatttgttggattttgggatgctaagcatttttgttgcctccttcacggcccgatttatggccttcctgaaggctaccgaagcacagctgtatgtggatcaacacgttcaagatgacactctgcacaacgtatctttgccgccagaggtggcttacttcacctatgctagggataagtggtggccctcagatccccagatcatcagcgaaggcctctatgcaatcgcagttgtactctcattctccaggatcgcttacattcttcccgccaacgaaagttttggccccctacaaattagcctggggcgtacggtaaaggacatcttcaagttcatggtaatattcatcatggtattcgtggcctttatgatcggaatgtttaatctgtactcttattacaggggggctaaatataatcctgcctttacaacagtcgaggagagttttaaaaccctgttctggagtatctttggactttcagaggtcatatctgttgtgctcaaatacgatcacaaattcatcgaaaacataggttacgtcttatacggtgtctataacgttacaatggtggtagtgctgctgaacatgctgatcgcgatgattaacaattcctaccaggagatcgaggaagacgccgatgttgaatggaagtttgctagggccaaactgtggctgtcatattttgacgaagggcgcacactgcctgctccattcaatctagtcccctcccccaagagtttctattacttgataatgcggatcaagatgtgccttattaaattgtgtaaatctaaagccaaatcatgcgaaaacgacctggaaatgggtatgctgaattcaaagtttaaaaagacacggtaccaggcggggatgagaaattccgaaaacctcacagctaacaacacactgagcaaacccactaggtaccagaaaatcatgaaacgactaatcaaaagatacgtcctcaaggctcaggtagatcgtgagaacgatgaggttaacgaaggggagctcaaagaaataaagcaggacattagtagcttaaggtatgaattgctggaagagaaatctcaggcaacaggagaactcgcagacttaatccagcagctgtccgagaagttcggcaaaaacctcaataaggatcacttacgggtgaataaggggaaggatatctag

SEQ ID NO: 65225 - DNA, 2406 bp, Artificial Sequence
  derived and/or modified sequence
atgctgaggaacagcaccttcaagaacatgcagaggaggcacaccaccctgcgggagaagggccggcggcaggccatccggggccctgcctacatgtttaatgagaagggcaccagcctgaccccagaggaggagcgcttcctggacagcgcagaatatggcaacatccctgtggtgaggaagatgctggaggagagcaagaccctgaacttcaactgtgtggactacatgggccagaatgccctgcagctggccgtgggcaatgagcacctggaggtgacagagctgctgctgaagaaggagaacctggcccgggtgggagatgccctgctgctggccatcagcaagggctacgtgagaattgtggaggccatcctgaaccacccagcctttgcccagggccagaggctgaccctgagccccctggagcaggagctgagagatgatgacttctacgcctatgatgaagatggcacccgcttcagccatgacatcacccccatcatcctggccgcccactgccaggagtatgaaattgtgcacatcctgctgctgaagggggcccgcatcgagcggccccatgactacttctgcaagtgcaatgaatgtacagagaagcagaggaaggacagcttcagccacagccgcagcaggatgaatgcctacaagggcctggccagcgctgcctacctgagcctgagcagcgaggaccctgtgctgacagccctggagctgagcaatgagctggcccggctggccaacattgaaacagagttcaagtttgtggcccaccccaactgccagcagcagctgctgaccatgtggtatgagaacctgagcggcctgcggcagcagagcattgctgtgaagttcctggccgtgtttggagtgtccatcggcctgcccttcctggccatcgcctactggatcgccccctgcagcaagctgggccgcaccctgcggagccccttcatgaagtttgtggcccatgctgtgtccttcaccatcttcctgggcctgctggtggtgaatgccagtgacagatttgaaggagtgaagaccctgcccaatgagaccttcacagactaccccaagcagatcttccgggtgaagaccacccagttctcctggacagagatgctgatcatgaagtgggtgctgggcatgatctggagcgagtgcaaggagatctgggaggagggcccccgggagtatgtgctgcacctgtggaacctgctggactttggcatgctgagcatctttgtggccagcttcaccgcccgcttcatggccttcctgaaggccacagaggcccagctgtatgtggaccagcacgtgcaggatgacaccctgcacaacgtgtccctgcccccagaggtggcctacttcacctacgcccgggacaagtggtggcccagcgacccccagatcatcagcgagggcctgtatgccatcgctgtggtgctgtccttcagccgcatcgcctacatcctgcctgccaatgaaagctttggccccctgcagatcagcctgggccgcacagtgaaggacatcttcaagttcatggtgatcttcatcatggtgtttgtggccttcatgattggcatgttcaacctgtacagctactacagaggagccaagtacaacccagccttcaccaccgtggaggagagcttcaagaccctcttctggagcatcttcggcctgtctgaggtgatctctgtggtgctgaagtatgaccacaagttcattgaaaatattggctacgtgctgtatggagtgtacaacgtgaccatggtggtggtgctgctgaacatgctgattgccatgatcaacaacagctaccaggagattgaggaggatgctgatgtggagtggaagtttgcccgggccaagctgtggctgagctactttgatgagggccgcaccctgcctgcccccttcaacctggtgcccagccccaagagcttctactacctgatcatgaggatcaagatgtgcctgatcaagctgtgcaagagcaaggccaagagctgtgaaaatgacctggagatgggcatgctgaacagcaagttcaagaagacccgctaccaggccggcatgaggaacagcgagaacctgacagccaacaacaccctgagcaagcccacccgctaccagaagatcatgaagaggctcatcaagcgctacgtgctgaaggcccaggtggacagagaaaatgatgaggtgaatgaaggagagctgaaggagatcaagcaggacatcagcagcctgcgctatgagctgctggaggagaagagccaggccaccggggagctggccgacctgatccagcagctgtctgagaagtttgggaagaacctgaacaaggaccacctgcgggtgaacaagggcaaggacatctag

SEQ ID NO: 65226 - DNA, 2406 bp, Artificial Sequence
  derived and/or modified sequence
atgctgcggaacagcaccttcaagaacatgcagcggcggcacaccacccttagggaaaaagggagacggcaagcaatacggggaccggcctacatgttcaatgagaaaggcactagcttgaccccagaggaagagagatttttagactctgcggagtatggtaacattccagtggtgcgtaaaatgctggaagaatctaagacgttgaacttcaattgtgtcgactacatgggacaaaacgccctgcagctggctgtgggcaacgaacacctcgaagttactgaactcctcctgaagaaagagaaccttgccagggtgggcgacgcactactgctggccattagcaagggctatgttcgcatcgtcgaggccatccttaaccaccctgccttcgcccaaggacaacgtctgactctttcaccccttgaacaggaattgagagatgacgatttctatgcctatgatgaggacggaacacgattttcacacgacattacccccatcatactggccgcccactgccaggagtatgaaatcgtgcatatcctgctgctgaagggggcaaggatcgagagaccccacgactacttctgtaagtgtaatgaatgtacagagaagcaaagaaaagattctttctctcactcacgctccaggatgaacgcctacaagggtcttgcctccgcagcatacctttccttgagctccgaagatccagtcttaaccgccctggaactaagcaacgagctggcacgcctggctaacatagagaccgagtttaagttcgtggcccacccgaattgccaacagcaattacttaccatgtggtacgaaaacctttctggactgcgacaacagagtatagcggtgaaattcctggctgtgttcggtgtgagtataggcttaccattcctggcaattgcatactggattgccccttgcagcaaactggggcgcacgctaaggtcaccatttatgaagttcgtggcacacgccgtgagcttcacgattttcctgggcctactagtcgtcaatgcgtcagataggttcgagggggtgaaaacgctgccaaatgaaactttcactgactatccaaagcaaatctttcgggtgaagaccactcagttctcttggaccgaaatgctgataatgaagtgggtgttaggaatgatctggagcgaatgcaaggaaatctgggaggaaggacccagggagtacgtgctgcatttgtggaatctgctggactttgggatgctgtctatttttgttgccagctttacagccagatttatggcctttctgaaagcaactgaggcccagctttacgtggatcagcacgtgcaggacgacactctgcacaatgtgagccttcccccagaggttgcatacttcacctatgcccgcgataagtggtggccatctgatccccagattatctccgaggggttatatgccatcgcggtagtgctgtctttcagtcggatcgcatacatcctgccggcgaacgagagctttgggcccctgcagatctccttgggcagaacagtcaaggatatcttcaagttcatggtaatcttcataatggtctttgtcgcctttatgatcgggatgttcaacctctattcgtactatcggggagctaaatataatcctgctttcacgacagtcgaggagagcttcaagacactcttctggtcgatctttggtctgagcgaggtgatatctgttgtcctgaagtatgatcacaaattcatagaaaacataggttacgtcctctatggagtgtacaacgtgacaatggtggtagtgctgctgaatatgctgatcgcaatgattaacaattcctaccaggagatagaggaagatgctgatgtcgagtggaagttcgctcgtgctaagttgtggctgagctacttcgatgaaggccggactctgccagccccattcaacctagttccctcccctaaaagtttttactaccttatcatgcggatcaagatgtgtttgattaagctgtgcaaatcaaaggccaaaagttgtgagaatgacctggagatggggatgctcaacagcaaattcaaaaaaacgagatatcaggccggcatgaggaattccgaaaacctaaccgcaaacaatacactgtccaaacccacacgatatcaaaagatcatgaagcgactgatcaagcgctatgtcctcaaggcacaggtcgatcgcgagaatgacgaagtcaatgaaggggaactaaaagagatcaaacaggatatctcttcactccgatatgaattgcttgaagaaaagagccaggcaacgggtgaacttgcagaccttattcagcagctgtccgaaaaattcgggaaaaacctcaataaagatcatctgagagttaacaaaggaaaggacatttag

SEQ ID NO: 65227 - DNA, 2406 bp, Artificial Sequence
  derived and/or modified sequence
atgttgcgcaactctacgttcaaaaatatgcagcggaggcacacaaccctacgtgagaaggggaggcgtcaagccatccgcggaccggcatacatgttcaatgagaagggtactagccttacacccgaggaggagaggttcttagactccgcagaatatgggaacattcccgttgtgcgaaagatgctcgaggaaagcaagacattaaactttaattgcgtcgattacatgggccagaatgccctacagcttgcagttggcaatgagcacctcgaggtcacagagctgctgctgaaaaaagaaaacctcgcgcgtgtgggcgatgccttactgctggctattagtaagggctatgtccgcattgttgaagcgatcctgaaccatcctgcattcgcccagggccaaagactcaccctgtctcctctcgaacaggagttgagagatgacgacttctatgcttatgatgaagatgggacaagattctcgcacgacatcacgccgataattctggccgcacactgccaggagtacgagattgtccacattctgttgctgaagggagctaggattgagcgtccccatgattatttctgcaagtgcaacgaatgtacagagaagcagcgaaaagactccttttctcattctcgctctcgcatgaatgcctataaaggactggcaagtgcagcatatctctccttatcaagcgaagatccagttctgactgccctggaactctccaatgagctggctcgcctcgcaaatattgaaactgaatttaaattcgttgcccatcctaactgtcagcagcagctgttaaccatgtggtacgagaacctgtctggacttcgacagcagtccatcgcggtcaagttcctggcagtgttcggggtttctatcggtctgccatttctggctatcgcatattggatcgctccttgttccaaactcgggaggacgctgaggtctcctttcatgaaattcgtggcccacgccgtttctttcacaatttttctcgggctgctcgtagttaacgcttcggacagattcgagggcgttaagacattacccaatgagacctttacagattatccaaagcaaatattcagagtgaaaaccactcagttcagctggacagaaatgctgatcatgaaatgggtgctaggaatgatttggagcgaatgcaaggagatttgggaagagggtcctcgggaatacgtgctccatctgtggaatttgttggactttggaatgctgtccatcttcgtcgcctcattcaccgcaagatttatggctttcctcaaggccactgaagcccagctgtatgtggaccaacatgttcaggacgataccctgcataatgtgagcctgcccccagaggttgcatattttacttatgctcgtgacaaatggtggccctccgacccgcaaattataagcgaaggcctttatgccatcgcagttgtccttagcttctcccggattgcatacattttaccagcgaacgagtcttttgggcctcttcagatctctctaggcagaaccgtgaaggacatctttaaattcatggtgatctttataatggttttcgttgctttcatgatcggcatgttcaacctttatagttactaccggggagccaagtataacccagctttcactactgtggaggagtccttcaagactctgttttggtctatatttggtctcagtgaggtgatctcagtagtccttaagtatgaccataagttcatcgagaatatcgggtacgtgctctacggtgtgtacaacgtgaccatggtggtggtcctgctcaatatgctgatcgcaatgatcaacaattcttaccaggagatagaagaagacgccgacgtggaatggaaattcgctagggccaagctgtggctgtcgtactttgacgaaggcagaaccctgcccgctccatttaatttggtcccgtccccaaagtccttctactatcttattatgcggattaagatgtgtctcatcaagttatgtaagtcaaaggccaagtcgtgcgagaacgacctggagatgggtatgctgaactcaaaatttaagaagacccggtaccaggccggtatgagaaactccgaaaaccttacagccaataatacactatctaagcccacccggtatcagaagataatgaagaggctaatcaagcgctatgtcctgaaggcacaagttgacagagagaacgatgaggtgaacgagggagagctcaaagagatcaagcaggacattagttctctacgctacgagctgctggaagagaaatcgcaggcgacaggcgagcttgcagaccttatccagcagctgtccgaaaaattcggcaagaatctgaataaagatcacttaagagttaacaagggtaaggacatttag

SEQ ID NO: 65228 - DNA, 2752 bp, Artificial Sequence
  derived and/or modified sequence
cacggttctgcctcggaaggcgagtttttaccactgcaacacaaagaacagaggagcgcgctttcacatcgttgcaacttaactcacttgaccagctctatacttcagcaccacggagagcggtacatccttggctaccacccatggggagccagcttctggcgactcaacaccggattccggtcatctagaggaggaacaagcctgcgtattacaccctcaatgttgaggaacagcaccttcaaaaacatgcagcgccggcacacaacgctgagggagaagggccgtcgccaggccatccggggtcccgcctacatgttcaacgagaagggcaccagtctgacgcccgaggaggagcgcttcctggactcggctgagtatggcaacatcccggtggtccggaaaatgctggaggagtccaagacccttaacttcaactgtgtggactacatggggcagaacgctctgcagctggccgtgggcaacgagcacctagaggtcacggagctgctgctgaagaaggagaacctggcacgggtgggggacgcgctgctgctggccatcagcaagggctatgtgcgcatcgtggaggccatcctcaaccacccggccttcgcgcagggccagcgcctgacgctcagcccgctggaacaggagctgcgcgacgacgacttctatgcctacgacgaggacggcacgcgcttctcccacgacatcacgcccatcatcctggcggcgcactgccaggagtatgagatcgtgcacatcctgctgctcaagggcgcccgcatcgagcggccccacgactacttctgcaagtgcaatgagtgcaccgagaaacagcggaaagactccttcagccactcgcgctcgcgcatgaacgcctacaaaggactggcgagtgctgcctacttgtccctgtccagcgaagaccctgtcctcaccgccctggagctcagcaacgagttagccagactagccaacattgagactgaatttaagttcgttgctcatcctaactgtcagcagcaattgcttaccatgtggtatgaaaatctctcaggcttacgtcaacagtctatcgctgtgaaattcctggctgtctttggagtctccataggcctcccttttctcgccatagcctattggattgctccgtgcagcaagctaggacgaaccctgaggagccctttcatgaagtttgtagctcatgcagtttcttttacaatcttcttgggattattagttgtgaatgcatctgaccgatttgaaggtgttaaaaccctgccaaacgaaaccttcacagactacccaaaacaaatcttcagagtgaaaaccacacagttctcctggacagaaatgctcattatgaagtgggtcttaggaatgatttggtccgaatgcaaggaaatctgggaggaggggccacgggagtacgtgctgcacttgtggaacctgctagatttcgggatgctgtccatcttcgtggcctccttcacagcacgcttcatggccttcctgaaggccacggaggcacagctgtacgtggaccagcacgtgcaggacgacacgctgcacaatgtctcgcttccgccggaagtggcatacttcacctacgccagggacaagtggtggccttcagaccctcagatcatatcggaagggctctacgcgatagccgtcgtgctgagcttctctcgcattgcatacattctgccagccaacgagagttttgggcccctgcagatctcgctagggagaactgtgaaagatatcttcaagttcatggtcattttcatcatggtatttgtggccttcatgattgggatgttcaacctgtactcttactaccgaggtgccaaatacaacccagcgtttacaacggttgaagaaagttttaaaactttgttttggtccatattcggcttatctgaagtaatctcagtggtgctgaaatacgaccacaaattcatcgagaacattggctacgttctctacggcgtttataacgtcaccatggtggtagtgttgctcaacatgctaatagccatgataaacaactcctatcaggaaattgaggaggatgcagatgtggaatggaagttcgcccgagcaaaactctggctgtcttactttgatgaaggaagaactctacctgctccttttaatctagtgccaagtcctaaatcattttattatctcataatgagaatcaagatgtgcctcataaaactctgcaaatctaaggccaaaagctgtgaaaatgaccttgaaatgggcatgctgaattccaaattcaagaagactcgctaccaggctggcatgaggaattctgaaaatctgacagcaaataacactttgagcaagcccaccagataccagaaaatcatgaaacggctcataaaaagatacgtcctgaaagcccaggtggacagagaaaatgacgaagtcaatgaaggcgagctgaaggaaatcaagcaagatatctccagcctgcgctatgagcttcttgaggaaaaatctcaagctactggtgagctggcagacctgattcaacaactcagcgagaagtttggaaagaacttaaacaaagaccacctgagggtgaacaagggcaaagacatttagcagcccacatcggcgtctgtgacttctaccagcattccaaggccaggttggatgccctcgcccccatccttggtggggaggggtccccagcccactcctctaggacacgaaggggatctcctgg

SEQ ID NO: 65229 - protein, 109 aa, Artificial Sequence
  derived and/or modified sequence
MLSYGERLGSPAVSPLPVRGGHVMRGTAFAYVPSPQVLHRIPGTSAYAFPSLGPVALAEHTCPCGEVLERHEPLPAKLALEEEQKPESRLVPKLRQAGAMLLKVPLMLT

SEQ ID NO: 65230 - protein, 340 aa, Artificial Sequence
  derived and/or modified sequence
MLSYGERLGSPAVSPLPVRGGHVMRGTAFAYVPSPQVLHRIPGTSAYAFPSLGPVALAEHTCPCGEVLERHEPLPAKLALEEEQKPESRLVPKLRQAGAMLLKVPLMLTFLYLFVCSLDMLSSAFQLAGGKVAGDIFKDNAILSNPVAGLVVGILVTVLVQSSSTSTSIIVSMVSSGLLEVSSAIPIIMGSNIGTSVTNTIVALMQAGDRTDFRRAFAGATVHDCFNWLSVLVLLPLEAATGYLHHITRLVVASFNIHGGRDAPDLLKIITEPFTKLIIQLDESVITSIATGDESLRNHSLIQIWCHPDSLQQNLEGREITHFDLRKKQAMEDSSVPHCP

SEQ ID NO: 65231 - DNA, 330 bp, Artificial Sequence
  derived and/or modified sequence
atgctgtcctacggcgagcgccttgggtcccctgcagtaagtccacttccggtcagaggaggacatgtgatgcggggtaccgccttcgcctatgtgccttcgcctcaggtgctgcacagaattccaggcacaagcgcatatgcatttcctagccttggaccagtggcattagctgaacatacctgcccatgcggcgaagtgcttgagcgccatgagcctctgccagcaaagttggccttggaggaggagcagaaaccagagtcccggctggttccaaaactgaggcaagctggtgcgatgttactgaaggtgccccttatgctcacgtag

SEQ ID NO: 65232 - DNA, 1023 bp, Artificial Sequence
  derived and/or modified sequence
atgctatcatacggcgaaaggctggggtctccagccgtcagcccactcccggttcgaggaggccacgtcatgcgcgggacggcttttgcctatgtgccttctccccaggtgctccacaggatccccggtaccagcgcatacgctttcccctctcttggacctgtggccctcgctgagcatacgtgcccctgtggggaggtcctggaaagacatgagccgttgccggctaagctagctctcgaggaagaacagaagccagagagcagactggttccaaaactgaggcaggcgggagcaatgctcctgaaggtgccattgatgctcacatttctttacctttttgtatgtagcctagatatgctctcctccgccttccagctggcaggcgggaaagtggccggagacatctttaaggataatgccattctgtcgaacccagtcgcaggactcgtggtcggaattctcgtcacggtgctggtacagtcatctagcactagcaccagcattattgttagcatggtaagtagcggcttactggaggtgtcttccgctatccccattattatgggctctaacattggaacctccgtgaccaatactatcgttgctctaatgcaagccggggataggaccgatttcagacgagccttcgcaggtgcgacagttcacgattgtttcaactggctctcggtactggtgttacttcctctggaagccgccaccggatatcttcaccacatcactcgattagtggtggcctcctttaacatccacggtggacgagatgcccccgacttgctcaagattattacagagcctttcactaagcttatcatacagttggacgagtccgttatcacttcaattgccactggtgacgagtccctgcgcaaccacagtcttatacaaatctggtgtcatccagattctctgcagcagaacctggaaggccgggaaattacgcattttgacttacgcaagaagcaggctatggaagattcaagcgtaccacactgtccctag

SEQ ID NO: 65233 - DNA, 330 bp, Artificial Sequence
  derived and/or modified sequence
atgctgtcctatggagagcggctgggcagccctgctgtgagccccctgcctgtgcggggcggccacgtgatgaggggcacagcctttgcctacgtgcccagcccccaggtgctgcaccgcatccctggcaccagcgcctatgccttccccagcctgggccctgtggccctggccgagcacacctgcccctgtggggaggtgctggagagacatgagcccctgcctgccaagctggccctggaggaggagcagaagccagagagccggctggtgcccaagctgcggcaggccggggccatgctgctgaaggtgcccctgatgctgacctag

SEQ ID NO: 65234 - DNA, 1023 bp, Artificial Sequence
  derived and/or modified sequence
atgctgtcctatggagagcggctgggcagccctgctgtgagccccctgcctgtgcggggcggccacgtgatgaggggcacagcctttgcctacgtgcccagcccccaggtgctgcaccgcatccctggcaccagcgcctatgccttccccagcctgggccctgtggccctggccgagcacacctgcccctgtggggaggtgctggagagacatgagcccctgcctgccaagctggccctggaggaggagcagaagccagagagccggctggtgcccaagctgcggcaggccggggccatgctgctgaaggtgcccctgatgctgaccttcctgtacctgtttgtgtgcagcctggacatgctgagcagcgccttccagctggccggcggcaaggtggccggggacatcttcaaggacaatgccatcctgagcaaccctgtggccggcctggtggtgggcatcctggtgacagtgctggtgcagagcagcagcaccagcaccagcatcatcgtgtccatggtgagcagcggcctgctggaggtgtcctctgccatccccatcatcatgggcagcaacatcggcacctctgtgaccaacaccatcgtggccctgatgcaggccggggacagaacagacttccggcgggcctttgctggggccaccgtgcatgactgcttcaactggctgtctgtgctggtgctgctgcccctggaggccgccaccggctacctgcaccacatcacccggctggtggtggccagcttcaacatccacggcggcagagatgccccagacctgctgaagatcatcacagagcccttcaccaagctgatcatccagctggatgagagcgtcatcaccagcatcgccactggagatgagagcctgaggaaccacagcctcatccagatctggtgccacccagacagcctgcagcagaacctggagggccgggagatcacccactttgacctgaggaagaagcaggccatggaggacagctctgtgccccactgcccctag

SEQ ID NO: 65235 - DNA, 330 bp, Artificial Sequence
  derived and/or modified sequence
atgctgagctacggcgagcggctgggcagccccgccgtgagccccctgccagtgagagggggacatgtcatgcgcggtacggcatttgcgtacgtaccctccccccaggtgttgcaccggattccagggacaagcgcatacgcattccccagcctgggaccggtggccctggccgagcacacatgcccgtgcggggaggtccttgagcgccacgagcccctcccggcaaagctggctttggaagaagagcaaaagcctgagtcgagactagtgcccaagctgcgacaagccggcgccatgctgctcaaagtgccactgatgttgacatag

SEQ ID NO: 65236 - DNA, 1023 bp, Artificial Sequence
  derived and/or modified sequence
atgctgagctacggcgagcggctgggcagccccgccgtgagccccctgcccgttcgcggcggtcacgtaatgcggggcactgccttcgcttatgttccttcccctcaagtgctgcacagaattcccggaacctcggcgtatgctttcccatcactgggccctgtggccctcgccgagcatacgtgcccttgcggagaagttctggagagacatgaacccctgcccgctaagcttgccttggaagaggagcagaaaccggagtcacgcttggtccctaaattgaggcaggccggagcaatgttgttgaaagtcccgttgatgctgacctttctgtatctgtttgtttgtagtttggacatgctctcttccgcctttcagctggcgggagggaaggttgcaggcgacatttttaaggacaatgccattttgtccaaccctgttgcaggtctggtggtgggtattctggtaactgttctcgtacagtcctctagcaccagtaccagcatcatcgtcagcatggtgagttctggcctactcgaggtgtcatccgccatacccatcatcatgggctccaatatcgggacaagtgttacaaacactattgtagctctgatgcaggccggcgatcgcacagatttccgtagagctttcgcaggcgcaactgtgcatgattgctttaactggctttcagtcctggtgcttctgcccctggaagctgcgactggttatctgcaccacattacccgacttgtcgtggcaagttttaacattcacgggggacgggacgctcctgacctgcttaagatcattactgagccatttacgaagctcataatccagctagacgaatcagttattaccagcatcgcgacaggggatgagtctctgcgtaaccatagcctgattcaaatttggtgccatcccgacagcttgcagcagaaccttgaagggcgcgagattactcatttcgatctccgcaaaaaacaggcaatggaagattccagtgtgcctcattgcccttag

SEQ ID NO: 65237 - DNA, 330 bp, Artificial Sequence
  derived and/or modified sequence
atgctctcctacggagagagattgggatctccggctgtctcgcctttgcccgtgcggggaggccacgtgatgaggggaactgcttttgcttacgtgccaagccctcaggtgctgcacaggattccaggcacatccgcatatgcatttccttctctgggcccagttgccctggccgaacacacatgtccatgcggagaggtgctggagcgacacgagcccttgcccgctaagttggcgctcgaagaggaacaaaaaccagaatcccggcttgttccaaaacttcgacaggcaggcgcaatgttactcaaggtgcccctcatgctgacatag

SEQ ID NO: 65238 - DNA, 1023 bp, Artificial Sequence
  derived and/or modified sequence
atgctgtcctatggagaacggttaggaagccccgcagtgagtcccttacccgtaaggggaggccatgtcatgaggggcaccgcctttgcttatgtgccatcaccacaggtactgcaccgcatcccagggacatctgcttacgctttccccagtttggggccagtagcactggccgaacacacatgcccttgcggtgaggtgctggaacgacatgagcctctcccagctaaactggccctggaggaggaacagaaacccgaatcccgcctggtacccaagcttcggcaggcgggagcgatgcttctgaaggtgccactgatgctcacatttctgtacctgttcgtttgcagtctcgacatgttgtcctcagcttttcagctggcgggagggaaggtagccggagatatcttcaaggacaacgccattctgtcgaaccctgtcgccggactggtagttggcatactcgtcacagtcctcgtgcagtccagtagcacctctacctccattattgtttccatggtgagcagtggcctccttgaagtctcctctgccatcccaatcattatgggctcaaacattgggacaagcgtcaccaatacaatcgtcgccctcatgcaggccggagatagaactgacttcaggcgagcgtttgccggtgccaccgtacacgactgctttaattggttgagtgtgctggtgttgttacccctcgaagcagcaactggttatctccaccacatcactaggttggtggtggcctcttttaatatccacgggggtcgggacgccccagatctgctcaagatcatcacagaaccattcactaagttaatcatccagttagatgaaagcgtcataacttccattgcaaccggggatgaaagtctccgtaaccatagtcttatccagatttggtgccaccccgactctctccagcagaatttggaagggcgagagatcactcactttgacctgaggaagaaacaagccatggaggacagttcggtgccccactgtccatag

SEQ ID NO: 65239 - DNA, 532 bp, Artificial Sequence
  derived and/or modified sequence
atctggaaaatagaacttggaagagacgatgtttcagggccttgcctgctctgtgctggggccaggcagctctgttgaagtccaggctctccaagagaggacaaagtcaaggaggccaggaaagccattgctttgttacccaaagggaacccaccgcgttgctgagacccactgacctgcagacctcatagtgggtgcccaggatgttgtcctacggagagaggctggggtcccctgctgtctccccactcccagtccgtggggggcatgtgatgcgagggacggcctttgcctacgtgcccagccctcaggtcctacacaggatcccggggacctctgcctatgccttccccagcctgggccctgtggcccttgctgagcacacctgcccctgtggggaggtcctggagcgccatgaaccactgcctgccaagctggccctggaggaggagcagaagccagagtccaggctggtccccaagctgcgccaggctggcgccatgctgctcaaggtgccactgatgctcacctt

SEQ ID NO: 65240 - DNA, 1912 bp, Artificial Sequence
  derived and/or modified sequence
gtcctggaggcttcattgagctgctgagcagaagctgaaacacagaattctaagcgttgctgagacccactgacctgcagacctcatagtgggtgcccaggatgttgtcctacggagagaggctggggtcccctgctgtctccccactcccagtccgtggggggcatgtgatgcgagggacggcctttgcctacgtgcccagccctcaggtcctacacaggatcccggggacctctgcctatgccttccccagcctgggccctgtggcccttgctgagcacacctgcccctgtggggaggtcctggagcgccatgaaccactgcctgccaagctggccctggaggaggagcagaagccagagtccaggctggtccccaagctgcgccaggctggcgccatgctgctcaaggtgccactgatgctcaccttcctctacctcttcgtctgctccctggacatgctcagctcggccttccagctggctggagggaaggtggctggtgacatcttcaaggataacgccatcctgtccaacccggtggccgggctggtggtggggatcctggtgaccgtgctggtgcagagctccagcacctccacatccatcatcgtcagcatggtctcctctggcttgctggaggtgagctctgccatccccatcatcatgggctccaacatcggcacctctgtcaccaacaccatcgtggccctgatgcaggcgggggacaggactgacttccggcgggccttcgcgggggccacggtgcatgactgctttaactggctgtcagtgctggtcctgctgcccctggaggctgccactggctacctgcaccacatcactcgacttgtggtggcctccttcaacatccatggtggccgtgatgctcctgacctgctcaagatcatcacagagcccttcacgaagctcatcatccagctggacgagtctgtgataaccagcattgccactggtgatgagtccctgaggaaccacagtctcatccagatctggtgccacccagactccttacagcaaaatctggaagggagagaaatcacacactttgatcttcgcaaaaagcaagccatggaagacagctctgttcctcactgcccctgagctccctgccggccacctactgcagcttccggcagatctcaaccagcagcctccacgtcctcacttgaagtcatcctcacccaggttcactctggggaggccgcccttgggcctttctctacggctgcagctgacacttgtccagctggtttctcttcctcactctaccaggaaatgctttccttaaacgctttctgcagggcagggtctcatttcctcggcttggagagtagctggtgggtgggacccaagctctcactttcatcccctttctgggacagcgccccgaaggagtgtgactcacacagcagtggatgtgcttggtcttgcaaagtgtgaagtgcgtcctggctcttcctgcccaaagacgggccacagagtctccccgtgctcccttccaacctgttcccattgacgccaactttcaccatgctggacctgaaccagcccgaaacagtctccagggaagctatgcaccagggagaggaggcaagtccaaggcctaccagatggggaaagcagcagcagcggcagttgagtgatcagacacttgagtctcccgggaccctgacaccgtcctgggaatcaccttcttatgtggccacactgtggactgtcaactatacctgcctggattaaacaagcatcttttgaggacttgcaacctgggaggcagggattatcacgtccccattttacagacgaggagcactgagccccagagaagtgcagtggcttgcccaagtccatgtaattgaggtaggatacaaatcctggtagaatcctga

SEQ ID NO: 65241 - DNA, 330 bp, Artificial Sequence
  derived and/or modified sequence
atgctgagctacggcgagagactgggcagccccgccgtgagccccctgcccgtgagaggcggccacgtgatgagaggcaccgccttcgcctacgtgcccagcccccaggtgctgcacagaatccccggcaccagcgcctacgccttccccagcctgggccccgtggccctggccgagcacacctgcccctgcggcgaggtgctggagagacacgagcccctgcccgccaagctggccctggaggaggagcagaagcccgagagcagactggtgcccaagctgagacaggccggcgccatgctgctgaaggtgcccctgatgctgacctag

SEQ ID NO: 65242 - DNA, 1023 bp, Artificial Sequence
  derived and/or modified sequence
atgctgagctacggcgagagactgggcagccccgccgtgagccccctgcccgtgagaggcggccacgtgatgagaggcaccgccttcgcctacgtgcccagcccccaggtgctgcacagaatccccggcaccagcgcctacgccttccccagcctgggccccgtggccctggccgagcacacctgcccctgcggcgaggtgctggagagacacgagcccctgcccgccaagctggccctggaggaggagcagaagcccgagagcagactggtgcccaagctgagacaggccggcgccatgctgctgaaggtgcccctgatgctgaccttcctgtacctgttcgtgtgcagcctggacatgctgagcagcgccttccagctggccggcggcaaggtggccggcgacatcttcaaggacaacgccatcctgagcaaccccgtggccggcctggtggtgggcatcctggtgaccgtgctggtgcagagcagcagcaccagcaccagcatcatcgtgagcatggtgagcagcggcctgctggaggtgagcagcgccatccccatcatcatgggcagcaacatcggcaccagcgtgaccaacaccatcgtggccctgatgcaggccggcgacagaaccgacttcagaagagccttcgccggcgccaccgtgcacgactgcttcaactggctgagcgtgctggtgctgctgcccctggaggccgccaccggctacctgcaccacatcaccagactggtggtggccagcttcaacatccacggcggcagagacgcccccgacctgctgaagatcatcaccgagcccttcaccaagctgatcatccagctggacgagagcgtgatcaccagcatcgccaccggcgacgagagcctgagaaaccacagcctgatccagatctggtgccaccccgacagcctgcagcagaacctggagggcagagagatcacccacttcgacctgagaaagaagcaggccatggaggacagcagcgtgccccactgcccctag

SEQ ID NO: 65243 - protein, 481 aa, Artificial Sequence
  derived and/or modified sequence
MTSSPRAPPGEQGRGGAEMIRAAPPPLFLLLLLLLLLVSWASRGEAAPDQDEIQRLPGLAKQPSFRQYSGYLKGSGSKHLHYWFVESQKDPENSPVVLWLNGGPGCSSLDGLLTEHGPFLIANVLYLESPAGVGFSYSDDKFYATNDTEVAQSNFEALQDFFRLFPEYKNNKLFLTGESYAGIYIPTLAVLVMQDPSMNLQGLAVGNGLSSYEQNDNSLVYFAYYHGLLGNRLWSSLQTHCCSQNKCNFYDNKDLECVTNLQEVARIVGNSGLNIYNLYAPCAGGVPSHFRYEKDTVVVQDLGNIFTRLPLKRMWHQALLRSGDKVRMDPPCTNTTAASTYLNNPYVRKALNIPEQLPQWDMCNFLVNLQYRRLYRSMNSQYLKLLSSQKYQILLYNGDVDMACNFMGDEWFVDSLNQKMEVQRRPWLVKYGDSGEQIAGFVKEFSHIAFLTIKGAGHMVPTDKPLAAFTMFSRFLNKQPY

SEQ ID NO: 65244 - protein, 345 aa, Artificial Sequence
  derived and/or modified sequence
MIRAAPPPLFLLLLLLLLLVSWASRGEAAPDQDEIQRLPGLAKQPSFRQYSGYLKGSGSKHLHYWFVESQKDPENSPVVLWLNGGPGCSSLDGLLTEHGPFLIANVLYLESPAGVGFSYSDDKFYATNDTEVAQSNFEALQDFFRLFPEYKNNKLFLTGESYAGIYIPTLAVLVMQDPSMNLQGLAVGNGLSSYEQNDNSLVYFAYYHGLLGNRLWSSLQTHCCSQNKCNFYDNKDLECVTNLQEVARIVGNSGLNIYNLYAPCAGGVPSHFRYEKDTVVVQDLGNIFTRLPLKRMWHQALLRSGDKVRMDPPCTNTTAASTYLNNPYVRKALNIPEQLPQWDMC

SEQ ID NO: 65245 - DNA, 2208 bp, Artificial Sequence
  derived and/or modified sequence
agagtgcacccgaatccacgggctcggaggcagcagccatctctcggccatagggcaggccagctggcgccgggggctattttgggcggcgggcaatgatggtgaccgcaaggcgaccttgtaaggcatttcccccctgactcccttccccgagcctctgcccgggggtcctagcgccgctttctcagccatcccgcctacaacttagccgtccacaacaggatcatctgatcgcgtgcgcccgggctacgatctgcgaggcccgcggaccttgacccggcattgaccgccaccgccccccaggtccgtagggaccaaagaaggggcgggaggaagactgtcacgtggcgccggagttcacgtgactcgtacacatgacttccagtccccgggcgcctcctggagagcaaggacgcgggggagcagagatgatccgagccgcgccgccgccgctgttcctgctgctgctgctgctgctgctgctagtgtcctgggcgtcccgaggcgaggcagcccccgaccaggacgagatccagcgcctccccgggctggccaagcagccgtctttccgccagtactccggctacctcaaaggctccggctccaagcacctccactactggtttgtggagtcccagaaggatcccgagaacagccctgtggtgctttggctcaatgggggtcccggctgcagctcactagatgggctcctcacagagcatggccccttcctgattgccaatgtgttatacctggagtccccagctggggtgggcttctcctactccgatgacaagttttatgcaactaatgacactgaggtcgcccagagcaattttgaggcccttcaagatttcttccgcctctttccggagtacaagaacaacaaacttttcctgaccggggagagctatgctggcatctacatccccaccctggccgtgctggtcatgcaggatcccagcatgaaccttcaggggctggctgtgggcaatggactctcctcctatgagcagaatgacaactccctggtctactttgcctactaccatggccttctggggaacaggctttggtcttctctccagacccactgctgctctcaaaacaagtgtaacttctatgacaacaaagacctggaatgcgtgaccaatcttcaggaagtggcccgcatcgtgggcaactctggcctcaacatctacaatctctatgccccgtgtgctggaggggtgcccagccattttaggtatgagaaggacactgttgtggtccaggatttgggcaacatcttcactcgcctgccactcaagcggatgtggcatcaggcactgctgcgctcaggggataaagtgcgcatggaccccccctgcaccaacacaacagctgcttccacctacctcaacaacccgtacgtgcggaaggccctcaacatcccggagcagctgccacaatgggacatgtgcaactttctggtaaacttacagtaccgccgtctctaccgaagcatgaactcccagtatctgaagctgcttagctcacagaaataccagatcctattatataatggagatgtagacatggcctgcaatttcatgggggatgagtggtttgtggattccctcaaccagaagatggaggtgcagcgccggccctggttagtgaagtacggggacagcggggagcagattgccggcttcgtgaaggagttctcccacatcgcctttctcacgatcaagggcgccggccacatggttcccaccgacaagcccctcgctgccttcaccatgttctcccgcttcctgaacaagcagccatactgatgaccacagcaaccagctccacggcctgatgcagcccctcccagcctctcccgctaggagagtcctcttctaagcaaagtgcccctgcaggccgggttctgccgccaggactgcccccttcccagagccctgtacatcccagactgggcccagggtctcccatagacagcctgggggcaagttagcactttattcccgcagcagttcctgaatggggtggcctggccccttctctgcttaaagaatgccctttatgatgcactgattccatcccaggaacccaacagagctcaggacagcccacagggaggtggtggacggactgtaattgatagattgattatggaattaaattgggtacagcttcaaaaaaaaaaaaaaaaaaaaa

SEQ ID NO: 65246 - DNA, 1446 bp, Artificial Sequence
  derived and/or modified sequence
atgacgagcagtccgagagctccccccggcgagcaggggcgaggcggtgcagaaatgattcgtgctgcccctcctcctctctttttgctgttactgctgctcctcctgctcgtgtcatgggcctcacggggcgaggcagcacccgatcaggatgagatacagagacttcccggacttgccaagcaaccgagctttcggcaatactcagggtatcttaagggatctgggtctaagcacctgcactactggtttgtcgagtcacagaaagacccagagaacagcccagtggtcttgtggctgaacggtggacctggttgctcctctcttgacggcctgctcaccgaacacggtccctttctgatcgcaaacgtcctgtatctggagtcacccgccggcgtcggcttttcgtattcagatgataagttttacgccaccaatgatacagaggtggcccagtccaatttcgaagccctgcaggattttttccggctgtttcctgaatataaaaacaataagctattcctcacaggggagtcctacgccgggatctacatccccacactagccgtcctggtgatgcaggatccttccatgaaccttcaggggttagctgttgggaatgggttgagcagctacgagcaaaacgacaatagcctggtgtatttcgcttactaccacggccttctgggaaatcgcttgtggagcagtttgcagacacattgctgcagccagaataagtgtaacttttacgataacaaagatttggagtgcgttactaatctccaggaggttgctagaatagtcggaaactcaggactcaacatttataatctgtacgctccatgcgctgggggtgttccgtcccatttccgatacgagaaggacactgtggtggtgcaggacttggggaacatctttacccggctgcctctgaagcggatgtggcatcaggccctactacgcagtggggacaaggttaggatggatccaccctgcacaaacactacggcagcaagcacgtatctgaataacccatacgtgcgtaaggccctcaatatacccgagcaattgccacaatgggatatgtgtaattttcttgtgaatctgcagtatagacggctctatcgcagcatgaattcccagtatctgaagctgcttagctcccagaaataccaaatcctgctctataatggcgatgtcgatatggcctgtaacttcatgggggacgaatggtttgtagacagcttaaatcagaaaatggaggtgcagcgcaggccttggctcgtgaagtatggagattccggagagcagatcgcaggttttgtgaaggagtttagccatatagccttcctgaccatcaaaggagccggccacatggtgcctacagataaaccattagctgcttttacgatgttctcaagattcttgaataaacagccgtattag

SEQ ID NO: 65247 - DNA, 1038 bp, Artificial Sequence
  derived and/or modified sequence
atgataagggccgccccaccacccctattcctgcttctgttgctcctgttgctgctggtgagctgggcgtctaggggggaggccgcccctgatcaggacgagatccagcgtttgcccggcttggccaaacagccatcatttcgccagtacagcggatacctgaagggatcaggtagcaagcacttgcactactggttcgtggagagccagaaagatcctgagaacagtcctgttgtcttatggcttaatgggggccccggatgttcttctctggacggtctgctcaccgaacacgggcctttcctgatcgcaaacgttttgtatcttgagtctccagccggtgtgggcttctcctactctgacgacaaattttatgccactaatgatacagaggtggcacagtccaattttgaagcccttcaggatttcttccgactgttcccagagtacaagaacaacaagttgtttctgacaggcgagtcatacgctggcatatatatccctacactcgccgtcctggtaatgcaggacccatccatgaacctacagggtctggcagtgggaaacggcctaagcagctatgagcaaaatgacaactctcttgtgtatttcgcttactaccacgggctgctgggcaaccgattatggagctccttgcagacccactgctgttcccagaacaagtgcaacttttacgataataaagacctagaatgcgtgaccaacttgcaggaggtggctagaatcgtcggcaattcaggtctcaacatctacaacttgtacgctccttgcgccgggggggttccttcccattttcgatacgaaaaagatactgtcgtggttcaggatctaggcaatattttcactagacttcccttgaagaggatgtggcatcaggccttattgagatcaggtgacaaggttcggatggatcctccttgtacgaataccactgcagcaagcacctacctgaacaacccctacgtacgcaaagccctcaacattcccgagcagctgcctcagtgggacatgtgttag

SEQ ID NO: 65248 - DNA, 1446 bp, Artificial Sequence
  derived and/or modified sequence
atgaccagcagcccccgggcccctcctggagagcagggccggggcggcgctgagatgatccgggccgcccctcctcctctcttcctgctgctgctgctgctgctgctgctggtgtcctgggccagcagaggagaggccgccccagaccaggatgagatccagaggctgcccggcctggccaagcagcccagcttccggcagtacagcggctacctgaagggcagcggcagcaagcacctgcactactggtttgtggagagccagaaggaccctgagaacagccctgtggtgctgtggctgaatggaggccctggctgcagcagcctggatggcctgctgacagagcacggccccttcctgattgccaacgtgctgtacctggagagccctgctggggtgggcttctcctacagtgatgacaagttctacgccaccaatgacacagaggtggcccagagcaactttgaggccctgcaggacttcttccgcctcttccctgagtacaagaacaacaagctgttcctgaccggggagagctatgccggcatctacatccccaccctggccgtgctggtgatgcaggaccccagcatgaacctgcagggcctggccgtgggcaatggcctgagcagctatgagcagaatgacaacagcctggtgtactttgcctactaccacggcctgctgggcaaccggctgtggagcagcctgcagacccactgctgcagccagaacaagtgcaacttctatgacaacaaggacctggagtgtgtgaccaacctgcaggaggtggccagaattgtgggcaacagcggcctgaacatctacaacctgtatgccccctgtgccggcggcgtgcccagccacttccgctatgagaaggacacagtggtggtgcaggacctgggcaacatcttcacccggctgcccctgaagaggatgtggcaccaggccctgctgcggagcggggacaaggtgaggatggaccccccctgcaccaacaccacagctgccagcacctacctgaacaacccctacgtgaggaaggccctgaacatccctgagcagctgccccagtgggacatgtgcaacttcctggtgaacctgcagtaccgccgcctgtaccgctccatgaacagccagtacctgaagctgctgagcagccagaagtaccagatcctgctgtacaatggagatgtggacatggcctgcaacttcatgggagatgagtggtttgtggacagcctgaaccagaagatggaggtgcagaggcggccctggctggtgaagtatggagacagcggggagcagattgctggctttgtgaaggagttcagccacatcgccttcctgaccatcaagggggccggccacatggtgcccacagacaagcccctggccgccttcaccatgttcagccgcttcctgaacaagcagccctactag

SEQ ID NO: 65249 - DNA, 1038 bp, Artificial Sequence
  derived and/or modified sequence
atgatccgggccgcccctcctcctctcttcctgctgctgctgctgctgctgctgctggtgtcctgggccagcagaggagaggccgccccagaccaggatgagatccagaggctgcccggcctggccaagcagcccagcttccggcagtacagcggctacctgaagggcagcggcagcaagcacctgcactactggtttgtggagagccagaaggaccctgagaacagccctgtggtgctgtggctgaatggaggccctggctgcagcagcctggatggcctgctgacagagcacggccccttcctgattgccaacgtgctgtacctggagagccctgctggggtgggcttctcctacagtgatgacaagttctacgccaccaatgacacagaggtggcccagagcaactttgaggccctgcaggacttcttccgcctcttccctgagtacaagaacaacaagctgttcctgaccggggagagctatgccggcatctacatccccaccctggccgtgctggtgatgcaggaccccagcatgaacctgcagggcctggccgtgggcaatggcctgagcagctatgagcagaatgacaacagcctggtgtactttgcctactaccacggcctgctgggcaaccggctgtggagcagcctgcagacccactgctgcagccagaacaagtgcaacttctatgacaacaaggacctggagtgtgtgaccaacctgcaggaggtggccagaattgtgggcaacagcggcctgaacatctacaacctgtatgccccctgtgccggcggcgtgcccagccacttccgctatgagaaggacacagtggtggtgcaggacctgggcaacatcttcacccggctgcccctgaagaggatgtggcaccaggccctgctgcggagcggggacaaggtgaggatggaccccccctgcaccaacaccacagctgccagcacctacctgaacaacccctacgtgaggaaggccctgaacatccctgagcagctgccccagtgggacatgtgctag

SEQ ID NO: 65250 - DNA, 1446 bp, Artificial Sequence
  derived and/or modified sequence
atgaccagcagcccccgggccccccccggcgagcagggccggggcggagcagaaatgatacgggccgctcccccgcctctatttttgctactactgctgttgcttctcctggtctcatgggctagcaggggagaggccgctcctgatcaggacgagatacagcggctgccaggccttgcaaagcaacctagttttaggcagtacagcggctacctgaaggggtctggaagcaagcatctgcattattggtttgttgagagccaaaaggatccagaaaacagcccagtggtgctgtggcttaatggcggccctggttgcagtagtctggatggacttcttacggaacacgggccctttctgattgccaacgtgctgtacctggagtccccagctggcgtcgggtttagttacagcgacgacaagttctatgccacaaatgacacagaggtagcccagtcaaatttcgaagccctgcaggactttttccgactatttccagaatataaaaataataaacttttcctgactggtgagtcgtacgctgggatctatatccctactctggcagttctggtgatgcaggacccatccatgaaccttcagggcttggcggtgggaaacggactgtcctcctatgaacagaatgataattcacttgtatacttcgcttactaccacggtttactcggcaataggttgtggagctccttacagacacactgctgctcccaaaataaatgcaacttctatgacaataaggacctagagtgcgtgaccaaccttcaagaggtcgccagaatcgtgggaaattcaggcttgaatatatataacctttatgcgccatgcgcggggggcgtgcctagtcattttagatacgaaaaagacaccgtggtagtccaggatctgggaaatatctttacccgcttacctcttaagcggatgtggcatcaggccctgctccgatccggcgataaggtccggatggatcctccatgcacaaatacaacagctgcaagcacatatctcaacaatccatatgtccgtaaagcgctgaatattccagaacagctgcctcagtgggatatgtgtaactttcttgtcaacctccaatatcgtcgtttgtatagatccatgaactcacagtacctcaagctcctgtccagtcagaaatatcaaattctgctttacaacggcgatgtggatatggcctgtaacttcatgggagatgagtggtttgtggattcactgaaccagaaaatggaagtccagagaaggccatggctggtaaagtacggggattcgggggagcagattgccggattcgtcaaggagttctcacatattgcattcctcacaataaaaggcgccgggcacatggtaccaaccgacaaacctttggcagcgttcaccatgttttcaaggttccttaacaagcagccctactag

SEQ ID NO: 65251 - DNA, 1038 bp, Artificial Sequence
  derived and/or modified sequence
atgatccgggccgcccccccccccctgttcctgctgctgctgctgcttcttttgctggtgtcttgggcaagcaggggcgaggctgccccggatcaggatgagattcagcgcctcccgggtctagcaaagcagccctccttccggcagtattctgggtatcttaaggggagtgggtcgaaacatctccattattggttcgtggaaagtcagaaggatccagagaactcccccgtggtcttgtggttgaacggcgggcctggctgcagcagccttgacggcctgttgaccgagcatggcccctttctaatcgccaacgttctctacttagaatccccagcgggcgtagggttttcctactcagatgataaattctacgccactaacgataccgaggttgcgcagtccaattttgaagcactgcaagatttctttaggttatttcccgaatacaagaataacaagctttttctgaccggcgagtcatacgcaggaatttatatccccactctggctgtgcttgtgatgcaggatccctctatgaatctacaggggctggccgtgggtaatggactcagcagctacgaacagaacgacaacagcctcgtgtatttcgcatactaccacggtcttctgggcaatcgactgtggtcgtctttgcagacacattgctgcagtcagaataagtgtaatttttacgataataaggatctggaatgtgtcaccaacctccaggaagtagcccggatcgttgggaatagtggtcttaatatctacaatctgtacgcgccctgcgcaggcggagtgccctctcattttcgctacgaaaaagataccgtggttgttcaagatctgggaaacattttcactagactgccgctaaagcggatgtggcatcaggcactgctgagatctggggacaaggttcggatggacccaccatgcactaacaccactgcagccagcacttacctcaacaatccatatgtcagaaaagcgctaaacattcccgaacagctcccacaatgggacatgtgctag

SEQ ID NO: 65252 - DNA, 1446 bp, Artificial Sequence
  derived and/or modified sequence
atgacgtcgagcccacgggctcctcccggagagcaaggcagggggggagccgagatgatccgggcagctcctcctcccttgttcctcctgttgctgctgctgctgcttctagtgtcctgggcttcccggggagaagccgcacccgatcaggacgaaatccagcgtctgcccggtctcgccaaacaacctagttttcgacagtattccggttatctgaaaggatctggaagtaaacacctacattactggtttgttgaatcccaaaaggatcccgaaaactccccagtggttctgtggctcaatggcggacctgggtgctcctcattggatggactcctcactgaacatggcccatttttgatcgccaatgtgttgtacctggaatcacctgcaggcgttgggttctcttatagtgatgataaattctacgccacaaacgacactgaggtggctcaaagcaatttcgaggccttacaagacttttttcggttgttcccagaatacaagaacaacaaactcttcctgactggcgagagctatgcagggatctacatcccaactctggctgtgttggtgatgcaagaccctagcatgaatctccaaggcctggcggtcggcaatggtcttagttcttatgagcagaatgacaatagcctcgtctactttgcttactatcacggcctgctcgggaaccggctctggtcctctctccagacacactgctgttcacagaataaatgcaatttttatgataacaaggatctggagtgcgtgactaatctccaggaagtggccaggatagtggggaactccggactcaatatttacaatctgtatgccccttgtgcgggaggggtcccaagccattttcggtatgaaaaggatactgtggtagtacaagatcttggtaatatcttcactcgactcccactgaagcggatgtggcatcaggcactgttgagaagcggcgacaaggttaggatggatccaccttgtacgaataccacagccgcttctacatacttgaataacccttacgtgcgaaaagccctgaacattcccgagcagctcccccagtgggacatgtgtaactttttggtaaatctgcagtaccggaggctctacagaagcatgaattctcagtaccttaaacttttaagctcccagaaataccaaattctactttacaatggcgacgtggatatggcctgcaacttcatgggggatgagtggtttgttgacagcctcaatcagaagatggaggtccagcgcagaccgtggctggtcaagtacggggactctggggagcagatagccggttttgtcaaggagttttctcatattgctttcctcaccatcaagggggctggccacatggtccctacggacaaaccgttggccgctttcacaatgttttctcgtttcctaaacaagcagccctactag

SEQ ID NO: 65253 - DNA, 1038 bp, Artificial Sequence
  derived and/or modified sequence
atgataagggccgctcccccacccctgttcctattgctgctgttgcttcttttacttgtctcgtgggcttctcgtggcgaggctgcccctgaccaagatgagatccagcgtttgccgggacttgccaaacagcctagcttccgccagtacagcggttacttaaagggctcagggagcaagcatttgcactactggttcgttgagtcccagaaggatccagagaattcccctgtggtgttatggctgaacgggggacctggctgctcctctctggacggactgcttaccgagcacggcccattcttgatcgctaacgtgttatacttagagtcgcccgctggcgtggggtttagctatagtgatgataagttttatgcgactaacgatactgaggtggcacagagcaattttgaagcactgcaggacttcttccgcctcttcccagagtacaagaacaacaaactctttctcacaggtgagagctatgccggaatatacattcctactctagcagtgctagtcatgcaggacccgtcaatgaacctacaggggctggccgttggtaatggcctcagttcttatgagcaaaacgataacagccttgtctattttgcctactaccacggcttgcttggaaaccgcctgtggagctctttacagacccattgctgctcacagaacaagtgcaacttctacgacaacaaggatctcgaatgtgtgactaatttgcaagaagtagcccgaattgtcggcaacagtgggcttaatatatataacttgtatgccccttgtgctggcggtgttccatcgcactttcgctacgaaaaggacactgtagtggtgcaggaccttgggaacattttcacccggctaccactgaaaaggatgtggcatcaggctctgctgagatcgggagataaagtgcgcatggaccctccctgtacaaatactacggccgcttctacatatctgaataatccatatgttcggaaagccctcaacattcccgaacagcttccacagtgggatatgtgctag

SEQ ID NO: 65254 - DNA, 2187 bp, Artificial Sequence
  derived and/or modified sequence
agagtgcacccgaatccacgggctcggaggcagcagccatctctcggccatagggcaggccagctggcgccgggggctattttgggcggcgggcaatgatggtgaccgcaaggcgaccttgtaaggcatttcccccctgactcccttccccgagcctctgcccgggggtcctagcgccgctttctcagccatcccgcctacaacttagccgtccacaacaggatcatctgatcgcgtgcgcccgggctacgatctgcgaggcccgcggaccttgacccggcattgaccgccaccgccccccaggtccgtagggaccaaagaaggggcgggaggaagactgtcacgtggcgccggagttcacgtgactcgtacacatgacttccagtccccgggcgcctcctggagagcaaggacgcgggggagcagagatgatccgagccgcgccgccgccgctgttcctgctgctgctgctgctgctgctgctagtgtcctgggcgtcccgaggcgaggcagcccccgaccaggacgagatccagcgcctccccgggctggccaagcagccgtctttccgccagtactccggctacctcaaaggctccggctccaagcacctccactactggtttgtggagtcccagaaggatcccgagaacagccctgtggtgctttggctcaatgggggtcccggctgcagctcactagatgggctcctcacagagcatggccccttcctgattgccaatgtgttatacctggagtccccagctggggtgggcttctcctactccgatgacaagttttatgcaactaatgacactgaggtcgcccagagcaattttgaggcccttcaagatttcttccgcctctttccggagtacaagaacaacaaacttttcctgaccggggagagctatgctggcatctacatccccaccctggccgtgctggtcatgcaggatcccagcatgaaccttcaggggctggctgtgggcaatggactctcctcctatgagcagaatgacaactccctggtctactttgcctactaccatggccttctggggaacaggctttggtcttctctccagacccactgctgctctcaaaacaagtgtaacttctatgacaacaaagacctggaatgcgtgaccaatcttcaggaagtggcccgcatcgtgggcaactctggcctcaacatctacaatctctatgccccgtgtgctggaggggtgcccagccattttaggtatgagaaggacactgttgtggtccaggatttgggcaacatcttcactcgcctgccactcaagcggatgtggcatcaggcactgctgcgctcaggggataaagtgcgcatggaccccccctgcaccaacacaacagctgcttccacctacctcaacaacccgtacgtgcggaaggccctcaacatcccggagcagctgccacaatgggacatgtgcaactttctggtaaacttacagtaccgccgtctctaccgaagcatgaactcccagtatctgaagctgcttagctcacagaaataccagatcctattatataatggagatgtagacatggcctgcaatttcatgggggatgagtggtttgtggattccctcaaccagaagatggaggtgcagcgccggccctggttagtgaagtacggggacagcggggagcagattgccggcttcgtgaaggagttctcccacatcgcctttctcacgatcaagggcgccggccacatggttcccaccgacaagcccctcgctgccttcaccatgttctcccgcttcctgaacaagcagccatactgatgaccacagcaaccagctccacggcctgatgcagcccctcccagcctctcccgctaggagagtcctcttctaagcaaagtgcccctgcaggccgggttctgccgccaggactgcccccttcccagagccctgtacatcccagactgggcccagggtctcccatagacagcctgggggcaagttagcactttattcccgcagcagttcctgaatggggtggcctggccccttctctgcttaaagaatgccctttatgatgcactgattccatcccaggaacccaacagagctcaggacagcccacagggaggtggtggacggactgtaattgatagattgattatggaattaaattgggtacagcttc

SEQ ID NO: 65255 - DNA, 1075 bp, Artificial Sequence
  derived and/or modified sequence
gggcgcctcctggagagcaaggacgcgggggagcagagatgatccgagccgcgccgccgccgctgttcctgctgctgctgctgctgctgctgctagtgtcctgggcgtcccgaggcgaggcagcccccgaccaggacgagatccagcgcctccccgggctggccaagcagccgtctttccgccagtactccggctacctcaaaggctccggctccaagcacctccactactggtttgtggagtcccagaaggatcccgagaacagccctgtggtgctttggctcaatgggggtcccggctgcagctcactagatgggctcctcacagagcatggccccttcctgattgccaatgtgttatacctggagtccccagctggggtgggcttctcctactccgatgacaagttttatgcaactaatgacactgaggtcgcccagagcaattttgaggcccttcaagatttcttccgcctctttccggagtacaagaacaacaaacttttcctgaccggggagagctatgctggcatctacatccccaccctggccgtgctggtcatgcaggatcccagcatgaaccttcaggggctggctgtgggcaatggactctcctcctatgagcagaatgacaactccctggtctactttgcctactaccatggccttctggggaacaggctttggtcttctctccagacccactgctgctctcaaaacaagtgtaacttctatgacaacaaagacctggaatgcgtgaccaatcttcaggaagtggcccgcatcgtgggcaactctggcctcaacatctacaatctctatgccccgtgtgctggaggggtgcccagccattttaggtatgagaaggacactgttgtggtccaggatttgggcaacatcttcactcgcctgccactcaagcggatgtggcatcaggcactgctgcgctcaggggataaagtgcgcatggaccccccctgcaccaacacaacagctgcttccacctacctcaacaacccgtacgtgcggaaggccctcaacatcccggagcagctgccacaatgggacatgtgcaa

SEQ ID NO: 65256 - DNA, 1446 bp, Artificial Sequence
  derived and/or modified sequence
atgaccagcagccccagagccccccccggcgagcagggcagaggcggcgccgagatgatcagagccgcccccccccccctgttcctgctgctgctgctgctgctgctgctggtgagctgggccagcagaggcgaggccgcccccgaccaggacgagatccagagactgcccggcctggccaagcagcccagcttcagacagtacagcggctacctgaagggcagcggcagcaagcacctgcactactggttcgtggagagccagaaggaccccgagaacagccccgtggtgctgtggctgaacggcggccccggctgcagcagcctggacggcctgctgaccgagcacggccccttcctgatcgccaacgtgctgtacctggagagccccgccggcgtgggcttcagctacagcgacgacaagttctacgccaccaacgacaccgaggtggcccagagcaacttcgaggccctgcaggacttcttcagactgttccccgagtacaagaacaacaagctgttcctgaccggcgagagctacgccggcatctacatccccaccctggccgtgctggtgatgcaggaccccagcatgaacctgcagggcctggccgtgggcaacggcctgagcagctacgagcagaacgacaacagcctggtgtacttcgcctactaccacggcctgctgggcaacagactgtggagcagcctgcagacccactgctgcagccagaacaagtgcaacttctacgacaacaaggacctggagtgcgtgaccaacctgcaggaggtggccagaatcgtgggcaacagcggcctgaacatctacaacctgtacgccccctgcgccggcggcgtgcccagccacttcagatacgagaaggacaccgtggtggtgcaggacctgggcaacatcttcaccagactgcccctgaagagaatgtggcaccaggccctgctgagaagcggcgacaaggtgagaatggaccccccctgcaccaacaccaccgccgccagcacctacctgaacaacccctacgtgagaaaggccctgaacatccccgagcagctgccccagtgggacatgtgcaacttcctggtgaacctgcagtacagaagactgtacagaagcatgaacagccagtacctgaagctgctgagcagccagaagtaccagatcctgctgtacaacggcgacgtggacatggcctgcaacttcatgggcgacgagtggttcgtggacagcctgaaccagaagatggaggtgcagagaagaccctggctggtgaagtacggcgacagcggcgagcagatcgccggcttcgtgaaggagttcagccacatcgccttcctgaccatcaagggcgccggccacatggtgcccaccgacaagcccctggccgccttcaccatgttcagcagattcctgaacaagcagccctactag

SEQ ID NO: 65257 - DNA, 1038 bp, Artificial Sequence
  derived and/or modified sequence
atgatcagagccgcccccccccccctgttcctgctgctgctgctgctgctgctgctggtgagctgggccagcagaggcgaggccgcccccgaccaggacgagatccagagactgcccggcctggccaagcagcccagcttcagacagtacagcggctacctgaagggcagcggcagcaagcacctgcactactggttcgtggagagccagaaggaccccgagaacagccccgtggtgctgtggctgaacggcggccccggctgcagcagcctggacggcctgctgaccgagcacggccccttcctgatcgccaacgtgctgtacctggagagccccgccggcgtgggcttcagctacagcgacgacaagttctacgccaccaacgacaccgaggtggcccagagcaacttcgaggccctgcaggacttcttcagactgttccccgagtacaagaacaacaagctgttcctgaccggcgagagctacgccggcatctacatccccaccctggccgtgctggtgatgcaggaccccagcatgaacctgcagggcctggccgtgggcaacggcctgagcagctacgagcagaacgacaacagcctggtgtacttcgcctactaccacggcctgctgggcaacagactgtggagcagcctgcagacccactgctgcagccagaacaagtgcaacttctacgacaacaaggacctggagtgcgtgaccaacctgcaggaggtggccagaatcgtgggcaacagcggcctgaacatctacaacctgtacgccccctgcgccggcggcgtgcccagccacttcagatacgagaaggacaccgtggtggtgcaggacctgggcaacatcttcaccagactgcccctgaagagaatgtggcaccaggccctgctgagaagcggcgacaaggtgagaatggaccccccctgcaccaacaccaccgccgccagcacctacctgaacaacccctacgtgagaaaggccctgaacatccccgagcagctgccccagtgggacatgtgctag

SEQ ID NO: 65258 - protein, 394 aa, Artificial Sequence
  derived and/or modified sequence
MALQGISVVELSGLAPGPFCAMVLADFGARVVRVDRPGSRYDVSRLGRGKRSLVLDLKQPRGAAVLRRLCKRSDVLLEPFRRGVMEKLQLGPEILQRENPRLIYARLSGFGQSGSFCRLAGHDINYLALSGVLSKIGRSGENPYAPLNLLADFAGGGLMCALGIIMALFDRTRTGKGQVIDANMVEGTAYLSSFLWKTQKLSLWEAPRGQNMLDGGAPFYTTYRTADGEFMAVGAIEPQFYELLIKGLGLKSDELPNQMSMDDWPEMKKKFADVFAEKTKAEWCQIFDGTDACVTPVLTFEEVVHHDHNKERGSFITSEEQDVSPRPAPLLLNTPAIPSFKRDPFIGEHTEEILEEFGFSREEIYQLNSDKIIESNKAGSKFWILYPTHSNIQK

SEQ ID NO: 65259 - DNA, 1185 bp, Artificial Sequence
  derived and/or modified sequence
atggccctgcaaggtatctccgtggtggaactttctggactcgctcctgggccattttgcgccatggttctggctgacttcggggccagagttgtacgtgtggaccgtcccggttctcggtatgatgtgagccgcctaggcaggggtaagcgcagcttagttttggacctcaaacagccacgaggggctgccgtcctacgaaggttgtgcaagcgcagtgatgttttattggagccattcaggcgaggcgtgatggaaaagctccagctagggcccgaaattctgcaaagagaaaatccgaggttaatttacgctcgcttgtccggctttgggcaaagcgggtcgttttgtagactcgccgggcacgacattaattatctggcactctctggcgtcctgtccaaaatcggtagatcaggcgagaatccctacgccccactgaacttgctggcagactttgcgggaggcggccttatgtgcgctctcggcatcataatggcgctgttcgaccgaactaggacgggaaaagggcaggtcattgatgccaatatggtcgaaggcacggcatatctcagctcttttctctggaaaacacagaaactgagcctgtgggaagcccctagagggcagaatatgctggacgggggagcgcctttctacactacttaccgcaccgcggatggagagttcatggctgtgggcgccatcgagccccagttttatgagctactaattaagggcttgggactaaaatccgacgaactgcccaatcagatgtcaatggacgattggcccgaaatgaagaaaaagttcgctgacgtgttcgccgaaaagacaaaagccgaatggtgtcaaatctttgatgggaccgatgcctgcgtgacgcctgtactgacttttgaggaggtggtccatcatgatcacaacaaggagcgcgggtcttttatcacttccgaggagcaggatgtctccccacgccctgcccccttgctgctaaatacccctgccattccgtcttttaagcgggatccctttatcggcgagcataccgaagagattcttgaagagtttggtttcagcagagaggagatttaccaacttaattccgacaagatcatcgaatctaacaaagccggctctaaattttggatactgtatccaactcactccaacattcaaaaatag

SEQ ID NO: 65260 - DNA, 1185 bp, Artificial Sequence
  derived and/or modified sequence
atggccctgcagggcatctctgtggtggagctgagcggcctggcccctggccccttctgtgccatggtgctggccgactttggagcccgggtggtgcgggtggacaggcctggcagccgctatgatgtgtcccggctgggccggggcaagaggagcctggtgctggacctgaagcagcccagaggagctgctgtgctgcggcggctgtgcaagagaagtgatgtgctgctggagcccttcagaagaggagtgatggagaagctgcagctgggccctgagatcctgcagcgggagaaccccaggctcatctatgcccggctgagcggcttcggccagagcggcagcttctgccgcctggccggccatgacatcaactacctggccctgagcggcgtgctgagcaagattggccgctctggagagaacccctatgcccccctgaacctgctggccgactttgctgggggcggcctgatgtgtgccctgggcatcatcatggccctgtttgacaggaccaggacaggcaagggccaggtgattgatgccaacatggtggagggcacagcctacctgagcagcttcctgtggaagacccagaagctgagcctgtgggaggccccccggggccagaacatgctggatggaggagcccccttctacaccacctacagaacagcagatggagagttcatggctgtgggcgccatcgagccccagttctatgagctgctgatcaagggcctgggcctgaagagtgatgagctgcccaaccagatgtccatggatgactggccagagatgaagaagaagtttgctgatgtgtttgctgagaagaccaaggccgagtggtgccagatctttgatggaacagatgcctgtgtgacccctgtgctgacctttgaggaggtggtgcaccacgaccacaacaaggagcggggcagcttcatcaccagcgaggagcaggatgtgagccccaggcctgcccccctgctgctgaacaccccagccatccccagcttcaagagggaccccttcatcggggagcacacagaggagatcctggaggagtttggcttcagccgggaggagatctaccagctgaacagcgacaagatcatcgagagcaacaaggccggcagcaagttctggatcctgtaccccacccacagcaacatccagaagtag

SEQ ID NO: 65261 - DNA, 1195 bp, Artificial Sequence
  derived and/or modified sequence
ggaagcgccatggcactgcagggcatctcggtcgtggagctgtccggcctggccccgggcccgttctgtgctatggtcctggctgacttcggggcgcgtgtggtacgcgtggaccggcccggctcccgctacgacgtgagccgcttgggccggggcaagcgctcgctagtgctggacctgaagcagccgcggggagccgccgtgctgcggcgtctgtgcaagcggtcggatgtgctgctggagcccttccgccgcggtgtcatggagaaactccagctgggcccagagattctgcagcgggaaaatccaaggcttatttatgccaggctgagtggatttggccagtcaggaagcttctgccggttagctggccacgatatcaactatttggctttgtcaggtgttctctcaaaaattggcagaagtggtgagaatccgtatgccccgctgaatctcctggctgactttgctggtggtggccttatgtgtgcactgggcattataatggctctttttgaccgcacacgcactggcaagggtcaggtcattgatgcaaatatggtggaaggaacagcatatttaagttcttttctgtggaaaactcagaaattgagtctgtgggaagcacctcgaggacagaacatgttggatggtggagcacctttctatacgacttacaggacagcagatggggaattcatggctgttggagcaatagaaccccagttctacgagctgctgatcaaaggacttggactaaagtctgatgaacttcccaatcagatgagcatggatgattggccagaaatgaagaagaagtttgcagatgtatttgcagagaagacgaaggcagagtggtgtcaaatctttgacggcacagatgcctgtgtgactccggttctgacttttgaggaggttgttcatcatgatcacaacaaggaacggggctcgtttatcaccagtgaggagcaggacgtgagcccccgccctgcacctctgctgttaaacaccccagccatcccttctttcaaaagggatcctttcataggagaacacactgaggagatacttgaagaatttggattcagccgcgaagagatttatcagcttaactcagataaaatcattgaaagtaataaggctggtagcaagttctggatcttatacccaacacacagcaacatccagaaataaa

SEQ ID NO: 65262 - DNA, 1185 bp, Artificial Sequence
  derived and/or modified sequence
atggccctgcagggcatcagcgtggtggagctgagcggcctggcccccggacctttttgtgctatggtcttggccgacttcggggccagggttgtgagggtagatcggcccgggagcagatacgatgtgtcccggttaggcagagggaaaagatcactagttctggacttaaaacagccacggggcgccgcagttctcaggcggctgtgcaaaagatctgacgttctgctggaaccctttcgcagaggggtgatggagaagcttcagctgggcccagagatcctacagcgcgagaacccaagactgatctacgccagactgtcgggctttggccagagtgggagcttctgcaggcttgcaggacacgatattaactatctcgccctttcgggggtactgtccaagattggtagatccggcgagaacccgtatgccccactgaatctgttagcagacttcgctggcggcgggcttatgtgcgcactcggaattatcatggcattattcgatagaacgcgcaccggaaaagggcaggtgatagatgctaacatggtggaagggactgcctatctttcctcattcctctggaagacccagaagctgtctctctgggaggccccaagaggccagaacatgctggacgggggcgcccctttttacaccacttatcgaactgctgatggcgagttcatggcggtcggggccattgagcctcagttctacgagctccttattaaaggactagggttaaaaagcgacgagctgccaaatcagatgtcaatggacgactggcccgaaatgaagaagaagtttgccgacgtgttcgcagagaaaacgaaggctgaatggtgtcaaatctttgacggcactgacgcctgtgtcactcccgttttgaccttcgaagaggtcgtgcaccacgaccataacaaggaaagagggtcattcatcacctccgaggaacaggacgtgagtcctaggccagctcctcttctgttaaatacacccgccataccctcattcaaacgcgacccttttataggtgagcacaccgaggaaatcttagaggagtttggcttcagccgcgaagaaatttaccagctgaattccgataagatcatcgagagcaacaaagcaggctccaaattttggatcttatatcccacgcacagtaacatacagaaatag

SEQ ID NO: 65263 - DNA, 1185 bp, Artificial Sequence
  derived and/or modified sequence
atggcacttcagggtatctctgttgttgaactgagcggactcgcacctggacctttttgcgccatggtcttggccgatttcggcgctcgtgtagtgcgggtggatagaccaggcagtcgttacgacgtgtctagattaggaagaggcaaaaggtcattggtgttggatctcaaacagccaaggggggctgcggtcctgagacggttgtgcaaacggtctgatgtactgctggagcctttcagaagaggagtgatggaaaaacttcagttaggaccagagatcctgcagcgcgagaacccaagactgatctacgctaggttgtcaggcttcggtcagtccggctctttctgtagactcgctggtcacgatatcaattatctcgcactaagcggcgtgctctctaaaatcggccgatctggcgagaatccctacgctcccctcaatctactcgcggactttgctggagggggtctgatgtgtgctctgggcataatcatggcactctttgaccgcacccggactgggaagggccaagtaatcgacgccaacatggtagagggcaccgcatacctgtcctcgtttttatggaagacccaaaaactctccttgtgggaagcccctcgcggacaaaacatgttagacggaggcgctcctttttacaccacctatcgtaccgcagatggcgaatttatggcggttggtgccatcgagccccagttctacgaactcctcatcaaaggcttaggcctgaagtccgacgagctgcctaaccaaatgtccatggatgactggccagaaatgaagaagaaatttgccgacgtttttgcagaaaagaccaaagccgagtggtgccagatctttgacggaaccgacgcctgcgtgacacctgtgctgacatttgaggaagtggtacaccacgaccacaacaaggagcgaggatctttcatcaccagcgaggaacaggacgtgagccctaggcccgcacctttgttgctcaacacgcccgctatcccatccttcaagcgcgacccttttatcggggagcatacagaggaaattctcgaggagttcggattttcccgagaggaaatatatcagttaaacagtgataaaatcatcgagtccaataaggctggctcaaaattctggatcctgtatccgacgcactccaacatacaaaaatag

SEQ ID NO: 65264 - DNA, 1185 bp, Artificial Sequence
  derived and/or modified sequence
atggccctgcagggcatcagcgtggtggagctgagcggcctggcccccggccccttctgcgccatggtgctggccgacttcggcgccagagtggtgagagtggacagacccggcagcagatacgacgtgagcagactgggcagaggcaagagaagcctggtgctggacctgaagcagcccagaggcgccgccgtgctgagaagactgtgcaagagaagcgacgtgctgctggagcccttcagaagaggcgtgatggagaagctgcagctgggccccgagatcctgcagagagagaaccccagactgatctacgccagactgagcggcttcggccagagcggcagcttctgcagactggccggccacgacatcaactacctggccctgagcggcgtgctgagcaagatcggcagaagcggcgagaacccctacgcccccctgaacctgctggccgacttcgccggcggcggcctgatgtgcgccctgggcatcatcatggccctgttcgacagaaccagaaccggcaagggccaggtgatcgacgccaacatggtggagggcaccgcctacctgagcagcttcctgtggaagacccagaagctgagcctgtgggaggcccccagaggccagaacatgctggacggcggcgcccccttctacaccacctacagaaccgccgacggcgagttcatggccgtgggcgccatcgagccccagttctacgagctgctgatcaagggcctgggcctgaagagcgacgagctgcccaaccagatgagcatggacgactggcccgagatgaagaagaagttcgccgacgtgttcgccgagaagaccaaggccgagtggtgccagatcttcgacggcaccgacgcctgcgtgacccccgtgctgaccttcgaggaggtggtgcaccacgaccacaacaaggagagaggcagcttcatcaccagcgaggagcaggacgtgagccccagacccgcccccctgctgctgaacacccccgccatccccagcttcaagagagaccccttcatcggcgagcacaccgaggagatcctggaggagttcggcttcagcagagaggagatctaccagctgaacagcgacaagatcatcgagagcaacaaggccggcagcaagttctggatcctgtaccccacccacagcaacatccagaagtag

SEQ ID NO: 65265 - protein, 642 aa, Artificial Sequence
  derived and/or modified sequence
MAASRKPPRVRVNHQDFQLRNLRIIEPNEVTHSGDTGVETDGRMPPKVTSELLRQLRQAMRNSEYVTEPIQAYIIPSGDAHQSEYIAPCDCRRAFVSGFDGSAGTAIITEEHAAMWTDGRYFLQAAKQMDSNWTLMKMGLKDTPTQEDWLVSVLPEGSRVGVDPLIIPTDYWKKMAKVLRSAGHHLIPVKENLVDKIWTDRPERPCKPLLTLGLDYTGISWKDKVADLRLKMAERNVMWFVVTALDEIAWLFNLRGSDVEHNPVFFSYAIIGLETIMLFIDGDRIDAPSVKEHLLLDLGLEAEYRIQVHPYKSILSELKALCADLSPREKVWVSDKASYAVSETIPKDHRCCMPYTPICIAKAVKNSAESEGMRRAHIKDAVALCELFNWLEKEVPKGGVTEISAADKAEEFRRQQADFVDLSFPTISSTGPNGAIIHYADGTTDVTRTMHFGTPTAYEKECFTYVLKGHIAVSAAVFPTGTKGHLLDSFARSALWDSGLDYLHGTGHGVGSFLNVHEGPCGISYKTFSDEPLEAGMIVTDEPGYYEDGAFGIRIENVVLVVPVKTKYNFNNRGSLTFEPLTLVPIQTKMIDVDSLTDKECDWLNNYHLTCRDVIGKELQKQGRQEALEWLIRETQPISKQH

SEQ ID NO: 65266 - DNA, 1929 bp, Artificial Sequence
  derived and/or modified sequence
atggccgccagcagaaagccccccagagtgagagtgaaccaccaggacttccagctgagaaacctgagaatcatcgagcccaacgaggtgacccacagcggcgacaccggcgtggagaccgacggcagaatgccccccaaggtgaccagcgagctgctgagacagctgagacaggccatgagaaacagcgagtacgtgaccgagcccatccaggcctacatcatccccagcggcgacgcccaccagagcgagtacatcgccccctgcgactgcagaagagccttcgtgagcggcttcgacggcagcgccggcaccgccatcatcaccgaggagcacgccgccatgtggaccgacggcagatacttcctgcaggccgccaagcagatggacagcaactggaccctgatgaagatgggcctgaaggacacccccacccaggaggactggctggtgagcgtgctgcccgagggcagcagagtgggcgtggaccccctgatcatccccaccgactactggaagaagatggccaaggtgctgagaagcgccggccaccacctgatccccgtgaaggagaacctggtggacaagatctggaccgacagacccgagagaccctgcaagcccctgctgaccctgggcctggactacaccggcatcagctggaaggacaaggtggccgacctgagactgaagatggccgagagaaacgtgatgtggttcgtggtgaccgccctggacgagatcgcctggctgttcaacctgagaggcagcgacgtggagcacaaccccgtgttcttcagctacgccatcatcggcctggagaccatcatgctgttcatcgacggcgacagaatcgacgcccccagcgtgaaggagcacctgctgctggacctgggcctggaggccgagtacagaatccaggtgcacccctacaagagcatcctgagcgagctgaaggccctgtgcgccgacctgagccccagagagaaggtgtgggtgagcgacaaggccagctacgccgtgagcgagaccatccccaaggaccacagatgctgcatgccctacacccccatctgcatcgccaaggccgtgaagaacagcgccgagagcgagggcatgagaagagcccacatcaaggacgccgtggccctgtgcgagctgttcaactggctggagaaggaggtgcccaagggcggcgtgaccgagatcagcgccgccgacaaggccgaggagttcagaagacagcaggccgacttcgtggacctgagcttccccaccatcagcagcaccggccccaacggcgccatcatccactacgccgacggcaccaccgacgtgaccagaaccatgcacttcggcacccccaccgcctacgagaaggagtgcttcacctacgtgctgaagggccacatcgccgtgagcgccgccgtgttccccaccggcaccaagggccacctgctggacagcttcgccagaagcgccctgtgggacagcggcctggactacctgcacggcaccggccacggcgtgggcagcttcctgaacgtgcacgagggcccctgcggcatcagctacaagaccttcagcgacgagcccctggaggccggcatgatcgtgaccgacgagcccggctactacgaggacggcgccttcggcatcagaatcgagaacgtggtgctggtggtgcccgtgaagaccaagtacaacttcaacaacagaggcagcctgaccttcgagcccctgaccctggtgcccatccagaccaagatgatcgacgtggacagcctgaccgacaaggagtgcgactggctgaacaactaccacctgacctgcagagacgtgatcggcaaggagctgcagaagcagggcagacaggaggccctggagtggctgatcagagagacccagcccatcagcaagcagcactag

SEQ ID NO: 65267 - DNA, 1929 bp, Artificial Sequence
  derived and/or modified sequence
atggctgcaagccgaaagcctcctagggtgcgcgtgaatcatcaggacttccagctccgcaacctgagaataatagaacccaatgaggttacacactctggcgatacgggcgtggagaccgacggccgaatgccaccgaaggtgacatccgaactcctgcgtcagctgagacaagcgatgcgaaattcagagtatgtcaccgaaccaatccaggcctacatcatacctagtggagacgcccatcagtctgaatacatcgctccctgtgactgcagaagagcattcgtctctggcttcgacggtagtgcgggcacagcgattataacagaggagcacgctgctatgtggaccgacggacgctattttctgcaagccgccaagcagatggattctaattggaccctcatgaagatggggctgaaagatacccctacgcaggaggactggctggtgtcagtgttaccggaggggtctcgcgtcggcgtagatcctctgattattccaaccgactactggaagaaaatggccaaggtactgcggtccgcaggacaccatctgattcctgtgaaggagaatctggttgataaaatttggaccgaccgtccggagcgaccctgcaagccactcctgaccctcgggctggactacacaggtatcagctggaaggacaaagtcgcagacttaaggttgaaaatggcagaacgcaatgtgatgtggtttgtggtgaccgcactcgatgaaatagcatggctgttcaatctgcgtggcagcgatgtggagcacaatccggtgtttttcagctatgccatcataggtctggaaaccatcatgcttttcatcgacggcgaccgcattgatgccccatcagtgaaagaacatctgttgctcgacctcggactcgaggccgaataccggatccaggtgcacccttataaatcgattctgtcagagctaaaagctttgtgtgctgacctaagccctagggagaaggtctgggtgtccgataaggcttcctatgcagtgagtgagacaatccccaaggaccatcgttgttgtatgccctacacgcctatttgcatcgccaaagccgtgaaaaatagcgcagaaagcgaaggtatgcgtcgtgctcacatcaaagatgccgtcgccctttgtgagctgttcaactggctggaaaaagaagtcccaaagggtggggtgaccgagatttccgcggccgataaagcagaagagtttcgacgccaacaggctgacttcgtggacctctcgtttcctacaatctcttcaaccggccccaacggggctatcatccactacgctgacgggaccactgacgtaaccaggactatgcatttcggaacacccacagcttacgagaaagagtgttttacctatgtcctgaaaggacacatcgctgtgagcgcggccgtcttcccaacaggcacaaagggccacttactcgatagtttcgcccgctctgccttatgggacagcgggcttgactatctgcacggaacagggcatggagtaggtagcttcttaaacgtccatgaggggccttgtggaatctcctacaagaccttcagcgatgaacctctggaggctgggatgattgtgaccgatgagcccggatactacgaggacggggctttcgggatcagaattgaaaatgtcgtgctcgtcgttcctgtcaaaactaagtataattttaataatcgtgggagcctcactttcgagcctcttacgctggtccccatccagaccaagatgatcgacgtggacagtctgacagacaaggaatgtgactggctcaataattatcacttgacatgcagggacgtcattggtaaagaattgcaaaaacagggccgccaggaagcgctggaatggctgattcgcgagacccagccaatcagcaagcagcactag

SEQ ID NO: 65268 - DNA, 1929 bp, Artificial Sequence
  derived and/or modified sequence
atggccgccagcaggaagccaccccgggtgcgggtgaaccaccaggacttccagctgaggaacctgcgcatcatcgagcccaatgaggtgacccacagcggggacaccggggtggagacagatggccgcatgccacccaaggtgaccagcgagctgctgcggcagctgcggcaggccatgagaaattctgaatatgtgacagagcccatccaggcctacatcatccccagcggagatgcccaccagagcgagtacatcgccccctgtgactgccggcgggcctttgtgtctggctttgatggcagcgctggaacagccatcatcacagaggagcacgccgccatgtggacagatggccgctacttcctgcaggccgccaagcagatggacagcaactggaccctgatgaagatgggcctgaaggacacccccacccaggaggactggctggtgtctgtgctgcctgagggcagccgggtgggcgtggaccccctcatcatccccacagactactggaagaagatggccaaggtgctgcggtctgctggccaccacctgatccctgtgaaggagaacctggtggacaagatctggacagacaggcctgagcggccctgcaagcccctgctgaccctgggcctggactacacaggcatctcctggaaggacaaggtggccgacctgcggctgaagatggccgagagaaatgtgatgtggtttgtggtgacagccctggatgagatcgcctggctgttcaacctgcggggcagtgatgtggagcacaaccctgtgttcttctcctatgccatcatcggcctggagaccatcatgctgttcattgatggagacagaattgatgcccccagcgtgaaggagcacctgctgctggacctgggcctggaggccgagtaccgcatccaggtgcacccctacaagagcatcctgtctgagctgaaggccctgtgtgccgacctgagcccccgggagaaggtgtgggtgtctgacaaggccagctatgctgtgtctgagaccatccccaaggaccaccgctgctgcatgccctacacccccatctgcatcgccaaggctgtgaagaacagcgctgagagcgagggcatgaggcgggcccacatcaaggatgctgtggccctgtgtgagctgttcaactggctggagaaggaggtgcccaagggcggcgtgacagagatctctgctgctgacaaggccgaggagttccggcggcagcaggccgactttgtggacctgtccttccccaccatcagcagcacaggccccaatggagccatcatccactatgcagatggcaccacagatgtgaccaggaccatgcacttcggcacccccacagcctatgagaaggagtgcttcacctacgtgctgaagggccacatcgctgtgtctgctgctgtgttccccaccggcaccaagggccacctgctggacagctttgcccggagcgccctgtgggacagcggcctggactacctgcacggcaccggccacggcgtgggcagcttcctgaatgtgcatgagggcccctgtggcatctcctacaagaccttcagtgatgagcccctggaggccggcatgattgtgacagatgagcccggctactatgaagatggagccttcggcatcagaattgaaaatgtggtgctggtggtgcctgtgaagaccaagtacaacttcaacaacagaggcagcctgacctttgagcccctgaccctggtgcccatccagaccaagatgattgatgtggacagcctgacagacaaggaatgtgactggctgaacaactaccacctgacctgcagagatgtgattggcaaggagctgcagaagcagggccggcaggaggccctggagtggctgatccgggagacccagcccatcagcaagcagcactag

SEQ ID NO: 65269 - DNA, 1929 bp, Artificial Sequence
  derived and/or modified sequence
atggccgccagccggaagcccccccgggtgcgggtgaaccaccaggacttccagctcagaaacctcaggattatagaaccaaacgaagtgactcatagcggcgatactggtgtggagactgacggacggatgccccccaaggttacttccgaattgctgaggcagttacggcaggccatgcggaattccgagtatgttaccgagcccattcaggcctatattattccatctggcgatgcgcaccagagcgaatacatagcaccatgcgactgtagacgagctttcgtgtccggttttgatggttcggctgggaccgctatcatcactgaagagcacgccgctatgtggactgatgggaggtacttcctgcaggccgctaagcagatggactccaattggacactgatgaaaatggggcttaaagatacccctacccaggaggattggctggtgagcgtattacctgaaggatctcgcgttggggttgatcctttaattattcccacagattattggaagaaaatggccaaggtgctgcgcagcgcgggtcaccatctcatccccgtcaaagagaatttggtcgacaaaatttggaccgatcggcccgagcgcccctgtaaaccgctgcttacactgggactggattatacaggtatcagctggaaagataaggtcgccgacctacgcctgaagatggcagagagaaacgtaatgtggtttgtagtgactgccctggatgaaatagcttggctgttcaatctgaggggttctgacgtggagcacaacccagtgttcttcagctatgcgatcattgggctcgagaccataatgctcttcatagacggagatcggatcgacgccccttctgttaaagagcaccttcttctggatctgggtttggaagccgaatacaggatacaagtgcacccctataagagtattctctccgaactgaaggccctgtgcgcggatctgtctcctcgggagaaggtctgggtctcagacaaggccagctatgccgtctccgagaccattcctaaggaccaccgttgttgtatgccctatacacccatctgcatcgcaaaggctgttaagaattccgccgagtccgagggaatgaggcgcgcgcatattaaggacgcagtcgcactctgcgaactgttcaactggctcgagaaggaagtcccaaagggtggtgtaaccgaaattagcgcggctgacaaggccgaggaattcagacggcaacaagccgattttgtggaccttagttttcctaccatcagttccacaggccctaatggcgccatcattcactacgccgacgggaccaccgatgttacacgcacaatgcacttcgggacacctaccgcttacgaaaaggagtgtttcacgtatgtgctcaagggacacatcgccgtctcggctgctgtttttccaactgggaccaaaggacatttacttgacagcttcgctaggtccgccctttgggatagcgggttggactatctccacggaaccgggcatggggtgggaagctttttgaacgttcacgagggcccctgtggtatcagctacaagaccttcagcgacgagcccctcgaagccgggatgattgtaaccgacgaaccagggtactacgaagatggagctttcggtatcaggatagagaatgtggtgctggtggtgcctgtgaagacaaagtacaattttaataacagaggctccctgacattcgaaccactgacgttggtgcctattcagactaagatgatcgatgtcgactcgctgaccgataaagaatgcgactggttgaacaattaccacctcacatgcagggacgtcataggcaaggagcttcagaagcaggggcgacaagaagcactcgagtggcttatcagggagactcaacctatctcaaagcagcactag

SEQ ID NO: 65270 - DNA, 1929 bp, Artificial Sequence
  derived and/or modified sequence
atggccgcaagccgcaagccaccacgggtacgggtcaaccaccaggacttccagttacgcaacctgagaatcatcgagccgaacgaggtgactcactccggagacactggtgtagaaacagatggaagaatgcctccaaaagtaactagtgagcttctacgtcagctgagacaggctatgagaaacagcgaatatgttaccgagcccatacaggcctatatcattccatccggagacgctcaccagtcggagtatattgccccatgtgactgtcgacgtgccttcgtgagcggctttgacggttcagctggcacagccattattacagaggaacatgcggctatgtggacagatggacgctatttcctgcaggctgccaagcaaatggattccaactggaccctcatgaagatgggactcaaggataccccgacacaggaggattggctggtgtctgtactgccagaaggtagcagagtgggggtggatccccttatcattccaaccgattattggaaaaaaatggccaaagttcttcgttctgcaggtcaccacctcataccggtaaaggagaatctggtagacaaaatctggaccgacagacctgaaaggccctgtaaaccgttgcttactctgggcctcgattataccggaatttcttggaaagacaaggtggcagatttaagactcaagatggccgagcgaaatgtgatgtggtttgtggtcaccgccctggatgagatcgcttggctctttaatctccgcggatctgacgtggagcacaaccccgtgtttttcagctacgcaatcatagggctcgagacaattatgcttttcatcgatggcgacaggatcgatgctccttctgtgaaggaacacttgctgctggacctcgggctggaggcagagtaccggatacaagtacatccctacaagagtatcttgtctgaactcaaggcactgtgcgccgatttgagccctcgggagaaagtttgggttagcgataaagcctcctacgcagtgtccgagacgatccctaaagaccaccggtgctgcatgccctacaccccaatttgcatcgctaaagccgttaagaactccgccgagtcagaagggatgagacgggctcacattaaggatgccgtggccctttgcgaacttttcaactggcttgaaaaggaagtgcccaaagggggagtcacagagatctcagccgcagataaagccgaagagtttcggaggcaacaggctgatttcgtagatctatccttccctaccatttcttccacaggccctaacggagctatcattcattatgctgatgggacgacggatgtgacccgcacaatgcattttggaacacccaccgcttatgagaaggagtgctttacctatgtgctgaaggggcacatcgccgtctcagctgcagtgttccccacgggaaccaagggacatctgctagatagcttcgccagatcagctctctgggatagcggtcttgattatctccacgggactggacatggggttggttctttcctcaacgtgcatgagggcccttgcggaattagctacaagacgttctctgacgagccgctggaagctggaatgatcgtgaccgacgagcccggatactacgaggacggggcttttggcattagaattgaaaatgttgtcctggtagtgcctgtgaagactaaatacaacttcaataacagaggatccctgacctttgaacccctcacacttgtgcctatccagacaaaaatgatagacgtagactctcttacagataaggaatgcgattggcttaataactatcacctgacctgccgggatgttatcggcaaagaattacagaaacagggtaggcaggaagcgttagagtggctaatacgcgaaacccagcctatatccaaacagcattag

SEQ ID NO: 65271 - DNA, 2467 bp, Artificial Sequence
  derived and/or modified sequence
gacccggcgctagcccgcccgcccgcccgccggctctcgcgcctccttcgcgccggcccttccgcgggtgatcagctggtctgcgctcccctgacgtgggctggggcacgtcaccgccgaatggcagcctccagaaagccaccgcgagtaagggtgaatcaccaggattttcaactgagaaatttaagaataattgaacctaacgaggtgacacactcaggagacacaggtgtggaaacagacggcagaatgcctccaaaggtgacttcagagctgcttcggcagctgagacaagccatgaggaactctgagtatgtgaccgaaccgatccaggcctacatcatcccatcgggagatgctcatcagagtgagtatattgctccatgtgactgtcggcgggcttttgtctctggattcgatggctctgcgggcacagccatcatcacagaagagcatgcagccatgtggactgacgggcgctactttctccaggctgccaagcaaatggacagcaactggacacttatgaagatgggtctgaaggacacaccaactcaggaagactggctggtgagtgtgcttcctgaaggatccagggttggtgtggaccccttgatcattcctacagattattggaagaaaatggccaaagttctgagaagtgccggccatcacctcattcctgtcaaggagaacctcgttgacaaaatctggacagaccgtcctgagcgcccttgcaagcctctcctcacactgggcctggattacacaggcatctcctggaaggacaaggttgcagaccttcggttgaaaatggctgagaggaacgtcatgtggtttgtggtcactgccttggatgagattgcgtggctatttaatctccgaggatcagatgtggagcacaatccagtatttttctcctacgcaatcataggactagagacgatcatgctcttcattgatggtgaccgcatagacgcccccagtgtgaaggagcacctgcttcttgacttgggtctggaagccgaatacaggatccaggtgcatccctacaagtccatcctgagcgagctcaaggccctgtgtgctgacctctccccaagggagaaggtgtgggtcagtgacaaggccagctatgctgtgagcgagaccatccccaaggaccaccgctgctgtatgccttacacccccatctgcatcgccaaagctgtgaagaattcagctgagtcagaaggcatgaggcgggctcacattaaagatgctgttgctctctgtgaactctttaactggctggagaaagaggttcccaaaggtggtgtgacagagatctcagctgctgacaaagctgaggagtttcgcaggcaacaggcagactttgtggacctgagcttcccaacaatttccagtacgggacccaacggcgccatcattcactacgcggatggcaccacagatgtgacgcggacaatgcattttgggacccctacagcctacgagaaggaatgcttcacatatgtcctcaagggccacatagctgtgagtgcagccgttttcccgactggaaccaaaggtcaccttcttgactcctttgcccgttcagctttatgggattcaggcctagattacttgcacgggactggacatggtgttgggtcttttttgaatgtccatgagggtccttgcggcatcagttacaaaacattctctgatgagcccttggaggcaggcatgattgtcactgatgagcccgggtactatgaagatggggcttttggaattcgcattgagaatgttgtccttgtggttcctgtgaagaccaagtataattttaataaccggggaagcctgacctttgaacctctaacattggttccaattcagaccaaaatgatagatgtggattctcttacagacaaagagtgcgactggctcaacaattaccacctgacctgcagggatgtgattgggaaggaattgcagaaacagggccgccaggaagctctcgagtggctcatcagagagacgcaacccatctccaaacagcattaataaatacctccccggttttgtttttgtaaaatgctctggaggaaggaagaaacgtggcagatccctgacatctttcccctttcctttccttcttccctacctcccctttttactttagactttaagaagaacagaaaatcttcttatcctctttgatattttattgcaaacactcagtcttttatgattttttaattgttgagaacaagccaagaataaaattgctgcaccagaaggagggtccctccaaagttgaacacttggtgaaaggaagatgccccgacttctttggccagtgatggggaatcagtgagtgctccatgatggtcatgttccaggtgctagtacatcattcatgatcaccttaatgctcatgagactatatttatgatcagtgaataaaaatgtcagaactgtg

SEQ ID NO: 65272 - DNA, 828 bp, Artificial Sequence
  derived and/or modified sequence
atgcggattctccagctgattcttttagcattggccactggcttagtgggtggcgaaactaggataatcaaagggttcgagtgcaaaccccactctcagccctggcaagctgcgctgttcgagaaaaccaggctcctgtgcggagcgactctgattgcccccagatggcttctcacagctgctcactgtctgaaaccatgggtcagtttaacctcgcccacccatgtcagtcctgaccttagttcctctaactactgtctgtcccacctgagtcgctatatcgtgcatctcggacagcacaatttgcagaaggaggaaggatgtgagcagactagaacagccacagaaagcttcccacatccaggcttcaacaattccctgcccaataaagatcatcgaaatgatatcatgcttgtgaagatggccagcccagtgtccataacctgggctgttaggcctcttactctttctagccgctgtgtgactgcaggtacgtcctgtctcatttctggctggggaagcacgagttccccacagctgcgcctgccacacaccctgagatgcgctaacataacaattatagaacaccagaaatgtgagaacgcctaccccggcaatatcacagacactatggtgtgcgcgagcgttcaggagggaggtaaggattcatgtcagggtgattcagggggccctctggtttgtaatcagtctctgcaaggaatcatttcttggggtcaagacccctgtgccataacaagaaagccaggagtttacacaaaggtgtgcaaatacgtggactggattcaggaaacgatgaagaacaactag

SEQ ID NO: 65273 - DNA, 828 bp, Artificial Sequence
  derived and/or modified sequence
atgaggatcctgcagctgatcctgctggccctggccaccggcctggtgggcggggagacccgcatcatcaagggctttgagtgcaagccccacagccagccctggcaggccgccctgtttgagaagacccggctgctgtgtggggccaccctcatcgccccccgctggctgctgacagctgcccactgcctgaagccctgggtgtccctgaccagccccacccacgtgtccccagacctgagcagcagcaactactgcctgagccacctgagccgctacatcgtgcacctgggccagcacaacctgcagaaggaggagggctgtgagcagaccaggacagccacagagagcttcccccaccctggcttcaacaacagcctgcccaacaaggaccacagaaatgacatcatgctggtgaagatggccagccctgtgtccatcacctgggccgtgcggcccctgaccctgagcagccgctgtgtgacagctggcaccagctgcctgatcagcggctggggcagcaccagcagcccccagctgcggctgccccacaccctgcgctgtgccaacatcaccatcatcgagcaccagaagtgtgaaaatgcctacccaggcaacatcacagacaccatggtgtgtgcctctgtgcaggagggcggcaaggacagctgccagggcgacagcggcggccccctggtgtgcaaccagagcctgcagggcatcatctcctggggccaggacccctgtgccatcaccaggaagccaggagtgtacaccaaggtgtgcaagtatgtggactggatccaggagaccatgaagaacaactag

SEQ ID NO: 65274 - DNA, 828 bp, Artificial Sequence
  derived and/or modified sequence
atgcggatcctgcagctgatcctgctggccctggccaccggcctggtgggaggcgaaacccggatcataaagggtttcgaatgtaagccgcacagccaaccgtggcaagctgccctgtttgagaagactcggctcctctgcggcgccacgctcatcgccccacggtggcttctgacagcggctcattgccttaaaccctgggtgtcgctgacatcaccaacacatgtcagtccagacctcagcagctctaattactgtttatcgcacttatcaagatatatcgtccatctcggacagcacaacctacaaaaagaggaagggtgcgagcaaactagaactgcaaccgaaagtttcccacaccctggctttaataattccctccccaataaggaccatagaaatgacatcatgctggttaaaatggcttccccggtgtctatcacatgggcagtccgaccgctcacactgagtagtcgttgcgtgaccgccgggacttcttgtttgatatctggctgggggtctactagctcaccgcagcttaggctcccacataccctgcggtgcgccaatatcaccatcatcgagcatcaaaagtgcgagaatgcctaccccggtaatatcaccgacacgatggtgtgcgcctccgtccaagagggcggcaaggatagctgtcagggggattccggcgggccgctggtgtgtaaccagagtctccaggggattatcagttggggacaggacccatgtgctattacgcgcaaacctggggtctataccaaggtctgtaaatacgttgattggatccaagaaaccatgaagaacaattag

SEQ ID NO: 65275 - DNA, 828 bp, Artificial Sequence
  derived and/or modified sequence
atgagaatcctgcagcttatcctgttggccctcgcaactggactggttgggggagagacacgaattattaaaggcttcgagtgcaagcctcactcacaaccctggcaggcagccctgtttgaaaaaacacgcctgctgtgcggagccacccttattgcaccccgatggttattgacagctgcacactgcctgaaaccttgggttagtctgacatccccaacacacgtgtccccagacttgtcctcctcaaattattgcctctcccatttgtctagatatatcgtgcatctgggacagcacaatctgcagaaggaagaggggtgcgaacagacgaggacagcaaccgagagctttccccatcccggattcaacaattcacttcctaacaaggaccataggaatgacatcatgcttgtgaaaatggctagccctgtcagcatcacatgggccgtcaggcccttaaccctcagctcaagatgcgtgaccgccggtacatcatgtttgatttctggttggggaagtaccagcagcccacagttaagattgccacatactttaaggtgcgccaacattactatcatcgaacatcagaaatgtgaaaatgcctatccaggcaacatcaccgacaccatggtctgtgctagcgtacaggaaggcggtaaggactcctgccaaggtgacagtggaggccctctggtctgcaatcagagcttgcaaggaatcattagctgggggcaggacccttgcgctatcactagaaaacccggagtgtataccaaagtttgcaagtacgtggattggatccaggagactatgaaaaacaactag

SEQ ID NO: 65276 - DNA, 828 bp, Artificial Sequence
  derived and/or modified sequence
atgagaatcctgcagctgatcctgctggccctggccaccggcctggtgggcggcgagaccagaatcatcaagggcttcgagtgcaagccccacagccagccctggcaggccgccctgttcgagaagaccagactgctgtgcggcgccaccctgatcgcccccagatggctgctgaccgccgcccactgcctgaagccctgggtgagcctgaccagccccacccacgtgagccccgacctgagcagcagcaactactgcctgagccacctgagcagatacatcgtgcacctgggccagcacaacctgcagaaggaggagggctgcgagcagaccagaaccgccaccgagagcttcccccaccccggcttcaacaacagcctgcccaacaaggaccacagaaacgacatcatgctggtgaagatggccagccccgtgagcatcacctgggccgtgagacccctgaccctgagcagcagatgcgtgaccgccggcaccagctgcctgatcagcggctggggcagcaccagcagcccccagctgagactgccccacaccctgagatgcgccaacatcaccatcatcgagcaccagaagtgcgagaacgcctaccccggcaacatcaccgacaccatggtgtgcgccagcgtgcaggagggcggcaaggacagctgccagggcgacagcggcggccccctggtgtgcaaccagagcctgcagggcatcatcagctggggccaggacccctgcgccatcaccagaaagcccggcgtgtacaccaaggtgtgcaagtacgtggactggatccaggagaccatgaagaacaactag

SEQ ID NO: 65277 - protein, 152 aa, Artificial Sequence
  derived and/or modified sequence
MARDYDHLFKLLIIGDSGVGKSSLLLRFADNTFSGSYITTIGVDFKIRTVEINGEKVKLQIWDTAGQERFRTITSTYYRGTHGVIVVYDVTSAESFVNVKRWLHEINQNCDDVCRILDVQLHHGAGPPSKERQPGKTAAATTERCGEAHEEQ

SEQ ID NO: 65278 - DNA, 483 bp, Artificial Sequence
  derived and/or modified sequence
atggccagagactacgatcacttattcaaattattgatcatcggggactccggggtaggaaaatcctctctcctgctcaggttcgccgacaacacgttttcaggttcgtatataaccacaattggagtcgacttcaaaatccgcaccgtagaaatcaacggggagaaagtcaagctgcagatctgggacacagccggtcaggaacgcttccggaccatcacatcgacagcagagacagctctgcgaagtctgccccaaccagaagctcatggaggcagtagcggtgattcccttagtttcgtgccccttttcaaggaattttccccatgcttttgtattggcaggtgccatagacactttctccccagaccaccgagggtccctcgacgctgctggacctcacctccattccctaccggagccccttcctcacccgctaaagcgccagggcctggtgaggacgcagctcggcgagctgattag

SEQ ID NO: 65279 - DNA, 459 bp, Artificial Sequence
  derived and/or modified sequence
atggcacgcgactacgaccacctgtttaaactactcattattggagactccggggtggggaagagctctcttctactgcggttcgcagacaacaccttcagcgggtcttacatcacgacaattggcgtagatttcaagattaggacggttgaaatcaatggggagaaggtgaagctgcagatttgggatactgccggtcaggagcgctttcgcacaattaccagcacttactatagaggcacccatggcgtgatcgtcgtgtacgatgtgacctcagccgagtctttcgtaaacgtgaaacgctggcttcatgaaattaatcaaaattgtgacgacgtgtgcagaatccttgatgtacagctgcaccacggcgctggccctccatcaaaagagagacagcccggaaagaccgccgctgcaacaactgagagatgtggggaggcacacgaggaacagtag

SEQ ID NO: 65280 - DNA, 483 bp, Artificial Sequence
  derived and/or modified sequence
atggcccgcgactatgaccatctgttcaaactgcttatcatcggcgatagcggcgttggaaaatcttcgcttctattgcggtttgcagataacacattctccggatcctatattaccacgatcggagtggatttcaaaatccgaactgtagagattaacggcgaaaaagtgaagctgcaaatttgggacactgccgggcaggaacgctttagaacaattaccagcaccgcggaaactgccctgcgatcgctcccccagcctgaagctcacgggggttcctctggtgattcccttagtttcgtcccactgtttaaggaattctcaccctgcttctgtataggcagatgccatagacacttcctgccgaggccacccagggtacccagacgctgttggacgtccccaccattcccaaccggagccccttcctctccagccaaagcccccggccccggagaagatgccgctaggagggctgactag

SEQ ID NO: 65281 - DNA, 459 bp, Artificial Sequence
  derived and/or modified sequence
atggcaagggactatgaccatcttttcaaactcctgattattggggatagcggcgtggggaagtcttcactgctcctgaggttcgctgataacacattctccggatcgtacatcacaacaatcggcgtggacttcaagatcaggactgtagagattaatggagaaaaggtgaaattacagatttgggatactgccggccaggagcgatttaggactatcactagtacctattatcgaggaacacacggcgtcattgtggtatacgatgtgacctcagcagaaagctttgtgaacgtgaaaagatggttgcatgagattaaccagaattgcgatgatgtgtgccggattttagatgtacagttgcaccacggcgcaggcccaccaagcaaagaacgacagccagggaagaccgctgcagccacaacggaacggtgtggggaggcccatgaagaacagtag

SEQ ID NO: 65282 - DNA, 483 bp, Artificial Sequence
  derived and/or modified sequence
atggccagggattatgaccacctcttcaagttgctcatcatcggggacagtggagttggaaaatcctcgctgctcttaagattcgcagacaacaccttttcagggagctacatcacaactatcggtgttgattttaagattagaacggtagagatcaatggcgaaaaagttaaattacagatctgggataccgccggccaggagcgattcagaacaattacatcaacggccgagaccgcactgagatccctgccccaaccagaagctcacggcgggtcttcaggggatagcctttcctttgtgcccctgttcaaggaattctccccctgcttctgcattggtcgatgtcacagacatttcctacccagaccccccagagtaccgagacgctgttggacttcacccccttttcccacaggcgccccttctagcccagcaaaagcccctggacccggcgaggacgctgctcgtcgcgctgactag

SEQ ID NO: 65283 - DNA, 939 bp, Artificial Sequence
  derived and/or modified sequence
agttccggctgtttgttcgggaagtggatccgccgctgccggagcagcccgaagggagctgcggatcgcgaggccagtaccgaccccgcccgcccgcgcgcaccgcccccgcccgccatggcccgggactacgaccacctcttcaagctgctcatcatcggcgacagcggtgtgggcaagagcagtttactgttgcgttttgcagacaacactttctcaggcagctacatcaccacgatcggagtggatttcaagatccggaccgtggagatcaacggggagaaggtgaagctgcagatctgggacacagcggggcaggagcgcttccgcaccatcacctccacgtattatcgggggacccacggggtcattgtggtttacgacgtcaccagtgccgagtcctttgtcaacgtcaagcggtggcttcacgaaatcaaccagaactgtgatgatgtgtgccgaatattagatgttcaactgcatcacggagctggtcctccgagcaaagaaagacaacctggcaaaacagcagcagcaacaacagaacgatgtggtgaagctcacgaagaacagtaaacgaaagaaacgctgctgctaatggcacccagtccactgcagagactgcactgcggtccctcccccagcccgaggcccacggaggttcctcgggggacagtctcagtttcgtgccgttatttaaagaattctctccatgtttttgtatcgggaggtgccatcggcacttcctcccccgccctcctcgagtgccaagaaggtgttggaccagcccgcccttccctactggtgccccctcctccccggccaaggcgcctggacctggcgaggacgctgcccgccgagcggactgattcgcagagtctgtacatagtgtatattgctctacccggccgcacaccacgtcctgctctggcttttgcc

SEQ ID NO: 65284 - DNA, 483 bp, Artificial Sequence
  derived and/or modified sequence
atggccagagactacgaccacctgttcaagctgctgatcatcggcgacagcggcgtgggcaagagcagcctgctgctgagattcgccgacaacaccttcagcggcagctacatcaccaccatcggcgtggacttcaagatcagaaccgtggagatcaacggcgagaaggtgaagctgcagatctgggacaccgccggccaggagagattcagaaccatcaccagcaccgccgagaccgccctgagaagcctgccccagcccgaggcccacggcggcagcagcggcgacagcctgagcttcgtgcccctgttcaaggagttcagcccctgcttctgcatcggcagatgccacagacacttcctgcccagaccccccagagtgcccagaagatgctggaccagcccccccttccccaccggcgcccccagcagccccgccaaggcccccggccccggcgaggacgccgccagaagagccgactag

SEQ ID NO: 65285 - DNA, 459 bp, Artificial Sequence
  derived and/or modified sequence
atggccagagactacgaccacctgttcaagctgctgatcatcggcgacagcggcgtgggcaagagcagcctgctgctgagattcgccgacaacaccttcagcggcagctacatcaccaccatcggcgtggacttcaagatcagaaccgtggagatcaacggcgagaaggtgaagctgcagatctgggacaccgccggccaggagagattcagaaccatcaccagcacctactacagaggcacccacggcgtgatcgtggtgtacgacgtgaccagcgccgagagcttcgtgaacgtgaagagatggctgcacgagatcaaccagaactgcgacgacgtgtgcagaatcctggacgtgcagctgcaccacggcgccggcccccccagcaaggagagacagcccggcaagaccgccgccgccaccaccgagagatgcggcgaggcccacgaggagcagtag

SEQ ID NO: 65286 - DNA, 483 bp, Artificial Sequence
  derived and/or modified sequence
atggcccgggattatgatcacctctttaagctcctcatcattggcgattccggggtgggcaagtccagccttctgctccggttcgctgataacacattcagtgggagttatataacaaccatcggggtcgattttaagattcgaaccgtcgagataaacggggagaaggtgaagctgcaaatttgggatacagccggccaggagcggttcagaactatcactagtacagcggaaacagctttacgtagcctcccgcagcctgaggctcacggcggctcatccggcgactcactctcattcgtccctctgtttaaggaattttcaccatgcttctgcattgggagatgccatcgacattttcttcctaggccaccgcgagttcctagacggtgttggacgtctcccccatttccaacaggagccccatctagccccgctaaggctcccggcccaggcgaagacgccgccaggcgcgcagactag

SEQ ID NO: 65287 - DNA, 459 bp, Artificial Sequence
  derived and/or modified sequence
atggctcgcgattacgaccatctgtttaagttacttattatcggcgattcaggagtgggaaagagctcattgctactgcgcttcgctgacaataccttcagcggatcttacattaccaccatcggggtggattttaagattcggaccgttgaaattaacggtgagaaagtgaagttgcagatctgggacactgcgggacaggaacggtttcgcaccattaccagtacatactatagaggaacacacggggttattgtggtttatgatgtaactagcgccgagtcctttgtgaacgttaagagatggttgcacgaaattaatcaaaattgcgatgatgtatgtcgcattctcgatgtgcaattgcaccatggcgctgggccaccgtccaaggagaggcagcctggtaagacggctgcagctactaccgagcgctgcggcgaggcccacgaggagcagtag

SEQ ID NO: 65288 - DNA, 483 bp, Artificial Sequence
  derived and/or modified sequence
atggcccgggactatgaccacctgttcaagctgctgatcatcggggacagcggcgtgggcaagagcagcctgctgctgcgctttgctgacaacaccttcagcggcagctacatcaccaccatcggcgtggacttcaagatcagaacagtggagatcaatggagagaaggtgaagctgcagatctgggacacagctggccaggagcgcttccgcaccatcaccagcacagctgagacagccctgcggagcctgccccagcctgaggcccacggcggcagcagcggggacagcctgagctttgtgcccctcttcaaggagttcagcccctgcttctgcatcggccgctgccaccgccacttcctgccccggcccccccgggtgccccggcgctgctggaccagcccccccttccccactggagcccccagcagccctgccaaggcccctggccctggagaagatgctgccaggagagctgactag

SEQ ID NO: 65289 - DNA, 459 bp, Artificial Sequence
  derived and/or modified sequence
atggcccgggactatgaccacctgttcaagctgctgatcatcggggacagcggcgtgggcaagagcagcctgctgctgcgctttgctgacaacaccttcagcggcagctacatcaccaccatcggcgtggacttcaagatcagaacagtggagatcaatggagagaaggtgaagctgcagatctgggacacagctggccaggagcgcttccgcaccatcaccagcacctactaccggggcacccacggcgtgattgtggtgtatgatgtgaccagcgctgagagctttgtgaatgtgaagcgctggctgcacgagatcaaccagaactgtgatgatgtgtgccgcatcctggatgtgcagctgcaccacggggccggcccccccagcaaggagcggcagcccgggaagacagctgctgccaccacagagcgctgtggggaggcccacgaggagcagtag

SEQ ID NO: 65290 - DNA, 483 bp, Artificial Sequence
  derived and/or modified sequence
atggcccgggactacgaccacctgttcaagctgctgatcatcggcgactcaggagtcggcaagtctagtctgcttctccgattcgctgacaacacctttagcggctcttacatcacaacaataggagttgatttcaagatccggactgtagagatcaacggagagaaagtgaaactgcagatctgggacaccgccggccaagagcgatttagaaccattacctctacagccgagaccgccctgcgatccctgccccagcccgaagcgcacggaggaagctccggagactcattgtcatttgtccccctctttaaggagtttagcccgtgtttctgtatcggtcgatgccacaggcacttcctgcctcgtccacctcgcgtcccacgacggtgttggactagccctccatttccgactggcgcccctagctcgcccgccaaggcgcccggtcctggggaggacgccgccagacgcgcagattag

SEQ ID NO: 65291 - DNA, 459 bp, Artificial Sequence
  derived and/or modified sequence
atggcccgggactacgaccacctgttcaagctgctgatcatcggcgacagcggagtggggaagtcgtccctcctcctgcggttcgctgacaatacctttagcggctcttacatcacaacaatcggcgtggattttaagattcgcactgtcgagataaatggggagaaggtgaaactacagatttgggacacagccggacaggaacggttcagaaccattacctctacttattatagggggacacacggagtaattgtcgtctatgacgtgactagcgccgagagctttgtcaatgttaagcgctggcttcacgaaatcaaccagaactgtgatgacgtatgcaggattctggatgtacagctccatcacggcgcaggccctccttccaaagaacggcaaccagggaaaaccgctgccgccacgaccgagcgctgcggggaggcccacgaggagcagtag

SEQ ID NO: 65292 - RNA, 483 nt, Artificial Sequence
  derived and/or modified sequence
auggcccgcgacuaugaccaucuguucaaacugcuuaucaucggcgauagcggcguuggaaaaucuucgcuucuauugcgguuugcagauaacacauucuccggauccuauauuaccacgaucggaguggauuucaaaauccgaacuguagagauuaacggcgaaaaagugaagcugcaaauuugggacacugccgggcaggaacgcuuuagaacaauuaccagcaccgcggaaacugcccugcgaucgcucccccagccugaagcucacggggguuccucuggugauucccuuaguuucgucccacuguuuaaggaauucucacccugcuucuguauaggcagaugccauagacacuuccugccgaggccacccaggguacccagacgcuguuggacguccccaccauucccaaccggagccccuuccucuccagccaaagcccccggccccggagaagaugccgcuaggagggcugacuag

SEQ ID NO: 65293 - RNA, 459 nt, Artificial Sequence
  derived and/or modified sequence
auggcaagggacuaugaccaucuuuucaaacuccugauuauuggggauagcggcguggggaagucuucacugcuccugagguucgcugauaacacauucuccggaucguacaucacaacaaucggcguggacuucaagaucaggacuguagagauuaauggagaaaaggugaaauuacagauuugggauacugccggccaggagcgauuuaggacuaucacuaguaccuauuaucgaggaacacacggcgucauugugguauacgaugugaccucagcagaaagcuuugugaacgugaaaagaugguugcaugagauuaaccagaauugcgaugaugugugccggauuuuagauguacaguugcaccacggcgcaggcccaccaagcaaagaacgacagccagggaagaccgcugcagccacaacggaacgguguggggaggcccaugaagaacaguag

SEQ ID NO: 65294 - RNA, 483 nt, Artificial Sequence
  derived and/or modified sequence
auggccagggauuaugaccaccucuucaaguugcucaucaucggggacaguggaguuggaaaauccucgcugcucuuaagauucgcagacaacaccuuuucagggagcuacaucacaacuaucgguguugauuuuaagauuagaacgguagagaucaauggcgaaaaaguuaaauuacagaucugggauaccgccggccaggagcgauucagaacaauuacaucaacggccgagaccgcacugagaucccugccccaaccagaagcucacggcgggucuucaggggauagccuuuccuuugugccccuguucaaggaauucucccccugcuucugcauuggucgaugucacagacauuuccuacccagaccccccagaguaccgagacgcuguuggacuucacccccuuuucccacaggcgccccuucuagcccagcaaaagccccuggacccggcgaggacgcugcucgucgcgcugacuag

SEQ ID NO: 65295 - protein, 1065 aa, Artificial Sequence
  derived and/or modified sequence
MFNSMTPPPISSYGEPCCLRPLPSQGAPSVGTEVKLTKKRALSISPLSDASLDLQTVIRTSPSSLVAFINSRCTSPGGSYGHLSIGTMSPSLGFPAQMNHQKGPSPSFGVQPCGPHDSARGGMIPHPQSRGPFPTCQLKSELDMLVGKCREEPLEGDMSSPNSTGIQDPLLGMLDGREDLEREEKREPESVYETDCRWDGCSQEFDSQEQLVHHINSEHIHGERKEFVCHWGGCSRELRPFKAQYMLVVHMRRHTGEKPHKCTFEGCRKSYSRLENLKTHLRSHTGEKPYMCEHEGCSKAFSNASDRAKHQNRTHSNEKPYVCKLPGCTKRYTDPSSLRKHVKTVHGPDAHVTKRHRGDGPLPRAPSISTVEPKREREGGPIREESRLTVPEGAMKPQPSPGAQSSCSSDHSPAGSAANTDSGVEMTGNAGGSTEDLSSLDEGPCIAGTGLSTLRRLENLRLDQLHQLRPIGTRGLKLPSLSHTGTTVSRRVGPPVSLERRSSSSSSISSAYTVSRRSSLASPFPPGSPPENGASSLPGLMPAQHYLLRARYASARGGGTSPTAASSLDRIGGLPMPPWRSRAEYPGYNPNAGVTRRASDPAQAADRPAPARVQRFKSLGCVHTPPTVAGGGQNFDPYLPTSVYSPQPPSITENAAMDARGLQEEPEVGTSMVGSGLNPYMDFPPTDTLGYGGPEGAAAEPYGARGPGSLPLGPGPPTNYGPNPCPQQASYPDPTQETWGEFPSHSGLYPGPKALGGTYSQCPRLEHYGQVQVKPEQGCPVGSDSTGLAPCLNAHPSEGPPHPQPLFSHYPQPSPPQYLQSGPYTQPPPDYLPSEPRPCLDFDSPTHSTGQLKAQLVCNYVQSQQELLWEGGGREDAPAQEPSYQSPKFLGGSQVSPSRAKAPVNTYGPGFGPNLPNHKSGSYPTPSPCHENFVVGANRASHRAAAPPRLLPPLPTCYGPLKVGGTNPSCGHPEVGRLGGGPALYPPPEGQVCNPLDSLDLDNTQLDFVAILDEPQGLSPPPSHDQRGSSGHTPPPSGPPNMAVGNMSVLLRSLPGETEFLNSSA

SEQ ID NO: 65296 - DNA, 3198 bp, Artificial Sequence
  derived and/or modified sequence
atgttcaacagcatgacccccccccccatcagcagctacggcgagccctgctgcctgagacccctgcccagccagggcgcccccagcgtgggcaccgaggtgaagctgaccaagaagagagccctgagcatcagccccctgagcgacgccagcctggacctgcagaccgtgatcagaaccagccccagcagcctggtggccttcatcaacagcagatgcaccagccccggcggcagctacggccacctgagcatcggcaccatgagccccagcctgggcttccccgcccagatgaaccaccagaagggccccagccccagcttcggcgtgcagccctgcggcccccacgacagcgccagaggcggcatgatcccccacccccagagcagaggccccttccccacctgccagctgaagagcgagctggacatgctggtgggcaagtgcagagaggagcccctggagggcgacatgagcagccccaacagcaccggcatccaggaccccctgctgggcatgctggacggcagagaggacctggagagagaggagaagagagagcccgagagcgtgtacgagaccgactgcagatgggacggctgcagccaggagttcgacagccaggagcagctggtgcaccacatcaacagcgagcacatccacggcgagagaaaggagttcgtgtgccactggggcggctgcagcagagagctgagacccttcaaggcccagtacatgctggtggtgcacatgagaagacacaccggcgagaagccccacaagtgcaccttcgagggctgcagaaagagctacagcagactggagaacctgaagacccacctgagaagccacaccggcgagaagccctacatgtgcgagcacgagggctgcagcaaggccttcagcaacgccagcgacagagccaagcaccagaacagaacccacagcaacgagaagccctacgtgtgcaagctgcccggctgcaccaagagatacaccgaccccagcagcctgagaaagcacgtgaagaccgtgcacggccccgacgcccacgtgaccaagagacacagaggcgacggccccctgcccagagcccccagcatcagcaccgtggagcccaagagagagagagagggcggccccatcagagaggagagcagactgaccgtgcccgagggcgccatgaagccccagcccagccccggcgcccagagcagctgcagcagcgaccacagccccgccggcagcgccgccaacaccgacagcggcgtggagatgaccggcaacgccggcggcagcaccgaggacctgagcagcctggacgagggcccctgcatcgccggcaccggcctgagcaccctgagaagactggagaacctgagactggaccagctgcaccagctgagacccatcggcaccagaggcctgaagctgcccagcctgagccacaccggcaccaccgtgagcagaagagtgggcccccccgtgagcctggagagaagaagcagcagcagcagcagcatcagcagcgcctacaccgtgagcagaagaagcagcctggccagccccttcccccccggcagcccccccgagaacggcgccagcagcctgcccggcctgatgcccgcccagcactacctgctgagagccagatacgccagcgccagaggcggcggcaccagccccaccgccgccagcagcctggacagaatcggcggcctgcccatgcccccctggagaagcagagccgagtaccccggctacaaccccaacgccggcgtgaccagaagagccagcgaccccgcccaggccgccgacagacccgcccccgccagagtgcagagattcaagagcctgggctgcgtgcacaccccccccaccgtggccggcggcggccagaacttcgacccctacctgcccaccagcgtgtacagcccccagccccccagcatcaccgagaacgccgccatggacgccagaggcctgcaggaggagcccgaggtgggcaccagcatggtgggcagcggcctgaacccctacatggacttcccccccaccgacaccctgggctacggcggccccgagggcgccgccgccgagccctacggcgccagaggccccggcagcctgcccctgggccccggcccccccaccaactacggccccaacccctgcccccagcaggccagctaccccgaccccacccaggagacctggggcgagttccccagccacagcggcctgtaccccggccccaaggccctgggcggcacctacagccagtgccccagactggagcactacggccaggtgcaggtgaagcccgagcagggctgccccgtgggcagcgacagcaccggcctggccccctgcctgaacgcccaccccagcgagggccccccccacccccagcccctgttcagccactacccccagcccagccccccccagtacctgcagagcggcccctacacccagcccccccccgactacctgcccagcgagcccagaccctgcctggacttcgacagccccacccacagcaccggccagctgaaggcccagctggtgtgcaactacgtgcagagccagcaggagctgctgtgggagggcggcggcagagaggacgcccccgcccaggagcccagctaccagagccccaagttcctgggcggcagccaggtgagccccagcagagccaaggcccccgtgaacacctacggccccggcttcggccccaacctgcccaaccacaagagcggcagctaccccacccccagcccctgccacgagaacttcgtggtgggcgccaacagagccagccacagagccgccgccccccccagactgctgccccccctgcccacctgctacggccccctgaaggtgggcggcaccaaccccagctgcggccaccccgaggtgggcagactgggcggcggccccgccctgtaccccccccccgagggccaggtgtgcaaccccctggacagcctggacctggacaacacccagctggacttcgtggccatcctggacgagccccagggcctgagccccccccccagccacgaccagagaggcagcagcggccacacccccccccccagcggcccccccaacatggccgtgggcaacatgagcgtgctgctgagaagcctgcccggcgagaccgagttcctgaacagcagcgcctag

SEQ ID NO: 65297 - DNA, 3198 bp, Artificial Sequence
  derived and/or modified sequence
atgtttaattcgatgacgccacctcctattagctcctacggcgaaccgtgttgtttaagaccactgccctctcaaggagccccctccgtgggcaccgaagtcaagctgacaaagaaacgggctctttcaatcagtcccctctctgacgcatccttggaccttcagaccgtaatcaggacttctccttcgagcctggtggcttttatcaattccaggtgcacctctccaggaggctcttatggccacttaagcatcgggactatgagcccatcactaggcttcccggcccagatgaatcaccagaaaggacccagtccctcattcggcgtgcagccatgtgggcctcacgattcggcacgcggcggaatgattccccaccctcagagcaggggaccgtttcctacttgccagctgaagtccgaattggacatgctagtaggtaagtgtcgcgaggagccactggagggcgacatgagttcaccaaatagcactgggattcaggatccactgctgggaatgttggatggccgcgaagacctcgagcgcgaagagaaaagagagcctgagagcgtgtacgagacggactgtcgctgggacgggtgctcacaggaattcgactcgcaagagcagctggtccaccacatcaatagtgagcatatccacggagagagaaaggaatttgtctgccattggggaggctgctcaagggagttgagaccattcaaggcgcagtatatgttggtggtccatatgcgtaggcacacaggagagaagccgcacaagtgcaccttcgagggatgtcggaaaagctacagcaggttggaaaatcttaaaacgcaccttcgttctcacacgggtgagaagccctacatgtgtgaacatgagggatgctcaaaggctttctcgaacgccagtgacagagctaagcaccagaaccgcactcattccaacgagaagccttatgtgtgcaaactgcctggatgtaccaaacgttatactgacccctccagcctgcgaaaacacgtgaaaaccgtccacgggccagatgctcatgttacaaagcgacacagaggcgatggccccctgcctcgagccccttccatctctaccgtggaaccgaaacgcgaaagagaaggcggacccatacgcgaggagagcagattgacagtgcccgagggagctatgaagccccagcctagccctggagctcagtctagctgctctagcgaccattctccagccggctctgcagcgaacactgattcaggcgtagagatgactggcaacgcaggagggtctaccgaggatttgagctctctggacgagggcccctgtatcgccgggaccgggctgtcaaccctgaggcgcctagaaaacctgcgattggatcaactccatcagcttcgacccatcgggacccgcggcctcaaattacctagtttgagtcacacagggacgaccgtctccagacgcgtcgggccacctgtgtctcttgagagaaggagctcctcgagcagtagtattagcagtgcctataccgtgtctcggcgtagctctctcgcttccccctttccccctggcagccctccggagaatggagcatctagcctgcccggcctgatgcccgcacagcattatctgctcagagcacgttatgccagcgcccgaggtggcgggaccagtccaaccgccgccagcagcttggatcgaatcggaggccttcccatgccgccctggaggagtcgggcggaatatcccggttacaaccctaacgccggcgttacgaggagggcaagcgaccctgcccaagcggcggaccgcccagcgccagctagagttcaaagattcaaatcgttggggtgtgtccacacaccaccaacggtggcgggcggtgggcagaactttgacccatatctgcctacttccgtctactctcctcagccaccatccataaccgaaaacgctgcaatggatgcaagaggcctgcaagaagaaccggaggtgggtacaagtatggtgggatctgggctaaacccctacatggattttccaccgaccgacaccctgggatatggcggtccggaaggagccgcggctgaaccctatggtgcgcggggtccgggctcccttccactaggacctggacctccaacgaactacggccctaatccatgcccacagcaggcttcctatcctgatcccacccaggagacttggggggaattccccagtcactctggcctgtatcctgggcctaaggcgttggggggaacatattctcaatgtcctcggttagagcactatggacaggtccaggtgaagcccgagcagggatgcccggttggaagtgattccaccggcctagccccctgcctgaatgcccatcctagtgagggaccaccccacccgcagccactattttcacactatccccagccctcgccaccccagtatctgcaatcagggccctatactcaacccccgccagactatctgccaagcgaaccaagaccgtgcttggatttcgactccccaacccactccacgggccaactgaaggcccagctggtttgtaactacgtgcagtcacaacaggagctcctttgggaaggcggcggtcgagaggacgcccctgctcaggagccatcctatcaatccccaaaatttcttggaggttctcaagtgtccccttcaagagccaaggccccagtgaacacctacggtccgggatttggacctaatctgcccaaccacaagagcggatcttatcccaccccttctccctgccatgaaaactttgttgtgggtgcaaaccgcgcctcacatcgtgctgctgcaccccctcgcctgttacctcctctgcctacatgctacggtcctttgaaggttggcggaaccaatcccagttgcggccacccggaagtgggccgtctgggaggcggacctgctctgtatccaccgcctgaggggcaggtgtgtaaccccctggatagcttggacctggacaatacgcagttagattttgtggccatcctggacgagccacaggggctgagccccccacctagccacgaccagcggggttctagcggccataccccccctcctagcggccctcccaatatggccgtcgggaacatgtctgtgctactccgcagtctcccaggggagacggaattcctcaattcttcggcctag

SEQ ID NO: 65298 - DNA, 3198 bp, Artificial Sequence
  derived and/or modified sequence
atgtttaacagtatgacaccccctcccataagctcctatggcgagccttgctgccttcggcccctgccgtcccagggggcccccagcgtcggtaccgaagtgaagctgaccaagaagcgtgctctgagtatctccccactgtccgatgcatccctggatctccagactgtcatcagaaccagcccttccagccttgtcgcatttattaatagcagatgtacctctcctggcggaagttacggtcacctgtcaattggtacgatgagcccgagcctcgggttccccgcgcagatgaaccaccagaagggacccagcccttctttcggggtacagccctgtggtccacatgattccgcccgcgggggaatgatccctcacccacagagcagaggcccatttcccacctgccaactcaagagcgagctggacatgctggtaggcaaatgccgggaggagcccctggaaggcgacatgagttccccgaactccaccgggatacaagaccctctgctcggaatgctggacggtcgcgaggacctagaacgggaggagaagcgggaaccagagtctgtgtacgagaccgattgtcgatgggacggctgctcccaggaattcgactctcaggaacaacttgtgcaccacatcaattccgaacacatccacggagagaggaaggaattcgtgtgccactggggtggctgttcgcgcgagttaagaccgtttaaagcccagtatatgctcgtggtgcatatgaggcgccacaccggagagaaacctcacaaatgcaccttcgaaggctgcaggaaatcatattctagactcgagaacctgaaaacacacctcagaagccatactggcgaaaaaccatacatgtgtgaacacgagggctgcagtaaagcctttagtaatgccagcgacagggctaagcatcaaaataggacacattccaatgaaaagccgtatgtgtgcaagctgccagggtgcaccaagagatatactgacccgtctagcctgaggaagcacgtaaagactgtgcatggtccggatgcgcacgtgactaagagacacaggggggatggccccctacccagagctcccagcatcagcactgtggaacccaagagggaacgagaaggcggaccaatccgggaagagagtaggctaaccgtgccagaaggcgctatgaaaccacagccatctcctggcgctcagagttcatgcagctccgaccactcacccgcggggtctgcggccaatacggacagcggcgtggaaatgacaggcaatgccgggggttctacagaggacttgagcagcttggatgaggggccctgtatcgcgggaacgggtttgagtactctccgaaggctcgagaacctgagactggaccagttgcatcaactgaggcctattggaacccgtggcctcaaactgcccagcctgtcacacacaggcacgacagtctcccgacgcgtcgggcctcctgtgtccctcgagagacgatcaagctcatcctcatccatcagcagtgcttacactgtcagccgaaggtcgtctctggcgagccccttccccccaggttcgccgcctgagaatggcgcgtccagcctgccagggctcatgcccgcccagcattatctcctgagagctcggtatgcgtccgctcggggtgggggaacgtcgcctactgccgcaagcagcctggaccgcataggcggcctcccaatgcccccttggagatcaagagccgaataccctggctacaaccctaacgccggcgttactcgaagggccagtgaccccgcacaggccgcagacaggcccgcccccgccagagtccagcggttcaaaagtttaggttgcgtgcacaccccacctacagttgctggagggggacagaacttcgacccatacctgccgaccagtgtgtactctccccagcccccctctataaccgaaaacgctgcaatggatgccagaggccttcaggaggagcccgaggttgggactagtatggtcggaagcggcctgaatccttatatggattttccccccacggacaccttgggctacgggggaccagaaggagctgccgcagagccctatggcgccagaggccctggatcgttgcctctgggtcctgggccgcctacaaattacgggcccaatccgtgccctcaacaggccagttaccccgaccctacacaggagacttggggtgagttccctagccattcgggtctgtacccaggacccaaggcccttggagggacatactcacagtgcccacggttggagcactacggccaagtgcaggtgaagcccgagcagggttgtccggtgggcagcgacagtaccgggctggcaccctgcctaaatgctcatccttcagaagggccaccccaccctcagcctctcttctctcactatccccagccatcccctccccaatacctgcagagtggcccctatactcaaccccctccagattacctgccgagcgaaccacgcccttgtctggatttcgactcgccgacacatagcactgggcagctgaaggcacagctggtctgcaactatgtgcagagccagcaggagctgctatgggaggggggcggccgcgaggacgccccggcccaggaaccctcttaccagtctcctaagtttctgggcgggagccaggtgtcaccaagccgcgctaaggcacctgttaacacctatggtcctggcttcggccccaacctgcctaatcacaagagcggatcctacccaactccctcaccgtgccacgaaaacttcgtggtaggggccaaccgagcttcccatcgtgcagctgcgccccccaggctactgcccccgctgcctacgtgctatggaccactcaaggtcggagggactaaccccagttgtggtcacccagaagttgggagacttggcggcgggcccgccttgtatccaccacctgagggacaggtctgcaacccactggacagtttggacctcgataatacccagttggactttgtagcaatccttgatgaaccccagggattaagcccaccacctagccacgaccagaggggaagctctggccatacccctcccccaagtggtccccctaatatggctgtcgggaacatgtctgtgctactccggtctcttcccggagagaccgaattcttgaatagttcagcttag

SEQ ID NO: 65299 - DNA, 3196 bp, Artificial Sequence
  derived and/or modified sequence
atgttcaactcgatgaccccaccaccaatcagtagctatggcgagccctgctgtctccggcccctccccagtcagggggcccccagtgtggggacagaagtcaagttgaccaagaagcgggcactgtccatctcacctctgtcggatgccagcctggacctgcagacggttatccgcacctcacccagctccctcgtagctttcatcaactcgcgatgcacatctccaggaggctcctacggtcatctctccattggcaccatgagcccatctctgggattcccagcccagatgaatcaccaaaaagggccctcgccttcctttggggtccagccttgtggtccccatgactctgcccggggtgggatgatcccacatcctcagtcccggggacccttcccaacttgccagctgaagtctgagctggacatgctggttggcaagtgccgggaggaacccttggaaggtgatatgtccagccccaactccacaggcatacaggatcccctgttggggatgctggatgggcgggaggacctcgagagagaggagaagcgtgagcctgaatctgtgtatgaaactgactgccgttgggatggctgcagccaggaatttgactcccaagagcagctggtgcaccacatcaacagcgagcacatccacggggagcggaaggagttcgtgtgccactgggggggctgctccagggagctgaggcccttcaaagcccagtacatgctggtggttcacatgcgcagacacactggcgagaagccacacaagtgcacgtttgaagggtgccggaagtcatactcacgcctcgaaaacctgaagacgcacctgcggtcacacacgggtgagaagccatacatgtgtgagcacgagggctgcagtaaagccttcagcaatgccagtgaccgagccaagcaccagaatcggacccattccaatgagaagccgtatgtatgtaagctccctggctgcaccaaacgctatacagatcctagctcgctgcgaaaacatgtcaagacagtgcatggtcctgacgcccatgtgaccaaacggcaccgtggggatggccccctgcctcgggcaccatccatttctacagtggagcccaagagggagcgggaaggaggtcccatcagggaggaaagcagactgactgtgccagagggtgccatgaagccacagccaagccctggggcccagtcatcctgcagcagtgaccactccccggcagggagtgcagccaatacagacagtggtgtggaaatgactggcaatgcagggggcagcactgaagacctctccagcttggacgagggaccttgcattgctggcactggtctgtccactcttcgccgccttgagaacctcaggctggaccagctacatcaactccggccaatagggacccggggtctcaaactgcccagcttgtcccacaccggtaccactgtgtcccgccgcgtgggccccccagtctctcttgaacgccgcagcagcagctccagcagcatcagctctgcctatactgtcagccgccgctcctccctggcctctcctttcccccctggctccccaccagagaatggagcatcctccctgcctggccttatgcctgcccagcactacctgcttcgggcaagatatgcttcagccagagggggtggtacttcgcccactgcagcatccagcctggatcggataggtggtcttcccatgcctccttggagaagccgagccgagtatccaggatacaaccccaatgcaggggtcacccggagggccagtgacccagcccaggctgctgaccgtcctgctccagctagagtccagaggttcaagagcctgggctgtgtccataccccacccactgtggcagggggaggacagaactttgatccttacctcccaacctctgtctactcaccacagccccccagcatcactgagaatgctgccatggatgctagagggctacaggaagagccagaagttgggacctccatggtgggcagtggtctgaacccctatatggacttcccacctactgatactctgggatatgggggacctgaaggggcagcagctgagccttatggagcgaggggtccaggctctctgcctcttgggcctggtccacccaccaactatggccccaacccctgtccccagcaggcctcatatcctgaccccacccaagaaacatggggtgagttcccttcccactctgggctgtacccaggccccaaggctctaggtggaacctacagccagtgtcctcgacttgaacattatggacaagtgcaagtcaagccagaacaggggtgcccagtggggtctgactccacaggactggcaccctgcctcaatgcccaccccagtgaggggcccccacatccacagcctctcttttcccattacccccagccctctcctccccaatatctccagtcaggcccctatacccagccaccccctgattatcttccttcagaacccaggccttgcctggactttgattcccccacccattccacagggcagctcaaggctcagcttgtgtgtaattatgttcaatctcaacaggagctactgtgggagggtgggggcagggaagatgcccccgcccaggaaccttcctaccagagtcccaagtttctggggggttcccaggttagcccaagccgtgctaaagctccagtgaacacatatggacctggctttggacccaacttgcccaatcacaagtcaggttcctatcccaccccttcaccatgccatgaaaattttgtagtgggggcaaatagggcttcacatagggcagcagcaccacctcgacttctgcccccattgcccacttgctatgggcctctcaaagtgggaggcacaaaccccagctgtggtcatcctgaggtgggcaggctaggagggggtcctgccttgtaccctcctcccgaaggacaggtatgtaaccccctggactctcttgatcttgacaacactcagctggactttgtggctattctggatgagccccaggggctgagtcctcctccttcccatgatcagcggggcagctctggacataccccacctccctctgggccccccaacatggctgtgggcaacatgagtgtcttactgagatccctacctggggaaacagaattcctcaactctagtgcct

SEQ ID NO: 65300 - DNA, 3475 bp, Artificial Sequence
  derived and/or modified sequence
cccagactccagccctggaccgcgcatcccgagcccagcgcccagacagagtgtccccacaccctcctctgagacgccatgttcaactcgatgaccccaccaccaatcagtagctatggcgagccctgctgtctccggcccctccccagtcagggggcccccagtgtggggacagaagtcaagttgaccaagaagcgggcactgtccatctcacctctgtcggatgccagcctggacctgcagacggttatccgcacctcacccagctccctcgtagctttcatcaactcgcgatgcacatctccaggaggctcctacggtcatctctccattggcaccatgagcccatctctgggattcccagcccagatgaatcaccaaaaagggccctcgccttcctttggggtccagccttgtggtccccatgactctgcccggggtgggatgatcccacatcctcagtcccggggacccttcccaacttgccagctgaagtctgagctggacatgctggttggcaagtgccgggaggaacccttggaaggtgatatgtccagccccaactccacaggcatacaggatcccctgttggggatgctggatgggcgggaggacctcgagagagaggagaagcgtgagcctgaatctgtgtatgaaactgactgccgttgggatggctgcagccaggaatttgactcccaagagcagctggtgcaccacatcaacagcgagcacatccacggggagcggaaggagttcgtgtgccactgggggggctgctccagggagctgaggcccttcaaagcccagtacatgctggtggttcacatgcgcagacacactggcgagaagccacacaagtgcacgtttgaagggtgccggaagtcatactcacgcctcgaaaacctgaagacgcacctgcggtcacacacgggtgagaagccatacatgtgtgagcacgagggctgcagtaaagccttcagcaatgccagtgaccgagccaagcaccagaatcggacccattccaatgagaagccgtatgtatgtaagctccctggctgcaccaaacgctatacagatcctagctcgctgcgaaaacatgtcaagacagtgcatggtcctgacgcccatgtgaccaaacggcaccgtggggatggccccctgcctcgggcaccatccatttctacagtggagcccaagagggagcgggaaggaggtcccatcagggaggaaagcagactgactgtgccagagggtgccatgaagccacagccaagccctggggcccagtcatcctgcagcagtgaccactccccggcagggagtgcagccaatacagacagtggtgtggaaatgactggcaatgcagggggcagcactgaagacctctccagcttggacgagggaccttgcattgctggcactggtctgtccactcttcgccgccttgagaacctcaggctggaccagctacatcaactccggccaatagggacccggggtctcaaactgcccagcttgtcccacaccggtaccactgtgtcccgccgcgtgggccccccagtctctcttgaacgccgcagcagcagctccagcagcatcagctctgcctatactgtcagccgccgctcctccctggcctctcctttcccccctggctccccaccagagaatggagcatcctccctgcctggccttatgcctgcccagcactacctgcttcgggcaagatatgcttcagccagagggggtggtacttcgcccactgcagcatccagcctggatcggataggtggtcttcccatgcctccttggagaagccgagccgagtatccaggatacaaccccaatgcaggggtcacccggagggccagtgacccagcccaggctgctgaccgtcctgctccagctagagtccagaggttcaagagcctgggctgtgtccataccccacccactgtggcagggggaggacagaactttgatccttacctcccaacctctgtctactcaccacagccccccagcatcactgagaatgctgccatggatgctagagggctacaggaagagccagaagttgggacctccatggtgggcagtggtctgaacccctatatggacttcccacctactgatactctgggatatgggggacctgaaggggcagcagctgagccttatggagcgaggggtccaggctctctgcctcttgggcctggtccacccaccaactatggccccaacccctgtccccagcaggcctcatatcctgaccccacccaagaaacatggggtgagttcccttcccactctgggctgtacccaggccccaaggctctaggtggaacctacagccagtgtcctcgacttgaacattatggacaagtgcaagtcaagccagaacaggggtgcccagtggggtctgactccacaggactggcaccctgcctcaatgcccaccccagtgaggggcccccacatccacagcctctcttttcccattacccccagccctctcctccccaatatctccagtcaggcccctatacccagccaccccctgattatcttccttcagaacccaggccttgcctggactttgattcccccacccattccacagggcagctcaaggctcagcttgtgtgtaattatgttcaatctcaacaggagctactgtgggagggtgggggcagggaagatgcccccgcccaggaaccttcctaccagagtcccaagtttctggggggttcccaggttagcccaagccgtgctaaagctccagtgaacacatatggacctggctttggacccaacttgcccaatcacaagtcaggttcctatcccaccccttcaccatgccatgaaaattttgtagtgggggcaaatagggcttcacatagggcagcagcaccacctcgacttctgcccccattgcccacttgctatgggcctctcaaagtgggaggcacaaaccccagctgtggtcatcctgaggtgggcaggctaggagggggtcctgccttgtaccctcctcccgaaggacaggtatgtaaccccctggactctcttgatcttgacaacactcagctggactttgtggctattctggatgagccccaggggctgagtcctcctccttcccatgatcagcggggcagctctggacataccccacctccctctgggccccccaacatggctgtgggcaacatgagtgtcttactgagatccctacctggggaaacagaattcctcaactctagtgcctaaagagtagggaatctcatccatcacagatcgcatttcctaaggggtttctatccttccagaaaaattgggggagctgcagtcccatgcacaagatgccccagggatgggaggtatgggctgggggctatgtatagtctgtatacgttttgaggagaaatttgataatgacactgtttcctgataataaaggaactgcatc

SEQ ID NO: 65301 - DNA, 3198 bp, Artificial Sequence
  derived and/or modified sequence
atgttcaacagcatgaccccaccacccatcagcagctatggagagccctgctgcctgcggcccctgcccagccagggcgcccccagcgtgggcacagaggtgaagctgaccaagaagagggccctgagcatcagccccctgagtgatgccagcctggacctgcagaccgtcatccgcaccagccccagcagcctggtggccttcatcaacagccgctgcaccagccctgggggcagctatggccacctgagcatcggcaccatgagccccagcctgggcttccctgcccagatgaaccaccagaagggccccagccccagctttggagtgcagccctgtggcccccatgacagcgcccggggcggcatgatcccccacccccagagccggggccccttccccacctgccagctgaagtctgagctggacatgctggtgggcaagtgccgggaggagcccctggagggggacatgagcagccccaacagcacaggcatccaggaccccctgctgggcatgctggatggccgggaggacctggagcgggaggagaagcgggagcctgagagcgtgtatgaaacagactgccgctgggatggctgcagccaggagtttgacagccaggagcagctggtgcaccacatcaacagcgagcacatccatggagagaggaaggagtttgtgtgccactggggcggctgcagccgggagctgcggcccttcaaggcccagtacatgctggtggtgcacatgaggaggcacactggagagaagccccacaagtgcacctttgagggctgcaggaagagctacagccggctggagaacctgaagacccacctgcggagccacactggagagaagccctacatgtgtgagcacgagggctgcagcaaggccttcagcaatgccagtgaccgggccaagcaccagaacagaacccacagcaatgagaagccctacgtgtgcaagctgcccggctgcaccaagcgctacacagaccccagcagcctgaggaagcacgtgaagacagtgcacggcccagatgcccacgtgaccaagaggcacagaggagatggccccctgccccgggcccccagcatcagcacagtggagcccaagcgggagcgggagggcggccccatccgggaggagagccggctgactgtgcctgagggcgccatgaagccccagcccagccctggggcccagagcagctgcagcagtgaccacagccctgctggcagcgctgccaacacagacagcggcgtggagatgactggaaatgctgggggcagcacagaggacctgagcagcctggatgagggcccctgcatcgccggcaccggcctgagcaccctgcggcggctggagaacctgcggctggaccagctgcaccagctgcggcccatcggcacccggggcctgaagctgcccagcctgagccacacaggcaccaccgtgtcccggcgggtgggcccccctgtgtccctggagcggcgcagcagcagcagcagcagcatcagcagcgcctacacagtgagccgccgcagcagcctggccagccccttccccccaggcagccccccagaaaatggagccagcagcctgcccggcctgatgcctgcccagcactacctgctgcgggcccgctatgccagcgcccggggcggcggcaccagccccacagctgccagcagcctggacagaattggaggcctgcccatgccaccctggaggagcagagctgagtacccaggctacaaccccaatgctggggtgacccggcgggccagtgaccctgcccaggccgctgacaggcctgccccagcccgggtgcagcgcttcaagagcctgggctgtgtgcacaccccacccaccgtggccggcggcggccagaactttgacccctacctgcccacctctgtgtacagcccccagccccccagcatcacagaaaatgctgccatggatgcccggggcctgcaggaggagcctgaggtgggcacctccatggtgggcagcggcctgaacccctacatggacttccccccaacagacaccctgggctatggaggccctgagggcgctgctgctgagccctacggggcccggggccctggcagcctgcccctgggccctggcccccccaccaactacggccccaacccctgcccccagcaggccagctacccagaccccacccaggagacctggggcgagttccccagccacagcggcctgtacccaggccccaaggccctgggcggcacctacagccagtgcccccggctggagcactacggccaggtgcaggtgaagccagagcagggctgccctgtgggcagtgacagcacaggcctggccccctgcctgaatgcccaccccagcgagggccccccccacccccagcccctcttcagccactacccccagcccagccccccccagtacctgcagagcggcccctacacccagcccccaccagactacctgcccagcgagccccggccctgcctggactttgacagccccacccacagcacaggccagctgaaggcccagctggtgtgcaactacgtgcagagccagcaggagctgctgtgggagggcggcggcagagaagatgccccagcccaggagcccagctaccagagccccaagttcctgggcggcagccaggtgagccccagccgggccaaggcccctgtgaacacctacggccctggcttcggccccaacctgcccaaccacaagagcggcagctaccccacccccagcccctgccatgaaaattttgtggtgggcgccaacagagccagccacagagctgctgccccaccccggctgctgccccccctgcccacctgctacggccccctgaaggtgggcggcaccaaccccagctgtggccaccctgaggtgggccgcctgggcggcggccctgccctgtacccacctcctgagggccaggtgtgcaaccccctggacagcctggacctggacaacacccagctggactttgtggccatcctggatgagccccagggcctgagccccccacccagccatgaccagaggggcagcagcggccacaccccacctccttctggcccccccaacatggctgtgggcaacatgtctgtgctgctgcggagcctgcctggagaaacagagttcctgaacagcagcgcctag

SEQ ID NO: 65302 - DNA, 3198 bp, Artificial Sequence
  derived and/or modified sequence
atgttcaacagcatgacccccccccccatcagcagctacggcgagccttgctgcctccgccccctaccatcccagggcgcaccgtcagtggggactgaggtgaaactcacgaaaaaacgtgcattgtctatcagccctctctctgatgcctctctggatttgcagactgtgattaggactagccctagctcactggttgcgtttataaattctaggtgtacaagtcccggcggcagctatggtcatctctccatcggtacaatgagcccttccctagggtttcctgcccaaatgaatcaccagaagggtcccagcccgtctttcggcgttcagccctgtggcccccacgactctgcccggggtggcatgattcctcacccccaaagccggggaccattcccaacctgccagctgaaaagcgagcttgacatgctagtgggcaagtgccgggaagaacccctggagggagacatgagttcacccaatagcaccggaattcaggatcccttattagggatgctggacggacgtgaggacctcgaacgtgaggaaaagcgagaacccgagtctgtgtatgagacggactgtaggtgggatgggtgttctcaagaattcgactctcaggagcagctcgtgcatcacatcaacagcgagcacatccatggagagcggaaagaattcgtctgtcattggggggggtgcagtagagagctgcgtccattcaaagcacagtatatgctggtggtccatatgagacgccacaccggtgagaagccacataaatgtacgttcgaaggatgtcggaagagctacagccgcctagagaacctgaagacacacctgagatcacacaccggggaaaagccatacatgtgcgagcatgaaggatgctctaaggccttttcaaatgcatctgatcgcgcgaagcatcagaataggacccattctaacgaaaagccctatgtgtgcaagttaccgggctgtactaagcgctatacagacccttcaagccttaggaaacacgtgaaaacggtccacggacctgatgcacatgtgacgaaaagacatcgtggagatggcccgctgcccagggctccatctataagtaccgtcgagcccaagcgggaacgcgagggcggtcctattagagaggagagcagactcacagtgccggaaggggctatgaagccccaaccatcacccggcgcccagtcctcctgttcctctgatcactctcctgccgggagcgccgcaaatacagattccggcgttgagatgaccggcaacgccggcggcagcacggaggacctgtcttctctggatgagggcccctgtatcgctggcactggactctcaacgcttcgaaggctggagaacttacgactggatcagttgcatcagctgcggcccattgggactcgagggcttaagctcccctcccttagtcacaccggcacaacagttagcaggagagtggggccaccggtaagtctcgagaggagaagctcctccagttcctccatttccagcgcatacaccgtgagcagacgttctagtctagctagccccttcccgccgggcagtccaccagagaatggcgcatcttccttgccaggactgatgcccgcccagcactacctgctgcgggccaggtacgcttctgcccggggaggcggcaccagcccgacggccgcctccagtttagatcggatcggcggactgccgatgcccccttggcgaagccgggccgagtaccctggctacaatccgaatgctggtgttacccgtcgcgcttcagatcctgcccaggcggccgatcgccccgctcctgcaagggtgcaacggtttaagtcgttgggctgcgttcatacccccccaacagtcgcaggcggtggacagaacttcgatccctatctacctactagcgtctattcaccacagccaccatcaataaccgagaacgccgcgatggacgcccgcggactgcaggaggaaccggaggtagggacatcaatggtgggatctggattgaacccctacatggatttcccacccaccgacaccttaggctacggggggcctgagggcgcggccgcagaaccatatggcgcccgcggcccgggctccttgcctcttggtccaggccctcctacaaactatggaccaaatccatgtccacaacaggcaagttatccggatcccacacaggagacttggggggaattcccttcacatagcgggctgtaccccggtccaaaggctttgggcggcacatactcacaatgcccgagactggagcactacggccaggtccaggtcaagcccgagcaagggtgccctgtgggtagcgatagcaccgggctcgcgccttgcttgaacgcccatcctagcgagggccctcctcatccccagcctctgttcagccactacccgcaaccttctcctccgcagtatctgcagtccggcccctacacacagccaccccccgactacctgccaagcgaaccccgcccctgtctggacttcgactcacccacccattctaccggccagctgaaggcccagttggtgtgtaactacgtgcagagtcagcaggagcttctgtgggagggcgggggccgtgaggatgctccagcccaggagccttcatatcaatcgccaaagttcctgggcgggtcacaagttagccccagtcgtgcaaaagcccctgtaaacacctacgggcctggcttcggacctaatcttcccaaccacaaaagcggatcctatcctacgccctccccatgccacgaaaattttgtggtgggcgccaaccgagcttcccacagggcggccgcgccgcccagactactccctccgttgccaacctgctacggccccctgaaggttggcgggaccaatcctagctgtggtcacccagaggtggggcgcctgggaggcggaccggccctatatccaccccctgaaggccaggtttgcaaccccttggatagcctagacctggacaacacacagttggattttgtggcaattttggacgaaccccagggcctgtcaccccccccatctcacgaccaaaggggctcttctggccacactccacctcctagtggccctcccaatatggccgttggcaatatgtccgtcctgctcaggtccttgccaggcgagaccgaatttctgaatagctccgcttag

SEQ ID NO: 65303 - DNA, 3198 bp, Artificial Sequence
  derived and/or modified sequence
atgttcaacagcatgacccccccccccatcagcagctacggcgagccttgttgcctgcgccccctaccttcacagggcgcgccatcagtggggacggaggtgaagctcactaagaagagggcgttatccatttctccactctctgacgcttctttggatctccagactgtgatccgaacctctccaagcagtctggtcgcctttattaattctcggtgcacaagtccaggcgggtcttacggccatttgtcaatcgggaccatgagcccaagcttgggattccccgcccagatgaaccaccagaaagggccctcaccttccttcggcgtgcagccatgtggcccccatgacagtgcccgcggaggcatgataccacaccctcagtctagaggcccctttccgacctgtcagctgaagtccgagctggacatgttggtgggcaaatgccgagaggagcctttggagggggatatgtccagccctaatagcacagggattcaggaccctttgttgggaatgcttgatggccgggaagacctggagcgggaagagaaacgagagccagagagtgtgtacgagacagactgcaggtgggacggatgctcccaggaatttgatagtcaggagcagctggtgcaccatatcaactctgagcacattcacggtgaacgaaaagaattcgtgtgtcactggggtggttgcagcagggaactgcgaccgttcaaagcccaatacatgttggtcgtgcacatgagaaggcacaccggcgagaaaccccataagtgcacgtttgaggggtgccgtaagagctattcccgactagagaatttgaagacccatttacggtcccatacgggggaaaagccctacatgtgtgaacacgagggatgctcgaaggctttcagcaacgcatctgaccgtgctaagcatcaaaatagaacccactctaacgaaaagccctatgtgtgcaaactcccgggatgtaccaagcggtacacagatccctcaagccttaggaaacatgttaaaacagtgcatgggccagacgcccacgtgacgaagcgccaccgaggggacggaccactgcccagggcaccttccatcagcacagttgagcccaaacgagagagagagggtggtccaattcgagaggaaagtcggctcacagttcctgaaggggccatgaagccacagccgtcaccaggagctcagtcttcttgttcctcagatcacagcccagccggcagcgccgcaaacacagatagcggtgtggagatgacgggtaatgcgggcggatccactgaagacctgagcagcctggacgagggcccttgtatcgcgggtacgggactctctacactgagacggctggagaaccttcgcctggaccagcttcaccagctgagacccatcgggactagaggcctcaagctgccatcgcttagtcacacaggcaccacagtatctcgcagggtaggaccacccgtgagtcttgaacggcgttcttccagctcgtcgagcatctcgtcagcctatacagtttccaggcgatcctccctggcatccccattccctcctggctctccccccgaaaacggcgcttctagcttgccaggattaatgccagctcagcactacttgttgcgggcaaggtacgcttctgcgcgcgggggggggacctccccgacagctgcgagctctctggataggatcggcggacttcccatgcccccttggcgaagtcgtgcagagtatccagggtataaccctaacgctggtgtcactagacgggcctcagatcccgcacaagccgccgatcgcccagcgcccgcacgggtccaacgtttcaagtcgttggggtgcgtgcacacaccacccacagttgctggcgggggtcagaacttcgacccatatctccctacatcagtctattctccgcagcctccatcaattaccgagaacgccgccatggacgctcgaggactgcaggaggaacctgaggtgggtacctctatggtggggtcagggctgaatccctacatggactttcccccgacagatacactgggctacgggggaccagagggagccgcggcagagccttatggggccagggggccaggatcgctgcccttaggtcctgggcctcctacgaactatggtccaaacccatgtcctcagcaggcatcctatcccgatccgacccaggaaacctggggtgaatttccaagccactctgggctttatcccggcccaaaagccctgggcggcacttactcccagtgcccgaggcttgagcactacgggcaggttcaggtgaaacccgagcagggttgtcccgtggggagcgattctaccggtctggcaccctgcctgaatgcgcacccatctgagggacctccacacccccagccccttttcagtcactatccccagccatccccgcctcagtaccttcaatccgggccttacacacaaccaccacctgattacctcccctctgagccccgtccttgcttagatttcgatagcccgacgcattccaccggccagttgaaggcccagctggtgtgcaattacgtgcagagtcagcaggagctactgtgggagggaggaggaagagaagatgctccagcacaagaaccttcataccagtcacccaagttcctgggcggatcacaggtgtccccaagtcgggccaaagcacctgttaacacctacggcccaggatttggccctaacctgcccaatcataagtcgggatcctatcccaccccttcgccgtgtcacgagaatttcgtcgtgggtgccaatcgtgcctctcatcgcgccgcggcccccccgcggctgctgccccctctgcccacctgttatggcccccttaaagtgggcgggactaacccaagttgtggacaccccgaggttggacgacttggcggtgggccagctctgtacccaccccccgaagggcaagtatgtaaccctctcgactccctggacctcgataatactcagctggacttcgtggcaattctcgatgagccacagggtctgtctccgcccccctcccatgaccagcgaggctcctctggccatacaccacccccatcaggaccacccaacatggccgtgggaaatatgtcagtgctcctgcgctcactgcctggtgaaactgagtttttaaattcctcagcttag

SEQ ID NO: 65304 - DNA, 3198 bp, Artificial Sequence
  derived and/or modified sequence
atgtttaacagtatgacacccccacccatatcaagttacggcgaaccttgttgtctccgtccccttccatcccagggggcacccagcgtgggcacggaggtgaaactgaccaaaaaacgagcccttagtatctctcccttaagcgatgcctccctggacctgcaaaccgtgatcaggacatctccctcgtccctcgtggcctttatcaatagtcggtgtaccagccctggcggatcatatggccatctgtccattggaacaatgagcccttctcttgggtttcccgcacagatgaaccaccaaaaggggccaagccccagcttcggcgtccagccatgtggcccacatgatagcgcaaggggcggaatgattccccacccgcagtctcgaggaccatttcccacctgtcagctcaaatccgagctggacatgctcgtgggtaagtgtcgagaagagccactggagggcgacatgtcatcgccgaatagcactgggatccaggatccgctgctcgggatgctggatggcagggaagacttagaaagagaagaaaagcgcgagccggaatccgtgtacgagactgattgcaggtgggatgggtgttctcaggaattcgattcacaggagcagctggttcatcacattaatagtgagcacattcacggggaaagaaaggagttcgtatgtcattggggagggtgtagtcgcgaactgagaccgtttaaggcccaatatatgcttgtcgttcacatgaggcgccacactggcgagaagcctcataaatgtacttttgaaggctgtagaaagagctatagtcgtttagagaatctcaaaacccacttgagatcacacacaggagagaagccctatatgtgtgagcatgaaggttgtagtaaggctttcagcaatgcttcggaccgcgcaaagcaccagaacaggactcacagcaacgaaaagccttacgtttgcaagctgccaggatgtacaaagcgatacacggatccatcgagccttcggaaacacgtcaaaactgtgcatggtcctgatgcccacgtgactaaacggcatcgaggggatggacccctcccaagggcaccatccatctctactgtggagcctaagcgtgagcgcgaaggcggacccatcagagaagaatctcgtctcacagtgccggaaggagccatgaaaccccagccatcccccggagcacagtctagctgtagtagcgaccactccccggctggctccgcagccaatacagacagtggcgtggaaatgacgggcaacgctgggggatctactgaggaccttagctctttggatgagggaccctgcattgcagggacaggcctgagcacgctgcgacgccttgagaacttacgtctcgaccagttacatcagctgcgccctatcggtacccgtggacttaagctgcctagcctttctcacacgggcactacagtctccaggcgggttgggcctcccgtctctctcgagagacgctcatcctcttctagttcaatcagcagcgcttacacagtctctcggcgaagttcacttgcaagcccgttcccgccagggagcccacctgaaaacggagcatctagcctgccagggctgatgcccgcacagcattacttactgagagccaggtacgctagtgccagaggaggaggcacgagtcctactgcagccagtagtcttgacagaattggaggcctcccgatgcccccatggagaagtagggccgagtaccccggatataaccccaacgccggtgtcacaaggagggcatctgatcctgcccaagccgcagatagacctgctccagctagagtgcagcgattcaagtccctgggctgcgttcatacaccccctactgtcgctggagggggtcagaactttgacccttatctacccacttcagtctatagccctcaaccacctagcattacggaaaacgccgctatggatgctagagggctacaggaggagccggaggtaggtacaagtatggtcgggtctggtctgaacccttatatggatttccccccaaccgacaccctggggtacgggggtccagagggggctgccgctgagccctatggggctaggggtccaggctcactgccccttggccctggccctcccacaaactacggtcctaatccctgtccccagcaggctagttaccccgatcctactcaagaaacctggggggagtttccatctcacagtggactttacccgggacctaaggcattaggcggaacctatagtcagtgccctcgcttggaacattacgggcaggtgcaggtgaaacctgagcagggatgccccgtgggaagcgacagcactggccttgctccatgcctaaatgcccacccctccgaaggcccacctcaccctcagcctctcttctcacactacccccagccatctcctccacagtacctacagtcgggcccttacacgcagcccccacctgactacctgccttccgaacccagaccttgtctggacttcgattctcccacacattcaactggccagctgaaggcacaactggtgtgtaattatgttcagtcacagcaggaactgctgtgggagggcggagggagggaagacgccccagcgcaggaacccagctatcagtctccaaaattccttggtggatcacaagtgagtccaagtcgggctaaagccccagtgaacacttacggcccaggctttggccctaatctccccaaccacaaatctggttcctacccaactccctccccttgtcatgaaaatttcgtggtgggcgctaacagagccagccatagggccgctgctccaccacgcctgctgccccctctgcccacctgttatggacctcttaaagtgggaggtacaaacccatcttgcggacatccggaagtgggcagattggggggtggccctgccctgtatcctcctcccgaggggcaggtttgtaatcccctggatagcctggacctggacaatactcagctggacttcgtggctatactggatgagccacaaggcctatcccctcctccatctcacgaccagaggggaagctcaggacacactccaccaccaagcgggccacctaacatggcagtaggcaatatgtccgtgctactcagatctctgccaggagaaaccgaatttttgaacagctcagcctag

SEQ ID NO: 65305 - DNA, 3198 bp, Artificial Sequence
  derived and/or modified sequence
atgtttaacagcatgacaccgccacctatcagttcctatggcgagccttgctgcctgcgacccctcccctcacagggcgctcccagtgtgggaaccgaggtgaagttgaccaagaaaagggcgctgagcattagtccgttgtcagacgcttctttggacctacagaccgtcataaggacatccccttcctctctcgtggctttcatcaattctcggtgcactagtccagggggtagttacgggcacttatccattggcacaatgagtcctagcctcggatttcctgctcagatgaaccatcaaaagggtccgtctcctagcttcggagtgcaaccatgtggaccccacgactcagcccgaggagggatgatcccacaccctcaatcccgtgggccattccccacatgccagctgaagtcggagctggatatgctggtcgggaaatgcagagaagagcctctcgaaggcgatatgagtagccccaacagcaccggaatccaagatcctctgctgggtatgctcgacggacgggaagatctcgaacgcgaggagaaacgtgagcccgagtcagtatacgagacggactgcagatgggacggatgttcacaagagttcgacagtcaggagcagctggtccatcacattaacagcgagcacattcatggcgagcgcaaggagttcgtatgtcattggggcggatgcagccgcgaactgcgaccatttaaggcacaatatatgttggtggtgcatatgcgtcgtcatactggtgagaaaccccataagtgcacgttcgaaggttgccgcaaatcttacagtaggttggagaatttaaagacgcatctccggagtcacaccggcgaaaagccatatatgtgtgagcacgaggggtgctctaaggccttctccaatgcgagcgaccgagccaagcaccagaatagaacacattcaaacgaaaagccatacgtgtgcaagctgcctgggtgtactaagaggtataccgatccgagctcccttcggaagcacgtcaagaccgtccacggaccggatgcccacgtcacaaagagacaccgcggtgatggaccacttccgagggctccttctatttccaccgtggaaccaaaacgggaaagagaaggagggcctatccgcgaagaaagtagacttacggtgccggaaggagctatgaaacctcagcccagcccaggcgctcagtcatcctgttcatcagatcatagtccggctggatcggccgcaaacacggattcaggcgtggaaatgacaggaaacgctggaggtagcaccgaagacttgagctctctggacgagggtccatgtattgcaggcactgggctgagcactctccggcgtctggaaaacctccgtcttgatcagctgcaccaactcaggcctattggaaccaggggccttaagctccccagtcttagccacacaggaacgaccgtgtctcggagagtaggaccccctgtgagcttagaacggcgaagctccagctcatcaagtatttcttccgcctatacagtctcaagacgctcgagtctcgcctcccctttccctcccggaagccctccagagaatggagccagctcattaccaggactaatgcctgcccaacattatttactgcgggctcgctatgctagcgcccgtggagggggaacttcccctacagcagcaagcagcttggacaggatcggcggactgccgatgcccccttggaggagccgagctgaatacccaggctacaaccctaatgctggggttacccgcagggcctccgatccggctcaagcggcagacaggcccgctcctgccagagttcagagatttaaaagcttgggatgcgtgcacacacctccaaccgttgctggtggtgggcagaattttgatccttatttgcccacgtcagtgtacagcccccagcccccttctataacagaaaacgccgctatggatgccagagggcttcaggaagaaccggaggtgggcacatcaatggtggggagcgggcttaatccatatatggactttcctcccacagatacactgggatatgggggacccgaaggagccgcagctgaaccttacggcgcacgaggaccgggttctctgcccctgggcccaggccctcctaccaactacgggccaaatccctgcccgcagcaggctagctaccctgacccaacacaggagacttggggtgagtttcccagtcactctggactctatcctggacctaaagctctcggaggtacctacagccagtgccccagactggagcattacgggcaggtccaagtcaagcccgagcaaggttgtcccgtgggctctgattctactggcctcgctccctgtttaaacgcccaccccagtgagggccctccgcacccccagcccctgttttcccattatccccagccatcacctccccagtacttgcagagcgggccttatactcagcccccaccagactacctgccgtctgaacccaggccgtgtctagatttcgactcacccacacattccaccgggcagttaaaagctcagctggtatgtaactatgtgcagtcccagcaagaactcctgtgggaaggcggtggacgcgaagacgccccagctcaggaaccctcatatcaaagtcctaagtttctgggcggaagtcaagtgagccctagcagagcaaaggcacctgtgaacacatatggacccggatttggaccaaacctgcctaaccacaaatctggatcctatccgactccttcaccatgtcacgagaatttcgtggtcggcgcaaatcgcgcatcccacagagccgctgcgcctcccaggctgttgccccctctccctacttgctacggccctctgaaggtgggtgggacgaaccctagttgtggccacccggaagtgggcaggttgggcggtggacccgctctatatcctcctccggaaggacaggtgtgtaatcccctcgactctctggatctggataatacgcagctagacttcgtggccatcctggatgaaccacaggggttatctcccccaccgagccacgatcagcggggatcttccgggcacaccccccctccttccgggcctccaaatatggctgtaggcaacatgtcagtgctgttaagatctttgccaggggagactgaatttcttaactcttctgcctag

SEQ ID NO: 65306 - protein, 658 aa, Artificial Sequence
  derived and/or modified sequence
MAFEALASISHVAHVTITTKTADGKCAYRASYSDGKLKAPPKPCAGNQGTQITVEDLFYNIATRRKALKNPSEEYGKILEVVGRYSVHNAGISFSVKKQGETVADVRTLPNASTVDNIRSIFGNAVSRELIEIGCEDKTLAFKMNGYISNANYSVKKCIFLLFINHRLVESTSLRKAIETVYAAYLPKNTHPFLYLSLEISPQNVDVNVHPTKHEVHFLHEESILERVQQHIESKLLGSNSSRMYFTQTLLPGLAGPSGEMVKSTTSLTSSSTSGSSDKVYAHQMVRTDSREQKLDAFLQPLSKPLSSQPQAIVTEDKTDISSGRARQQDEEMLELPAPAEVAAKNQSLEGDTTKGTSEMSEKRGPTSSNPRKRHREDSDVEMVEDDSRKEMTAACTPRRRIINLTSVLSLQEEINEQGHEVLREMLHNHSFVGCVNPQWALAQHQTKLYLLNTTKLSEELFYQILIYDFANFGVLRLSEPAPLFDLAMLALDSPESGWTEEDGPKEGLAEYIVEFLKKKAEMLADYFSLEIDEEGNLIGLPLLIDNYVPPLEGLPIFILRLATEVNWDEEKECFESLSKECAMFYSIRKQYISEESTLSGQQSEVPGSIPNSWKWTVEHIVYKALRSHILPPKHFTEDGNILQLANLPDLYKVFERC

SEQ ID NO: 65307 - DNA, 1977 bp, Artificial Sequence
  derived and/or modified sequence
atggccttcgaggccctggccagcatcagccacgtggcccacgtgaccatcaccaccaagaccgccgacggcaagtgcgcctacagagccagctacagcgacggcaagctgaaggccccccccaagccctgcgccggcaaccagggcacccagatcaccgtggaggacctgttctacaacatcgccaccagaagaaaggccctgaagaaccccagcgaggagtacggcaagatcctggaggtggtgggcagatacagcgtgcacaacgccggcatcagcttcagcgtgaagaagcagggcgagaccgtggccgacgtgagaaccctgcccaacgccagcaccgtggacaacatcagaagcatcttcggcaacgccgtgagcagagagctgatcgagatcggctgcgaggacaagaccctggccttcaagatgaacggctacatcagcaacgccaactacagcgtgaagaagtgcatcttcctgctgttcatcaaccacagactggtggagagcaccagcctgagaaaggccatcgagaccgtgtacgccgcctacctgcccaagaacacccaccccttcctgtacctgagcctggagatcagcccccagaacgtggacgtgaacgtgcaccccaccaagcacgaggtgcacttcctgcacgaggagagcatcctggagagagtgcagcagcacatcgagagcaagctgctgggcagcaacagcagcagaatgtacttcacccagaccctgctgcccggcctggccggccccagcggcgagatggtgaagagcaccaccagcctgaccagcagcagcaccagcggcagcagcgacaaggtgtacgcccaccagatggtgagaaccgacagcagagagcagaagctggacgccttcctgcagcccctgagcaagcccctgagcagccagccccaggccatcgtgaccgaggacaagaccgacatcagcagcggcagagccagacagcaggacgaggagatgctggagctgcccgcccccgccgaggtggccgccaagaaccagagcctggagggcgacaccaccaagggcaccagcgagatgagcgagaagagaggccccaccagcagcaaccccagaaagagacacagagaggacagcgacgtggagatggtggaggacgacagcagaaaggagatgaccgccgcctgcacccccagaagaagaatcatcaacctgaccagcgtgctgagcctgcaggaggagatcaacgagcagggccacgaggtgctgagagagatgctgcacaaccacagcttcgtgggctgcgtgaacccccagtgggccctggcccagcaccagaccaagctgtacctgctgaacaccaccaagctgagcgaggagctgttctaccagatcctgatctacgacttcgccaacttcggcgtgctgagactgagcgagcccgcccccctgttcgacctggccatgctggccctggacagccccgagagcggctggaccgaggaggacggccccaaggagggcctggccgagtacatcgtggagttcctgaagaagaaggccgagatgctggccgactacttcagcctggagatcgacgaggagggcaacctgatcggcctgcccctgctgatcgacaactacgtgccccccctggagggcctgcccatcttcatcctgagactggccaccgaggtgaactgggacgaggagaaggagtgcttcgagagcctgagcaaggagtgcgccatgttctacagcatcagaaagcagtacatcagcgaggagagcaccctgagcggccagcagagcgaggtgcccggcagcatccccaacagctggaagtggaccgtggagcacatcgtgtacaaggccctgagaagccacatcctgccccccaagcacttcaccgaggacggcaacatcctgcagctggccaacctgcccgacctgtacaaggtgttcgagagatgctag

SEQ ID NO: 65308 - DNA, 1977 bp, Artificial Sequence
  derived and/or modified sequence
atggcctttgaggccctggcttcaatatcccacgtcgcccatgttaccattacaaccaagaccgctgacgggaagtgcgcttatcgcgcatcatactctgatggcaagctcaaggcccccccgaaaccctgcgcaggtaaccaggggacccaaatcactgtagaagatctgttttataacattgccacccgccggaaggctcttaagaatccttcagaggagtatggcaaaatacttgaagttgtcggcagatatagcgtccacaatgcaggaataagctttagcgtgaagaagcaaggagagacagtagccgatgtccggaccctgccaaacgctagcaccgtggacaatataagatctattttcgggaatgccgtctcacgcgagctgatcgagattgggtgcgaagataaaactttagccttcaagatgaatggatatataagtaacgctaactacagtgttaaaaaatgcatcttcctcctctttatcaaccacagactcgtagagagcacatcgctgaggaaagcgattgagaccgtatatgctgcttacttgccaaaaaatacgcatccctttctatatctctccctagaaatctctcctcagaacgttgacgtgaacgttcaccccaccaagcacgaggtccactttcttcatgaagagagtattctcgagagggtgcagcaacacatcgagtccaaactactgggctccaattctagtaggatgtatttcacccaaacccttctccctggcctggccggcccatccggggagatggtgaaatcgactacatctctgactagtagtagcactagcggaagcagcgacaaggtgtacgcccaccagatggtcagaacagactcacgcgagcagaagcttgatgcctttctgcagccattgtccaaacctctctccagccagccacaggccatagtgacagaggataaaaccgacatcagcagcgggagagcccggcagcaagacgaagaaatgcttgaattgcccgcgcctgctgaggttgcggccaaaaaccaatcactggagggtgacaccacaaagggaacctccgagatgtctgagaagaggggccctacatccagcaatccacggaagcggcatcgtgaggacagcgatgtggaaatggtggaggacgattcacgaaaggagatgaccgccgcatgtacgccaaggaggcgcatcattaatttaacctccgttctatctctccaggaggaaatcaatgagcaaggccatgaagtgctgcgagaaatgttacataatcatagctttgtgggatgcgtgaacccacaatgggccctggctcaacaccagactaaactgtacctgttgaatacaaccaagttgtcagaagaactattttaccaaatcttgatctacgatttcgccaattttggtgtcctgcggctctctgaacctgcacccttgttcgacctcgcaatgctcgctctggattccccagagagcggctggactgaagaggacggacctaaggagggcctggcagagtatattgtggagtttctcaaaaagaaagccgaaatgttagcagattatttctctctagagatcgatgaggaagggaacctgatcggcctgcccctcctcattgacaactacgtcccacccttagaaggcctccccatatttatcttgcgcttggcgaccgaggtgaattgggatgaggaaaaggagtgttttgaatctctttctaaggaatgcgcaatgttctattctattcgcaagcaatacatcagcgaggaaagtacgctctcagggcagcaatccgaggttcctggctctattcccaatagctggaaatggaccgtcgaacacatagtttacaaagcccttcgttcacacattctgccacctaagcattttaccgaggacggcaacatcctccagctggcaaacttaccggacctgtacaaagtgttcgagagatgttag

SEQ ID NO: 65309 - DNA, 1977 bp, Artificial Sequence
  derived and/or modified sequence
atggcctttgaggccctggccagcatcagccacgtggcccacgtgaccatcaccaccaagacagcagatggaaaatgtgcctaccgggccagctacagtgatggcaagctgaaggccccacccaagccctgtgccggcaaccagggcacccagatcaccgtggaggacctcttctacaacatcgccaccaggaggaaggccctgaagaaccccagcgaggagtatggcaagatcctggaggtggtgggccgctacagcgtgcacaatgccggcatctccttctctgtgaagaagcagggcgagaccgtggctgatgtgaggaccctgcccaatgccagcacagtggacaacatccgcagcatctttggaaatgctgtgtcccgggagctgattgaaattggctgtgaggacaagaccctggccttcaagatgaatggctacatcagcaatgccaactacagcgtgaagaagtgcatcttcctgctcttcatcaaccaccggctggtggagagcaccagcctgaggaaggccatcgagaccgtgtatgctgcctacctgcccaagaacacccaccccttcctgtacctgagcctggagatcagcccccagaatgtggatgtgaatgtgcaccccaccaagcatgaggtgcacttcctgcacgaggagagcatcctggagcgggtgcagcagcacatcgagagcaagctgctgggcagcaacagcagcaggatgtacttcacccagaccctgctgcccggcctggccggccccagcggggagatggtgaagagcaccaccagcctgaccagcagcagcaccagcggcagcagtgacaaggtgtatgcccaccagatggtgaggacagacagccgggagcagaagctggatgccttcctgcagcccctgagcaagcccctgagcagccagccccaggccatcgtgacagaggacaagacagacatcagcagcggccgggcccggcagcaggatgaggagatgctggagctgcctgccccagctgaggtggccgccaagaaccagagcctggagggggacaccaccaagggcaccagcgagatgtctgagaagaggggccccaccagcagcaaccccaggaagaggcacagagaagattctgatgtggagatggtggaggatgacagcaggaaggagatgacagctgcctgcaccccaagaagacgcatcatcaacctgacctctgtgctgagcctgcaggaggagatcaatgagcagggccacgaggtgctgcgggagatgctgcacaaccacagctttgtgggctgtgtgaacccccagtgggccctggcccagcaccagaccaagctgtacctgctgaacaccaccaagctgtctgaggagctgttctaccagatcctgatctatgactttgccaactttggagtgctgcggctgtctgagcccgcccccctgtttgacctggccatgctggccctggacagccctgagagcggctggacagaggaggatggccccaaggagggcctggccgagtacatcgtggagttcctgaagaagaaggccgagatgctggccgactacttcagcctggagattgatgaggagggcaacctgattggcctgcccctgctgattgacaactacgtgccccccctggagggcctgcccatcttcatcctgcggctggccacagaggtgaactgggatgaggagaaggaatgttttgagagcctgagcaaagaatgtgccatgttctacagcatcaggaagcagtacatcagcgaggagagcaccctgagcggccagcagagcgaggtgcccggcagcatccccaacagctggaagtggacagtggagcacatcgtgtacaaggccctgcggagccacatcctgccccccaagcacttcacagaagatggcaacatcctgcagctggccaacctgcctgacctgtacaaggtgtttgagcgctgctag

SEQ ID NO: 65310 - DNA, 1977 bp, Artificial Sequence
  derived and/or modified sequence
atggccttcgaggccctggccagcatcagccacgtggcccacgtgaccatcactactaagacggccgatggaaagtgtgcctaccgggctagctactctgatgggaaactgaaggcacctccaaaaccctgcgcgggtaatcaaggaacccagattactgtagaagacctgttttataatatagcgacccgcaggaaggctctgaaaaaccctagtgaggaatacggcaagattctcgaagtggtaggcaggtactccgtgcacaacgcaggaatatcatttagcgtgaaaaaacaaggtgagacagtggcggatgtgaggaccttgcccaatgcttctactgtcgataatatccggtcaatctttggcaacgctgtgagccgggaactgatcgagatcgggtgcgaagacaagactcttgccttcaagatgaatggctatataagcaatgcgaactattccgtgaaaaagtgtatctttctcctgtttattaatcacaggttggtggagtctacatctctccgcaaggccattgagacagtttacgctgcctacctgcctaagaacacccatccatttctatatttgtcactggagatcagtccccagaatgtggatgtcaacgtgcatcccaccaaacacgaggttcatttccttcacgaggaaagcatacttgagagggtacagcagcatatcgaaagtaagctgttggggagtaactcgagccggatgtacttcacccagaccctcttacctggcttagctgggccaagtggagagatggtgaagagcacaacttctctcacctcttcttctacaagcgggtcaagtgataaggtttatgcacaccagatggtaagaacagactcgcgggagcagaaactggatgctttcttgcagcctctgtcaaaacccctaagctctcagcctcaggctatcgtcactgaagacaagacggacatctcctctggacgggcccgccaacaagatgaagaaatgctggagctccctgctcccgctgaggttgcagccaaaaaccaaagcctcgagggcgatacgactaagggcacttccgaaatgtccgagaagcgtggtccaaccagctctaatccccgcaagcgccacagagaagattctgatgtcgaaatggtcgaggatgactccaggaaagaaatgaccgccgcctgcactccaaggcgaaggattatcaatctgacttctgtactctcattacaggaggaaattaatgagcaggggcacgaagttctgcgcgagatgctccataaccacagctttgtgggatgcgtgaaccctcaatgggctctggcccagcatcaaaccaagctgtacctgctgaacacgacaaagctgagtgaagagcttttttaccagatccttatttacgacttcgccaattttggcgtgctgagactcagtgagccagccccgctgttcgacttagctatgctcgcactcgattcgccagagtctggctggacggaagaggatggacccaaggagggcctggccgaatacattgtagaatttttaaagaagaaggccgagatgcttgctgattactttagcctcgagatagacgaagaaggcaacttgattggactccccctcctgatagacaattacgttcctccactcgaggggttgcctattttcatcctcagacttgccaccgaggtgaattgggatgaggagaaagagtgtttcgagtcattgagcaaggagtgcgcgatgttctattcaatccggaagcaatacatctcagaggaatcaaccctcagcggacagcagagcgaggttccgggcagcatcccgaatagttggaagtggacagttgaacatatcgtatacaaagcactgcggtcccacatcctccctccaaagcacttcaccgaagatggcaacatattacagctcgccaatctgcctgacctttacaaggtcttcgaacgctgctag

SEQ ID NO: 65311 - DNA, 2428 bp, Artificial Sequence
  derived and/or modified sequence
gacgtgccagtcaggccttctccttttccgcagaccgtgtgtttctttaccgctctcccccgagaccttttaagggttgtttggagttttagatgcaaaatccacaagtattcaagtgattgttaaagagggaggcctgaagttgattcagatccaagacaatggcaccgggatcaggaaagaagatctggatattgtatgtgaaaggttcactactagtaaactgcagtcctttgaggatttagccagtatttctacctatggctttcgaggctttggccagcataagccatgtggctcatgttactattacaacgaaaacagctgatggaaagtgtgcatacagagcaagttactcagatggaaaactgaaagcccctcctaaaccatgtgctggcaatcaagggacccagatcacggtggaggaccttttttacaacatagccacgaggagaaaagctttaaaaaatccaagtgaagaatatgggaaaattttggaagttgttggcaggtattcagtacacaatgcaggcattagtttctcagttaaaaaacaaggagagacagtagctgatgttaggacactacccaatgcctcaaccgtggacaatattcgctccatctttggaaatgctgttagtcgagaactgatagaaattggatgtgaggataaaaccctagccttcaaaatgaatggttacatatccaatgcaaactactcagtgaagaagtgcatcttcttactcttcatcaaccatcgtctggtagaatcaacttccttgagaaaagccatagaaacagtgtatgcagcctatttgcccaaaaacacacacccattcctgtacctcagtttagaaatcagtccccagaatgtggatgttaatgtgcaccccacaaagcatgaagttcacttcctgcacgaggagagcatcctggagcgggtgcagcagcacatcgagagcaagctcctgggctccaattcctccaggatgtacttcacccagactttgctaccaggacttgctggcccctctggggagatggttaaatccacaacaagtctgacctcgtcttctacttctggaagtagtgataaggtctatgcccaccagatggttcgtacagattcccgggaacagaagcttgatgcatttctgcagcctctgagcaaacccctgtccagtcagccccaggccattgtcacagaggataagacagatatttctagtggcagggctaggcagcaagatgaggagatgcttgaactcccagcccctgctgaagtggctgccaaaaatcagagcttggagggggatacaacaaaggggacttcagaaatgtcagagaagagaggacctacttccagcaaccccagaaagagacatcgggaagattctgatgtggaaatggtggaagatgattcccgaaaggaaatgactgcagcttgtaccccccggagaaggatcattaacctcactagtgttttgagtctccaggaagaaattaatgagcagggacatgaggttctccgggagatgttgcataaccactccttcgtgggctgtgtgaatcctcagtgggccttggcacagcatcaaaccaagttataccttctcaacaccaccaagcttagtgaagaactgttctaccagatactcatttatgattttgccaattttggtgttctcaggttatcggagccagcaccgctctttgaccttgccatgcttgccttagatagtccagagagtggctggacagaggaagatggtcccaaagaaggacttgctgaatacattgttgagtttctgaagaagaaggctgagatgcttgcagactatttctctttggaaattgatgaggaagggaacctgattggattaccccttctgattgacaactatgtgccccctttggagggactgcctatcttcattcttcgactagccactgaggtgaattgggacgaagaaaaggaatgttttgaaagcctcagtaaagaatgcgctatgttctattccatccggaagcagtacatatctgaggagtcgaccctctcaggccagcagagtgaagtgcctggctccattccaaactcctggaagtggactgtggaacacattgtctataaagccttgcgctcacacattctgcctcctaaacatttcacagaagatggaaatatcctgcagcttgctaacctgcctgatctatacaaagtctttgagaggtgttaaatatggttatttatgcactgtgggatgtgttcttctttctctgtattccgatacaaagtgttgtatcaaagtgtgatatacaaagtgtaccaacataagtgttggtagcacttaagacttatacttgccttctgatagtattcctttatacacagtggattgattataaataaatagatgtgtcttaacat

SEQ ID NO: 65312 - DNA, 2366 bp, Artificial Sequence
  derived and/or modified sequence
acaacggcggaggccgccgggttccctgacgtgccagtcaggccttctccttttccgcagaccgtgtgtttctttaccgctctcccccgagaccttttaagggttgtttggagttttagatgcaaaatccacaagtattcaagtgattgttaaagagggaggcctgaagttgattcagatccaagacaatggcaccgggatcaggaaagaagatctggatattgtatgtgaaaggttcactactagtaaactgcagtcctttgaggatttagccagtatttctacctatggctttcgaggtgaggctttggccagcataagccatgtggctcatgttactattacaacgaaaacagctgatggaaagtgtgcatacagagcaagttactcagatggaaaactgaaagcccctcctaaaccatgtgctggcaatcaagggacccagatcacggtattcagtacacaatgcaggcattagtttctcagttaaaaaacaaggagagacagtagctgatgttaggacactacccaatgcctcaaccgtggacaatattcgctccatctttggaaatgctgttagtcgagaactgatagaaattggatgtgaggataaaaccctagccttcaaaatgaatggttacatatccaatgcaaactactcagtgaagaagtgcatcttcttactcttcatcaaccatcgtctggtagaatcaacttccttgagaaaagccatagaaacagtgtatgcagcctatttgcccaaaaacacacacccattcctgtacctcagtttagaaatcagtccccagaatgtggatgttaatgtgcaccccacaaagcatgaagttcacttcctgcacgaggagagcatcctggagcgggtgcagcagcacatcgagagcaagctcctgggctccaattcctccaggatgtacttcacccagactttgctaccaggacttgctggcccctctggggagatggttaaatccacaacaagtctgacctcgtcttctacttctggaagtagtgataaggtctatgcccaccagatggttcgtacagattcccgggaacagaagcttgatgcatttctgcagcctctgagcaaacccctgtccagtcagccccaggccattgtcacagaggataagacagatatttctagtggcagggctaggcagcaagatgaggagatgcttgaactcccagcccctgctgaagtggctgccaaaaatcagagcttggagggggatacaacaaaggggacttcagaaatgtcagagaagagaggacctacttccagcaaccccagaaagagacatcgggaagattctgatgtggaaatggtggaagatgattcccgaaaggaaatgactgcagcttgtaccccccggagaaggatcattaacctcactagtgttttgagtctccaggaagaaattaatgagcagggacatgaggttctccgggagatgttgcataaccactccttcgtgggctgtgtgaatcctcagtgggccttggcacagcatcaaaccaagttataccttctcaacaccaccaagcttagtgaagaactgttctaccagatactcatttatgattttgccaattttggtgttctcaggttatcggagccagcaccgctctttgaccttgccatgcttgccttagatagtccagagagtggctggacagaggaagatggtcccaaagaaggacttgctgaatacattgttgagtttctgaagaagaaggctgagatgcttgcagactatttctctttggaaattgatgaggaagggaacctgattggattaccccttctgattgacaactatgtgccccctttggagggactgcctatcttcattcttcgactagccactgaggtgaattgggacgaagaaaaggaatgttttgaaagcctcagtaaagaatgcgctatgttctattccatccggaagcagtacatatctgaggagtcgaccctctcaggccagcagagtgaagtgcctggctccattccaaactcctggaagtggactgtggaacacattgtctataaagccttgcgctcacacattctgcctcctaaacatttcacagaagatggaaatatcctgcagcttgctaacctgcctgatctatacaaagtctttgagaggtgttaaatatggttatttatgcactgtgggatgtgttcttctttctctgtattccgatacaaagtgttgtatcaaagtgtgatatacaaagtgtaccaacataagtgttggtagcacttaagacttatacttgccttctgatagtattcctttatacacagtggattgattataaataaatagatgtgtcttaac

SEQ ID NO: 65313 - DNA, 1977 bp, Artificial Sequence
  derived and/or modified sequence
atggcctttgaagcgttagcatcaatcagtcacgttgcccacgtgacgatcacaacaaagacagctgacggtaaatgcgcctatcgggcaagctattctgatgggaagttgaaggcgcctcctaagccgtgtgccggaaaccagggcacccagattacagtcgaagatttgttctataatatagctaccagacggaaggcactgaagaacccatctgaggaatacggaaagatcctggaggtggtgggacgctacagtgtacataacgctgggatttccttcagcgttaaaaagcagggggagacggtcgcagacgtcaggactctgcccaatgcaagtacagtggataatataagaagcatcttcggcaacgcagtgagcagggagctgatcgaaattgggtgcgaagataaaactcttgcatttaagatgaatgggtacatcagcaatgctaactactcagtgaagaagtgcattttccttctcttcattaatcatcgcttggtagagtccacctctctgaggaaagctatcgaaacagtatacgcggcatacctgcccaaaaacacacacccgttcttgtatttaagtctggaaataagtcctcagaacgtggacgttaacgtccatcctacgaaacacgaagtgcatttcttacacgaggagtcaatcctggagcgcgtccagcagcacatcgaatccaaactgctgggatcgaatagcagcagaatgtactttacacaaacactgttacctggactagccggaccctcgggagagatggtcaagtctactacctcgctgacatctagctccacttctggaagtagcgacaaagtctacgcacatcaaatggtccgaacagattcccgcgaacagaaactggatgccttcctccagcccctgtccaaacccctttcctcacagccccaagctattgtcaccgaggacaagacagacatctcgtcaggccgagcacgccagcaggacgaggagatgttggagctgcccgcaccggctgaggttgcagctaagaaccagagcctcgagggtgatacgactaaggggacttctgagatgtctgagaaaagggggcctacctcaagcaacccgaggaaacgccacagggaagactccgacgtggaaatggtggaggacgatagcagaaaggagatgacagcagcctgtacccccaggcgtaggattataaacctcacatcagtgctgtccctacaggaagaaatcaatgagcagggccatgaggtcctgcgggagatgctccataatcatagcttcgtggggtgcgtgaatccccagtgggccttggcccagcaccagacaaagctgtacctgctgaacactacaaagctgtctgaggagttattctatcaaattcttatctatgacttcgctaactttggtgtgttacgacttagtgagccggctccactgtttgatttggctatgctggcgttggattcacccgaatccgggtggaccgaagaagatggaccaaaagaagggttagcggagtacatcgtcgagttccttaaaaaaaaggctgagatgctcgctgattatttttccctagaaatagatgaagaggggaatttgattgggctcccgctactgatagacaactacgtgcccccactggaggggctgcccatcttcatcctacggctagccacagaggtgaactgggatgaggaaaaggaatgttttgaatcactaagcaaggagtgtgcaatgttctatagtattcgcaaacaatacattagcgaggagagtaccctgtctggccagcagtctgaagttcccggatccatacctaactcctggaaatggacggtggaacatatagtttacaaggcactgcgctcccacatactgcccccaaagcacttcactgaggatgggaatatcctgcagctcgcaaacctacctgacctatacaaggtgttcgagagatgctag

SEQ ID NO: 65314 - protein, 411 aa, Artificial Sequence
  derived and/or modified sequence
MAAPRPPPARLSGVMVPAPIQDLEALRALTALFKEQRNRNLDTIGVAVDLILLFRELRVEQESLLTAFRCGLQFLGNIASRNEDSQSIVWVHAFPELFLSCLNHPDKKIVAYSSMILFTSLNHERMKELEENLNIAIDVIDAYQKHPESEWPFLIITDLFLKSPELVQAMFPKLNNQERVTLLDLMIAKITSDEPLTKDDIPVFLRHAELIASTFVDQCKTVLKLASEEPPDDEEALATIRLLDVLCEMTVNTELLGYLQVFPGLLERVIDLLRVIHVAGKETTNIFSNCGCVRAEGDISNVANGFKSHLIRLIGNLCYKNKDNQDKVNELDGIPLILDNCNISDSNPFLTQWVIYAIRNLTEDNSQNQDLIAKMEEQGLADASLLKKVGFEVEKKGEKLILKSTRDTPKP

SEQ ID NO: 65315 - DNA, 1236 bp, Artificial Sequence
  derived and/or modified sequence
atggccgcccccaggccacccccagctagactgtccggtgtgatggttcccgctccaattcaggacctggaggccctgagagctttgaccgcgctatttaaggaacagcgtaaccgaaatttagacacaataggcgtggcggtggatctgatcttacttttcagggaactgagagtcgagcaagaaagcctgctcactgctttccggtgcgggttgcagtttctgggcaatatagcttccaggaatgaggattcccaatctatcgtgtgggtgcacgctttccctgagctctttctcagctgcctgaaccatcctgataagaagattgttgcttattcctccatgattcttttcacgagtctcaaccatgaaagaatgaaggaactagaggagaacctcaatattgccatcgatgtgattgacgcataccaaaaacatcctgagagtgaatggccttttctgattattaccgatcttttcctgaagtcaccggaattagtgcaggctatgttcccgaaactgaacaatcaagaacgcgtgacattattggatctgatgattgcaaagatcaccagcgacgagcctctcaccaaggatgacatccccgtgttcctgcggcatgccgagctgattgcttccacatttgtcgatcagtgcaagactgtgctcaaactagctagcgaggaacctcctgacgatgaggaagcattagccaccatacgtcttctcgatgtcctgtgcgagatgaccgttaacaccgagctgctgggctacttgcaggtgtttccaggcctactcgagagggtgatcgatcttctcagggtgatccatgttgcaggcaaggagaccacaaacatattttcaaactgtggttgtgtccgggccgaaggggacatctccaatgtggcaaatggattcaagtctcacctgattagattaatcggcaatctgtgctacaaaaacaaggacaaccaggataaggtcaacgaactcgacgggatcccactaatcctcgacaactgcaatatttctgacagcaacccattcctaacccagtgggtgatatacgctattagaaacttaactgaagacaacagtcaaaatcaggatttgatcgcgaagatggaggaacaaggtctcgcagacgcttcgctgctgaaaaaagtgggttttgaagttgaaaaaaagggcgaaaagttgattctgaaatccacgagggacacccccaaaccctag

SEQ ID NO: 65316 - DNA, 1236 bp, Artificial Sequence
  derived and/or modified sequence
atggccgccccccggcccccaccagcccggctgagcggcgtgatggtgcctgcccccatccaggacctggaggccctgcgggccctgacagccctcttcaaggagcagaggaacagaaacctggacaccatcggcgtggccgtggacctgatcctgctcttccgggagctgcgggtggagcaggagagcctgctgacagccttccgctgtggcctgcagttcctgggcaacatcgccagcagaaatgaagacagccagagcatcgtgtgggtgcacgccttccctgagctgttcctgagctgcctgaaccacccagacaagaagatcgtggcctacagctccatgatcctcttcaccagcctgaaccacgagaggatgaaggagctggaggagaacctgaacatcgccattgatgtgattgatgcctaccagaagcaccctgagagcgagtggcccttcctgatcatcacagacctcttcctgaagagccctgagctggtgcaggccatgttccccaagctgaacaaccaggagcgggtgaccctgctggacctgatgattgccaagatcaccagtgatgagcccctgaccaaggatgacatccctgtgttcctgcggcatgctgagctgattgccagcacctttgtggaccagtgcaagacagtgctgaagctggccagcgaggagcccccagatgatgaggaggccctggccaccatccggctgctggatgtgctgtgtgagatgacagtgaacacagagctgctgggctacctgcaggtgtttcctggcctgctggagagggtcatcgacctgctgcgggtcatccacgtggccggcaaggagaccaccaacatcttcagcaactgtggctgtgtgcgggcagagggggacatcagcaatgtggccaacggcttcaagagccacctgatccgcctcatcggcaacctgtgctacaagaacaaggacaaccaggacaaggtgaatgagctggatggcatccccctcatcctggacaactgcaacatcagtgacagcaaccccttcctgacccagtgggtgatctatgccatccggaacctgacagaggacaacagccagaaccaggacctgattgccaagatggaggagcagggcctggctgatgccagcctgctgaagaaggtgggctttgaggtggagaagaagggggagaagctgatcctgaagagcacccgggacacccccaagccctag

SEQ ID NO: 65317 - DNA, 1236 bp, Artificial Sequence
  derived and/or modified sequence
atggccgccccccggcccccccccgcccggctgagcggcgtgatggtgcccgcgcccatccaggacctcgaagcgttgagagcgctgacagcactgtttaaggagcagcgcaatcggaaccttgacacaattggagtcgcagtcgatttaatcctattgttccgggagctgcgagtcgaacaggaatcattactgacagcattcagatgcggtctgcagttcttgggtaacatcgccagtcgcaacgaggatagccagtctattgtctgggttcacgctttcccggaactgttcctgtcctgcctgaaccaccctgataagaaaatcgtcgcgtatagctccatgatcctcttcacctctctgaaccacgaaagaatgaaggaactggaagagaacctgaacattgctatcgatgtcattgatgcctaccagaaacaccctgagtctgaatggcctttcttgattattacagacctctttctaaagagtcctgagttagtgcaggcaatgtttcccaaattgaataaccaggaacgggtgactctcctggacttaatgattgcaaaaatcacgtcggatgagccacttactaaggacgatattcccgtatttcttcggcatgccgaattaatcgcgagcacctttgtcgatcagtgtaagacggtactgaagctggcctctgaggaacccccagatgacgaggaagccttagcgaccatccgactgctcgatgttctttgtgagatgactgttaataccgagttgttaggttatttgcaggtgttcccagggctgttagaaagggtgattgatctactacgggtgatccacgtcgcaggtaaagagaccaccaacatcttcagcaactgcgggtgcgttcgggcggagggcgacatctctaacgtcgccaacgggtttaagtcccatttgattcgtttgattggcaatctctgctacaagaacaaagataatcaagacaaagtgaacgaactcgatgggatcccgctcatcctggacaattgcaatatcagtgatagtaacccattcctgacgcagtgggtgatatacgccatcagaaatctgacggaggataactcccagaaccaagatcttatcgctaagatggaggaacaggggctggcagatgcgtcacttctgaaaaaggtcggtttcgaagtggaaaaaaagggagaaaaactgattcttaagagtactcgagacactccgaagccctag

SEQ ID NO: 65318 - DNA, 1236 bp, Artificial Sequence
  derived and/or modified sequence
atggccgctccccgacctcccccagccaggctttctggggttatggtgcccgcacctatccaggatctggaggccctccgggcacttacagccctcttcaaggagcagcgcaacagaaatctggatacaatcggggtggcggtagacctcattctgctttttcgggagctgcgagtggagcaggagagccttttgaccgcattcaggtgtggcctgcaatttctcggaaacatcgcctctcgaaacgaagactcccagagtattgtttgggtgcacgcttttcccgagctcttcctgtcatgtttaaatcaccctgataaaaaaatagtggcctatagtagcatgatcctgtttacttctcttaaccatgagaggatgaaagagttggaggagaatttaaatattgccatcgacgtaatcgacgcataccagaaacatccagaaagtgagtggccgttccttattatcactgacctgttcctcaagtcacctgagctggtccaggccatgttccctaagcttaacaatcaagaaagagtgacattacttgatttaatgattgcaaagatcacatccgacgagccgctgaccaaggatgacataccggtgttcttgcgtcacgcagagctgattgcatcaacttttgtcgatcagtgtaaaacagttctgaagcttgcatctgaggaaccacccgacgacgaagaggccttggccaccatccgactcctagatgtgctgtgcgagatgacagtcaataccgaattattaggctatctacaggtatttcccggattgctggaaagggtgattgacttgttgagggtgattcacgtggcaggcaaagagaccacaaatatcttcagtaattgcggttgtgtgcgggctgagggcgatatttctaacgtcgccaacgggttcaagtcacatctgataaggttgataggcaacctgtgctacaaaaacaaagacaatcaagataaagtgaatgagcttgatgggatcccattaatcctggataattgcaacatatccgactctaatccctttcttacgcagtgggtaatttacgctatccgcaatttgactgaagataattcccagaaccaggatcttattgctaagatggaagaacagggcctcgccgacgcctctctactgaagaaagtgggtttcgaggtggagaagaagggggaaaaactgatcctgaagagtacacgggacactcccaagccatag

SEQ ID NO: 65319 - DNA, 3135 bp, Artificial Sequence
  derived and/or modified sequence
aggcgggacttccgccggcgccccctcccccgcggcgccgtctcctcctcccgcctgaggcgagtctgggctcagcctagagctctccggcggcggcgcagcttcagggcagcgcgggctgcagcggcggcggcggttagggctgtgtagggcgaggcctcccccttcctcctcgccatcctactcctccctcctcgtcatcctcccccttcgtcctcctcgccttcctcctcctcgtcaggctcgacccagctgtgagcggcaagatggcggcgcccaggccgccgcctgccaggctgtcgggcgtcatggtgccggcgcccatccaagacctggaggccctgcgcgcgctcacggcgctcttcaaagagcagcggaaccggaacttggatacgattggtgttgctgttgatttgattcttctgtttcgtgaactgcgagtggaacaggaatctctgttgacagcttttcgctgtggcctgcagtttttaggcaacattgcctcacggaatgaagattcccagtctattgtttgggtgcatgctttcccagaactgtttttgtcttgcttaaatcatccggacaaaaaaattgttgcctactcttcaatgattttgtttacatcccttaatcatgaaagaatgaaagaactggaggagaacctcaatattgcaattgatgtcatagatgcttaccaaaaacatcctgaatcagaatggccgttcttgattattacagacctctttctgaaaagcccggaattggtacaagccatgtttcccaaactgaacaatcaagaaagagttacactgttagaccttatgatagccaagataacgagtgatgagccactcaccaaggatgacatccctgtgtttttgcggcatgctgagttgattgcaagcacctttgtggatcagtgcaagactgtgctcaagctggcctctgaggagcctcctgatgatgaggaggcactggctacaattaggcttctcgacgtcctgtgcgaaatgactgtgaatactgagctgctcggctatctgcaggttttccctggcttgctggaaagagtgattgatcttttgcgggtgattcatgtagctggaaaagaaaccacaaacatcttcagtaattgtggttgcgtgagagcagaaggtgacatctccaatgtggccaatgggtttaagtctcatctcattcgtctgattggaaatctgtgttacaagaataaagataaccaagacaaggtaaatgagctggatggtatcccgttgatcctggacaactgcaacatcagtgacagtaacccctttctgacccagtgggtgatatatgccatccgaaaccttaccgaagacaacagccaaaaccaagatttgattgcaaagatggaggaacaggggctggcagatgcatccctacttaaaaaagtgggttttgaagttgaaaagaaaggcgaaaagctgatcctgaaatctactagagacacccctaagccatgaatgaactacatccaaatacctgaatttttggaatctgtttcatggatttttcatcttctaccgtatgtgaaattgcaagtgtttgaagatttataagtacaaatttgggaacatacaaatcttttaggtagtagagtttaacgtgtataagctaaaagtgaaagtaactgagtgttctcttgtttctttgcattaatgtaactgtgtggtttgcctttgtccccctggatagaacgtgcatttaaagaatatattgtacttactgtgacagcagataataaaccagtctcttggagggcacaacccttatttgacaaaacttggatgttggcttgactgtgtttgtcccttcagatggcaagtcagcatcattctttatattcctcttctcattgggttttctgaactctggcaggcggttgaagtagtttctcactgtgattaattctagcaatctcttttcacccctctgcctttccaaaacattgacaagactcatttccagttaattaattcgagaaccctccctcttcattttgggtactgggctgtcttgtcactgagccctatccctttggaatgtggcagggagtgaggttggtgagagaacatgtgggcacttaactcttcatgttccagttcatcccagaagtagacatcccaggacccattctgtgtcaaggtgaatgcctgtgtcctccccagcttcatgcctctgtcatgggggaaggaatagcttatgttctgctctggtgcagtgccgtagattaaaggtacatttctatcttctttgatttaaaaagcaccagtctcataaaggtgccactcagttttagccatgtcttcactgaaattgcaaaagtacttttagggagcaggagtttatttgacatctagttatctgtctgtctgttcatctatctatctgtctgctgtatgagaggtaggactggattaaatgaccactgaactcactgaatccagatcattcatatcatcaacaaaagctctagggggaggtcacgttgtgaatgcttaaaacatattattttcttcaacaaccatatcgctaaactaatatatccagagattttgcacaattcgtgttgaaccttccaaaacaaaaataaagacctgtccaaaagttttgacaaaaatactgattgctcccaaataaagtgcttctaagctttgtgtagacatagtttaactgatttgtaaaaatagcttaagcatgttgagaatgaagtaaaagttttcccatgtgctgtctaatgtactctgtgtaactctgaagacacatcagcttctaggattgcagcaatctatgaataacattttttctctcatttatgactttccatcagtaaagaagccattgcagaatttaaaattacacaaaggagtcattctctcctgggacataaagagttaaagctctgtcctctaaatagaagcctggccaaagggagaaaacagtgggagtcccttttcccttttaacaagtttgcaatagacacttctttttttcctgtctcaatggatgtgtgcacaccagtggaatcgcacaaacttgtcggtatgagctatataataacaaacacaaataaataaaagggagccttgtgagaat

SEQ ID NO: 65320 - DNA, 1236 bp, Artificial Sequence
  derived and/or modified sequence
atggccgcccccagacccccccccgccagactgagcggcgtgatggtgcccgcccccatccaggacctggaggccctgagagccctgaccgccctgttcaaggagcagagaaacagaaacctggacaccatcggcgtggccgtggacctgatcctgctgttcagagagctgagagtggagcaggagagcctgctgaccgccttcagatgcggcctgcagttcctgggcaacatcgccagcagaaacgaggacagccagagcatcgtgtgggtgcacgccttccccgagctgttcctgagctgcctgaaccaccccgacaagaagatcgtggcctacagcagcatgatcctgttcaccagcctgaaccacgagagaatgaaggagctggaggagaacctgaacatcgccatcgacgtgatcgacgcctaccagaagcaccccgagagcgagtggcccttcctgatcatcaccgacctgttcctgaagagccccgagctggtgcaggccatgttccccaagctgaacaaccaggagagagtgaccctgctggacctgatgatcgccaagatcaccagcgacgagcccctgaccaaggacgacatccccgtgttcctgagacacgccgagctgatcgccagcaccttcgtggaccagtgcaagaccgtgctgaagctggccagcgaggagccccccgacgacgaggaggccctggccaccatcagactgctggacgtgctgtgcgagatgaccgtgaacaccgagctgctgggctacctgcaggtgttccccggcctgctggagagagtgatcgacctgctgagagtgatccacgtggccggcaaggagaccaccaacatcttcagcaactgcggctgcgtgagagccgagggcgacatcagcaacgtggccaacggcttcaagagccacctgatcagactgatcggcaacctgtgctacaagaacaaggacaaccaggacaaggtgaacgagctggacggcatccccctgatcctggacaactgcaacatcagcgacagcaaccccttcctgacccagtgggtgatctacgccatcagaaacctgaccgaggacaacagccagaaccaggacctgatcgccaagatggaggagcagggcctggccgacgccagcctgctgaagaaggtgggcttcgaggtggagaagaagggcgagaagctgatcctgaagagcaccagagacacccccaagccctag

SEQ ID NO: 65321 - protein, 2138 aa, Artificial Sequence
  derived and/or modified sequence
MVNENTRMYIPEENHQGSNYGSPRPAHANMNANAAAGLAPEHIPTPGAALSWQAAIDAARQAKLMGSAGNATISTVSSTQRKRQQYGKPKKQGSTTATRPPRALLCLTLKNPIRRACISIVEWKPFEIIILLTIFANCVALAIYIPFPEDDSNATNSNLERVEYLFLIIFTVEAFLKVIAYGLLFHPNAYLRNGWNLLDFIIVVVGLFSAILEQATKADGANALGGKGAGFDVKALRAFRVLRPLRLVSGVPSLQVVLNSIIKAMVPLLHIALLVLFVIIIYAIIGLELFMGKMHKTCYNQEGIADVPAEDDPSPCALETGHGRQCQNGTVCKPGWDGPKHGITNFDNFAFAMLTVFQCITMEGWTDVLYWMQDAMGYELPWVYFVSLVIFGSFFVLNLVLGVLSGEFSKEREKAKARGDFQKLREKQQLEEDLKGYLDWITQAEDIDPENEDEGMDEEKPRNMSMPTSETESVNTENVAGGDIEGENCGARLAHRISKSKFSRYWRRWNRFCRRKCRAAVKSNVFYWLVIFLVFLNTLTIASEHYNQPNWLTEVQDTANKALLALFTAEMLLKMYSLGLQAYFVSLFNRFDCFVVCGGILETILVETKIMSPLGISVLRCVRLLRIFKITRYWNSLSNLVASLLNSVRSIASLLLLLFLFIIIFSLLGMQLFGGKFNFDEMQTRRSTFDNFPQSLLTVFQILTGEDWNSVMYDGIMAYGGPSFPGMLVCIYFIILFICGNYILLNVFLAIAVDNLADAESLTSAQKEEEEEKERKKLARTASPEKKQELVEKPAVGESKEEKIELKSITADGESPPATKINMDDLQPNENEDKSPYPNPETTGEEDEEEPEMPVGPRPRPLSELHLKEKAVPMPEASAFFIFSSNNRFRLQCHRIVNDTIFTNLILFFILLSSISLAAEDPVQHTSFRNHILFYFDIVFTTIFTIEIALKMTAYGAFLHKGSFCRNYFNILDLLVVSVSLISFGIQSSAINVVKILRVLRVLRPLRAINRAKGLKHVVQCVFVAIRTIGNIVIVTTLLQFMFACIGVQLFKGKLYTCSDSSKQTEAECKGNYITYKDGEVDHPIIQPRSWENSKFDFDNVLAAMMALFTVSTFEGWPELLYRSIDSHTEDKGPIYNYRVEISIFFIIYIIIIAFFMMNIFVGFVIVTFQEQGEQEYKNCELDKNQRQCVEYALKARPLRRYIPKNQHQYKVWYVVNSTYFEYLMFVLILLNTICLAMQHYGQSCLFKIAMNILNMLFTGLFTVEMILKLIAFKPKGYFSDPWNVFDFLIVIGSIIDVILSETNPAEHTQCSPSMNAEENSRISITFFRLFRVMRLVKLLSRGEGIRTLLWTFIKSFQALPYVALLIVMLFFIYAVIGMQVFGKIALNDTTEINRNNNFQTFPQAVLLLFRCATGEAWQDIMLACMPGKKCAPESEPSNSTEGETPCGSSFAVFYFISFYMLCAFLIINLFVAVIMDNFDYLTRDWSILGPHHLDEFKRIWAEYDPEAKGRIKHLDVVTLLRRIQPPLGFGKLCPHRVACKRLVSMNMPLNSDGTVMFNATLFALVRTALRIKTEGNLEQANEELRAIIKKIWKRTSMKLLDQVVPPAGDDEVTVGKFYATFLIQEYFRKFKKRKEQGLVGKPSQRNALSLQAGLRTLHDIGPEIRRAISGDLTAEEELDKAMKEAVSAASEDDIFRRAGGLFGNHVSYYQSDGRSAFPQTFTTQRPLHINKAGSSQGDTESPSHEKLVDSTFTPSSYSSTGSNANINNANNTALGRLPRPAGYPSTVSTVEGHGPPLSPAIRVQEVAWKLSSNRCHSRESQAAMAGQEETSQDETYEVKMNHDTEACSEPSLLSTEMLSYQDDENRQLTLPEEDKRDIRQSPKRGFLRSASLGRRASFHLECLKRQKDRGGDISQKTVLPLHLVHHQALAVAGLSPLLQRSHSPASFPRPFATPPATPGSRGWPPQPVPTLRLEGVESSEKLNSSFPSIHCGSWAETTPGGGGSSAARRVRPVSLMVPSQAGAPGRQFHGSASSLVEAVLISEGLGQFAQDPKFIEVTTQELADACDMTIEEMESAADNILSGGAPQSPNGALLPFVNCRDAGQDRAGGEEDAGCVRARGRPSEEELQDSRVYVSSL

SEQ ID NO: 65322 - DNA, 13480 bp, Artificial Sequence
  derived and/or modified sequence
ttattttttcaaatggtgtagccgccggaggtgcggtgctcagttcttggaaggggcccggatgtactgaggatgcgttacagtttcactcgaggaggcagtagtggaaaggagcagtttttggggtttgatgccataatgggaatcaggtaatcgtcggcggggaagaagaaacgctgcagaccacggcttcctcgaatcttgcgcgaaagccgccggcctcggaggagggattaatccagacccgccggggggtgttttcacatttcttcctcttcgtggctgctcctcctattaaaaccatttttggtccatggtcaatgagaatacgaggatgtacattccagaggaaaaccaccaaggttccaactatgggagcccacgccccgcccatgccaacatgaatgccaatgcggcagcggggctggcccctgagcacatccccaccccgggggctgccctgtcgtggcaggcggccatcgacgcagcccggcaggctaagctgatgggcagcgctggcaatgcgaccatctccacagtcagctccacgcagcggaagcggcagcaatatgggaaacccaagaagcagggcagcaccacggccacacgcccgccccgagccctgctctgcctgaccctgaagaaccccatccggagggcctgcatcagcattgtcgaatggaaaccatttgaaataattattttactgactatttttgccaattgtgtggccttagcgatctatattccctttccagaagatgattccaacgccaccaattccaacctggaacgagtggaatatctctttctcataatttttacggtggaagcgtttttaaaagtaatcgcctatggactcctctttcaccccaatgcctacctccgcaacggctggaacctactagattttataattgtggttgtggggctttttagtgcaattttagaacaagcaaccaaagcagatggggcaaacgctctcggagggaaaggggccggatttgatgtgaaggcgctgagggccttccgcgtgctgcgccccctgcggctggtgtccggagtcccaagtctccaggtggtcctgaattccatcatcaaggccatggtccccctgctgcacatcgccctgcttgtgctgtttgtcatcatcatctacgccatcatcggcttggagctcttcatggggaagatgcacaagacctgctacaaccaggagggcatagcagatgttccagcagaagatgacccttccccttgtgcgctggaaacgggccacgggcggcagtgccagaacggcacggtgtgcaagcccggctgggatggtcccaagcacggcatcaccaactttgacaactttgccttcgccatgctcacggtgttccagtgcatcaccatggagggctggacggacgtgctgtactggatgcaggacgctatgggctatgagttaccctgggtgtattttgtcagtctggtcatctttggatcctttttcgttctaaatctggttctcggtgtgttgagcggagagttttccaaagagagggagaaggccaaggcccggggagatttccagaagctgcgggagaagcagcagctagaagaggatctcaaaggctacctggattggatcactcaggccgaagacatcgatcctgagaatgaggacgaaggcatggatgaggagaagccccgaaacatgagcatgcccaccagtgagaccgagtccgtcaacaccgaaaacgtggctggaggtgacatcgagggagaaaactgcggggccaggctggcccaccggatctccaagtcaaagttcagccgctactggcgccggtggaatcggttctgcagaaggaagtgccgcgccgcagtcaagtctaatgtcttctactggctggtgattttcctggtgttcctcaacacgctcaccattgcctctgagcactacaaccagcccaactggctcacagaagtccaagacacggcaaacaaggccctgctggccctgttcacggcagagatgctcctgaagatgtacagcctgggcctgcaggcctacttcgtgtccctcttcaaccgctttgactgcttcgtcgtgtgtggcggcatcctggagaccatcctggtggagaccaagatcatgtccccactgggcatctccgtgctcagatgcgtccggctgctgaggattttcaagatcacgaggtactggaactccttgagcaacctggtggcatccttgctgaactctgtgcgctccatcgcctccctgctccttctcctcttcctcttcatcatcatcttctccctcctggggatgcagctctttggaggaaagttcaactttgatgagatgcagacccggaggagcacattcgataacttcccccagtccctcctcactgtgtttcagatcctgaccggggaggactggaattcggtgatgtatgatgggatcatggcttatggcggcccctcttttccagggatgttagtctgtatttacttcatcatcctcttcatctgtggaaactatatcctactgaatgtgttcttggccattgctgtggacaacctggctgatgctgagagcctcacatctgcccaaaaggaggaggaagaggagaaggagagaaagaagctggccaggactgccagcccagagaagaaacaagagttggtggagaagccggcagtgggggaatccaaggaggagaagattgagctgaaatccatcacggctgacggagagtctccacccgccaccaagatcaacatggatgacctccagcccaatgaaaatgaggataagagcccctaccccaacccagaaactacaggagaagaggatgaggaggagccagagatgcctgtcggccctcgcccacgaccactctctgagcttcaccttaaggaaaaggcagtgcccatgccagaagccagcgcgtttttcatcttcagctctaacaacaggtttcgcctccagtgccaccgcattgtcaatgacacgatcttcaccaacctgatcctcttcttcattctgctcagcagcatttccctggctgctgaggacccggtccagcacacctccttcaggaaccatattctgttttattttgatattgtttttaccaccattttcaccattgaaattgctctgaagatgactgcttatggggctttcttgcacaagggttctttctgccggaactacttcaacatcctggacctgctggtggtcagcgtgtccctcatctcctttggcatccagtccagtgcaatcaatgtcgtgaagatcttgcgagtcctgcgagtactcaggcccctgagggccatcaacagggccaaggggctaaagcatgtggttcagtgtgtgtttgtcgccatccggaccatcgggaacatcgtgattgtcaccaccctgctgcagttcatgtttgcctgcatcggggtccagctcttcaagggaaagctgtacacctgttcagacagttccaagcagacagaggcggaatgcaagggcaactacatcacgtacaaagacggggaggttgaccaccccatcatccaaccccgcagctgggagaacagcaagtttgactttgacaatgttctggcagccatgatggccctcttcaccgtctccaccttcgaagggtggccagagctgctgtaccgctccatcgactcccacacggaagacaagggccccatctacaactaccgtgtggagatctccatcttcttcatcatctacatcatcatcatcgccttcttcatgatgaacatcttcgtgggcttcgtcatcgtcacctttcaggagcagggggagcaggagtacaagaactgtgagctggacaagaaccagcgacagtgcgtggaatacgccctcaaggcccggcccctgcggaggtacatccccaagaaccagcaccagtacaaagtgtggtacgtggtcaactccacctacttcgagtacctgatgttcgtcctcatcctgctcaacaccatctgcctggccatgcagcactacggccagagctgcctgttcaaaatcgccatgaacatcctcaacatgctcttcactggcctcttcaccgtggagatgatcctgaagctcattgccttcaaacccaagggttactttagtgatccctggaatgtttttgacttcctcatcgtaattggcagcataattgacgtcattctcagtgagactaatccagctgaacatacccaatgctctccctctatgaacgcagaggaaaactcccgcatctccatcaccttcttccgcctgttccgggtcatgcgtctggtgaagctgctgagccgtggggagggcatccggacgctgctgtggaccttcatcaagtccttccaggccctgccctatgtggccctcctgatcgtgatgctgttcttcatctacgcggtgatcgggatgcaggtgtttgggaaaattgccctgaatgataccacagagatcaaccggaacaacaactttcagaccttcccccaggccgtgctgctcctcttcaggtgtgccaccggggaggcctggcaggacatcatgctggcctgcatgccaggcaagaagtgtgccccagagtccgagcccagcaacagcacggagggtgaaacaccctgtggtagcagctttgctgtcttctacttcatcagcttctacatgctctgtgccttcctgatcatcaacctctttgtagctgtcatcatggacaactttgactacctgacaagggactggtccatccttggtccccaccacctggatgagtttaaaagaatctgggcagagtatgaccctgaagccaagggtcgtatcaaacacctggatgtggtgaccctcctccggcggattcagccgccactaggttttgggaagctgtgccctcaccgcgtggcttgcaaacgcctggtctccatgaacatgcctctgaacagcgacgggacagtcatgttcaatgccaccctgtttgccctggtcaggacggccctgaggatcaaaacagaagggaacctagaacaagccaatgaggagctgcgggcgatcatcaagaagatctggaagcggaccagcatgaagctgctggaccaggtggtgccccctgcaggtgatgatgaggtcaccgttggcaagttctacgccacgttcctgatccaggagtacttccggaagttcaagaagcgcaaagagcagggccttgtgggcaagccctcccagaggaacgcgctgtctctgcaggctggcttgcgcacactgcatgacatcgggcctgagatccgacgggccatctctggagatctcaccgctgaggaggagctggacaaggccatgaaggaggctgtgtccgctgcttctgaagatgacatcttcaggagggccggtggcctgttcggcaaccacgtcagctactaccaaagcgacggccggagcgccttcccccagaccttcaccactcagcgcccgctgcacatcaacaaggcgggcagcagccagggcgacactgagtcgccatcccacgagaagctggtggactccaccttcaccccgagcagctactcgtccaccggctccaacgccaacatcaacaacgccaacaacaccgccctgggtcgcctccctcgccccgccggctaccccagcacggtcagcactgtggagggccacgggccccccttgtcccctgccatccgggtgcaggaggtggcgtggaagctcagctccaacaggtgccactcccgggagagccaggcagccatggcgggtcaggaggagacgtctcaggatgagacctatgaagtgaagatgaaccatgacacggaggcctgcagtgagcccagcctgctctccacagagatgctctcctaccaggatgacgaaaatcggcaactgacgctcccagaggaggacaagagggacatccggcaatctccgaagaggggtttcctccgctctgcctcactaggtcgaagggcctccttccacctggaatgtctgaagcgacagaaggaccgagggggagacatctctcagaagacagtcctgcccttgcatctggttcatcatcaggcattggcagtggcaggcctgagccccctcctccagagaagccattcccctgcctcattccctaggccttttgccaccccaccagccacacctggcagccgaggctggcccccacagcccgtccccaccctgcggcttgagggggtcgagtccagtgagaaactcaacagcagcttcccatccatccactgcggctcctgggctgagaccacccccggtggcgggggcagcagcgccgcccggagagtccggcccgtctccctcatggtgcccagccaggctggggccccagggaggcagttccacggcagtgccagcagcctggtggaagcggtcttgatttcagaaggactggggcagtttgctcaagatcccaagttcatcgaggtcaccacccaggagctggccgacgcctgcgacatgaccatagaggagatggagagcgcggccgacaacatcctcagcgggggcgccccacagagccccaatggcgccctcttaccctttgtgaactgcagggacgcggggcaggaccgagccgggggcgaagaggacgcgggctgtgtgcgcgcgcggggtcgaccgagtgaggaggagctccaggacagcagggtctacgtcagcagcctgtagtgggcgctgccagatgcgggcttttttttatttgtttcaatgttcctaatgggttcgtttcagaagtgcctcactgttctcgtgacctggagttaaccggaacagcgtcttcattcatttctgttgggaccagacgcggagcctgggtgcgcgagccgccctccgggaggaaggcgcccggctgcgtctgcagaggcggggagaggaggcggcgagggtcccggggcgcgaggaaggcgcctgccctctcccagctcgcaggccccgggcccggccgcgcctccgcggggagagcaccccggcttcccgcgcgccctcaccaaaaggaccctacagcaaacgggtgtctttcgactctgcttgtagaaaccatttgcacatattctgtacgagcctcgctgtctccctagagccagggccctgcggatttggagaagggagcggggcaggacttccaggaggaccccaacccggcccggagagggaggaggaggcctccaggggcgcggagctctggggatgggcgtcgggccggcagtggtgcggctcactccgtccctgcccacctgcgacgggatcccccgaccggcacgggccacgccgagctcccggccagccgccggcccgcaggcagcgcgagggaggagctgcgccgccggctccgcccaaccaggtggtgctgagcttccgctgagcgctcttttgttttgtggtttgacacttttcttgacagcatgttgcagtttcttttcggttttggttttttttaaatgttttattttgctttcccagcgggaggggaggaagaagagtgtttacaaagtcctgtagccccctcacctttctgttttcacttttgccaatgtacatcgggtttggttttcttgtattatttaaacggttgtggtttcctttttccacggaggttcaatagaagccgctgcaggagagttttaccaaccattgtgtatgcccaataatttgttatcatttccttaggtagtaacctatttttgttctggtttggttcggttatctaatggaaaggtaactggcaatgcacttgatgtggtcttgcacatgtgggtgatagagttgggttcctttttatgctgggtgtacaggtgggtttgggagagaggagcatgcgcgagagagtctccgagtgtgtgcgacgcgtgtgtgtgtggtgggttgtctgtgtgcatatgtcctgcccgtgtatatgcacccacaccatgtgcccgtgcacaccagtgactacgcagtcccccctttctggtttagctgtgggaagatctgaatctggggccgtttgaaagcaaaaacaaaccactgtctctgcttctgaaacgggaatcagtaactctttgcattttctgtcccacaagatatgcaaaaacaatgcaataatattcatttaaaaatacaattgtgagttgtgttggcattaaaactgtattttaaaaaaagacagaaatttaagggaaaaacacaagaaggcattttgcttcaatatattccgtgtaatgttttattgcattgataatgtttctgttgaagaaaccgttatacttgaattcaggtcagtttcagtatttttcaaatatttttttaaaactgaattgcaattgtgccaagcgaatataatgaattgaattaagttggttttcggattcacttcttgtatattttgctgcatgtaaagtaaatcattttgtatttggagtgtgacaagctttacctttgaactcaagtgcttttctatatgtggttgggggaaagggaacaagttttctttagtttgcacaatgagcaaaggtatcaccagtgtagtcattattctgctctccacaaacaggtttggacattactgttttgcatatcttgtgtttgcttacatttccctcaatttttccaaaatcgtttgctgggtatgtttgtaccgcctcttgctgtgagagaccaggacctattttattccagtcttcactctgtccactctgctctggtcatctgatttggtacttctccaagaacagcccttcactgtgaggtgcagggaggcgttctgatgagccctcagtcactgggccgtcatccgcatcccccatggaagaggtagctggctttcccttcccttccaccacacggaattttctctttggcttccttaggaaagtgtacactaaccgggaggataaaattaaagtcaggctgcttggagggaggggcatcctcacttccggattcttgttgctctacccaacaaggacagcaggggctcgagaaaggaactggtgaaaccctgatccatctgaaagtcaactctgcgtgctcctttctccatcccttcctcactctggagcagcctttccttcaggcttgccctaatgtttgggctgccggggagggggccaggacaagggaagaggcatccggagctcacagtgggggtgggaacagatttttgtgggggcatctctaatgctcacttatatctccctagaacatcactcttttggtgctgtgtccttcaaatgtatgtcaacagtggtggctgaaaagggactgctttggggaaaacaggacccaaccattcacccagaattgacccattaaatctcttccagtcctagtgttccctgagcccctcttggcacatatataagtaagctagaaattacaataagggacagtccattcctctatgacagcttgctggactgattcatgacaaagtggagaaatgtactcaatactccccggttaacacagtctagaaacagagtttctttatggatatccacacccaagtcatccaaactttcttgattccttttcactgccatcaaggtcctctagaaattgagtttaggtatcatcctttgaaaagttcccaagatttctaccaggaggtacacacaggcgttccctgtctagggcaggaggactatcctagcttgaccttctgatccactagaataagactggcgtatgatgcctgtcatcagaacagactggcacaagtagtgacatcaatgaaccacagcacaatcttccaagtgatgtctactctccacctaaaatggaattttccccatgaccttgtaaaacataattgtcacatcttccatacccctcctgacagcccccaagtgtcaggagaaaacagtcaggggctaagggcccaagggacttgaagaaacaacagtttaaggtctgcagtttggtcaacttaattcttgtcctccgaccagccctgcctctttcatttccagaccttggagaatttttcccagctttgattcagaaggtactagttataacccctttccttcttcttaatccaataggcctcactctcactgggaaatccactcaaaggaacaaggcaatgtctctcattctatttcccagttccaaattccaggtgcttgtctggagtgaagctacccgttactttctcccagcttttctccacccagcatgtctcctgcccatgcagctgaagacagtggggcaacctcaggagaagcagacctttccatgcccaagttcatctcctgagcaacagtgacacctagaaaatgaggactttggaagtcacccaaaagatggtggctactttatggagtcctgaagatacacagccaccactcctaaaggcaaagaaagaaaacacgaatgtaggtcagggatagagtggaaccctggtcatcggggtttttagcctcatcgtgggaaaggtggtaaaggaggatgatggcatctccatccctagaggccaagaattgaaatatcattgtcaaggattagaaacaattcagcaaagaggccacaaaaagggcctgctgactcccagaagacctctttaaaccccaggggaggcaaatacttgctgatggagtctgggccgtttccatattttaaagaagacctgcctctggggcaaatgtcagcacagagaggactgggaggagaatggaggcaagaaaagggcatattttgactccctctgtgcctcttcccagttcatggaaggatgtgttcagcttacccacccacagtgaccagtgtggtggagccgctgacatctcaaggatctatttgggaaggtgagaagagtactcattccatctgggggtgttgttccagccacatcagcctacctggtgggatgtgggggtgtctgccaccctgtcccccctctgctgatgtccctcccctcaggctgtccaggtgccacctgacacaggctgctgtgcaaagacaggcggggaagcccaaacctcactcccagggaggccctcagccgccagagtccaggttctccagaggctacgatttgaggaggttgagggggaagacaggagggaaagaaaagtcctacaactgtcaggaatggggcacctttccctgtccctaagcaaagctccctcttcccactgccctccccagccccagctccctgtcctccccaacacctagtgagaaagacggtgcgtggaagggagtcccatgggcagatgcttacacgacctctttgtgaagcctcttctgggtttaacttcattcatcaatttattcttatgtcaaagcaatgaaacttttctttctggagccagataccaatacaacaggtgaacgggtttctgccacatctctacattgacgggggatgcttgaacaacccccctcactacacagacacacaccgttaaggcacaagggctggggttgagctctagatgagggactttcctgctcctgcaagggtgagcactgtatacacagacaaggagggtgcagtagagtgactcccttggatggaagtagtaccatcagaacctactattattatgacataaattctatttacatacattgagagaatactacaatcaacactttttcctgggatgactttaagaggtttgagccacagcacctgaagtggcaaagatccatggtctttgtagggtattagagaactcttccagtcacctctgaaagcactctagatcttgcagctgagtggatgaagtgtaacaaatctgttgcacgctgagaggagtcagaattagcatttttcatgaaagttccccacgtctctactaagaatgaggaagaaaagactaagactaggtaattacacagaggcttgaaatgttacatcaccagagccaagtcctctcccttcagatcagttactggctgctacacagggacacccccaccttttcagggcatcccatgcactccacttctcaggatctaaggaatttgactttgtagggatcccagaaagggcactgtgccacttcccctggtgtgaatcagacatacattgtacattcatttctaaaattcactcatgcacctcaaaccaaggtcattatccaaaaaaaaaaaaaaaaagctctgggtggaagagtttgtaagttttaagagagggtcatttctatgtgaggaaatgcagaaatggacagaatgattcttattcactgtttgggtctggagaattcccattgtggaaatcttagagatctcaagtttattaccaagggaataaggaaaaaaaggtgagcaggcaccaggccaagcagtggctcccttgccaaggaacctgaggctgcaggtttcagggacccccttgaagaaacctctcctggccattggccaggagaaaagagaagtctctcctgtagagtcacaagagaagcaaaagagggtgggtcactgggtcctggacatagcccccaaccccaagacttcccaatatggagaaactacaccaatgtttaaaaggggaaaaggaaagaacttgtacatcaagggaagatgatttgtaaacacacagtcctgtgcagaaagatccccttcaggaggtgtctccagcatcccaaagctgtgcgcaccttctcttttcctgcctcaggccacctatgcatccagctgcagcccatacccacacctgaaatccatctcttgaatcccagccaggttatataccaccccattgccatgtcctgtcctggccagaatgcatgctgttcccccaagcctcgtgggagtgaggccatgggaaacagagatgagcatgtctggacaagtctgtgatggtagtggatgagaataacccatggcaaaacacgcacattcattaagaaatagggcgacagattccccgttggtgaagcactgaaaggtctattactctcataatattgctgttttattttaatccaccagagctaccatgcaaaactttcctcctgtgaaacgctccagataaagctcctctaatctccccttccctcatgtcctccagctcaaacccaccttcatcccccaaaccaatctgtatcatgcctgttatcagagaggcacagaaagatgggcagtgcctccgttgtcaccattccccacacccctacacacccccacaccctcccctccaggctccacgacttcacagtcttactgttgtaaatatcattgtacagtttgtaatcctcaaataatcccattgtcagaggcctcgcctgatgggccttctcaccctcgagaaaggccagggaatctagaaggggcaacccttcaaggagagcttcagggtcatctctgtgtgagacactattgtatattcctgtaagattgcatttttatctaaggaatgatgttatttaaaaaacaaacaaaaaacacaaaaaataagaattgcaaataaatttcttaacaatgtct

SEQ ID NO: 65323 - DNA, 6417 bp, Artificial Sequence
  derived and/or modified sequence
atggtgaatgaaaatacacggatgtacataccggaagaaaatcaccagggcagcaactacgggtctccaagacctgctcatgccaatatgaacgcaaacgccgccgcagggttagctcctgagcatatacccacgcctggtgcagcactgtcttggcaggccgctattgacgccgcccgccaagctaaactgatgggtagtgccggaaatgccacaatctccacagtcagttccacacaacggaagcggcaacagtatggcaaaccaaagaagcaggggtcaaccaccgctacacgccctccccgcgcccttctctgtctcacacttaagaatccaatcagacgggcctgtatttccattgtagaatggaagccctttgagattatcatcttactaactatcttcgccaactgcgtggccctagcaatctacattccttttccagaggacgattctaatgcaacaaactccaacctcgaacgggtagagtacctttttctgatcatcttcaccgtcgaggctttcctgaaagtgattgcatacggactgctctttcatccaaacgcttatcttagaaatggatggaacctattggatttcatcattgttgtggtagggttgttctccgcgatcttggaacaggccacaaaggcagatggggctaacgctcttgggggaaagggcgctggattcgatgtgaaagctttgagagccttccgcgtattgagacccctccggctggtaagtggggtgccttcactgcaggtggtactgaatagtatcattaaggccatggttccacttctccatatcgcactgcttgtactgttcgtgattatcatttacgcaatcatcggccttgagctcttcatgggtaaaatgcacaaaacatgttacaatcaggaaggaattgcagacgtgcctgcagaggacgatcccagtccttgcgctctggaaacgggccatggcaggcagtgccaaaacgggacggtatgtaagcctggctgggacgggccaaaacatggtattactaactttgacaacttcgcttttgctatgctgactgtgtttcagtgtattacaatggagggatggaccgacgtactgtattggatgcaggacgccatggggtatgaactaccctgggtctactttgtttcactcgtcatctttggaagctttttcgttctcaatctggttctcggagtgttgtcaggcgagttcagtaaagagagagagaaggccaaggcacgtggcgattttcagaaactcagagaaaagcagcagcttgaagaagacttaaaggggtatctagattggataactcaggccgaggatatcgatccagagaacgaagacgaagggatggatgaagaaaaaccaagaaacatgagtatgccaacttcggagacagagagcgtcaacacagagaacgtggcaggcggggatatcgaaggcgagaactgtggcgcccgactggctcatcggattagtaaaagcaagttcagtagatattggcggaggtggaaccgtttttgcagacggaagtgtcgcgctgctgtgaaatccaatgtgttctattggttggtcatcttcctcgtcttcctgaacaccttgaccatcgccagtgagcattacaaccagccaaactggctgacagaagtgcaggatactgcgaataaggcgctcttggccttgtttaccgcggagatgctgttgaagatgtatagtctcggtcttcaggcatacttcgtgtcactgtttaatcggttcgattgcttcgttgtctgtggaggcatactcgaaacaatcttggtcgagactaaaatcatgtccccacttgggatctccgtgctgaggtgtgttcgcttacttcgtatcttcaagattaccaggtactggaattctctctcaaatctcgtggcctcccttttgaattcagtgagatctatcgcctctctactactcctgctctttctttttattatcatttttagccttctggggatgcagttgtttggggggaaatttaactttgacgagatgcagaccaggcggtccactttcgataacttcccccagtcattgctgactgtctttcaaatcctaaccggggaggattggaacagtgtaatgtacgatggcatcatggcgtacgggggaccttcttttcccggaatgcttgtgtgcatttactttattatcctgtttatttgtgggaactatatcctgttaaatgtgttcctggctattgccgttgacaacctagccgatgctgagtctttgacgtctgcacagaaggaggaggaggaagaaaaagagaggaagaaactagcgcggacagcctccccggaaaagaaacaggaactcgtggagaagccagccgtgggggagtcgaaagaggaaaagatagaactgaaatcaatcacagctgatggtgaatcccccccagccaccaagatcaacatggatgacctacaacctaacgagaacgaggataagtccccttaccctaaccccgaaacaaccggggaagaggatgaagaagagccagaaatgcccgtgggtccacgaccacggcctctaagcgagctgcacttgaaggaaaaggccgttccaatgcccgaggccagcgctttcttcatcttttcttcaaataataggtttagactgcagtgccataggatcgtgaatgatacaatattcactaacctgattctgttttttattcttctcagcagtatctctctggcggctgaggatcccgtccagcataccagcttccggaatcacatcctgttttacttcgacatagtttttacaaccatattcactatcgaaatcgctcttaagatgacggcctacggagcctttctgcacaaggggtccttttgtcggaattactttaacatcttggacctactcgttgtgtctgtttcattaattagctttgggattcaatcgtccgcgatcaacgtcgtgaaaatcttacgggtgttaagagtgctgcgtccgttacgagccataaatcgggcgaagggtttaaagcatgtggtgcaatgtgtttttgttgcaatccgaacaatcggaaatattgtgatcgtgacaactctcctgcagtttatgttcgcatgcattggggtccaactcttcaagggcaagctgtacacttgctccgacagctccaaacaaaccgaggcagaatgtaagggtaactatattacatacaaagacggggaggtggaccaccctattatacagccacggagctgggagaattcaaagttcgattttgacaatgttcttgctgctatgatggccctgttcacagtcagcaccttcgaaggttggcctgaactattgtatcgtagcatcgactctcacacagaggacaagggaccaatctataactatcgggttgagatttcaatcttcttcatcatctatatcattattatcgctttttttatgatgaacatttttgtgggcttcgtaattgtcaccttccaggagcagggagagcaggagtataaaaactgtgagctggacaagaaccagagacagtgcgtggagtacgccctgaaggcaagaccgctgcgacggtacattcccaaaaaccaacaccagtacaaggtgtggtatgtggtgaatagcacctactttgaatacctcatgttcgtccttatcttgttgaatactatctgtttagccatgcagcattatggtcagtcctgccttttcaaaatagctatgaacatcttgaatatgctgttcactggactcttcactgtggagatgatcctgaagcttatcgcgtttaaacctaagggttacttctctgacccctggaacgtgttcgattttctgatcgtgatcggatcgatcatcgatgtcatcctcagcgaaactaatcccgcagaacacacgcagtgctctccaagcatgaacgccgaagaaaattccaggatctctattactttttttcgactgttccgggtaatgaggctggtgaaactcctgtcccgtggggaaggcatccgaactttactttggacctttatcaagagttttcaggctctgccgtacgtggctttgctgatcgtcatgttgttctttatctacgctgtgattggtatgcaagtttttggaaagattgccctgaacgacaccaccgagattaatcgcaacaataactttcaaacgttcccccaggcagtgctattactcttccgatgcgccaccggagaggcatggcaagacatcatgctcgcctgtatgccaggcaagaagtgtgccccggaatccgaaccatctaactcaaccgagggagagacaccatgcggatcatctttcgcagtcttttacttcattagcttctacatgttgtgcgcatttctgataataaacctgttcgtggccgttataatggataacttcgactacctcactcgcgactggtcaatcttgggcccacaccacctggacgaatttaaacgaatctgggccgagtatgacccggaggcgaagggccgcatcaaacacttggatgtggtaactttactgcgcaggattcagcctcccctcggattcgggaagctgtgtccccaccgggtggcatgcaagaggctagtatcaatgaacatgcctctcaatagcgacgggacagtgatgttcaatgccaccctgtttgcccttgtccgcactgccctgaggataaaaacagaaggcaatcttgaacaggcaaacgaggagctccgtgcgatcattaaaaaaatctggaagaggacaagcatgaaactgttggaccaagtggtgccaccagcaggggatgatgaggttacagtggggaagttctacgcaaccttcctcatccaagagtacttccgcaaattcaaaaaaaggaaagaacagggattggttggtaaaccatcccaacggaacgcactttctttgcaggcagggctgaggactctgcacgacatcggccccgagattagacgcgccatttcaggcgatcttacagctgaggaggagctcgataaagcgatgaaagaagctgtgtctgccgcctcagaggacgatatttttcgtagagctggcggcctgtttggtaaccatgtatcgtattaccaatccgatggacggtccgctttcccccagacattcactacccagagacctctccatatcaacaaggctggttcgagccagggtgacacagagtctccgtcacacgagaaactggtggacagtaccttcacacctagttcctactcatccacaggcagtaacgccaacattaataacgcgaacaatactgctctgggacgtttaccacgaccagccggttatccgtccaccgtgtccaccgtggaaggacacggcccacctctctcacccgccattagggtccaggaagtggcatggaagctcagtagtaatagatgccactcgcgtgagagccaggcagcaatggcaggccaggaagagacttcgcaagacgaaacctacgaggtgaagatgaatcacgataccgaggcatgtagcgaacccagcctcttgagcacagagatgttgtcttaccaggacgacgagaatcgtcagctgactttgcctgaggaagataagagggatatccgacaatccccaaagcgtggttttttgcgatctgccagcctcggacgccgggcctcttttcacctggaatgcttgaagagacaaaaggaccgcgggggcgatatcagccagaaaaccgtcttgcccctacatctggtgcatcatcaagctctggccgtggcaggactcagtccgctgttacaaagatcgcacagtccagcatcgtttcctaggccatttgctacacctcccgctacgcccggcagccgcggctggccaccacagccagtccccactctaaggctggagggggtagagtcatccgagaaactgaacagcagtttcccgtccatccactgtggatcatgggccgagacgacacctggaggcggcggcagcagcgcagctcggagggtcagacccgtgtccctaatggtgccttctcaggcaggggcccccgggcgacaatttcatggcagtgcctcctctctcgtagaagctgtgctgattagcgaagggctgggacaatttgctcaagatcctaagtttatcgaggtaacaactcaggagctggctgatgcttgcgatatgacaatcgaagagatggaatccgcagcagataacattctcagcggcggagccccccagagccccaatggcgcacttctcccatttgtgaattgtcgagacgccgggcaggatagggcgggcggggaggaggacgccgggtgcgtgcgcgctaggggcaggccctcagaggaggaactgcaggatagcagggtatacgtgtctagtctgtag

SEQ ID NO: 65324 - DNA, 6417 bp, Artificial Sequence
  derived and/or modified sequence
atggtgaatgaaaacaccaggatgtacatccctgaggagaaccaccagggcagcaactacggcagccccaggcctgcccacgccaacatgaatgccaatgctgctgctggcctggcccctgagcacatccccacccctggggccgccctgtcctggcaggccgccattgatgctgcccggcaggccaagctgatgggcagcgctggaaatgccaccatcagcacagtgagcagcacccagaggaagaggcagcagtatggcaagcccaagaagcagggcagcaccacagccacccggcccccccgggccctgctgtgcctgaccctgaagaaccccatccggcgggcctgcatcagcatcgtggagtggaagccctttgagatcatcatcctgctgaccatctttgccaactgtgtggccctggccatctacatccccttcccagaagatgacagcaatgccaccaacagcaacctggagcgggtggagtacctgttcctgatcatcttcaccgtggaggccttcctgaaggtgattgcctacggcctgctcttccaccccaatgcctacctgagaaatggctggaacctgctggacttcatcatcgtggtggtgggcctcttcagcgccatcctggagcaggccaccaaggcagatggagccaatgccctgggcggcaaaggagctggctttgatgtgaaggccctgcgggccttccgggtgctgcggcccctgcggctggtgtctggagtgcccagcctgcaggtggtgctgaacagcatcatcaaggccatggtgcccctgctgcacatcgccctgctggtgctgtttgtgatcatcatctatgccatcatcggcctggagctgttcatgggcaagatgcacaagacctgctacaaccaggagggcattgctgatgtgcctgcagaagatgaccccagcccctgtgccctggagaccggccacggccggcagtgccagaatggcaccgtgtgcaagccaggctgggatggccccaagcacggcatcaccaactttgacaactttgcctttgccatgctgactgtgttccagtgcatcaccatggagggctggacagatgtgctgtactggatgcaggatgccatgggctatgagctgccctgggtgtactttgtgtccctggtgatcttcggcagcttctttgtgctgaacctggtgctgggcgtgctgtctggagagttcagcaaggagcgggagaaggccaaggcccggggggacttccagaagctgcgggagaagcagcagctggaggaggacctgaagggctacctggactggatcacccaggctgaagatattgatcctgaaaatgaagatgagggcatggatgaggagaagcccaggaacatgtccatgcccaccagcgagacagaatctgtgaacacagaaaatgtggccggcggggacatcgagggggagaactgtggggcccggctggcccaccgcatcagcaagagcaagttcagccgctactggaggcgctggaaccgcttctgcaggaggaagtgcagagctgctgtgaagagcaatgtgttctactggctggtgatcttcctggtgttcctgaacaccctgaccatcgccagcgagcactacaaccagcccaactggctgacagaggtgcaggacacagccaacaaggccctgctggccctcttcaccgctgagatgctgctgaagatgtacagcctgggcctgcaggcctactttgtgtccctcttcaacagatttgactgctttgtggtgtgtggcggcatcctggagaccatcctggtggagaccaagatcatgagccccctgggcatctctgtgctgcgctgtgtgcggctgctgcgcatcttcaagatcacccgctactggaacagcctgagcaacctggtggccagcctgctgaacagcgtgcgcagcatcgccagcctgctgctgctgctcttcctgttcatcatcatcttcagcctgctgggcatgcagctgtttggaggcaagttcaactttgatgagatgcagaccaggaggagcacctttgacaacttcccccagagcctgctgaccgtcttccagatcctgaccggggaggactggaacagcgtgatgtatgatggcatcatggcctatggaggccccagcttccctggcatgctggtgtgcatctacttcatcatcctcttcatctgtggcaactacatcctgctgaatgtgttcctggccatcgctgtggacaacctggctgatgctgagagcctgaccagcgcccagaaggaggaggaggaggagaaggagaggaagaagctggccaggacagccagccctgagaagaagcaggagctggtggagaagccagctgtgggggagagcaaggaggagaagattgagctgaagagcatcacagcagatggagagagccccccagccaccaagatcaacatggatgacctgcagcccaatgaaaatgaagacaagagcccctaccccaaccctgagaccactggagaggaggatgaggaggagcctgagatgcctgtgggcccccggccccggcccctgtctgagctgcacctgaaggagaaggctgtgcccatgcctgaggccagcgccttcttcatcttcagcagcaacaaccgcttccggctgcagtgccaccgcatcgtgaatgacaccatcttcaccaacctgatcctcttcttcatcctgctgagcagcatcagcctggccgctgaggaccctgtgcagcacaccagcttcaggaaccacatcctcttctactttgacatcgtgttcaccaccatcttcaccatcgagatcgccctgaagatgacagcctatggagccttcctgcacaagggcagcttctgcaggaactacttcaacatcctggacctgctggtggtgtctgtgtccctcatcagctttggcatccagagcagcgccatcaacgtggtgaagatcctgcgggtgctgcgggtgctgcggcccctgcgggccatcaacagagccaagggcctgaagcacgtggtgcagtgtgtgtttgtggccatccgcaccatcggcaacatcgtcatcgtgaccaccctgctgcagttcatgtttgcctgcatcggcgtgcagctgttcaagggcaagctgtacacctgcagcgacagcagcaagcagacagaagctgagtgcaagggcaactacatcacctacaaggatggagaggtggaccaccccatcatccagcccaggtcctgggagaacagcaagtttgattttgacaacgtgctggccgccatgatggccctcttcaccgtgtccacctttgagggctggccagagctgctgtaccgcagcattgacagccacacagaggacaagggccccatctacaactacagagtggagatcagcatcttcttcatcatctacatcatcatcatcgccttcttcatgatgaacatctttgtgggcttcgtcatcgtgaccttccaggagcagggcgagcaggagtacaagaactgtgagctggacaagaaccagaggcagtgtgtggagtatgccctgaaggcccggcccctgcggcgctacatccccaagaaccagcaccagtacaaggtgtggtacgtggtgaacagcacctactttgagtacctgatgtttgtgctgatcctgctgaacaccatctgcctggccatgcagcactacggccagagctgcctcttcaagatcgccatgaacatcctgaacatgctgttcaccggcctcttcaccgtggagatgatcctgaagctgattgccttcaagcccaagggctacttcagtgacccctggaatgtgtttgacttcctgattgtcatcggcagcatcattgatgtgatcctgtctgagaccaacccagctgagcacacccagtgcagccccagcatgaatgctgaggagaacagccgcatcagcatcaccttcttccgcctcttccgggtgatgaggctggtgaagctgctgagcagaggagagggcatccgcaccctgctgtggaccttcatcaagagcttccaggccctgccctacgtggccctgctgattgtgatgctgttcttcatctatgctgtgattggcatgcaggtgtttgggaagatcgccctgaatgacaccacagagatcaacagaaacaacaacttccagaccttcccccaggccgtgctgctgctcttccgctgtgccaccggggaggcctggcaggacatcatgctggcctgcatgcctgggaagaagtgtgcccctgagagcgagcccagcaacagcacagaaggagagaccccctgtggcagcagctttgctgtgttctacttcatctccttctacatgctgtgtgccttcctgatcatcaacctgtttgtggccgtcatcatggacaactttgactacctgacccgggactggagcatcctgggcccccaccacctggatgagttcaagaggatctgggccgagtatgaccctgaggccaagggccgcatcaagcacctggatgtggtgaccctgctgcggcgcatccagccccccctgggctttgggaagctgtgcccccaccgggtggcctgcaagaggctggtgtccatgaacatgcccctgaacagtgatggcaccgtgatgtttaatgccaccctgtttgccctggtgaggacagccctgcgcatcaagacagagggcaacctggagcaggccaatgaggagctgcgggccatcatcaagaagatctggaagaggacctccatgaagctgctggaccaggtggtgcccccagctggagatgatgaggtgacagtgggcaagttctacgccaccttcctgatccaggagtacttcaggaagttcaagaagaggaaggagcagggcctggtgggcaagcccagccagagaaatgccctgagcctgcaggccggcctgcggaccctgcatgacatcggccctgagatccggcgggccatcagcggggacctgacagctgaggaggagctggacaaggccatgaaggaggccgtgtctgctgcctctgaagatgacatcttcagaagagctgggggcctgtttggaaaccacgtgtcctactaccagagtgatggccgcagcgccttcccccagaccttcaccacccagaggcccctgcacatcaacaaggccggcagcagccagggcgacacagagagccccagccatgagaagctggtggacagcaccttcacccccagcagctacagcagcacaggcagcaatgccaacatcaacaatgccaacaacacagccctgggccgcctgcccaggcctgctggctaccccagcacagtgtccacagtggagggccacggcccccccctgagccctgccatccgggtgcaggaggtggcctggaagctgagcagcaaccgctgccacagccgggagagccaggccgccatggccggccaggaggagaccagccaggatgagacctatgaggtgaagatgaaccacgacacagaggcctgcagcgagcccagcctgctgagcacagagatgctgagctaccaggatgatgaaaatcggcagctgaccctgcctgaggaggacaagagggacatccggcagagccccaagaggggcttcctgcggagcgccagcctgggcagaagagccagcttccacctggagtgcctgaagaggcagaaggacagaggaggagacatcagccagaagacagtgctgcccctgcacctggtgcaccaccaggccctggccgtggccggcctgagccccctgctgcagaggagccacagccctgccagcttcccccggccctttgccaccccaccagccaccccaggcagccggggctggccaccccagcctgtgcccaccctgcggctggagggcgtggagagcagcgagaagctgaacagcagcttccccagcatccactgcggctcctgggccgagaccacccctgggggcggcggcagcagcgctgccaggagagtgcggcctgtgtccctgatggtgcccagccaggccggggcccctggccggcagttccacggcagcgccagcagcctggtggaggccgtgctgatcagcgagggcctgggccagtttgcccaggaccccaagttcatcgaggtgaccacccaggagctggctgatgcctgtgacatgaccatcgaggagatggagagcgctgctgacaacatcctgtctggaggagccccccagagccccaatggagccctgctgccctttgtgaactgcagagatgctggccaggaccgggccggcggggaggaggatgctggctgtgtgcgggcccggggccggcccagcgaggaggagctgcaggacagccgggtgtatgtgagcagcctgtag

SEQ ID NO: 65325 - DNA, 6417 bp, Artificial Sequence
  derived and/or modified sequence
atggtgaacgagaacacccggatgtacatccccgaggagaaccaccaggggtctaactatggatcacctaggcccgcgcacgcaaatatgaatgcaaacgcagctgccggtctagcaccagaacatatccccacccccggagcagcactctcttggcaggccgccatagacgccgccagacaggccaaactcatgggctctgcgggaaatgcgactatctccaccgtgtcaagcacacaaaggaaacggcagcagtacggcaagccgaagaaacagggttccacaactgcaacgcggccccctagagctttgctgtgtctaacccttaaaaaccccattcggcgtgcttgcatttccatagtcgagtggaagccattcgagattattatccttctcacaatctttgcgaactgcgtagctttagcgatatacattccctttcccgaggacgattcaaatgccaccaattccaatttagagcgcgttgagtatctttttttgatcatcttcaccgtggaggcctttctgaaggtgatcgcctacggattgctgtttcatccgaacgcctacttaaggaacggttggaatttgctggattttatcattgtcgtcgtcggcctgttttctgcaatactcgagcaggcgacaaaagccgatggggcaaacgccctaggcggcaagggagccggttttgatgttaaagctctgagagccttcagagtgctgagacctctgcgcttggtctcaggtgttccatccctccaagtggtcctgaactccatcatcaaagccatggttccactgctgcatatcgcgctgcttgtgctttttgtgattataatatacgccatcatcggactggagctgttcatgggtaaaatgcataaaacatgctataaccaagaggggatagctgacgttcccgccgaggacgatccaagtccctgcgcactggagacaggtcacggccgacagtgtcagaacggaacagtctgcaagcccggatgggacggccccaaacacggtattaccaatttcgacaattttgcgttcgccatgctcactgtgtttcagtgcataactatggaaggctggactgacgtgctgtattggatgcaggacgctatggggtacgagctgccttgggtgtatttcgtgtctttggttattttcggctccttttttgtattaaatctggtgcttggcgtgctgtcaggggagttctctaaagaacgcgagaaagccaaggctagaggagattttcaaaagttacgtgaaaagcagcagctcgaagaagatttgaagggttacctggattggattacgcaggcagaagacatagacccagagaatgaagatgaaggtatggatgaggagaaaccacgcaacatgtcaatgcccactagtgagactgagtccgtgaatacagaaaatgtagcgggcggcgatatcgagggagaaaattgcggtgccaggcttgctcaccggatcagtaagtctaagttttcacggtattggcgaagatggaatcgcttctgcagaagaaagtgtcgtgctgcggtgaaaagtaacgtgttttactggctagtgatctttctggtattcctgaacaccctgactatcgctagcgagcactacaaccagccaaactggcttactgaggtccaagacacagcaaacaaggctcttttggccttgtttactgctgagatgcttctcaagatgtactccctgggactgcaggcttactttgtatctctctttaaccgatttgattgctttgtcgtttgcggcggcatcctcgagactattcttgtcgagacaaaaattatgagtcccctgggaatttctgtgctgaggtgtgtgcgtctcctacgcattttcaaaatcacaagatattggaatagcctgtctaacctcgtcgccagcttactcaactcagttcgctccatcgcttctttgctgctgctcttgtttcttttcattatcatctttagcctgcttggtatgcaactgtttgggggaaaatttaacttcgacgagatgcagaccagaagatcaactttcgataactttccacagtcattgctgactgtttttcagatcttgacgggcgaagattggaactctgtcatgtatgatggcatcatggcttatggagggccctcatttcctgggatgctggtgtgtatctactttataattctttttatctgcgggaactatatcctcctgaacgtatttttagcaattgcagtggataatttggctgatgcggaaagcttaacatctgcgcaaaaagaagaggaagaagaaaaggagagaaagaaactggctcggacagctagtcctgaaaaaaaacaggagctagtggaaaaacccgcggtcggagagtccaaggaggagaaaatcgagctgaaatccatcaccgctgacggtgaatcacctcccgctacaaaaataaacatggacgacctccagcccaacgagaatgaagataaatcaccgtaccctaaccccgaaacgaccggagaggaagacgaagaagagccagaaatgccggtgggccctagacctagacccctgtctgagctgcacctgaaagagaaggcggtacctatgcccgaggcctccgctttcttcatcttctcttctaacaataggttccggctgcagtgccacaggattgtcaatgataccattttcactaatctcattctattttttatcctcctctcctccatcagcctcgctgccgaggaccctgtgcagcatacttcctttcggaaccatatcctgttttacttcgacatcgtgtttacaacaatattcactatcgagattgccctcaaaatgacagcatacggggctttcctacacaaggggtctttctgccggaattattttaatatccttgatctgcttgttgtgtcggtctctctcatttcttttggaattcagagctcagctattaatgttgttaagatcttgagggttctcagggtgctgagacccttacgggccatcaaccgggccaaagggcttaagcacgtcgtgcagtgtgttttcgtcgcaatccgaactataggcaacatcgtgatagtgacgactctgctgcagttcatgtttgcttgcatcggggtccagctgtttaagggcaagctgtatacgtgctccgactccagcaagcagacagaggctgaatgtaagggcaattatattacatataaggatggcgaagtggaccatcctatcattcagccccgctcatgggaaaattctaagtttgattttgataacgtgttagccgcgatgatggcactgttcacagtgagcacgtttgagggttggcccgaacttctataccggtctatcgacagccataccgaggataaagggccaatctataattatcgggtagagatctccatcttttttatcatctacatcatcatcattgctttctttatgatgaacattttcgttggcttcgtgatcgtgaccttccaggaacagggtgagcaggagtacaagaattgtgagttagacaagaaccaaagacagtgtgtcgaatacgctctgaaggctcggccactgaggaggtacatccccaagaatcagcaccagtataaggtgtggtacgtcgtgaattctacttactttgaatacctgatgtttgttctaatcctactgaacaccatctgtctggcaatgcagcactacggccaatcttgtcttttcaaaatcgctatgaacattctcaacatgctcttcaccggtctgttcactgtagagatgatcctcaaattgatcgcgtttaaaccaaagggctatttttctgacccctggaatgtcttcgattttctgattgtgatcgggtccatcatcgacgtcattttgagtgaaacaaacccagctgaacacacacaatgctctcctagcatgaacgccgaggagaatagccgtatttcaataaccttctttagactatttagggtcatgcggctggtcaagctgctgtcccgaggagaaggcatccgcactctgctgtggacatttataaagtcttttcaagccctgccatatgtcgccctgctgattgtgatgttgttttttatctatgccgtcatcgggatgcaggtcttcgggaaaatcgcattgaatgataccaccgagatcaaccgcaataataattttcagacatttccacaggctgtgctccttctgtttagatgcgctacaggtgaagcttggcaagatattatgctcgcttgtatgccgggcaaaaagtgtgcacctgaatccgaaccttcgaattccaccgaaggggagacaccttgcggctcatcctttgcagtgttctacttcatcagtttctacatgctgtgtgcatttctgatcatcaatctttttgtcgcagttatcatggataatttcgactatctgacacgcgattggtccatcctggggccccaccacctcgacgaattcaaaagaatttgggcggagtacgaccctgaggccaaaggccgcatcaagcacctggacgtggtaactctgctccggcgcatccagcctccactaggtttcggtaagctttgcccgcacagagttgcctgtaaaagattagtgagtatgaatatgcctctcaatagcgatggaaccgttatgtttaacgccaccctgttcgccctggtcaggacagccctgcgcattaagactgagggtaacctggagcaggccaacgaggagttaagagccattataaagaagatatggaaacggacctctatgaagctcttggaccaggtcgtgccacctgccggggacgacgaggtaactgtaggaaagttttacgccacattcctgatccaagagtacttccgcaaattcaagaaaagaaaggaacagggactggtaggcaagccaagccagcgtaatgcactgtctctgcaggccgggttgagaacattgcacgatatagggcccgagattaggagggccatcagcggggatctaactgccgaagaggagttggacaaagccatgaaggaggccgttagtgcagcttcagaggatgacattttcagaagagcaggcgggctatttggaaaccatgtgagctactaccagtccgatggaaggtccgcgtttccacagacctttaccactcagcgacccctgcacataaacaaggctggctctagccagggggataccgagtcccctagtcacgaaaaattggtggactctacttttaccccatcaagttacagcagtaccggttcgaacgctaatattaataacgccaacaacaccgcattgggccgactacccaggcctgcgggctatccgtctaccgtcagcacagtggaaggacatggtccccctctgtccccagcaatcagggtccaggaagttgcctggaaacttagcagcaaccgttgtcactctcgtgagtctcaggcagctatggccggacaggaggaaacttcacaggacgaaacctacgaggtgaaaatgaatcacgatacagaggcctgtagcgagcccagtctcctgagcacagagatgctcagttaccaggacgatgagaatcgacaactgaccctgcccgaagaggataagcgcgatatcagacagtcacccaaacggggcttccttagatctgctagcctgggtcgtcgagcctcattccacctggagtgtctaaagcggcagaaggatagaggaggagatatctcacagaagacagtcttgcctctgcatcttgtgcatcaccaggcactcgcggtagccgggctcagtccactgcttcagaggtcccattccccagctagtttccctcgccccttcgccacacctcctgccacccccggaagccgcggctggccacctcaacctgtgccaaccctgagactggagggcgtcgaaagttctgagaagcttaatagctcattccctagcattcactgtggctcgtgggcagagaccacccccggtggaggcgggagcagtgctgcacgccgtgtgcgaccagttagcttgatggtgccctcgcaggccggcgccccaggacgacagtttcatggttccgcgtcaagcctcgtggaggccgtcttgatatctgaaggcttgggacaatttgcacaggatcctaaattcatagaggtgactacccaagagctggcagacgcttgcgacatgacaatcgaggagatggaaagcgccgcagacaacatcctcagcgggggagccccccagtccccaaacggagccctcttgccctttgtgaactgtcgggatgccggacaggatagggctggtggtgaggaggacgctggttgtgttagagccaggggtcgaccctccgaggaggagctgcaggacagtcgggtatacgtgtccagcctgtag

SEQ ID NO: 65326 - DNA, 6416 bp, Artificial Sequence
  derived and/or modified sequence
atggtgaatgagaacaccagaatgtacattcctgaggagaaccatcaggggagtaattacgggtctccacggcctgcccacgccaacatgaatgcgaacgcggcagccggattggccccagaacatatccccacccctggcgcagccctatcttggcaggcggcaattgacgcagccaggcaggcaaaactgatgggctcagccggaaacgccaccatctctactgtgtcctccacacagagaaaaagacagcaatacgggaagccgaaaaaacagggatccaccactgccactagacccccaagagctctgctctgtctcaccctaaagaacccaattaggcgggcatgtatttctatagtcgagtggaagccctttgaaatcatcatcttacttacgatcttcgccaattgtgtcgccctggctatctatattccattccccgaggacgatagtaacgcgaccaacagcaaccttgagcgcgtcgaatacctgttcctgattatcttcaccgtcgaggctttcctcaaggtaatcgcgtatggtttgctgttccaccccaatgcttatttgaggaacggctggaacctgctggattttatcattgtggttgttggactattttctgccattcttgaacaggccaccaaggccgatggagcaaatgctttaggcggaaagggggctgggttcgatgtgaaagcactgcgcgcttttcgagtgctccgtccgttaaggctggtctccggggttcctagtcttcaggtggtgctcaactccattattaaagccatggttccactgcttcacattgcacttctcgttctgtttgtgatcatcatatacgctatcatcggactcgagctgtttatgggaaagatgcataaaacatgctataaccaggagggtatcgccgatgtacccgctgaggacgatccttctccttgcgcactggaaactggacacggtcggcagtgtcagaatggaaccgtgtgcaagcctggatgggatggccctaagcacggcataactaactttgacaacttcgccttcgcgatgctgacagtgttccaatgcattaccatggaaggttggacagatgtactgtattggatgcaggacgcaatgggctatgagctgccttgggtttatttcgtgtccctggtgatcttcgggtccttctttgtcctcaacctcgtgctgggtgtcctctctggtgagttctctaaagagcgcgaaaaagcaaaggccagaggggattttcagaagcttcgcgagaagcagcagctcgaagaggacctcaaagggtacctggactggatcacacaggccgaggacatcgacccggagaatgaggatgaaggcatggacgaggagaagccaaggaatatgtccatgccgacatcagagacagaaagcgtgaatactgaaaacgttgccggtggggacattgaaggagaaaattgtggagcgaggttggcccatagaattagtaaatccaagttttctaggtactggcgcaggtggaacagattctgcagaaggaaatgccgggctgcagtaaagagcaacgtattttattggctggtaatcttccttgtatttctgaatactctgaccatcgcaagcgaacattacaaccagccaaactggctgactgaagtacaggacactgcaaataaagccctcttggcactgttcactgctgaaatgctactgaaaatgtatagcttgggtcttcaggcttatttcgtcagtcttttcaatagattcgattgctttgtggtgtgcgggggaattcttgagacaatcttagttgaaacaaagattatgtcccccctgggcatttccgtgctgcgatgcgttcgcctgttgcgaatttttaaaatcactaggtattggaactcactttcaaacttggtggcctcactcctaaattctgtcagaagcatcgcttccctgcttctactgttattcctttttataatcattttctccctcctggggatgcagctgtttgggggtaagttcaacttcgatgagatgcagacacgcaggagtacattcgataactttccgcaatcactcctgacagttttccagatcctcaccggggaagattggaattctgttatgtacgacggtataatggcttatggtggaccttcatttccgggtatgttagtgtgcatctacttcattatccttttcatttgcggtaactacatacttctgaatgtctttttggcgattgcagtcgacaacctggctgacgcagagagtttgaccagcgcacaaaaggaggaagaggaggagaaagaaaggaagaagctcgccagaactgctagccccgaaaagaaacaagaacttgttgaaaagccagccgtgggagagtctaaggaagagaagattgagctgaagtccattaccgccgacggtgaatctccacccgctactaagatcaatatggacgatctgcagccgaacgaaaatgaggacaagtctccctaccctaaccccgaaacaactggcgaggaagatgaggaggagcccgagatgccggtgggtccgcgtccaagacccctttctgaactccatctcaaggaaaaggccgtgcccatgcctgaagctagtgcattcttcatcttcagctcgaataatagatttcgcctccaatgtcaccggatcgtgaacgacactatctttaccaacctgatcctgttttttatcctgctgtccagcatctccctcgcagcggaggatccagttcaacacaccagttttcggaatcacatcctgttttactttgacatagtgttcactaccatattcacaatcgagatagccctgaagatgaccgcatatggtgcgttcttacacaaagggagcttctgtagaaattacttcaatatactggacctgctggtggtctctgtttctctcatatcattcggcatccaaagctccgctattaatgtcgtgaagatcttacgtgttctgagagtcctgcggcctcttagggcgattaatagggcaaaggggctgaaacacgtcgtgcagtgcgtgtttgttgctatccggacgataggcaatatcgttatagtcactaccctcttacagttcatgttcgcgtgtatcggcgtccagctgtttaagggaaagctgtacacatgctccgacagttctaagcagaccgaggccgagtgcaagggcaattacatcacttataaggacggcgaggtcgaccatccaatcattcagccgagatcttgggagaactccaaattcgacttcgataatgtgctggccgcaatgatggctctatttacagtttcaaccttcgaaggctggccagaactgctttaccggagtattgacagtcacaccgaggataagggtcccatttacaattaccgggtggaaatctcaatcttcttcatcatttacattattatcatcgctttttttatgatgaacatatttgtaggtttcgtgatcgttacttttcaggaacagggtgaacaggaatataagaactgtgaattggacaaaaatcaacgacaatgcgtcgagtacgcactcaaggcacgtccgctccgtaggtacattcccaagaaccagcaccaatataaagtctggtacgtcgtgaactccacttattttgaatacttgatgttcgtgctcatcctactgaatactatttgtctggctatgcagcattacggacaaagctgtttgttcaaaattgccatgaacattttgaacatgttgtttacggggcttttcaccgtggaaatgattctcaaacttatcgccttcaagcccaagggctacttttccgacccttggaacgtatttgacttcttgattgtcattggaagcataatagatgtcatattgagcgagactaacccagccgaacacactcagtgtagcccgagtatgaatgctgaggagaattctcggatcagtataaccttttttcgtctctttagggtcatgagacttgttaagctgcttagtaggggggaaggcattcgaaccttgctgtggactttcatcaagtcgtttcaagccctgccctatgttgccctgctgattgtgatgctgttctttatctatgcggtcatcggaatgcaagtctttggcaagatcgccctcaacgatactactgagatcaatagaaataacaatttccagacattcccccaggcagtcctcctactcttccgctgcgcaaccggcgaggcttggcaagatattatgctggcttgcatgcctggcaaaaagtgtgcaccagagtccgaacctagcaactctaccgaaggtgagacaccctgcgggtcttcatttgccgtcttctattttatcagcttctatatgctatgcgcatttttgataatcaatctgttcgtagccgtcatcatggataatttcgattatctaactagagactggtccatcttggggcctcaccatctggatgagttcaaacgcatatgggccgaatacgatccagaggcaaaaggtcgaataaaacacctggacgtagtcactcttctgagaagaattcaaccccctcttggatttggtaaattgtgccctcaccgggtggcctgtaagcggctcgtctccatgaatatgccattaaactcagacggaacagtgatgttcaacgccactcttttcgctctggtaagaaccgcccttagaatcaagaccgaagggaatctggaacaggccaatgaagagctgagagcgatcattaaaaaaatctggaaaaggacatctatgaagctgttagatcaggtggtcccacccgcaggagacgacgaggtgaccgtcggcaaattttacgcgaccttccttatccaggagtattttcgcaaatttaagaagcggaaagaacagggtcttgtggggaaaccatcgcagcggaacgcactttccttgcaagctggactgagaactttgcacgatatcggtccagagatcagacgggctatttcgggcgatctgacggccgaagaagagctggacaaggccatgaaggaagctgtatctgcggcatccgaggatgatatttttcgtagagcgggtggtctgtttggtaaccatgtctcatattatcagtcagacggtcggagcgcgttcccgcaaacgttcacaactcagaggcctttgcatattaataaagctggatccagtcagggtgataccgagtcccctagccatgagaaactggtggattccacttttaccccctcttcgtattcaagcaccggtagtaatgccaatatcaataacgccaacaacacggctctcggcagacttccacgtccagccggatatccgagtactgtgtcaacggtggaaggtcatggtcctccactgtctcctgccatccgggtgcaggaagtagcttggaagctgtcctccaaccgctgccatagccgtgagtcgcaggctgccatggccggacaggaagaaacgagccaggacgagacgtatgaagtaaaaatgaatcacgacaccgaagcatgctctgaaccttctcttctgtcaaccgaaatgttatcctaccaagacgacgagaaccgacagctcacattgcccgaagaggataagagagatattagacagagccccaaaagaggttttctgcggtctgcttccttggggaggcgggctagttttcaccttgagtgccttaaacgacagaaggatagaggtggggatatttcacaaaagacagtgttgcccctgcacctggtgcatcatcaggccctggcggtcgctggcctgtcacctctgctccagagatcccattcccccgcttcattcccacgtcccttcgcgacaccgccagccacccccggatctcggggttggccaccacagcccgtcccgacattgagactggaaggggtagagagctcagagaaattgaactcatctttccccagcatccactgcgggtcttgggccgagactacacctgggggtgggggtagtagtgccgctcgccgagtgcggccagtgtccttgatggtcccgtcccaggcaggcgcaccagggcgacagttccatggatccgccagcagcctcgtggaggccgttctcattagcgagggccttggccaatttgcccaggacccaaaattcattgaggtcaccacccaggaactggcagatgcttgtgatatgaccattgaggagatggagtccgccgcagataacatcctctcaggtggcgctccacagtcccctaacggcgcactcctgccgttcgtcaactgtcgcgatgccggacaagatcgtgccggtggggaggaagatgccggatgtgtgcgcgcacgagggaggcccagcgaggaagagctgcaggatagccgagtctatgtgtcaagtcttta

SEQ ID NO: 65327 - DNA, 7377 bp, Artificial Sequence
  derived and/or modified sequence
atggtcaatgagaatacgaggatgtacattccagaggaaaaccaccaaggttccaactatgggagcccacgccccgcccatgccaacatgaatgccaatgcggcagcggggctggcccctgagcacatccccaccccgggggctgccctgtcgtggcaggcggccatcgacgcagcccggcaggctaagctgatgggcagcgctggcaatgcgaccatctccacagtcagctccacgcagcggaagcggcagcaatatgggaaacccaagaagcagggcagcaccacggccacacgcccgccccgagccctgctctgcctgaccctgaagaaccccatccggagggcctgcatcagcattgtcgaatggaaaccatttgaaataattattttactgactatttttgccaattgtgtggccttagcgatctatattccctttccagaagatgattccaacgccaccaattccaacctggaacgagtggaatatctctttctcataatttttacggtggaagcgtttttaaaagtaatcgcctatggactcctctttcaccccaatgcctacctccgcaacggctggaacctactagattttataattgtggttgtggggctttttagtgcaattttagaacaagcaaccaaagcagatggggcaaacgctctcggagggaaaggggccggatttgatgtgaaggcgctgagggccttccgcgtgctgcgccccctgcggctggtgtccggagtcccaagtctccaggtggtcctgaattccatcatcaaggccatggtccccctgctgcacatcgccctgcttgtgctgtttgtcatcatcatctacgccatcatcggcttggagctcttcatggggaagatgcacaagacctgctacaaccaggagggcatagcagatgttccagcagaagatgacccttccccttgtgcgctggaaacgggccacgggcggcagtgccagaacggcacggtgtgcaagcccggctgggatggtcccaagcacggcatcaccaactttgacaactttgccttcgccatgctcacggtgttccagtgcatcaccatggagggctggacggacgtgctgtactggatgcaggacgctatgggctatgagttaccctgggtgtattttgtcagtctggtcatctttggatcctttttcgttctaaatctggttctcggtgtgttgagcggagagttttccaaagagagggagaaggccaaggcccggggagatttccagaagctgcgggagaagcagcagctagaagaggatctcaaaggctacctggattggatcactcaggccgaagacatcgatcctgagaatgaggacgaaggcatggatgaggagaagccccgaaacatgagcatgcccaccagtgagaccgagtccgtcaacaccgaaaacgtggctggaggtgacatcgagggagaaaactgcggggccaggctggcccaccggatctccaagtcaaagttcagccgctactggcgccggtggaatcggttctgcagaaggaagtgccgcgccgcagtcaagtctaatgtcttctactggctggtgattttcctggtgttcctcaacacgctcaccattgcctctgagcactacaaccagcccaactggctcacagaagtccaagacacggcaaacaaggccctgctggccctgttcacggcagagatgctcctgaagatgtacagcctgggcctgcaggcctacttcgtgtccctcttcaaccgctttgactgcttcgtcgtgtgtggcggcatcctggagaccatcctggtggagaccaagatcatgtccccactgggcatctccgtgctcagatgcgtccggctgctgaggattttcaagatcacgaggtactggaactccttgagcaacctggtggcatccttgctgaactctgtgcgctccatcgcctccctgctccttctcctcttcctcttcatcatcatcttctccctcctggggatgcagctctttggaggaaagttcaactttgatgagatgcagacccggaggagcacattcgataacttcccccagtccctcctcactgtgtttcagatcctgaccggggaggactggaattcggtgatgtatgatgggatcatggcttatggcggcccctcttttccagggatgttagtctgtatttacttcatcatcctcttcatctgtggaaactatatcctactgaatgtgttcttggccattgctgtggacaacctggctgatgctgagagcctcacatctgcccaaaaggaggaggaagaggagaaggagagaaagaagctggccaggactgccagcccagagaagaaacaagagttggtggagaagccggcagtgggggaatccaaggaggagaagattgagctgaaatccatcacggctgacggagagtctccacccgccaccaagatcaacatggatgacctccagcccaatgaaaatgaggataagagcccctaccccaacccagaaactacaggagaagaggatgaggaggagccagagatgcctgtcggccctcgcccacgaccactctctgagcttcaccttaaggaaaaggcagtgcccatgccagaagccagcgcgtttttcatcttcagctctaacaacaggtttcgcctccagtgccaccgcattgtcaatgacacgatcttcaccaacctgatcctcttcttcattctgctcagcagcatttccctggctgctgaggacccggtccagcacacctccttcaggaaccatattctgttttattttgatattgtttttaccaccattttcaccattgaaattgctctgaagatgactgcttatggggctttcttgcacaagggttctttctgccggaactacttcaacatcctggacctgctggtggtcagcgtgtccctcatctcctttggcatccagtccagtgcaatcaatgtcgtgaagatcttgcgagtcctgcgagtactcaggcccctgagggccatcaacagggccaaggggctaaagcatgtggttcagtgtgtgtttgtcgccatccggaccatcgggaacatcgtgattgtcaccaccctgctgcagttcatgtttgcctgcatcggggtccagctcttcaagggaaagctgtacacctgttcagacagttccaagcagacagaggcggaatgcaagggcaactacatcacgtacaaagacggggaggttgaccaccccatcatccaaccccgcagctgggagaacagcaagtttgactttgacaatgttctggcagccatgatggccctcttcaccgtctccaccttcgaagggtggccagagctgctgtaccgctccatcgactcccacacggaagacaagggccccatctacaactaccgtgtggagatctccatcttcttcatcatctacatcatcatcatcgccttcttcatgatgaacatcttcgtgggcttcgtcatcgtcacctttcaggagcagggggagcaggagtacaagaactgtgagctggacaagaaccagcgacagtgcgtggaatacgccctcaaggcccggcccctgcggaggtacatccccaagaaccagcaccagtacaaagtgtggtacgtggtcaactccacctacttcgagtacctgatgttcgtcctcatcctgctcaacaccatctgcctggccatgcagcactacggccagagctgcctgttcaaaatcgccatgaacatcctcaacatgctcttcactggcctcttcaccgtggagatgatcctgaagctcattgccttcaaacccaagggttactttagtgatccctggaatgtttttgacttcctcatcgtaattggcagcataattgacgtcattctcagtgagactaatccagctgaacatacccaatgctctccctctatgaacgcagaggaaaactcccgcatctccatcaccttcttccgcctgttccgggtcatgcgtctggtgaagctgctgagccgtggggagggcatccggacgctgctgtggaccttcatcaagtccttccaggccctgccctatgtggccctcctgatcgtgatgctgttcttcatctacgcggtgatcgggatgcaggtgtttgggaaaattgccctgaatgataccacagagatcaaccggaacaacaactttcagaccttcccccaggccgtgctgctcctcttcaggtgtgccaccggggaggcctggcaggacatcatgctggcctgcatgccaggcaagaagtgtgccccagagtccgagcccagcaacagcacggagggtgaaacaccctgtggtagcagctttgctgtcttctacttcatcagcttctacatgctctgtgccttcctgatcatcaacctctttgtagctgtcatcatggacaactttgactacctgacaagggactggtccatccttggtccccaccacctggatgagtttaaaagaatctgggcagagtatgaccctgaagccaagggtcgtatcaaacacctggatgtggtgaccctcctccggcggattcagccgccactaggttttgggaagctgtgccctcaccgcgtggcttgcaaacgcctggtctccatgaacatgcctctgaacagcgacgggacagtcatgttcaatgccaccctgtttgccctggtcaggacggccctgaggatcaaaacagaagggaacctagaacaagccaatgaggagctgcgggcgatcatcaagaagatctggaagcggaccagcatgaagctgctggaccaggtggtgccccctgcaggtgatgatgaggtcaccgttggcaagttctacgccacgttcctgatccaggagtacttccggaagttcaagaagcgcaaagagcagggccttgtgggcaagccctcccagaggaacgcgctgtctctgcaggctggcttgcgcacactgcatgacatcgggcctgagatccgacgggccatctctggagatctcaccgctgaggaggagctggacaaggccatgaaggaggctgtgtccgctgcttctgaagatgacatcttcaggagggccggtggcctgttcggcaaccacgtcagctactaccaaagcgacggccggagcgccttcccccagaccttcaccactcagcgcccgctgcacatcaacaaggcgggcagcagccagggcgacactgagtcgccatcccacgagaagctggtggactccaccttcaccccgagcagctactcgtccaccggctccaacgccaacatcaacaacgccaacaacaccgccctgggtcgcctccctcgccccgccggctaccccagcacggtcagcactgtggagggccacgggccccccttgtcccctgccatccgggtgcaggaggtggcgtggaagctcagctccaacaggtgccactcccgggagagccaggcagccatggcgggtcaggaggagacgtctcaggatgagacctatgaagtgaagatgaaccatgacacggaggcctgcagtgagcccagcctgctctccacagagatgctctcctaccaggatgacgaaaatcggcaactgacgctcccagaggaggacaagagggacatccggcaatctccgaagaggggtttcctccgctctgcctcactaggtcgaagggcctccttccacctggaatgtctgaagcgacagaaggaccgagggggagacatctctcagaagacagtcctgcccttgcatctggttcatcatcaggcattggcagtggcaggcctgagccccctcctccagagaagccattcccctgcctcattccctaggccttttgccaccccaccagccacacctggcagccgaggctggcccccacagcccgtccccaccctgcggcttgagggggtcgagtccagtgagaaactcaacagcagcttcccatccatccactgcggctcctgggctgagaccacccccggtggcgggggcagcagcgccgcccggagagtccggcccgtctccctcatggtgcccagccaggctggggccccagggaggcagttccacggcagtgccagcagcctggtggaagcggtcttgatttcagaaggactggggcagtttgctcaagatcccaagttcatcgaggtcaccacccaggagctggccgacgcctgcgacatgaccatagaggagatggagagcgcggccgacaacatcctcagcgggggcgccccacagagccccaatggcgccctcttaccctttgtgaactgcagggacgcggggcaggaccgagccgggggcgaagaggacgcgggctgtgtgcgcgcgcggggtcgaccgagtgaggaggagctccaggacagcagggtctacgtcagcagcctgtagtgggcgctgccagatgcgggcttttttttatttgtttcaatgttcctaatgggttcgtttcagaagtgcctcactgttctcgtgacctggagttaaccggaacagcgtcttcattcatttctgttgggaccagacgcggagcctgggtgcgcgagccgccctccgggaggaaggcgcccggctgcgtctgcagaggcggggagaggaggcggcgagggtcccggggcgcgaggaaggcgcctgccctctcccagctcgcaggccccgggcccggccgcgcctccgcggggagagcaccccggcttcccgcgcgccctcaccaaaaggaccctacagcaaacgggtgtctttcgactctgcttgtagaaaccatttgcacatattctgtacgagcctcgctgtctccctagagccagggccctgcggatttggagaagggagcggggcaggacttccaggaggaccccaacccggcccggagagggaggaggaggcctccaggggcgcggagctctggggatgggcgtcgggccggcagtggtgcggctcactccgtccctgcccacctgcgacgggatcccccgaccggcacgggccacgccgagctcccggccagccgccggcccgcaggcagcgcgagggaggagctgcgccgccggctccgcccaaccaggtggtgctgagcttccgctgagcgctcttttgttttgtggtttgacacttttcttgacagcatgttgcagtttcttttcggttttggttttttttaaatgttttattttgctttcccagcgggaggggaggaagaagagtgtttacaaagtcctgtagccccctcacctttctgttttcacttttgccaatgtacatcgggtttggttttcttgtattatttaaacggttgtggtttcctttttccacggaggttcaatagaagccgctgcaggagagttttaccaa

SEQ ID NO: 65328 - DNA, 6417 bp, Artificial Sequence
  derived and/or modified sequence
atggtgaacgagaacaccagaatgtacatccccgaggagaaccaccagggcagcaactacggcagccccagacccgcccacgccaacatgaacgccaacgccgccgccggcctggcccccgagcacatccccacccccggcgccgccctgagctggcaggccgccatcgacgccgccagacaggccaagctgatgggcagcgccggcaacgccaccatcagcaccgtgagcagcacccagagaaagagacagcagtacggcaagcccaagaagcagggcagcaccaccgccaccagaccccccagagccctgctgtgcctgaccctgaagaaccccatcagaagagcctgcatcagcatcgtggagtggaagcccttcgagatcatcatcctgctgaccatcttcgccaactgcgtggccctggccatctacatccccttccccgaggacgacagcaacgccaccaacagcaacctggagagagtggagtacctgttcctgatcatcttcaccgtggaggccttcctgaaggtgatcgcctacggcctgctgttccaccccaacgcctacctgagaaacggctggaacctgctggacttcatcatcgtggtggtgggcctgttcagcgccatcctggagcaggccaccaaggccgacggcgccaacgccctgggcggcaagggcgccggcttcgacgtgaaggccctgagagccttcagagtgctgagacccctgagactggtgagcggcgtgcccagcctgcaggtggtgctgaacagcatcatcaaggccatggtgcccctgctgcacatcgccctgctggtgctgttcgtgatcatcatctacgccatcatcggcctggagctgttcatgggcaagatgcacaagacctgctacaaccaggagggcatcgccgacgtgcccgccgaggacgaccccagcccctgcgccctggagaccggccacggcagacagtgccagaacggcaccgtgtgcaagcccggctgggacggccccaagcacggcatcaccaacttcgacaacttcgccttcgccatgctgaccgtgttccagtgcatcaccatggagggctggaccgacgtgctgtactggatgcaggacgccatgggctacgagctgccctgggtgtacttcgtgagcctggtgatcttcggcagcttcttcgtgctgaacctggtgctgggcgtgctgagcggcgagttcagcaaggagagagagaaggccaaggccagaggcgacttccagaagctgagagagaagcagcagctggaggaggacctgaagggctacctggactggatcacccaggccgaggacatcgaccccgagaacgaggacgagggcatggacgaggagaagcccagaaacatgagcatgcccaccagcgagaccgagagcgtgaacaccgagaacgtggccggcggcgacatcgagggcgagaactgcggcgccagactggcccacagaatcagcaagagcaagttcagcagatactggagaagatggaacagattctgcagaagaaagtgcagagccgccgtgaagagcaacgtgttctactggctggtgatcttcctggtgttcctgaacaccctgaccatcgccagcgagcactacaaccagcccaactggctgaccgaggtgcaggacaccgccaacaaggccctgctggccctgttcaccgccgagatgctgctgaagatgtacagcctgggcctgcaggcctacttcgtgagcctgttcaacagattcgactgcttcgtggtgtgcggcggcatcctggagaccatcctggtggagaccaagatcatgagccccctgggcatcagcgtgctgagatgcgtgagactgctgagaatcttcaagatcaccagatactggaacagcctgagcaacctggtggccagcctgctgaacagcgtgagaagcatcgccagcctgctgctgctgctgttcctgttcatcatcatcttcagcctgctgggcatgcagctgttcggcggcaagttcaacttcgacgagatgcagaccagaagaagcaccttcgacaacttcccccagagcctgctgaccgtgttccagatcctgaccggcgaggactggaacagcgtgatgtacgacggcatcatggcctacggcggccccagcttccccggcatgctggtgtgcatctacttcatcatcctgttcatctgcggcaactacatcctgctgaacgtgttcctggccatcgccgtggacaacctggccgacgccgagagcctgaccagcgcccagaaggaggaggaggaggagaaggagagaaagaagctggccagaaccgccagccccgagaagaagcaggagctggtggagaagcccgccgtgggcgagagcaaggaggagaagatcgagctgaagagcatcaccgccgacggcgagagcccccccgccaccaagatcaacatggacgacctgcagcccaacgagaacgaggacaagagcccctaccccaaccccgagaccaccggcgaggaggacgaggaggagcccgagatgcccgtgggccccagacccagacccctgagcgagctgcacctgaaggagaaggccgtgcccatgcccgaggccagcgccttcttcatcttcagcagcaacaacagattcagactgcagtgccacagaatcgtgaacgacaccatcttcaccaacctgatcctgttcttcatcctgctgagcagcatcagcctggccgccgaggaccccgtgcagcacaccagcttcagaaaccacatcctgttctacttcgacatcgtgttcaccaccatcttcaccatcgagatcgccctgaagatgaccgcctacggcgccttcctgcacaagggcagcttctgcagaaactacttcaacatcctggacctgctggtggtgagcgtgagcctgatcagcttcggcatccagagcagcgccatcaacgtggtgaagatcctgagagtgctgagagtgctgagacccctgagagccatcaacagagccaagggcctgaagcacgtggtgcagtgcgtgttcgtggccatcagaaccatcggcaacatcgtgatcgtgaccaccctgctgcagttcatgttcgcctgcatcggcgtgcagctgttcaagggcaagctgtacacctgcagcgacagcagcaagcagaccgaggccgagtgcaagggcaactacatcacctacaaggacggcgaggtggaccaccccatcatccagcccagaagctgggagaacagcaagttcgacttcgacaacgtgctggccgccatgatggccctgttcaccgtgagcaccttcgagggctggcccgagctgctgtacagaagcatcgacagccacaccgaggacaagggccccatctacaactacagagtggagatcagcatcttcttcatcatctacatcatcatcatcgccttcttcatgatgaacatcttcgtgggcttcgtgatcgtgaccttccaggagcagggcgagcaggagtacaagaactgcgagctggacaagaaccagagacagtgcgtggagtacgccctgaaggccagacccctgagaagatacatccccaagaaccagcaccagtacaaggtgtggtacgtggtgaacagcacctacttcgagtacctgatgttcgtgctgatcctgctgaacaccatctgcctggccatgcagcactacggccagagctgcctgttcaagatcgccatgaacatcctgaacatgctgttcaccggcctgttcaccgtggagatgatcctgaagctgatcgccttcaagcccaagggctacttcagcgacccctggaacgtgttcgacttcctgatcgtgatcggcagcatcatcgacgtgatcctgagcgagaccaaccccgccgagcacacccagtgcagccccagcatgaacgccgaggagaacagcagaatcagcatcaccttcttcagactgttcagagtgatgagactggtgaagctgctgagcagaggcgagggcatcagaaccctgctgtggaccttcatcaagagcttccaggccctgccctacgtggccctgctgatcgtgatgctgttcttcatctacgccgtgatcggcatgcaggtgttcggcaagatcgccctgaacgacaccaccgagatcaacagaaacaacaacttccagaccttcccccaggccgtgctgctgctgttcagatgcgccaccggcgaggcctggcaggacatcatgctggcctgcatgcccggcaagaagtgcgcccccgagagcgagcccagcaacagcaccgagggcgagaccccctgcggcagcagcttcgccgtgttctacttcatcagcttctacatgctgtgcgccttcctgatcatcaacctgttcgtggccgtgatcatggacaacttcgactacctgaccagagactggagcatcctgggcccccaccacctggacgagttcaagagaatctgggccgagtacgaccccgaggccaagggcagaatcaagcacctggacgtggtgaccctgctgagaagaatccagccccccctgggcttcggcaagctgtgcccccacagagtggcctgcaagagactggtgagcatgaacatgcccctgaacagcgacggcaccgtgatgttcaacgccaccctgttcgccctggtgagaaccgccctgagaatcaagaccgagggcaacctggagcaggccaacgaggagctgagagccatcatcaagaagatctggaagagaaccagcatgaagctgctggaccaggtggtgccccccgccggcgacgacgaggtgaccgtgggcaagttctacgccaccttcctgatccaggagtacttcagaaagttcaagaagagaaaggagcagggcctggtgggcaagcccagccagagaaacgccctgagcctgcaggccggcctgagaaccctgcacgacatcggccccgagatcagaagagccatcagcggcgacctgaccgccgaggaggagctggacaaggccatgaaggaggccgtgagcgccgccagcgaggacgacatcttcagaagagccggcggcctgttcggcaaccacgtgagctactaccagagcgacggcagaagcgccttcccccagaccttcaccacccagagacccctgcacatcaacaaggccggcagcagccagggcgacaccgagagccccagccacgagaagctggtggacagcaccttcacccccagcagctacagcagcaccggcagcaacgccaacatcaacaacgccaacaacaccgccctgggcagactgcccagacccgccggctaccccagcaccgtgagcaccgtggagggccacggcccccccctgagccccgccatcagagtgcaggaggtggcctggaagctgagcagcaacagatgccacagcagagagagccaggccgccatggccggccaggaggagaccagccaggacgagacctacgaggtgaagatgaaccacgacaccgaggcctgcagcgagcccagcctgctgagcaccgagatgctgagctaccaggacgacgagaacagacagctgaccctgcccgaggaggacaagagagacatcagacagagccccaagagaggcttcctgagaagcgccagcctgggcagaagagccagcttccacctggagtgcctgaagagacagaaggacagaggcggcgacatcagccagaagaccgtgctgcccctgcacctggtgcaccaccaggccctggccgtggccggcctgagccccctgctgcagagaagccacagccccgccagcttccccagacccttcgccaccccccccgccacccccggcagcagaggctggcccccccagcccgtgcccaccctgagactggagggcgtggagagcagcgagaagctgaacagcagcttccccagcatccactgcggcagctgggccgagaccacccccggcggcggcggcagcagcgccgccagaagagtgagacccgtgagcctgatggtgcccagccaggccggcgcccccggcagacagttccacggcagcgccagcagcctggtggaggccgtgctgatcagcgagggcctgggccagttcgcccaggaccccaagttcatcgaggtgaccacccaggagctggccgacgcctgcgacatgaccatcgaggagatggagagcgccgccgacaacatcctgagcggcggcgccccccagagccccaacggcgccctgctgcccttcgtgaactgcagagacgccggccaggacagagccggcggcgaggaggacgccggctgcgtgagagccagaggcagacccagcgaggaggagctgcaggacagcagagtgtacgtgagcagcctgtag

SEQ ID NO: 65329 - protein, 2173 aa, Artificial Sequence
  derived and/or modified sequence
MVNENTRMYIPEENHQGSNYGSPRPAHANMNANAAAGLAPEHIPTPGAALSWQAAIDAARQAKLMGSAGNATISTVSSTQRKRQQYGKPKKQGSTTATRPPRALLCLTLKNPIRRACISIVEWKPFEIIILLTIFANCVALAIYIPFPEDDSNATNSNLERVEYLFLIIFTVEAFLKVIAYGLLFHPNAYLRNGWNLLDFIIVVVGLFSAILEQATKADGANALGGKGAGFDVKALRAFRVLRPLRLVSGVPSLQVVLNSIIKAMVPLLHIALLVLFVIIIYAIIGLELFMGKMHKTCYNQEGIADVPAEDDPSPCALETGHGRQCQNGTVCKPGWDGPKHGITNFDNFAFAMLTVFQCITMEGWTDVLYWMQDAMGYELPWVYFVSLVIFGSFFVLNLVLGVLSGEFSKEREKAKARGDFQKLREKQQLEEDLKGYLDWITQAEDIDPENEDEGMDEEKPRNMSMPTSETESVNTENVAGGDIEGENCGARLAHRISKSKFSRYWRRWNRFCRRKCRAAVKSNVFYWLVIFLVFLNTLTIASEHYNQPNWLTEVQDTANKALLALFTAEMLLKMYSLGLQAYFVSLFNRFDCFVVCGGILETILVETKIMSPLGISVLRCVRLLRIFKITRYWNSLSNLVASLLNSVRSIASLLLLLFLFIIIFSLLGMQLFGGKFNFDEMQTRRSTFDNFPQSLLTVFQILTGEDWNSVMYDGIMAYGGPSFPGMLVCIYFIILFICGNYILLNVFLAIAVDNLADAESLTSAQKEEEEEKERKKLARTASPEKKQELVEKPAVGESKEEKIELKSITADGESPPATKINMDDLQPNENEDKSPYPNPETTGEEDEEEPEMPVGPRPRPLSELHLKEKAVPMPEASAFFIFSSNNRFRLQCHRIVNDTIFTNLILFFILLSSISLAAEDPVQHTSFRNHILFYFDIVFTTIFTIEIALKMTAYGAFLHKGSFCRNYFNILDLLVVSVSLISFGIQSSAINVVKILRVLRVLRPLRAINRAKGLKHVVQCVFVAIRTIGNIVIVTTLLQFMFACIGVQLFKGKLYTCSDSSKQTEAECKGNYITYKDGEVDHPIIQPRSWENSKFDFDNVLAAMMALFTVSTFEGWPELLYRSIDSHTEDKGPIYNYRVEISIFFIIYIIIIAFFMMNIFVGFVIVTFQEQGEQEYKNCELDKNQRQCVEYALKARPLRRYIPKNQHQYKVWYVVNSTYFEYLMFVLILLNTICLAMQHYGQSCLFKIAMNILNMLFTGLFTVEMILKLIAFKPKGYFSDPWNVFDFLIVIGSIIDVILSETNPAEHTQCSPSMNAEENSRISITFFRLFRVMRLVKLLSRGEGIRTLLWTFIKSFQALPYVALLIVMLFFIYAVIGMQVFGKIALNDTTEINRNNNFQTFPQAVLLLFRCATGEAWQDIMLACMPGKKCAPESEPSNSTEGETPCGSSFAVFYFISFYMLCAFLIINLFVAVIMDNFDYLTRDWSILGPHHLDEFKRIWAEYDPEAKGRIKHLDVVTLLRRIQPPLGFGKLCPHRVACKRLVSMNMPLNSDGTVMFNATLFALVRTALRIKTEGNLEQANEELRAIIKKIWKRTSMKLLDQVVPPAGDDEVTVGKFYATFLIQEYFRKFKKRKEQGLVGKPSQRNALSLQAGLRTLHDIGPEIRRAISGDLTAEEELDKAMKEAVSAASEDDIFRRAGGLFGNHVSYYQSDGRSAFPQTFTTQRPLHINKAGSSQGDTESPSHEKLVDSTFTPSSYSSTGSNANINNANNTALGRLPRPAGYPSTVSTVEGHGPPLSPAIRVQEVAWKLSSNRERHVPMCEDLELRRDSGSAGTQAHCLLLRKANPSRCHSRESQAAMAGQEETSQDETYEVKMNHDTEACSEPSLLSTEMLSYQDDENRQLTLPEEDKRDIRQSPKRGFLRSASLGRRASFHLECLKRQKDRGGDISQKTVLPLHLVHHQALAVAGLSPLLQRSHSPASFPRPFATPPATPGSRGWPPQPVPTLRLEGVESSEKLNSSFPSIHCGSWAETTPGGGGSSAARRVRPVSLMVPSQAGAPGRQFHGSASSLVEAVLISEGLGQFAQDPKFIEVTTQELADACDMTIEEMESAADNILSGGAPQSPNGALLPFVNCRDAGQDRAGGEEDAGCVRARGRPSEEELQDSRVYVSSL

SEQ ID NO: 65330 - DNA, 13585 bp, Artificial Sequence
  derived and/or modified sequence
ttattttttcaaatggtgtagccgccggaggtgcggtgctcagttcttggaaggggcccggatgtactgaggatgcgttacagtttcactcgaggaggcagtagtggaaaggagcagtttttggggtttgatgccataatgggaatcaggtaatcgtcggcggggaagaagaaacgctgcagaccacggcttcctcgaatcttgcgcgaaagccgccggcctcggaggagggattaatccagacccgccggggggtgttttcacatttcttcctcttcgtggctgctcctcctattaaaaccatttttggtccatggtcaatgagaatacgaggatgtacattccagaggaaaaccaccaaggttccaactatgggagcccacgccccgcccatgccaacatgaatgccaatgcggcagcggggctggcccctgagcacatccccaccccgggggctgccctgtcgtggcaggcggccatcgacgcagcccggcaggctaagctgatgggcagcgctggcaatgcgaccatctccacagtcagctccacgcagcggaagcggcagcaatatgggaaacccaagaagcagggcagcaccacggccacacgcccgccccgagccctgctctgcctgaccctgaagaaccccatccggagggcctgcatcagcattgtcgaatggaaaccatttgaaataattattttactgactatttttgccaattgtgtggccttagcgatctatattccctttccagaagatgattccaacgccaccaattccaacctggaacgagtggaatatctctttctcataatttttacggtggaagcgtttttaaaagtaatcgcctatggactcctctttcaccccaatgcctacctccgcaacggctggaacctactagattttataattgtggttgtggggctttttagtgcaattttagaacaagcaaccaaagcagatggggcaaacgctctcggagggaaaggggccggatttgatgtgaaggcgctgagggccttccgcgtgctgcgccccctgcggctggtgtccggagtcccaagtctccaggtggtcctgaattccatcatcaaggccatggtccccctgctgcacatcgccctgcttgtgctgtttgtcatcatcatctacgccatcatcggcttggagctcttcatggggaagatgcacaagacctgctacaaccaggagggcatagcagatgttccagcagaagatgacccttccccttgtgcgctggaaacgggccacgggcggcagtgccagaacggcacggtgtgcaagcccggctgggatggtcccaagcacggcatcaccaactttgacaactttgccttcgccatgctcacggtgttccagtgcatcaccatggagggctggacggacgtgctgtactggatgcaggacgctatgggctatgagttaccctgggtgtattttgtcagtctggtcatctttggatcctttttcgttctaaatctggttctcggtgtgttgagcggagagttttccaaagagagggagaaggccaaggcccggggagatttccagaagctgcgggagaagcagcagctagaagaggatctcaaaggctacctggattggatcactcaggccgaagacatcgatcctgagaatgaggacgaaggcatggatgaggagaagccccgaaacatgagcatgcccaccagtgagaccgagtccgtcaacaccgaaaacgtggctggaggtgacatcgagggagaaaactgcggggccaggctggcccaccggatctccaagtcaaagttcagccgctactggcgccggtggaatcggttctgcagaaggaagtgccgcgccgcagtcaagtctaatgtcttctactggctggtgattttcctggtgttcctcaacacgctcaccattgcctctgagcactacaaccagcccaactggctcacagaagtccaagacacggcaaacaaggccctgctggccctgttcacggcagagatgctcctgaagatgtacagcctgggcctgcaggcctacttcgtgtccctcttcaaccgctttgactgcttcgtcgtgtgtggcggcatcctggagaccatcctggtggagaccaagatcatgtccccactgggcatctccgtgctcagatgcgtccggctgctgaggattttcaagatcacgaggtactggaactccttgagcaacctggtggcatccttgctgaactctgtgcgctccatcgcctccctgctccttctcctcttcctcttcatcatcatcttctccctcctggggatgcagctctttggaggaaagttcaactttgatgagatgcagacccggaggagcacattcgataacttcccccagtccctcctcactgtgtttcagatcctgaccggggaggactggaattcggtgatgtatgatgggatcatggcttatggcggcccctcttttccagggatgttagtctgtatttacttcatcatcctcttcatctgtggaaactatatcctactgaatgtgttcttggccattgctgtggacaacctggctgatgctgagagcctcacatctgcccaaaaggaggaggaagaggagaaggagagaaagaagctggccaggactgccagcccagagaagaaacaagagttggtggagaagccggcagtgggggaatccaaggaggagaagattgagctgaaatccatcacggctgacggagagtctccacccgccaccaagatcaacatggatgacctccagcccaatgaaaatgaggataagagcccctaccccaacccagaaactacaggagaagaggatgaggaggagccagagatgcctgtcggccctcgcccacgaccactctctgagcttcaccttaaggaaaaggcagtgcccatgccagaagccagcgcgtttttcatcttcagctctaacaacaggtttcgcctccagtgccaccgcattgtcaatgacacgatcttcaccaacctgatcctcttcttcattctgctcagcagcatttccctggctgctgaggacccggtccagcacacctccttcaggaaccatattctgttttattttgatattgtttttaccaccattttcaccattgaaattgctctgaagatgactgcttatggggctttcttgcacaagggttctttctgccggaactacttcaacatcctggacctgctggtggtcagcgtgtccctcatctcctttggcatccagtccagtgcaatcaatgtcgtgaagatcttgcgagtcctgcgagtactcaggcccctgagggccatcaacagggccaaggggctaaagcatgtggttcagtgtgtgtttgtcgccatccggaccatcgggaacatcgtgattgtcaccaccctgctgcagttcatgtttgcctgcatcggggtccagctcttcaagggaaagctgtacacctgttcagacagttccaagcagacagaggcggaatgcaagggcaactacatcacgtacaaagacggggaggttgaccaccccatcatccaaccccgcagctgggagaacagcaagtttgactttgacaatgttctggcagccatgatggccctcttcaccgtctccaccttcgaagggtggccagagctgctgtaccgctccatcgactcccacacggaagacaagggccccatctacaactaccgtgtggagatctccatcttcttcatcatctacatcatcatcatcgccttcttcatgatgaacatcttcgtgggcttcgtcatcgtcacctttcaggagcagggggagcaggagtacaagaactgtgagctggacaagaaccagcgacagtgcgtggaatacgccctcaaggcccggcccctgcggaggtacatccccaagaaccagcaccagtacaaagtgtggtacgtggtcaactccacctacttcgagtacctgatgttcgtcctcatcctgctcaacaccatctgcctggccatgcagcactacggccagagctgcctgttcaaaatcgccatgaacatcctcaacatgctcttcactggcctcttcaccgtggagatgatcctgaagctcattgccttcaaacccaagggttactttagtgatccctggaatgtttttgacttcctcatcgtaattggcagcataattgacgtcattctcagtgagactaatccagctgaacatacccaatgctctccctctatgaacgcagaggaaaactcccgcatctccatcaccttcttccgcctgttccgggtcatgcgtctggtgaagctgctgagccgtggggagggcatccggacgctgctgtggaccttcatcaagtccttccaggccctgccctatgtggccctcctgatcgtgatgctgttcttcatctacgcggtgatcgggatgcaggtgtttgggaaaattgccctgaatgataccacagagatcaaccggaacaacaactttcagaccttcccccaggccgtgctgctcctcttcaggtgtgccaccggggaggcctggcaggacatcatgctggcctgcatgccaggcaagaagtgtgccccagagtccgagcccagcaacagcacggagggtgaaacaccctgtggtagcagctttgctgtcttctacttcatcagcttctacatgctctgtgccttcctgatcatcaacctctttgtagctgtcatcatggacaactttgactacctgacaagggactggtccatccttggtccccaccacctggatgagtttaaaagaatctgggcagagtatgaccctgaagccaagggtcgtatcaaacacctggatgtggtgaccctcctccggcggattcagccgccactaggttttgggaagctgtgccctcaccgcgtggcttgcaaacgcctggtctccatgaacatgcctctgaacagcgacgggacagtcatgttcaatgccaccctgtttgccctggtcaggacggccctgaggatcaaaacagaagggaacctagaacaagccaatgaggagctgcgggcgatcatcaagaagatctggaagcggaccagcatgaagctgctggaccaggtggtgccccctgcaggtgatgatgaggtcaccgttggcaagttctacgccacgttcctgatccaggagtacttccggaagttcaagaagcgcaaagagcagggccttgtgggcaagccctcccagaggaacgcgctgtctctgcaggctggcttgcgcacactgcatgacatcgggcctgagatccgacgggccatctctggagatctcaccgctgaggaggagctggacaaggccatgaaggaggctgtgtccgctgcttctgaagatgacatcttcaggagggccggtggcctgttcggcaaccacgtcagctactaccaaagcgacggccggagcgccttcccccagaccttcaccactcagcgcccgctgcacatcaacaaggcgggcagcagccagggcgacactgagtcgccatcccacgagaagctggtggactccaccttcaccccgagcagctactcgtccaccggctccaacgccaacatcaacaacgccaacaacaccgccctgggtcgcctccctcgccccgccggctaccccagcacggtcagcactgtggagggccacgggccccccttgtcccctgccatccgggtgcaggaggtggcgtggaagctcagctccaacagggaaaggcacgttccgatgtgtgaggatctggagctcaggagggattcaggctcagcagggactcaggctcactgccttctgctcaggaaagcaaacccctctaggtgccactcccgggagagccaggcagccatggcgggtcaggaggagacgtctcaggatgagacctatgaagtgaagatgaaccatgacacggaggcctgcagtgagcccagcctgctctccacagagatgctctcctaccaggatgacgaaaatcggcaactgacgctcccagaggaggacaagagggacatccggcaatctccgaagaggggtttcctccgctctgcctcactaggtcgaagggcctccttccacctggaatgtctgaagcgacagaaggaccgagggggagacatctctcagaagacagtcctgcccttgcatctggttcatcatcaggcattggcagtggcaggcctgagccccctcctccagagaagccattcccctgcctcattccctaggccttttgccaccccaccagccacacctggcagccgaggctggcccccacagcccgtccccaccctgcggcttgagggggtcgagtccagtgagaaactcaacagcagcttcccatccatccactgcggctcctgggctgagaccacccccggtggcgggggcagcagcgccgcccggagagtccggcccgtctccctcatggtgcccagccaggctggggccccagggaggcagttccacggcagtgccagcagcctggtggaagcggtcttgatttcagaaggactggggcagtttgctcaagatcccaagttcatcgaggtcaccacccaggagctggccgacgcctgcgacatgaccatagaggagatggagagcgcggccgacaacatcctcagcgggggcgccccacagagccccaatggcgccctcttaccctttgtgaactgcagggacgcggggcaggaccgagccgggggcgaagaggacgcgggctgtgtgcgcgcgcggggtcgaccgagtgaggaggagctccaggacagcagggtctacgtcagcagcctgtagtgggcgctgccagatgcgggcttttttttatttgtttcaatgttcctaatgggttcgtttcagaagtgcctcactgttctcgtgacctggagttaaccggaacagcgtcttcattcatttctgttgggaccagacgcggagcctgggtgcgcgagccgccctccgggaggaaggcgcccggctgcgtctgcagaggcggggagaggaggcggcgagggtcccggggcgcgaggaaggcgcctgccctctcccagctcgcaggccccgggcccggccgcgcctccgcggggagagcaccccggcttcccgcgcgccctcaccaaaaggaccctacagcaaacgggtgtctttcgactctgcttgtagaaaccatttgcacatattctgtacgagcctcgctgtctccctagagccagggccctgcggatttggagaagggagcggggcaggacttccaggaggaccccaacccggcccggagagggaggaggaggcctccaggggcgcggagctctggggatgggcgtcgggccggcagtggtgcggctcactccgtccctgcccacctgcgacgggatcccccgaccggcacgggccacgccgagctcccggccagccgccggcccgcaggcagcgcgagggaggagctgcgccgccggctccgcccaaccaggtggtgctgagcttccgctgagcgctcttttgttttgtggtttgacacttttcttgacagcatgttgcagtttcttttcggttttggttttttttaaatgttttattttgctttcccagcgggaggggaggaagaagagtgtttacaaagtcctgtagccccctcacctttctgttttcacttttgccaatgtacatcgggtttggttttcttgtattatttaaacggttgtggtttcctttttccacggaggttcaatagaagccgctgcaggagagttttaccaaccattgtgtatgcccaataatttgttatcatttccttaggtagtaacctatttttgttctggtttggttcggttatctaatggaaaggtaactggcaatgcacttgatgtggtcttgcacatgtgggtgatagagttgggttcctttttatgctgggtgtacaggtgggtttgggagagaggagcatgcgcgagagagtctccgagtgtgtgcgacgcgtgtgtgtgtggtgggttgtctgtgtgcatatgtcctgcccgtgtatatgcacccacaccatgtgcccgtgcacaccagtgactacgcagtcccccctttctggtttagctgtgggaagatctgaatctggggccgtttgaaagcaaaaacaaaccactgtctctgcttctgaaacgggaatcagtaactctttgcattttctgtcccacaagatatgcaaaaacaatgcaataatattcatttaaaaatacaattgtgagttgtgttggcattaaaactgtattttaaaaaaagacagaaatttaagggaaaaacacaagaaggcattttgcttcaatatattccgtgtaatgttttattgcattgataatgtttctgttgaagaaaccgttatacttgaattcaggtcagtttcagtatttttcaaatatttttttaaaactgaattgcaattgtgccaagcgaatataatgaattgaattaagttggttttcggattcacttcttgtatattttgctgcatgtaaagtaaatcattttgtatttggagtgtgacaagctttacctttgaactcaagtgcttttctatatgtggttgggggaaagggaacaagttttctttagtttgcacaatgagcaaaggtatcaccagtgtagtcattattctgctctccacaaacaggtttggacattactgttttgcatatcttgtgtttgcttacatttccctcaatttttccaaaatcgtttgctgggtatgtttgtaccgcctcttgctgtgagagaccaggacctattttattccagtcttcactctgtccactctgctctggtcatctgatttggtacttctccaagaacagcccttcactgtgaggtgcagggaggcgttctgatgagccctcagtcactgggccgtcatccgcatcccccatggaagaggtagctggctttcccttcccttccaccacacggaattttctctttggcttccttaggaaagtgtacactaaccgggaggataaaattaaagtcaggctgcttggagggaggggcatcctcacttccggattcttgttgctctacccaacaaggacagcaggggctcgagaaaggaactggtgaaaccctgatccatctgaaagtcaactctgcgtgctcctttctccatcccttcctcactctggagcagcctttccttcaggcttgccctaatgtttgggctgccggggagggggccaggacaagggaagaggcatccggagctcacagtgggggtgggaacagatttttgtgggggcatctctaatgctcacttatatctccctagaacatcactcttttggtgctgtgtccttcaaatgtatgtcaacagtggtggctgaaaagggactgctttggggaaaacaggacccaaccattcacccagaattgacccattaaatctcttccagtcctagtgttccctgagcccctcttggcacatatataagtaagctagaaattacaataagggacagtccattcctctatgacagcttgctggactgattcatgacaaagtggagaaatgtactcaatactccccggttaacacagtctagaaacagagtttctttatggatatccacacccaagtcatccaaactttcttgattccttttcactgccatcaaggtcctctagaaattgagtttaggtatcatcctttgaaaagttcccaagatttctaccaggaggtacacacaggcgttccctgtctagggcaggaggactatcctagcttgaccttctgatccactagaataagactggcgtatgatgcctgtcatcagaacagactggcacaagtagtgacatcaatgaaccacagcacaatcttccaagtgatgtctactctccacctaaaatggaattttccccatgaccttgtaaaacataattgtcacatcttccatacccctcctgacagcccccaagtgtcaggagaaaacagtcaggggctaagggcccaagggacttgaagaaacaacagtttaaggtctgcagtttggtcaacttaattcttgtcctccgaccagccctgcctctttcatttccagaccttggagaatttttcccagctttgattcagaaggtactagttataacccctttccttcttcttaatccaataggcctcactctcactgggaaatccactcaaaggaacaaggcaatgtctctcattctatttcccagttccaaattccaggtgcttgtctggagtgaagctacccgttactttctcccagcttttctccacccagcatgtctcctgcccatgcagctgaagacagtggggcaacctcaggagaagcagacctttccatgcccaagttcatctcctgagcaacagtgacacctagaaaatgaggactttggaagtcacccaaaagatggtggctactttatggagtcctgaagatacacagccaccactcctaaaggcaaagaaagaaaacacgaatgtaggtcagggatagagtggaaccctggtcatcggggtttttagcctcatcgtgggaaaggtggtaaaggaggatgatggcatctccatccctagaggccaagaattgaaatatcattgtcaaggattagaaacaattcagcaaagaggccacaaaaagggcctgctgactcccagaagacctctttaaaccccaggggaggcaaatacttgctgatggagtctgggccgtttccatattttaaagaagacctgcctctggggcaaatgtcagcacagagaggactgggaggagaatggaggcaagaaaagggcatattttgactccctctgtgcctcttcccagttcatggaaggatgtgttcagcttacccacccacagtgaccagtgtggtggagccgctgacatctcaaggatctatttgggaaggtgagaagagtactcattccatctgggggtgttgttccagccacatcagcctacctggtgggatgtgggggtgtctgccaccctgtcccccctctgctgatgtccctcccctcaggctgtccaggtgccacctgacacaggctgctgtgcaaagacaggcggggaagcccaaacctcactcccagggaggccctcagccgccagagtccaggttctccagaggctacgatttgaggaggttgagggggaagacaggagggaaagaaaagtcctacaactgtcaggaatggggcacctttccctgtccctaagcaaagctccctcttcccactgccctccccagccccagctccctgtcctccccaacacctagtgagaaagacggtgcgtggaagggagtcccatgggcagatgcttacacgacctctttgtgaagcctcttctgggtttaacttcattcatcaatttattcttatgtcaaagcaatgaaacttttctttctggagccagataccaatacaacaggtgaacgggtttctgccacatctctacattgacgggggatgcttgaacaacccccctcactacacagacacacaccgttaaggcacaagggctggggttgagctctagatgagggactttcctgctcctgcaagggtgagcactgtatacacagacaaggagggtgcagtagagtgactcccttggatggaagtagtaccatcagaacctactattattatgacataaattctatttacatacattgagagaatactacaatcaacactttttcctgggatgactttaagaggtttgagccacagcacctgaagtggcaaagatccatggtctttgtagggtattagagaactcttccagtcacctctgaaagcactctagatcttgcagctgagtggatgaagtgtaacaaatctgttgcacgctgagaggagtcagaattagcatttttcatgaaagttccccacgtctctactaagaatgaggaagaaaagactaagactaggtaattacacagaggcttgaaatgttacatcaccagagccaagtcctctcccttcagatcagttactggctgctacacagggacacccccaccttttcagggcatcccatgcactccacttctcaggatctaaggaatttgactttgtagggatcccagaaagggcactgtgccacttcccctggtgtgaatcagacatacattgtacattcatttctaaaattcactcatgcacctcaaaccaaggtcattatccaaaaaaaaaaaaaaaaagctctgggtggaagagtttgtaagttttaagagagggtcatttctatgtgaggaaatgcagaaatggacagaatgattcttattcactgtttgggtctggagaattcccattgtggaaatcttagagatctcaagtttattaccaagggaataaggaaaaaaaggtgagcaggcaccaggccaagcagtggctcccttgccaaggaacctgaggctgcaggtttcagggacccccttgaagaaacctctcctggccattggccaggagaaaagagaagtctctcctgtagagtcacaagagaagcaaaagagggtgggtcactgggtcctggacatagcccccaaccccaagacttcccaatatggagaaactacaccaatgtttaaaaggggaaaaggaaagaacttgtacatcaagggaagatgatttgtaaacacacagtcctgtgcagaaagatccccttcaggaggtgtctccagcatcccaaagctgtgcgcaccttctcttttcctgcctcaggccacctatgcatccagctgcagcccatacccacacctgaaatccatctcttgaatcccagccaggttatataccaccccattgccatgtcctgtcctggccagaatgcatgctgttcccccaagcctcgtgggagtgaggccatgggaaacagagatgagcatgtctggacaagtctgtgatggtagtggatgagaataacccatggcaaaacacgcacattcattaagaaatagggcgacagattccccgttggtgaagcactgaaaggtctattactctcataatattgctgttttattttaatccaccagagctaccatgcaaaactttcctcctgtgaaacgctccagataaagctcctctaatctccccttccctcatgtcctccagctcaaacccaccttcatcccccaaaccaatctgtatcatgcctgttatcagagaggcacagaaagatgggcagtgcctccgttgtcaccattccccacacccctacacacccccacaccctcccctccaggctccacgacttcacagtcttactgttgtaaatatcattgtacagtttgtaatcctcaaataatcccattgtcagaggcctcgcctgatgggccttctcaccctcgagaaaggccagggaatctagaaggggcaacccttcaaggagagcttcagggtcatctctgtgtgagacactattgtatattcctgtaagattgcatttttatctaaggaatgatgttatttaaaaaacaaacaaaaaacacaaaaaataagaattgcaaataaatttcttaacaatgtct

SEQ ID NO: 65331 - DNA, 6522 bp, Artificial Sequence
  derived and/or modified sequence
atggtgaacgagaataccaggatgtacattccagaagaaaaccaccaaggcagcaactatggttccccccgccctgcccacgccaacatgaacgcaaacgccgctgccggactggcccctgagcacatccctactcctggagctgctttgagctggcaggcagcaatagacgccgccagacaggccaaactcatgggaagtgccggcaacgctacgatctccactgtatccagtacacagaggaaacgtcagcagtatgggaagccaaaaaagcaggggtccaccactgctactcggccaccaagagccctgctctgtctaacgctaaaaaatcccatccggagagcatgcatttcgatcgtggagtggaagccttttgaaatcatcatccttcttactattttcgccaattgcgtagcgttggctatctacattcctttccctgaggatgattctaatgcgaccaattccaacctggaaagggtggaatacctgtttctaatcatttttacagtggaggcctttctgaaagtgatagcatatggtttacttttccaccccaatgcttacctcagaaatggctggaacctcctggactttattattgtagtggtcggcctcttttcggctattttggagcaggccactaaggccgatggcgctaatgccctcggcggtaagggggctggcttcgacgtgaaggcgctcagagccttcagggtgttgcgtcccttgcggctcgtgagtggcgtcccttcactccaggtggtgctcaacagcattataaaggccatggtcccacttctacacatcgcgctgctggtgctcttcgttatcatcatatatgctatcatcggactggagctgtttatgggaaagatgcacaagacatgttataaccaagagggcatcgccgacgtgccagccgaagacgacccgtcaccctgcgctctcgagaccggacatggccgacaatgccaaaacgggacagtctgcaagcccggatgggacgggcctaagcatggcattaccaattttgataattttgcctttgcgatgctgacagttttccagtgtattacaatggaaggttggaccgacgtgctgtactggatgcaggatgcaatgggatacgaactaccttgggtgtacttcgtgtccctggtgatttttggcagtttttttgtactcaatctggtgctcggcgtcttaagcggggaattcagcaaggaacgagaaaaggcaaaggcaaggggggatttccaaaagttgagggaaaagcagcagttagaggaggacttgaagggctatcttgactggattactcaggccgaggacatcgatcctgagaacgaggacgaagggatggatgaagaaaaaccccgcaatatgtccatgcccacaagtgaaaccgagtccgtaaacaccgagaatgtggctgggggagatatagaaggggaaaactgtggtgcaagattggcacacaggatttccaagagcaagttctcccgttactggcgacggtggaacagattctgcagaagaaaatgccgggccgcagtgaagtcaaacgtcttctattggctggtgatcttccttgtgtttcttaacacacttactatcgcttcagagcactacaaccagcctaactggctgactgaggtgcaggatacggcaaataaggccctgcttgccctgtttaccgcagaaatgcttttaaagatgtactcactcggtctgcaggcctattttgtgtcactctttaatcggtttgactgctttgtcgtctgtggtgggattttagagaccatcctcgtggagaccaagatcatgagtcctctaggaatttcggtgcttcgctgcgtcagacttctccgtatttttaagatcacacggtattggaattcactgtccaacttggtagcctcgctgctgaactcagtgaggtctatagcttccctgttactgctactgtttctgtttatcatcatatttagccttcttggaatgcagctgtttggaggtaagttcaactttgacgagatgcagaccagacggtctaccttcgataatttcccacagagcctgttaaccgtctttcagattctcaccggagaggactggaactccgtgatgtatgacggtatcatggcttacggaggcccaagcttccctggaatgctggtgtgcatttattttattatactcttcatctgtggaaattacattctactgaatgttttcttagcaattgccgtggataacctagctgacgcagaaagcctcacctcagcacagaaggaagaggaagaagagaaagagcggaagaagcttgctagaactgcaagtcctgagaaaaagcaggagctggtggaaaagcctgccgtgggcgagagcaaagaggaaaagatcgaactgaagtcaattaccgccgacggcgagtcccctcccgccactaagataaacatggacgaccttcagccaaacgagaatgaggataagtctccgtatcccaatcccgaaaccacaggagaagaagatgaagaagagcccgaaatgcctgtcggccctaggccgagacccctctccgaactgcacctgaaagagaaagcagtgcctatgccagaagcctccgcatttttcattttcagctccaataatcggttcagacttcagtgtcaccggattgtgaacgacaccattttcaccaatctgattctgttctttatattactctcctctatatctcttgctgccgaggatcccgtgcagcacacttcatttcgtaaccacatcctcttctacttcgacattgtgttcactacaatcttcaccatcgagatcgccctcaagatgaccgcctatggtgctttcctgcataagggttccttctgcagaaactacttcaacatactcgatctgttagttgtgtcagtttcactgatttcttttggcatccagagctcagctataaacgtcgtcaaaatactgcgggtgttgcgagtgctccgccccttgcgtgccatcaaccgcgccaagggcttgaaacacgtcgtgcagtgtgtgttcgtggccatcaggacgattggaaacattgtcatagtgactacgctgttgcagttcatgtttgcctgtataggggtccagctattcaagggaaagttatacacgtgcagcgactcatccaagcaaaccgaagctgagtgtaaaggaaactacattacatataaggacggggaagtggatcacccaatcatccagccccggtcttgggagaatagcaaattcgactttgataatgtactggctgcaatgatggctctcttcaccgtgtcgacttttgaaggttggcccgagctgctgtacagaagtatcgattcccacaccgaagacaaggggcccatttacaattaccgtgtcgaaattagcatcttctttattatttatataataatcatagctttctttatgatgaatattttcgtgggtttcgttattgtaaccttccaggagcagggggagcaggagtataagaattgtgagctcgacaagaaccagaggcagtgtgtggagtacgccctgaaggcccgacccttaagaaggtatatcccaaagaatcaacaccagtataaggtgtggtatgtggtcaatagtacgtactttgagtacctgatgtttgtccttatactgttgaataccatctgtctggccatgcagcactatggccagtcctgtctgtttaagatcgcgatgaatattctgaacatgctgttcaccggactattcaccgtagagatgatcttgaaattgatcgccttcaagccaaaggggtacttttcagatccctggaacgtgtttgatttcttaatagtgataggctcaatcatcgatgtcattttaagtgagaccaacccggccgagcacacccaatgcagcccctctatgaacgccgaggaaaattcgagaattagcattaccttcttccggctattccgggtgatgcgattagtaaagctcctctcacgtggcgaaggaatcaggactctcctctggactttcatcaaatcgtttcaggccctgccatacgtcgccctgctcattgtgatgctcttcttcatctatgctgtgatcggcatgcaggtgtttggtaagatcgccttaaatgacacgactgagatcaacagaaacaataattttcagaccttcccacaggctgttttactcctgttcagatgcgccactggcgaagcgtggcaggatataatgttggcctgcatgccaggaaagaaatgtgcaccagagtcagaacctagcaattctaccgaaggtgagaccccctgcggctccagcttcgccgtgttttactttatcagcttctatatgctgtgcgccttcctcatcattaatctcttcgtggctgtgatcatggataattttgattacctgacacgagattggtccattttagggccccatcatctggacgaatttaagcgtatctgggccgagtacgacccagaggctaaagggcgaataaagcacttggatgtcgtgacacttttacgacgcattcagcccccgctcggatttgggaagctgtgccctcatagagtggcttgcaagcgactggtgagtatgaacatgcctctgaattcagacggaaccgtaatgtttaacgccaccctgttcgctttggtccgtaccgccctgcgtatcaaaactgaggggaacctggaacaggctaatgaggagcttcgggccattattaaaaagatctggaagagaacctcgatgaagcttctcgatcaggtggtgccgcctgctggcgatgatgaggtgaccgtcggcaagttttatgccacatttttgatccaggaatatttccggaagtttaagaaaaggaaagagcaggggctggtggggaagccttcccagcggaacgccctgtctttgcaagccgggctgcggactttgcacgatattggcccagaaattagacgtgcaatcagcggagacctgacggctgaggaggagcttgataaagccatgaaggaggctgtctccgcagcttctgaggacgacatttttcggagagccggtggcttgtttggtaatcacgtctcgtactaccagagcgacggacgaagcgcttttccccaaacctttactactcagcgtcccctgcacattaataaggccggtagcagtcagggcgacactgagtccccctcacacgaaaagttagtcgacagcacgttcacccctagcagttattcaagcacgggctccaacgccaacattaataacgcaaataacaccgctctcgggcggctgcctaggcccgctgggtacccttctacagtgagcacagtggagggccacggacctcctctgtcacctgctattcgcgttcaggaagtcgcttggaagttatcatccaatcgcgagcggcatgtgcccatgtgcgaagacctcgagcttagaagggatagcgggtctgcaggaacacaggcccactgtttacttctgaggaaagcaaatccttctaggtgtcactcacgcgagagccaggccgccatggctggacaggaggagacttctcaggacgagacctacgaggtcaaaatgaaccacgatacggaggcctgctctgaaccctcgctattatctactgagatgctgagttaccaggatgatgaaaaccgacagctgaccctgcccgaagaggacaaacgcgacatcaggcagagccctaagcgtggctttctaaggtcggccagcctggggaggagagccagtttccatctggagtgcctgaaacggcagaaggatcgcggaggagacatctctcagaaaacagtattacctttacacctggttcaccatcaggccctggccgttgctggtctctcgccgcttctgcaaagaagtcacagcccagcctcgttcccaagaccattcgctacccctccagccactccaggcagcagagggtggccaccacagcccgtgcccacactccgccttgaaggcgtggaatcctctgagaagctcaactcctccttcccatcaatacactgcgggagctgggccgaaacaacccctggtggaggcggcagtagcgcagcaagacgagtgcggcccgtgtcactaatggtgccctcccaggccggggcgccagggagacaatttcacggatcagcttcttcgctcgtagaggcagtgctgattagcgaggggttgggacaattcgcgcaggatccaaagtttatcgaagtcacaacgcaagagctcgccgacgcctgtgatatgaccatcgaggagatggaatccgccgcggataacattcttagcggcggagctccacagagcccgaacggagccctgctaccctttgtgaattgtcgggatgctgggcaggaccgagccggcggcgaggaggatgccggttgtgtgcgggctagagggagaccctccgaagaggagctgcaagattctcgcgtgtacgtgtcatccctgtag

SEQ ID NO: 65332 - DNA, 6522 bp, Artificial Sequence
  derived and/or modified sequence
atggtgaatgaaaacaccaggatgtacatccctgaggagaaccaccagggcagcaactacggcagccccaggcctgcccacgccaacatgaatgccaatgctgctgctggcctggcccctgagcacatccccacccctggggccgccctgtcctggcaggccgccattgatgctgcccggcaggccaagctgatgggcagcgctggaaatgccaccatcagcacagtgagcagcacccagaggaagaggcagcagtatggcaagcccaagaagcagggcagcaccacagccacccggcccccccgggccctgctgtgcctgaccctgaagaaccccatccggcgggcctgcatcagcatcgtggagtggaagccctttgagatcatcatcctgctgaccatctttgccaactgtgtggccctggccatctacatccccttcccagaagatgacagcaatgccaccaacagcaacctggagcgggtggagtacctgttcctgatcatcttcaccgtggaggccttcctgaaggtgattgcctacggcctgctcttccaccccaatgcctacctgagaaatggctggaacctgctggacttcatcatcgtggtggtgggcctcttcagcgccatcctggagcaggccaccaaggcagatggagccaatgccctgggcggcaaaggagctggctttgatgtgaaggccctgcgggccttccgggtgctgcggcccctgcggctggtgtctggagtgcccagcctgcaggtggtgctgaacagcatcatcaaggccatggtgcccctgctgcacatcgccctgctggtgctgtttgtgatcatcatctatgccatcatcggcctggagctgttcatgggcaagatgcacaagacctgctacaaccaggagggcattgctgatgtgcctgcagaagatgaccccagcccctgtgccctggagaccggccacggccggcagtgccagaatggcaccgtgtgcaagccaggctgggatggccccaagcacggcatcaccaactttgacaactttgcctttgccatgctgactgtgttccagtgcatcaccatggagggctggacagatgtgctgtactggatgcaggatgccatgggctatgagctgccctgggtgtactttgtgtccctggtgatcttcggcagcttctttgtgctgaacctggtgctgggcgtgctgtctggagagttcagcaaggagcgggagaaggccaaggcccggggggacttccagaagctgcgggagaagcagcagctggaggaggacctgaagggctacctggactggatcacccaggctgaagatattgatcctgaaaatgaagatgagggcatggatgaggagaagcccaggaacatgtccatgcccaccagcgagacagaatctgtgaacacagaaaatgtggccggcggggacatcgagggggagaactgtggggcccggctggcccaccgcatcagcaagagcaagttcagccgctactggaggcgctggaaccgcttctgcaggaggaagtgcagagctgctgtgaagagcaatgtgttctactggctggtgatcttcctggtgttcctgaacaccctgaccatcgccagcgagcactacaaccagcccaactggctgacagaggtgcaggacacagccaacaaggccctgctggccctcttcaccgctgagatgctgctgaagatgtacagcctgggcctgcaggcctactttgtgtccctcttcaacagatttgactgctttgtggtgtgtggcggcatcctggagaccatcctggtggagaccaagatcatgagccccctgggcatctctgtgctgcgctgtgtgcggctgctgcgcatcttcaagatcacccgctactggaacagcctgagcaacctggtggccagcctgctgaacagcgtgcgcagcatcgccagcctgctgctgctgctcttcctgttcatcatcatcttcagcctgctgggcatgcagctgtttggaggcaagttcaactttgatgagatgcagaccaggaggagcacctttgacaacttcccccagagcctgctgaccgtcttccagatcctgaccggggaggactggaacagcgtgatgtatgatggcatcatggcctatggaggccccagcttccctggcatgctggtgtgcatctacttcatcatcctcttcatctgtggcaactacatcctgctgaatgtgttcctggccatcgctgtggacaacctggctgatgctgagagcctgaccagcgcccagaaggaggaggaggaggagaaggagaggaagaagctggccaggacagccagccctgagaagaagcaggagctggtggagaagccagctgtgggggagagcaaggaggagaagattgagctgaagagcatcacagcagatggagagagccccccagccaccaagatcaacatggatgacctgcagcccaatgaaaatgaagacaagagcccctaccccaaccctgagaccactggagaggaggatgaggaggagcctgagatgcctgtgggcccccggccccggcccctgtctgagctgcacctgaaggagaaggctgtgcccatgcctgaggccagcgccttcttcatcttcagcagcaacaaccgcttccggctgcagtgccaccgcatcgtgaatgacaccatcttcaccaacctgatcctcttcttcatcctgctgagcagcatcagcctggccgctgaggaccctgtgcagcacaccagcttcaggaaccacatcctcttctactttgacatcgtgttcaccaccatcttcaccatcgagatcgccctgaagatgacagcctatggagccttcctgcacaagggcagcttctgcaggaactacttcaacatcctggacctgctggtggtgtctgtgtccctcatcagctttggcatccagagcagcgccatcaacgtggtgaagatcctgcgggtgctgcgggtgctgcggcccctgcgggccatcaacagagccaagggcctgaagcacgtggtgcagtgtgtgtttgtggccatccgcaccatcggcaacatcgtcatcgtgaccaccctgctgcagttcatgtttgcctgcatcggcgtgcagctgttcaagggcaagctgtacacctgcagcgacagcagcaagcagacagaagctgagtgcaagggcaactacatcacctacaaggatggagaggtggaccaccccatcatccagcccaggtcctgggagaacagcaagtttgattttgacaacgtgctggccgccatgatggccctcttcaccgtgtccacctttgagggctggccagagctgctgtaccgcagcattgacagccacacagaggacaagggccccatctacaactacagagtggagatcagcatcttcttcatcatctacatcatcatcatcgccttcttcatgatgaacatctttgtgggcttcgtcatcgtgaccttccaggagcagggcgagcaggagtacaagaactgtgagctggacaagaaccagaggcagtgtgtggagtatgccctgaaggcccggcccctgcggcgctacatccccaagaaccagcaccagtacaaggtgtggtacgtggtgaacagcacctactttgagtacctgatgtttgtgctgatcctgctgaacaccatctgcctggccatgcagcactacggccagagctgcctcttcaagatcgccatgaacatcctgaacatgctgttcaccggcctcttcaccgtggagatgatcctgaagctgattgccttcaagcccaagggctacttcagtgacccctggaatgtgtttgacttcctgattgtcatcggcagcatcattgatgtgatcctgtctgagaccaacccagctgagcacacccagtgcagccccagcatgaatgctgaggagaacagccgcatcagcatcaccttcttccgcctcttccgggtgatgaggctggtgaagctgctgagcagaggagagggcatccgcaccctgctgtggaccttcatcaagagcttccaggccctgccctacgtggccctgctgattgtgatgctgttcttcatctatgctgtgattggcatgcaggtgtttgggaagatcgccctgaatgacaccacagagatcaacagaaacaacaacttccagaccttcccccaggccgtgctgctgctcttccgctgtgccaccggggaggcctggcaggacatcatgctggcctgcatgcctgggaagaagtgtgcccctgagagcgagcccagcaacagcacagaaggagagaccccctgtggcagcagctttgctgtgttctacttcatctccttctacatgctgtgtgccttcctgatcatcaacctgtttgtggccgtcatcatggacaactttgactacctgacccgggactggagcatcctgggcccccaccacctggatgagttcaagaggatctgggccgagtatgaccctgaggccaagggccgcatcaagcacctggatgtggtgaccctgctgcggcgcatccagccccccctgggctttgggaagctgtgcccccaccgggtggcctgcaagaggctggtgtccatgaacatgcccctgaacagtgatggcaccgtgatgtttaatgccaccctgtttgccctggtgaggacagccctgcgcatcaagacagagggcaacctggagcaggccaatgaggagctgcgggccatcatcaagaagatctggaagaggacctccatgaagctgctggaccaggtggtgcccccagctggagatgatgaggtgacagtgggcaagttctacgccaccttcctgatccaggagtacttcaggaagttcaagaagaggaaggagcagggcctggtgggcaagcccagccagagaaatgccctgagcctgcaggccggcctgcggaccctgcatgacatcggccctgagatccggcgggccatcagcggggacctgacagctgaggaggagctggacaaggccatgaaggaggccgtgtctgctgcctctgaagatgacatcttcagaagagctgggggcctgtttggaaaccacgtgtcctactaccagagtgatggccgcagcgccttcccccagaccttcaccacccagaggcccctgcacatcaacaaggccggcagcagccagggcgacacagagagccccagccatgagaagctggtggacagcaccttcacccccagcagctacagcagcacaggcagcaatgccaacatcaacaatgccaacaacacagccctgggccgcctgcccaggcctgctggctaccccagcacagtgtccacagtggagggccacggcccccccctgagccctgccatccgggtgcaggaggtggcctggaagctgagcagcaaccgggagcggcacgtgcccatgtgtgaggacctggagctgcggcgggacagcggcagcgctggcacccaggcccactgcctgctgctgaggaaggccaaccccagccgctgccacagccgggagagccaggccgccatggccggccaggaggagaccagccaggatgagacctatgaggtgaagatgaaccacgacacagaggcctgcagcgagcccagcctgctgagcacagagatgctgagctaccaggatgatgagaaccggcagctgaccctgcctgaggaggacaagagggacatccggcagagccccaagaggggcttcctgcggagcgccagcctgggccggcgggccagcttccacctggagtgcctgaagaggcagaaggaccggggcggggacatcagccagaagacagtgctgcccctgcacctggtgcaccaccaggccctggccgtggccggcctgagccccctgctgcagaggagccacagccctgccagcttcccccggccctttgccaccccaccagccaccccaggcagccggggctggccaccccagcctgtgcccaccctgcggctggagggcgtggagagcagcgagaagctgaacagcagcttccccagcatccactgcggctcctgggccgagaccaccccaggcggcggcggcagcagcgctgcccggcgggtgcggcctgtgtccctgatggtgcccagccaggccggggcccctggccggcagttccacggcagcgccagcagcctggtggaggccgtgctgatcagcgagggcctgggccagtttgcccaggaccccaagttcatcgaggtgaccacccaggagctggctgatgcctgtgacatgaccatcgaggagatggagagcgctgctgacaacatcctgagcggcggggccccccagagccccaacggggccctgctgccctttgtgaactgcagagatgctggccaggacagagctggaggagaagaagatgctggctgtgtgcgggcccggggccggcccagcgaggaggagctgcaggacagccgggtgtatgtgagcagcctgtag

SEQ ID NO: 65333 - DNA, 6522 bp, Artificial Sequence
  derived and/or modified sequence
atggtgaacgagaacacccggatgtacatccccgaggagaaccaccaggggagcaactatggtagtccccgccctgcgcatgcgaacatgaacgctaatgccgccgcaggcctagcccctgaacatataccaactcctggggccgccctcagttggcaggccgcgatagatgccgcaagacaggccaaattgatggggagcgctgggaacgccactatttccaccgtcagtagcacccagaggaaacgacagcagtacggcaaaccgaagaaacaaggatccacaacagcaactaggcccccgagggccctattgtgtcttaccttgaagaaccccatccgtcgagcgtgtatttccattgttgaatggaagccctttgaaatcattattctgttaacaattttcgccaattgtgtggccctcgccatttatatcccctttccagaggacgactccaatgcaaccaactccaatctcgaaagagtcgagtatctgttccttattatctttaccgtcgaggcctttctgaaggtcatcgcctatggtctgctgttccatcctaatgcttacctccgaaatgggtggaacctgctggacttcattatcgtggtcgtcggcctattctccgctatcctcgaacaagctacaaaagccgatggcgccaatgcactaggaggcaagggtgccggttttgatgttaaggccttaagggccttcagggtcctgcgcccgctccggcttgtgagtggcgtgcccagcctccaggttgttctcaattccattattaaggccatggtcccactgcttcacatcgcgctgttggtgctgttcgtcattatcatctatgcaatcatcggcttggaactgttcatgggaaaaatgcataagacctgttataaccaagaagggatcgccgacgtgcccgctgaagatgatccaagtccatgcgccctcgagactgggcatggccgccagtgtcagaacggaacagtctgcaaaccgggctgggacggccccaagcatggaatcactaatttcgacaacttcgcctttgcgatgctgaccgtcttccagtgcattacgatggaggggtggactgacgtgctgtactggatgcaagacgccatgggctatgagctgccttgggtgtactttgtgtcccttgtcatcttcggctctttcttcgttcttaatctggtgctcggggtgttgagcggcgagttttcaaaggaacgggagaaagccaaggctagaggcgacttccagaaacttcgtgaaaagcagcagctggaagaagacctcaagggctatttggactggatcacccaggccgaggacatcgaccccgagaacgaggatgaaggaatggacgaagagaagcccagaaacatgtcaatgccaacaagcgagacagagagtgtgaacacagaaaacgtggccgggggagacatcgagggggagaactgcggtgcgcgcctggcccatagaatcagtaagagcaagttttctcggtactggaggcggtggaacagattctgcagacggaagtgcagagctgccgttaaaagcaatgttttctactggttggttatctttctggtgttcttaaacacacttacaatcgcttcagagcattataaccagccaaactggcttactgaggtgcaggacaccgcgaataaagccctattggcactgttcaccgccgaaatgcttctgaagatgtactctttgggcctgcaggcttattttgtgtcactgttcaaccggtttgactgttttgtggtctgcgggggtatcctggaaaccatcctggttgaaacaaaaattatgtccccactgggtattagcgtcctgcgctgtgttcgcctgctgaggatcttcaaaatcacccgttattggaacagtctctctaacctggttgcctcccttctgaattccgtacgcagcatcgcgagtctgctcttactgctgtttctctttatcatcatcttctcactgttaggaatgcagctcttcggggggaaattcaactttgatgagatgcagacccgacggagtaccttcgataacttcccacagagcctgctgaccgtgtttcagatactgactggcgaagactggaattccgttatgtatgacggaatcatggcctacggcggacccagctttcccgggatgctcgtttgcatatactttattatcctttttatatgcggcaactatattttactgaatgtgttcctggctatcgccgttgataacctggctgatgcagaaagcctgacatccgctcaaaaagaggaggaagaggaaaaggagcgcaagaagctggcccgaactgcgagcccagagaaaaagcaggagctggtcgagaagcctgcagtgggcgaaagcaaggaggaaaagatcgaactgaaatctatcacagctgacggcgagagtccccctgccacaaaaattaatatggacgacctgcagcccaatgagaatgaagataaaagcccgtaccccaaccccgagactaccggagaagaggatgaggaagaacccgaaatgcccgtgggtccccggcctaggcctcttagtgaattgcacttaaaagagaaagcggtgcccatgcccgaagcatccgccttttttatcttctccagtaacaatcgcttcaggctacagtgccatcgcattgttaatgataccatctttacaaacctcattctgttttttatattgctttctagcataagtcttgccgctgaggacccagtccaacacacaagtttccggaatcatattctgttttacttcgacatcgtgttcactactatcttcacaatcgagatagcactgaagatgacggcctatggggctttcctgcataagggcagcttctgtagaaactattttaatattctggacttattggtcgtctccgtgtctctgatctcctttggtattcaatcaagcgccataaacgtggtgaagatactgcgcgtgctccgggtccttagacctcttcgagcaattaacagagccaagggcttgaaacacgtggtccagtgcgtgtttgtggcaattaggaccattgggaatattgtgatagttaccactctattgcaatttatgtttgcctgcataggcgtccagctctttaagggcaagttgtacacctgttctgacagctcgaagcagaccgaggccgagtgtaaaggtaattacatcacatataaggatggagaggtcgaccacccaatcattcagccgcgcagctgggagaactcaaaattcgactttgataatgtgctggcggccatgatggcactattcaccgtctccacattcgaggggtggccagagcttttgtacagatccattgatagccacaccgaggataaaggcccgatctacaattacagagtcgagatctctatatttttcattatctacattatcatcatcgcatttttcatgatgaatatcttcgttggctttgtgatcgtgacatttcaggaacagggagagcaggagtataagaattgcgagctggataagaaccaacgtcaatgcgtagaatacgctttaaaagcccgccctttaaggcgctacatccctaaaaatcagcaccagtacaaggtgtggtacgttgtgaactcaacatattttgaatatttgatgtttgtgctcatcctgttaaatacaatctgcctcgctatgcagcattatggccagtcttgcctgtttaagattgccatgaatattctaaatatgctttttactggactgttcactgtggagatgatcttgaagctaattgcattcaagcctaagggatatttctccgacccatggaacgtgttcgacttcttgatagttatcggtagcattatagatgtgatcctgagtgagaccaatccagcggagcatacccagtgttccccgtcgatgaacgccgaggagaattccagaatctctattactttttttcgactgtttagggtcatgagactggtcaaactgctcagtcgtggggagggcatccgaaccctgctgtggacctttatcaaaagttttcaagccctcccttacgtggcattgttgatcgtgatgctcttttttatttacgccgtgataggcatgcaggtcttcggcaagatcgccctgaatgacacgacagagattaatagaaacaataacttccagacctttccacaggcggtgttgctccttttccgatgcgctaccggggaagcctggcaggatatcatgctcgcttgcatgcctgggaagaagtgtgcgcccgagtcagaaccttctaacagcaccgagggtgaaacgccctgtgggagcagtttcgcggtgttttactttatcagtttctatatgctttgcgcattcctgatcatcaacttgtttgttgctgttatcatggacaattttgactatctgacccgcgactggtctatcctgggaccccaccatctcgacgagtttaaacgtatttgggccgagtacgatcccgaagctaaaggccgaatcaagcatctcgacgtcgtgacgctgctgcggcgcattcagccccctctcggcttcggcaagttgtgtccacatcgagtagcctgcaaacgtctggtctctatgaacatgccccttaacagcgatggcactgtcatgttcaatgccacattgttcgctctggtccgcaccgctctgcgaataaagaccgaaggaaatttagagcaggctaatgaggagctcagagcgatcattaagaagatctggaagcgaaccagtatgaagctgctggaccaagtcgtgccaccggccggagatgatgaggtgacagtcggaaagttctacgcaacatttctcatacaggagtatttccgaaaattcaaaaaaagaaaagagcaggggctcgtcggaaagcctagccagcgcaatgccctgagcctccaggctggcctgcgaacgctgcacgacattggccccgagataagacgtgcaatctctggagatctgacggccgaggaggaattagacaaagctatgaaggaggcggtttcagcagcgagtgaagacgacatcttccgtcgggccggcggcctattcggcaatcatgtgtcttactaccagagcgatggccgatcagcattcccacagacattcaccactcagagacctctgcacattaataaggctggatcttcccaaggagataccgaaagtcccagccacgagaagttagttgactcaactttcactcctagttcatattccagcactggatcaaacgcaaacataaataatgccaacaatacagccttgggccgcctcccgaggcccgcgggataccccagtacagtttcaacagttgagggtcacgggcctcctttgtctcccgccatccgcgtccaggaagttgcctggaagcttagttctaatagggagagacacgtccctatgtgtgaagatttggagctgcgtcgggattctggcagcgcagggacccaagcacattgtttgctgctacgcaaggcaaaccccagtcggtgccattccagagagtcccaagccgcaatggcaggacaagaagagacttcacaggacgaaacctacgaggttaaaatgaatcatgataccgaggcctgcagtgaaccttcgctgctgtccaccgagatgcttagttaccaggacgacgaaaaccggcagcttacattgccggaggaagataagcgagacatccggcagtcccctaaacgaggatttttgagatctgcctccctgggccgccgtgcgtctttccacctagaatgcttaaaacgacagaaagatcgaggcggcgatatatcacagaaaaccgtgctgccactacatctcgtgcaccaccaggctctggccgttgcgggacttagccccctgctccagaggagccactcaccagcctctttccccaggccctttgctacgccccccgcaactccgggctctcgcggctggcccccgcaacccgtaccgactctgagattggagggggtggagtctagcgaaaaattgaactcttcatttcctagcatccactgcgggtcttgggctgagactactccaggagggggcggcagcagtgccgcgaggagagttcggcctgtgtccctgatggtaccctcccaagccggcgctcccggtcggcaattccacggatcagcttctagcctggtagaagccgttttaatctccgagggcctgggacagttcgcccaggaccctaagttcatagaagtgaccactcaggaattagccgacgcgtgtgatatgaccatcgaggagatggagagtgcggccgacaatatactatcaggcggtgctccgcagagtcccaatggcgcactactcccttttgtgaactgtagggacgcagggcaggatagagctgggggggaggaggacgcgggatgcgtgcgggccaggggtagaccatccgaggaggagctacaggactctagggtctacgtaagcagcctctag

SEQ ID NO: 65334 - DNA, 6521 bp, Artificial Sequence
  derived and/or modified sequence
atggttaacgaaaacacccggatgtatatccctgaggaaaaccaccaaggttccaactacggtagccctaggcccgcacatgctaatatgaatgccaatgcggcagctggcttggcaccagagcacatacccactccgggagccgcacttagctggcaggcagcaatagatgccgctcgacaagccaagctgatggggtcagccggaaatgccactatttccacagtcagcagtacacagcgaaagcgacagcagtacggtaaacctaaaaagcagggtagtaccactgccacgcgtccgcctcgcgcattgttgtgtctgacactcaagaaccctattaggagagcttgcatcagcattgttgaatggaagccatttgaaattataatcctgctgaccattttcgctaattgtgtcgcactcgccatctatatcccctttcccgaggacgatagtaacgcaaccaacagcaacctggaacgggtggaatacctctttttgataatcttcactgtggaggcgttccttaaggtaatcgcgtacggcctcctgttccaccctaacgcatatctgcgcaatggatggaacctcctggattttattatcgttgtggtgggcctgttctcagcaattctggagcaggccacaaaggccgacggtgctaacgcactgggcggaaagggagcaggttttgatgttaaggctctccgggctttcagggtgctgcggccattgaggctggtttcaggcgtcccaagtctgcaggtagtgctgaactcaatcatcaaggcgatggttccactcctccacatcgcactcctggtgttattcgtgattataatatacgccatcattgggctggaactgtttatgggcaaaatgcacaagacatgctacaatcaagagggtatcgccgatgtgccagccgaagatgatccctctccatgtgccttggaaacaggtcacggcagacagtgccaaaatggcacagtatgtaaacccggttgggatggccctaagcatgggatcacgaattttgacaatttcgccttcgccatgcttactgttttccagtgtatcacgatggagggctggacggatgtcctgtattggatgcaagacgccatgggctacgagctcccatgggtgtattttgtctctctcgttatattcgggtccttctttgttttgaacctggtcctgggagtgctgagtggtgagtttagtaaggagagggagaaggcgaaggccaggggtgatttccagaaattgcgagagaagcaacagctggaagaggaccttaagggctatttagactggatcacacaggcggaggatatcgacccagaaaacgaggacgaaggaatggatgaggagaagcccaggaatatgagcatgcctaccagcgaaactgagagtgtaaacacagaaaacgtagcagggggagacattgaaggcgagaactgtggagcgcgtcttgcccacagaatcagtaaatccaaattttccaggtactggagaaggtggaatagattttgtaggaggaagtgtcgtgctgcagtgaagagtaacgtgttctactggctggtgatctttctggtctttctaaacactttgacgatcgcatccgagcactacaaccagcccaactggcttaccgaagttcaagataccgccaataaggcgttgctggccctatttactgctgagatgctcctgaagatgtattccctgggcctacaggcttattttgtcagtctctttaacaggttcgactgcttcgtcgtctgcgggggaattctggagaccattctggtggagactaaaattatgagtcctctggggataagtgttcttagatgcgtccgcctgttgagaatatttaaaattactcggtactggaactcattgtccaatctcgtcgcaagcctgctgaacagtgtcagatccatcgcatccctccttctgctgcttttcctattcataatcatcttctccctgcttggaatgcaactcttcggaggtaagtttaactttgatgagatgcagacccgaaggtcgacctttgacaatttcccgcagagcttgctgacagtgttccagattcttactggcgaagactggaactctgtgatgtacgatggcatcatggcatacgggggtccaagttttccaggcatgctggtttgcatctactttatcatccttttcatctgtgggaattatatactgctcaacgtgtttctagccatagcagttgacaatctggcagacgctgaatccctgacatccgctcaaaaggaggaagaggaggagaaagaacgtaaaaaactcgccaggacagcatcgccagaaaaaaaacaagaactcgttgagaagcccgctgttggtgaatctaaggaggagaaaatcgagttgaagtcgattacagccgatggcgagtcccccccagccaccaagattaatatggatgacctgcagcctaacgaaaacgaggacaagagcccgtacccaaaccccgaaacaaccggggaggaggatgaagaggagcccgagatgcccgtcgggccacggcctcgccctctttcagaattgcatctaaaggaaaaggccgtccctatgcccgaagcgagtgcgtttttcatcttctctagcaacaatagatttcgtcttcagtgccaccggattgttaacgacacgatctttaccaatctcattctgtttttcatactgcttagctccatctctctggcagcggaggatcctgtccagcatacttcctttcgtaatcatatcctgttttactttgatattgtctttactaccatcttcactatcgagatcgctctgaagatgactgcttacggggctttcctccataaaggatccttctgtcgcaattattttaatattttagaccttctggtggtcagcgtcagcctgatttcatttggcatccagagttccgcgataaacgtggtgaagatactgcgcgtgttgcgcgtacttcgcccactgagagccatcaaccgggcaaaaggcttgaaacacgtagtccagtgtgtgtttgttgctatccgaactatcggaaacatcgtgattgtcactactctgctgcaattcatgttcgcctgcataggggtgcagctgtttaaaggaaagctttatacctgctccgatagctccaagcagactgaggccgaatgcaaaggtaattatattacatataaggacggggaggtcgatcatccaattatccaacccaggtcctgggagaacagcaagtttgacttcgataatgtgctggctgccatgatggcacttttcaccgtgtccacttttgagggctggcctgaactgctttacaggtccattgatagccacacagaggacaaagggccaatatataattatagggtcgagatttcgatttttttcattatctatattatcatcattgcattttttatgatgaacatcttcgtgggcttcgtaatcgtgacgtttcaggagcagggcgagcaagagtataagaactgtgagctggataagaaccaacgccagtgcgtcgagtatgccctgaaagccaggccactgagacgctacatccccaaaaaccaacatcaatacaaggtttggtacgtcgtgaattctacatatttcgaatatctgatgtttgttctgatattactgaataccatttgcctcgctatgcaacactacgggcagagctgcttgttcaaaatcgctatgaatatcctgaacatgctcttcactggcctgtttacagtggagatgattctcaagttgattgcctttaagcccaagggctactttagcgatccctggaatgtgttcgacttcctgatcgtaataggcagtatcatcgacgtgattttaagcgagacgaacccggctgaacatactcagtgcagccccagcatgaacgcagaagagaattccaggatttcaatcacattttttcggttgtttagggtgatgaggttagttaagctcctctcccgaggagaaggcatccgcactttgctctggaccttcataaaaagttttcaggcgcttccctatgtggcgcttctcatcgtcatgctgttctttatctacgcagtcattggaatgcaggtgtttggcaaaatcgcactcaacgacactaccgagatcaacaggaacaacaactttcagactttcccacaggcagtgttattgctgtttcgttgcgctaccggggaagcctggcaggatatcatgcttgcctgcatgcccggaaagaaatgtgcgcctgaatctgaaccgtcaaactctaccgagggggaaactccatgtggctctagttttgctgtattctacttcatttcattttatatgttgtgcgcctttcttatcatcaaccttttcgtagctgtcatcatggataactttgactaccttaccagggattggagtatccttggccctcatcacttagatgagttcaagcgcatctgggcagagtatgatccagaagctaaaggcagaataaaacacctggacgtcgtgacgctccttcggcgtatccaaccacctctgggctttggaaaactttgtcctcaccgggtcgcatgcaaaaggctggtttctatgaatatgcccttaaattcagacggaaccgtaatgttcaacgcgaccctgtttgcactggtgcgtacagccctgcgaattaaaacagaaggtaacttagagcaggccaatgaggaactgcgggcaattatcaagaaaatttggaaaaggaccagtatgaaactgttggaccaagtggtgcctccagccggtgacgacgaggtaaccgtgggtaagttctatgctacgttcctgatccaggagtattttcgcaaatttaagaaaagaaaagaacagggtttggtggggaagccaagccagaggaatgccctctccctgcaagcgggactccggacccttcatgacataggcccagaaatcagaagagccatctctggagacctgacggccgaggaagagttggacaaggccatgaaagaggccgtgtccgctgcgtcggaagatgacatttttagacgcgcagggggactttttgggaaccatgtgtcatactaccagtccgatggccgtagcgctttcccacagactttcactacgcagaggccattgcatatcaacaaagctggaagctcccagggagataccgagtcacccagtcacgagaagcttgtggattctacctttacaccctcgtcatactcttcaacgggcagcaacgcgaatataaacaatgccaataacacagcacttggtcgcttgcccagacctgcaggataccctagcactgtttcaactgtggaggggcatgggcctcctctgtcccccgcaatcagggtgcaggaggtcgcatggaagctcagctctaaccgagaacgtcacgtaccgatgtgcgaggatctcgaactgcgccgtgatagcgggtctgccggtacacaggctcattgcctgctcctccgaaaagccaacccttcacggtgccacagccgggagagccaggctgccatggcgggacaggaggaaacctcacaggatgagacatacgaagttaaaatgaaccatgacactgaggcttgcagtgaaccatcattattatctactgagatgttgtcttaccaagacgacgaaaatcgacagctcaccttgccagaggaggataagcgggatatcaggcagtctcctaagagaggttttctcagaagcgcttcactcgggcgaagggcatcttttcacctggagtgtcttaagcggcagaaagataggggcggagatatctctcagaaaacggtcctgcctctccacctcgttcaccaccaagccttggcagtagcaggcctgtcacctctcttacaaaggtcacactcacctgcatcattccccaggcccttcgcgacacccccagccacccctggatcgagagggtggccacctcagccggtgcccacgctgcgccttgagggagtcgagagcagtgagaagcttaactctagctttccctccatacactgcggttcttgggccgaaactactcccggtggcggtggaagttcagccgctcggagggtgcgacctgttagcctcatggtgcctagccaggcgggagcacccggtcggcagtttcatggcagcgccagctcactggtggaggccgtgctgatcagtgaagggttgggccagttcgcacaggatcctaaatttatcgaggtaacgacccaggagttagctgatgcgtgcgacatgaccatcgaggagatggagagcgccgctgataatatcctttctggtggcgctcctcagtcccctaatggtgctcttctgccctttgttaactgtagagacgcaggtcaagacagggctggcggagaggaggacgcgggttgtgtgcgcgcaagaggtcgacctagtgaggaggaactacaggactctagagtttacgttagcagccttta

SEQ ID NO: 65335 - DNA, 7482 bp, Artificial Sequence
  derived and/or modified sequence
atggtcaatgagaatacgaggatgtacattccagaggaaaaccaccaaggttccaactatgggagcccacgccccgcccatgccaacatgaatgccaatgcggcagcggggctggcccctgagcacatccccaccccgggggctgccctgtcgtggcaggcggccatcgacgcagcccggcaggctaagctgatgggcagcgctggcaatgcgaccatctccacagtcagctccacgcagcggaagcggcagcaatatgggaaacccaagaagcagggcagcaccacggccacacgcccgccccgagccctgctctgcctgaccctgaagaaccccatccggagggcctgcatcagcattgtcgaatggaaaccatttgaaataattattttactgactatttttgccaattgtgtggccttagcgatctatattccctttccagaagatgattccaacgccaccaattccaacctggaacgagtggaatatctctttctcataatttttacggtggaagcgtttttaaaagtaatcgcctatggactcctctttcaccccaatgcctacctccgcaacggctggaacctactagattttataattgtggttgtggggctttttagtgcaattttagaacaagcaaccaaagcagatggggcaaacgctctcggagggaaaggggccggatttgatgtgaaggcgctgagggccttccgcgtgctgcgccccctgcggctggtgtccggagtcccaagtctccaggtggtcctgaattccatcatcaaggccatggtccccctgctgcacatcgccctgcttgtgctgtttgtcatcatcatctacgccatcatcggcttggagctcttcatggggaagatgcacaagacctgctacaaccaggagggcatagcagatgttccagcagaagatgacccttccccttgtgcgctggaaacgggccacgggcggcagtgccagaacggcacggtgtgcaagcccggctgggatggtcccaagcacggcatcaccaactttgacaactttgccttcgccatgctcacggtgttccagtgcatcaccatggagggctggacggacgtgctgtactggatgcaggacgctatgggctatgagttaccctgggtgtattttgtcagtctggtcatctttggatcctttttcgttctaaatctggttctcggtgtgttgagcggagagttttccaaagagagggagaaggccaaggcccggggagatttccagaagctgcgggagaagcagcagctagaagaggatctcaaaggctacctggattggatcactcaggccgaagacatcgatcctgagaatgaggacgaaggcatggatgaggagaagccccgaaacatgagcatgcccaccagtgagaccgagtccgtcaacaccgaaaacgtggctggaggtgacatcgagggagaaaactgcggggccaggctggcccaccggatctccaagtcaaagttcagccgctactggcgccggtggaatcggttctgcagaaggaagtgccgcgccgcagtcaagtctaatgtcttctactggctggtgattttcctggtgttcctcaacacgctcaccattgcctctgagcactacaaccagcccaactggctcacagaagtccaagacacggcaaacaaggccctgctggccctgttcacggcagagatgctcctgaagatgtacagcctgggcctgcaggcctacttcgtgtccctcttcaaccgctttgactgcttcgtcgtgtgtggcggcatcctggagaccatcctggtggagaccaagatcatgtccccactgggcatctccgtgctcagatgcgtccggctgctgaggattttcaagatcacgaggtactggaactccttgagcaacctggtggcatccttgctgaactctgtgcgctccatcgcctccctgctccttctcctcttcctcttcatcatcatcttctccctcctggggatgcagctctttggaggaaagttcaactttgatgagatgcagacccggaggagcacattcgataacttcccccagtccctcctcactgtgtttcagatcctgaccggggaggactggaattcggtgatgtatgatgggatcatggcttatggcggcccctcttttccagggatgttagtctgtatttacttcatcatcctcttcatctgtggaaactatatcctactgaatgtgttcttggccattgctgtggacaacctggctgatgctgagagcctcacatctgcccaaaaggaggaggaagaggagaaggagagaaagaagctggccaggactgccagcccagagaagaaacaagagttggtggagaagccggcagtgggggaatccaaggaggagaagattgagctgaaatccatcacggctgacggagagtctccacccgccaccaagatcaacatggatgacctccagcccaatgaaaatgaggataagagcccctaccccaacccagaaactacaggagaagaggatgaggaggagccagagatgcctgtcggccctcgcccacgaccactctctgagcttcaccttaaggaaaaggcagtgcccatgccagaagccagcgcgtttttcatcttcagctctaacaacaggtttcgcctccagtgccaccgcattgtcaatgacacgatcttcaccaacctgatcctcttcttcattctgctcagcagcatttccctggctgctgaggacccggtccagcacacctccttcaggaaccatattctgttttattttgatattgtttttaccaccattttcaccattgaaattgctctgaagatgactgcttatggggctttcttgcacaagggttctttctgccggaactacttcaacatcctggacctgctggtggtcagcgtgtccctcatctcctttggcatccagtccagtgcaatcaatgtcgtgaagatcttgcgagtcctgcgagtactcaggcccctgagggccatcaacagggccaaggggctaaagcatgtggttcagtgtgtgtttgtcgccatccggaccatcgggaacatcgtgattgtcaccaccctgctgcagttcatgtttgcctgcatcggggtccagctcttcaagggaaagctgtacacctgttcagacagttccaagcagacagaggcggaatgcaagggcaactacatcacgtacaaagacggggaggttgaccaccccatcatccaaccccgcagctgggagaacagcaagtttgactttgacaatgttctggcagccatgatggccctcttcaccgtctccaccttcgaagggtggccagagctgctgtaccgctccatcgactcccacacggaagacaagggccccatctacaactaccgtgtggagatctccatcttcttcatcatctacatcatcatcatcgccttcttcatgatgaacatcttcgtgggcttcgtcatcgtcacctttcaggagcagggggagcaggagtacaagaactgtgagctggacaagaaccagcgacagtgcgtggaatacgccctcaaggcccggcccctgcggaggtacatccccaagaaccagcaccagtacaaagtgtggtacgtggtcaactccacctacttcgagtacctgatgttcgtcctcatcctgctcaacaccatctgcctggccatgcagcactacggccagagctgcctgttcaaaatcgccatgaacatcctcaacatgctcttcactggcctcttcaccgtggagatgatcctgaagctcattgccttcaaacccaagggttactttagtgatccctggaatgtttttgacttcctcatcgtaattggcagcataattgacgtcattctcagtgagactaatccagctgaacatacccaatgctctccctctatgaacgcagaggaaaactcccgcatctccatcaccttcttccgcctgttccgggtcatgcgtctggtgaagctgctgagccgtggggagggcatccggacgctgctgtggaccttcatcaagtccttccaggccctgccctatgtggccctcctgatcgtgatgctgttcttcatctacgcggtgatcgggatgcaggtgtttgggaaaattgccctgaatgataccacagagatcaaccggaacaacaactttcagaccttcccccaggccgtgctgctcctcttcaggtgtgccaccggggaggcctggcaggacatcatgctggcctgcatgccaggcaagaagtgtgccccagagtccgagcccagcaacagcacggagggtgaaacaccctgtggtagcagctttgctgtcttctacttcatcagcttctacatgctctgtgccttcctgatcatcaacctctttgtagctgtcatcatggacaactttgactacctgacaagggactggtccatccttggtccccaccacctggatgagtttaaaagaatctgggcagagtatgaccctgaagccaagggtcgtatcaaacacctggatgtggtgaccctcctccggcggattcagccgccactaggttttgggaagctgtgccctcaccgcgtggcttgcaaacgcctggtctccatgaacatgcctctgaacagcgacgggacagtcatgttcaatgccaccctgtttgccctggtcaggacggccctgaggatcaaaacagaagggaacctagaacaagccaatgaggagctgcgggcgatcatcaagaagatctggaagcggaccagcatgaagctgctggaccaggtggtgccccctgcaggtgatgatgaggtcaccgttggcaagttctacgccacgttcctgatccaggagtacttccggaagttcaagaagcgcaaagagcagggccttgtgggcaagccctcccagaggaacgcgctgtctctgcaggctggcttgcgcacactgcatgacatcgggcctgagatccgacgggccatctctggagatctcaccgctgaggaggagctggacaaggccatgaaggaggctgtgtccgctgcttctgaagatgacatcttcaggagggccggtggcctgttcggcaaccacgtcagctactaccaaagcgacggccggagcgccttcccccagaccttcaccactcagcgcccgctgcacatcaacaaggcgggcagcagccagggcgacactgagtcgccatcccacgagaagctggtggactccaccttcaccccgagcagctactcgtccaccggctccaacgccaacatcaacaacgccaacaacaccgccctgggtcgcctccctcgccccgccggctaccccagcacggtcagcactgtggagggccacgggccccccttgtcccctgccatccgggtgcaggaggtggcgtggaagctcagctccaacagggaaaggcacgttccgatgtgtgaggatctggagctcaggagggattcaggctcagcagggactcaggctcactgccttctgctcaggaaagcaaacccctctaggtgccactcccgggagagccaggcagccatggcgggtcaggaggagacgtctcaggatgagacctatgaagtgaagatgaaccatgacacggaggcctgcagtgagcccagcctgctctccacagagatgctctcctaccaggatgacgaaaatcggcaactgacgctcccagaggaggacaagagggacatccggcaatctccgaagaggggtttcctccgctctgcctcactaggtcgaagggcctccttccacctggaatgtctgaagcgacagaaggaccgagggggagacatctctcagaagacagtcctgcccttgcatctggttcatcatcaggcattggcagtggcaggcctgagccccctcctccagagaagccattcccctgcctcattccctaggccttttgccaccccaccagccacacctggcagccgaggctggcccccacagcccgtccccaccctgcggcttgagggggtcgagtccagtgagaaactcaacagcagcttcccatccatccactgcggctcctgggctgagaccacccccggtggcgggggcagcagcgccgcccggagagtccggcccgtctccctcatggtgcccagccaggctggggccccagggaggcagttccacggcagtgccagcagcctggtggaagcggtcttgatttcagaaggactggggcagtttgctcaagatcccaagttcatcgaggtcaccacccaggagctggccgacgcctgcgacatgaccatagaggagatggagagcgcggccgacaacatcctcagcgggggcgccccacagagccccaatggcgccctcttaccctttgtgaactgcagggacgcggggcaggaccgagccgggggcgaagaggacgcgggctgtgtgcgcgcgcggggtcgaccgagtgaggaggagctccaggacagcagggtctacgtcagcagcctgtagtgggcgctgccagatgcgggcttttttttatttgtttcaatgttcctaatgggttcgtttcagaagtgcctcactgttctcgtgacctggagttaaccggaacagcgtcttcattcatttctgttgggaccagacgcggagcctgggtgcgcgagccgccctccgggaggaaggcgcccggctgcgtctgcagaggcggggagaggaggcggcgagggtcccggggcgcgaggaaggcgcctgccctctcccagctcgcaggccccgggcccggccgcgcctccgcggggagagcaccccggcttcccgcgcgccctcaccaaaaggaccctacagcaaacgggtgtctttcgactctgcttgtagaaaccatttgcacatattctgtacgagcctcgctgtctccctagagccagggccctgcggatttggagaagggagcggggcaggacttccaggaggaccccaacccggcccggagagggaggaggaggcctccaggggcgcggagctctggggatgggcgtcgggccggcagtggtgcggctcactccgtccctgcccacctgcgacgggatcccccgaccggcacgggccacgccgagctcccggccagccgccggcccgcaggcagcgcgagggaggagctgcgccgccggctccgcccaaccaggtggtgctgagcttccgctgagcgctcttttgttttgtggtttgacacttttcttgacagcatgttgcagtttcttttcggttttggttttttttaaatgttttattttgctttcccagcgggaggggaggaagaagagtgtttacaaagtcctgtagccccctcacctttctgttttcacttttgccaatgtacatcgggtttggttttcttgtattatttaaacggttgtggtttcctttttccacggaggttcaatagaagccgctgcaggagagttttaccaa

SEQ ID NO: 65336 - DNA, 6522 bp, Artificial Sequence
  derived and/or modified sequence
atggtgaacgagaacaccagaatgtacatccccgaggagaaccaccagggcagcaactacggcagccccagacccgcccacgccaacatgaacgccaacgccgccgccggcctggcccccgagcacatccccacccccggcgccgccctgagctggcaggccgccatcgacgccgccagacaggccaagctgatgggcagcgccggcaacgccaccatcagcaccgtgagcagcacccagagaaagagacagcagtacggcaagcccaagaagcagggcagcaccaccgccaccagaccccccagagccctgctgtgcctgaccctgaagaaccccatcagaagagcctgcatcagcatcgtggagtggaagcccttcgagatcatcatcctgctgaccatcttcgccaactgcgtggccctggccatctacatccccttccccgaggacgacagcaacgccaccaacagcaacctggagagagtggagtacctgttcctgatcatcttcaccgtggaggccttcctgaaggtgatcgcctacggcctgctgttccaccccaacgcctacctgagaaacggctggaacctgctggacttcatcatcgtggtggtgggcctgttcagcgccatcctggagcaggccaccaaggccgacggcgccaacgccctgggcggcaagggcgccggcttcgacgtgaaggccctgagagccttcagagtgctgagacccctgagactggtgagcggcgtgcccagcctgcaggtggtgctgaacagcatcatcaaggccatggtgcccctgctgcacatcgccctgctggtgctgttcgtgatcatcatctacgccatcatcggcctggagctgttcatgggcaagatgcacaagacctgctacaaccaggagggcatcgccgacgtgcccgccgaggacgaccccagcccctgcgccctggagaccggccacggcagacagtgccagaacggcaccgtgtgcaagcccggctgggacggccccaagcacggcatcaccaacttcgacaacttcgccttcgccatgctgaccgtgttccagtgcatcaccatggagggctggaccgacgtgctgtactggatgcaggacgccatgggctacgagctgccctgggtgtacttcgtgagcctggtgatcttcggcagcttcttcgtgctgaacctggtgctgggcgtgctgagcggcgagttcagcaaggagagagagaaggccaaggccagaggcgacttccagaagctgagagagaagcagcagctggaggaggacctgaagggctacctggactggatcacccaggccgaggacatcgaccccgagaacgaggacgagggcatggacgaggagaagcccagaaacatgagcatgcccaccagcgagaccgagagcgtgaacaccgagaacgtggccggcggcgacatcgagggcgagaactgcggcgccagactggcccacagaatcagcaagagcaagttcagcagatactggagaagatggaacagattctgcagaagaaagtgcagagccgccgtgaagagcaacgtgttctactggctggtgatcttcctggtgttcctgaacaccctgaccatcgccagcgagcactacaaccagcccaactggctgaccgaggtgcaggacaccgccaacaaggccctgctggccctgttcaccgccgagatgctgctgaagatgtacagcctgggcctgcaggcctacttcgtgagcctgttcaacagattcgactgcttcgtggtgtgcggcggcatcctggagaccatcctggtggagaccaagatcatgagccccctgggcatcagcgtgctgagatgcgtgagactgctgagaatcttcaagatcaccagatactggaacagcctgagcaacctggtggccagcctgctgaacagcgtgagaagcatcgccagcctgctgctgctgctgttcctgttcatcatcatcttcagcctgctgggcatgcagctgttcggcggcaagttcaacttcgacgagatgcagaccagaagaagcaccttcgacaacttcccccagagcctgctgaccgtgttccagatcctgaccggcgaggactggaacagcgtgatgtacgacggcatcatggcctacggcggccccagcttccccggcatgctggtgtgcatctacttcatcatcctgttcatctgcggcaactacatcctgctgaacgtgttcctggccatcgccgtggacaacctggccgacgccgagagcctgaccagcgcccagaaggaggaggaggaggagaaggagagaaagaagctggccagaaccgccagccccgagaagaagcaggagctggtggagaagcccgccgtgggcgagagcaaggaggagaagatcgagctgaagagcatcaccgccgacggcgagagcccccccgccaccaagatcaacatggacgacctgcagcccaacgagaacgaggacaagagcccctaccccaaccccgagaccaccggcgaggaggacgaggaggagcccgagatgcccgtgggccccagacccagacccctgagcgagctgcacctgaaggagaaggccgtgcccatgcccgaggccagcgccttcttcatcttcagcagcaacaacagattcagactgcagtgccacagaatcgtgaacgacaccatcttcaccaacctgatcctgttcttcatcctgctgagcagcatcagcctggccgccgaggaccccgtgcagcacaccagcttcagaaaccacatcctgttctacttcgacatcgtgttcaccaccatcttcaccatcgagatcgccctgaagatgaccgcctacggcgccttcctgcacaagggcagcttctgcagaaactacttcaacatcctggacctgctggtggtgagcgtgagcctgatcagcttcggcatccagagcagcgccatcaacgtggtgaagatcctgagagtgctgagagtgctgagacccctgagagccatcaacagagccaagggcctgaagcacgtggtgcagtgcgtgttcgtggccatcagaaccatcggcaacatcgtgatcgtgaccaccctgctgcagttcatgttcgcctgcatcggcgtgcagctgttcaagggcaagctgtacacctgcagcgacagcagcaagcagaccgaggccgagtgcaagggcaactacatcacctacaaggacggcgaggtggaccaccccatcatccagcccagaagctgggagaacagcaagttcgacttcgacaacgtgctggccgccatgatggccctgttcaccgtgagcaccttcgagggctggcccgagctgctgtacagaagcatcgacagccacaccgaggacaagggccccatctacaactacagagtggagatcagcatcttcttcatcatctacatcatcatcatcgccttcttcatgatgaacatcttcgtgggcttcgtgatcgtgaccttccaggagcagggcgagcaggagtacaagaactgcgagctggacaagaaccagagacagtgcgtggagtacgccctgaaggccagacccctgagaagatacatccccaagaaccagcaccagtacaaggtgtggtacgtggtgaacagcacctacttcgagtacctgatgttcgtgctgatcctgctgaacaccatctgcctggccatgcagcactacggccagagctgcctgttcaagatcgccatgaacatcctgaacatgctgttcaccggcctgttcaccgtggagatgatcctgaagctgatcgccttcaagcccaagggctacttcagcgacccctggaacgtgttcgacttcctgatcgtgatcggcagcatcatcgacgtgatcctgagcgagaccaaccccgccgagcacacccagtgcagccccagcatgaacgccgaggagaacagcagaatcagcatcaccttcttcagactgttcagagtgatgagactggtgaagctgctgagcagaggcgagggcatcagaaccctgctgtggaccttcatcaagagcttccaggccctgccctacgtggccctgctgatcgtgatgctgttcttcatctacgccgtgatcggcatgcaggtgttcggcaagatcgccctgaacgacaccaccgagatcaacagaaacaacaacttccagaccttcccccaggccgtgctgctgctgttcagatgcgccaccggcgaggcctggcaggacatcatgctggcctgcatgcccggcaagaagtgcgcccccgagagcgagcccagcaacagcaccgagggcgagaccccctgcggcagcagcttcgccgtgttctacttcatcagcttctacatgctgtgcgccttcctgatcatcaacctgttcgtggccgtgatcatggacaacttcgactacctgaccagagactggagcatcctgggcccccaccacctggacgagttcaagagaatctgggccgagtacgaccccgaggccaagggcagaatcaagcacctggacgtggtgaccctgctgagaagaatccagccccccctgggcttcggcaagctgtgcccccacagagtggcctgcaagagactggtgagcatgaacatgcccctgaacagcgacggcaccgtgatgttcaacgccaccctgttcgccctggtgagaaccgccctgagaatcaagaccgagggcaacctggagcaggccaacgaggagctgagagccatcatcaagaagatctggaagagaaccagcatgaagctgctggaccaggtggtgccccccgccggcgacgacgaggtgaccgtgggcaagttctacgccaccttcctgatccaggagtacttcagaaagttcaagaagagaaaggagcagggcctggtgggcaagcccagccagagaaacgccctgagcctgcaggccggcctgagaaccctgcacgacatcggccccgagatcagaagagccatcagcggcgacctgaccgccgaggaggagctggacaaggccatgaaggaggccgtgagcgccgccagcgaggacgacatcttcagaagagccggcggcctgttcggcaaccacgtgagctactaccagagcgacggcagaagcgccttcccccagaccttcaccacccagagacccctgcacatcaacaaggccggcagcagccagggcgacaccgagagccccagccacgagaagctggtggacagcaccttcacccccagcagctacagcagcaccggcagcaacgccaacatcaacaacgccaacaacaccgccctgggcagactgcccagacccgccggctaccccagcaccgtgagcaccgtggagggccacggcccccccctgagccccgccatcagagtgcaggaggtggcctggaagctgagcagcaacagagagagacacgtgcccatgtgcgaggacctggagctgagaagagacagcggcagcgccggcacccaggcccactgcctgctgctgagaaaggccaaccccagcagatgccacagcagagagagccaggccgccatggccggccaggaggagaccagccaggacgagacctacgaggtgaagatgaaccacgacaccgaggcctgcagcgagcccagcctgctgagcaccgagatgctgagctaccaggacgacgagaacagacagctgaccctgcccgaggaggacaagagagacatcagacagagccccaagagaggcttcctgagaagcgccagcctgggcagaagagccagcttccacctggagtgcctgaagagacagaaggacagaggcggcgacatcagccagaagaccgtgctgcccctgcacctggtgcaccaccaggccctggccgtggccggcctgagccccctgctgcagagaagccacagccccgccagcttccccagacccttcgccaccccccccgccacccccggcagcagaggctggcccccccagcccgtgcccaccctgagactggagggcgtggagagcagcgagaagctgaacagcagcttccccagcatccactgcggcagctgggccgagaccacccccggcggcggcggcagcagcgccgccagaagagtgagacccgtgagcctgatggtgcccagccaggccggcgcccccggcagacagttccacggcagcgccagcagcctggtggaggccgtgctgatcagcgagggcctgggccagttcgcccaggaccccaagttcatcgaggtgaccacccaggagctggccgacgcctgcgacatgaccatcgaggagatggagagcgccgccgacaacatcctgagcggcggcgccccccagagccccaacggcgccctgctgcccttcgtgaactgcagagacgccggccaggacagagccggcggcgaggaggacgccggctgcgtgagagccagaggcagacccagcgaggaggagctgcaggacagcagagtgtacgtgagcagcctgtag

SEQ ID NO: 65337 - protein, 2039 aa, Artificial Sequence
  derived and/or modified sequence
ERVEYLFLIIFTVEAFLKVIAYGLLFHPNAYLRNGWNLLDFIIVVVGLFSAILEQATKADGANALGGKGAGFDVKALRAFRVLRPLRLVSGVPSLQVVLNSIIKAMVPLLHIALLVLFVIIIYAIIGLELFMGKMHKTCYNQEGIADVPAEDDPSPCALETGHGRQCQNGTVCKPGWDGPKHGITNFDNFAFAMLTVFQCITMEGWTDVLYWMQDAMGYELPWVYFVSLVIFGSFFVLNLVLGVLSGEFSKEREKAKARGDFQKLREKQQLEEDLKGYLDWITQAEDIDPENEDEGMDEEKPRNMSMPTSETESVNTENVAGGDIEGENCGARLAHRISKSKFSRYWRRWNRFCRRKCRAAVKSNVFYWLVIFLVFLNTLTIASEHYNQPNWLTEVQDTANKALLALFTAEMLLKMYSLGLQAYFVSLFNRFDCFVVCGGILETILVETKIMSPLGISVLRCVRLLRIFKITRYWNSLSNLVASLLNSVRSIASLLLLLFLFIIIFSLLGMQLFGGKFNFDEMQTRRSTFDNFPQSLLTVFQILTGEDWNSVMYDGIMAYGGPSFPGMLVCIYFIILFICGNYILLNVFLAIAVDNLADAESLTSAQKEEEEEKERKKLARTASPEKKQELVEKPAVGESKEEKIELKSITADGESPPATKINMDDLQPNENEDKSPYPNPETTGEEDEEEPEMPVGPRPRPLSELHLKEKAVPMPEASAFFIFSSNNRFRLQCHRIVNDTIFTNLILFFILLSSISLAAEDPVQHTSFRNHILFYFDIVFTTIFTIEIALKMTAYGAFLHKGSFCRNYFNILDLLVVSVSLISFGIQSSAINVVKILRVLRVLRPLRAINRAKGLKHVVQCVFVAIRTIGNIVIVTTLLQFMFACIGVQLFKGKLYTCSDSSKQTEAECKGNYITYKDGEVDHPIIQPRSWENSKFDFDNVLAAMMALFTVSTFEGWPELLYRSIDSHTEDKGPIYNYRVEISIFFIIYIIIIAFFMMNIFVGFVIVTFQEQGEQEYKNCELDKNQRQCVEYALKARPLRRYIPKNQHQYKVWYVVNSTYFEYLMFVLILLNTICLAMQHYGQSCLFKIAMNILNMLFTGLFTVEMILKLIAFKPKHYFCDAWNTFDALIVVGSIVDIAITEVNNAEENSRISITFFRLFRVMRLVKLLSRGEGIRTLLWTFIKSFQALPYVALLIVMLFFIYAVIGMQVFGKIALNDTTEINRNNNFQTFPQAVLLLFRCATGEAWQDIMLACMPGKKCAPESEPSNSTEGETPCGSSFAVFYFISFYMLCAFLIINLFVAVIMDNFDYLTRDWSILGPHHLDEFKRIWAEYDPEAKGRIKHLDVVTLLRRIQPPLGFGKLCPHRVACKRLVSMNMPLNSDGTVMFNATLFALVRTALRIKTEGNLEQANEELRAIIKKIWKRTSMKLLDQVVPPAGDDEVTVGKFYATFLIQEYFRKFKKRKEQGLVGKPSQRNALSLQAGLRTLHDIGPEIRRAISGDLTAEEELDKAMKEAVSAASEDDIFRRAGGLFGNHVSYYQSDGRSAFPQTFTTQRPLHINKAGSSQGDTESPSHEKLVDSTFTPSSYSSTGSNANINNANNTALGRLPRPAGYPSTVSTVEGHGPPLSPAIRVQEVAWKLSSNRMHCCDMLDGGTFPPALGPRRAPPCLHQQLQGSLAGLREDTPCIVPGHASLCCSSRVGEWLPAGCTAPQHARCHSRESQAAMAGQEETSQDETYEVKMNHDTEACSEPSLLSTEMLSYQDDENRQLTLPEEDKRDIRQSPKRGFLRSASLGRRASFHLECLKRQKDRGGDISQKTVLPLHLVHHQALAVAGLSPLLQRSHSPASFPRPFATPPATPGSRGWPPQPVPTLRLEGVESSEKLNSSFPSIHCGSWAETTPGGGGSSAARRVRPVSLMVPSQAGAPGRQFHGSASSLVEAVLISEGLGQFAQDPKFIEVTTQELADACDMTIEEMESAADNILSGGAPQSPNGALLPFVNCRDAGQDRAGGEEDAGCVRARGRPSEEELQDSRVYVSSL

SEQ ID NO: 65338 - protein, 2209 aa, Artificial Sequence
  derived and/or modified sequence
MVNENTRMYIPEENHQGSNYGSPRPAHANMNANAAAGLAPEHIPTPGAALSWQAAIDAARQAKLMGSAGNATISTVSSTQRKRQQYGKPKKQGSTTATRPPRALLCLTLKNPIRRACISIVEWKPFEIIILLTIFANCVALAIYIPFPEDDSNATNSNLERVEYLFLIIFTVEAFLKVIAYGLLFHPNAYLRNGWNLLDFIIVVVGLFSAILEQATKADGANALGGKGAGFDVKALRAFRVLRPLRLVSGVPSLQVVLNSIIKAMVPLLHIALLVLFVIIIYAIIGLELFMGKMHKTCYNQEGIADVPAEDDPSPCALETGHGRQCQNGTVCKPGWDGPKHGITNFDNFAFAMLTVFQCITMEGWTDVLYWMQDAMGYELPWVYFVSLVIFGSFFVLNLVLGVLSGEFSKEREKAKARGDFQKLREKQQLEEDLKGYLDWITQAEDIDPENEDEGMDEEKPRNMSMPTSETESVNTENVAGGDIEGENCGARLAHRISKSKFSRYWRRWNRFCRRKCRAAVKSNVFYWLVIFLVFLNTLTIASEHYNQPNWLTEVQDTANKALLALFTAEMLLKMYSLGLQAYFVSLFNRFDCFVVCGGILETILVETKIMSPLGISVLRCVRLLRIFKITRYWNSLSNLVASLLNSVRSIASLLLLLFLFIIIFSLLGMQLFGGKFNFDEMQTRRSTFDNFPQSLLTVFQILTGEDWNSVMYDGIMAYGGPSFPGMLVCIYFIILFICGNYILLNVFLAIAVDNLADAESLTSAQKEEEEEKERKKLARTASPEKKQELVEKPAVGESKEEKIELKSITADGESPPATKINMDDLQPNENEDKSPYPNPETTGEEDEEEPEMPVGPRPRPLSELHLKEKAVPMPEASAFFIFSSNNRFRLQCHRIVNDTIFTNLILFFILLSSISLAAEDPVQHTSFRNHILFYFDIVFTTIFTIEIALKMTAYGAFLHKGSFCRNYFNILDLLVVSVSLISFGIQSSAINVVKILRVLRVLRPLRAINRAKGLKHVVQCVFVAIRTIGNIVIVTTLLQFMFACIGVQLFKGKLYTCSDSSKQTEAECKGNYITYKDGEVDHPIIQPRSWENSKFDFDNVLAAMMALFTVSTFEGWPELLYRSIDSHTEDKGPIYNYRVEISIFFIIYIIIIAFFMMNIFVGFVIVTFQEQGEQEYKNCELDKNQRQCVEYALKARPLRRYIPKNQHQYKVWYVVNSTYFEYLMFVLILLNTICLAMQHYGQSCLFKIAMNILNMLFTGLFTVEMILKLIAFKPKHYFCDAWNTFDALIVVGSIVDIAITEVNPAEHTQCSPSMNAEENSRISITFFRLFRVMRLVKLLSRGEGIRTLLWTFIKSFQALPYVALLIVMLFFIYAVIGMQVFGKIALNDTTEINRNNNFQTFPQAVLLLFRCATGEAWQDIMLACMPGKKCAPESEPSNSTEGETPCGSSFAVFYFISFYMLCAFLIINLFVAVIMDNFDYLTRDWSILGPHHLDEFKRIWAEYDPEAKGRIKHLDVVTLLRRIQPPLGFGKLCPHRVACKRLVSMNMPLNSDGTVMFNATLFALVRTALRIKTEGNLEQANEELRAIIKKIWKRTSMKLLDQVVPPAGDDEVTVGKFYATFLIQEYFRKFKKRKEQGLVGKPSQRNALSLQAGLRTLHDIGPEIRRAISGDLTAEEELDKAMKEAVSAASEDDIFRRAGGLFGNHVSYYQSDGRSAFPQTFTTQRPLHINKAGSSQGDTESPSHEKLVDSTFTPSSYSSTGSNANINNANNTALGRLPRPAGYPSTVSTVEGHGPPLSPAIRVQEVAWKLSSNRMHCCDMLDGGTFPPALGPRRAPPCLHQQLQGSLAGLREDTPCIVPGHASLCCSSRVGEWLPAGCTAPQHARCHSRESQAAMAGQEETSQDETYEVKMNHDTEACSEPSLLSTEMLSYQDDENRQLTLPEEDKRDIRQSPKRGFLRSASLGRRASFHLECLKRQKDRGGDISQKTVLPLHLVHHQALAVAGLSPLLQRSHSPASFPRPFATPPATPGSRGWPPQPVPTLRLEGVESSEKLNSSFPSIHCGSWAETTPGGGGSSAARRVRPVSLMVPSQAGAPGRQFHGSASSLVEAVLISEGLGQFAQDPKFIEVTTQELADACDMTIEEMESAADNILSGGAPQSPNGALLPFVNCRDAGQDRAGGEEDAGCVRARGRPSEEELQDSRVYVSSL

SEQ ID NO: 65339 - DNA, 13660 bp, Artificial Sequence
  derived and/or modified sequence
ttattttttcaaatggtgtagccgccggaggtgcggtgctcagttcttggaaggggcccggatgtactgaggatgcgttacagtttcactcgaggaggcagtagtggaaaggagcagtttttggggtttgatgccataatgggaatcaggtaatcgtcggcggggaagaagaaacgctgcagaccacggcttcctcgaatcttgcgcgaaagccgccggcctcggaggagggattaatccagacccgccggggggtgttttcacatttcttcctcttcgtggctgctcctcctattaaaaccatttttggtccatggtcaatgagaatacgaggatgtacattccagaggaaaaccaccaaggttccaactatgggagcccacgccccgcccatgccaacatgaatgccaatgcggcagcggggctggcccctgagcacatccccaccccgggggctgccctgtcgtggcaggcggccatcgacgcagcccggcaggctaagctgatgggcagcgctggcaatgcgaccatctccacagtcagctccacgcagcggaagcggcagcaatatgggaaacccaagaagcagggcagcaccacggccacacgcccgccccgagccctgctctgcctgaccctgaagaaccccatccggagggcctgcatcagcattgtcgaatggaaaccatttgaaataattattttactgactatttttgccaattgtgtggccttagcgatctatattccctttccagaagatgattccaacgccaccaattccaacctggaacgagtggaatatctctttctcataatttttacggtggaagcgtttttaaaagtaatcgcctatggactcctctttcaccccaatgcctacctccgcaacggctggaacctactagattttataattgtggttgtggggctttttagtgcaattttagaacaagcaaccaaagcagatggggcaaacgctctcggagggaaaggggccggatttgatgtgaaggcgctgagggccttccgcgtgctgcgccccctgcggctggtgtccggagtcccaagtctccaggtggtcctgaattccatcatcaaggccatggtccccctgctgcacatcgccctgcttgtgctgtttgtcatcatcatctacgccatcatcggcttggagctcttcatggggaagatgcacaagacctgctacaaccaggagggcatagcagatgttccagcagaagatgacccttccccttgtgcgctggaaacgggccacgggcggcagtgccagaacggcacggtgtgcaagcccggctgggatggtcccaagcacggcatcaccaactttgacaactttgccttcgccatgctcacggtgttccagtgcatcaccatggagggctggacggacgtgctgtactggatgcaggacgctatgggctatgagttaccctgggtgtattttgtcagtctggtcatctttggatcctttttcgttctaaatctggttctcggtgtgttgagcggagagttttccaaagagagggagaaggccaaggcccggggagatttccagaagctgcgggagaagcagcagctagaagaggatctcaaaggctacctggattggatcactcaggccgaagacatcgatcctgagaatgaggacgaaggcatggatgaggagaagccccgaaacatgagcatgcccaccagtgagaccgagtccgtcaacaccgaaaacgtggctggaggtgacatcgagggagaaaactgcggggccaggctggcccaccggatctccaagtcaaagttcagccgctactggcgccggtggaatcggttctgcagaaggaagtgccgcgccgcagtcaagtctaatgtcttctactggctggtgattttcctggtgttcctcaacacgctcaccattgcctctgagcactacaaccagcccaactggctcacagaagtccaagacacggcaaacaaggccctgctggccctgttcacggcagagatgctcctgaagatgtacagcctgggcctgcaggcctacttcgtgtccctcttcaaccgctttgactgcttcgtcgtgtgtggcggcatcctggagaccatcctggtggagaccaagatcatgtccccactgggcatctccgtgctcagatgcgtccggctgctgaggattttcaagatcacgaggtactggaactccttgagcaacctggtggcatccttgctgaactctgtgcgctccatcgcctccctgctccttctcctcttcctcttcatcatcatcttctccctcctggggatgcagctctttggaggaaagttcaactttgatgagatgcagacccggaggagcacattcgataacttcccccagtccctcctcactgtgtttcagatcctgaccggggaggactggaattcggtgatgtatgatgggatcatggcttatggcggcccctcttttccagggatgttagtctgtatttacttcatcatcctcttcatctgtggaaactatatcctactgaatgtgttcttggccattgctgtggacaacctggctgatgctgagagcctcacatctgcccaaaaggaggaggaagaggagaaggagagaaagaagctggccaggactgccagcccagagaagaaacaagagttggtggagaagccggcagtgggggaatccaaggaggagaagattgagctgaaatccatcacggctgacggagagtctccacccgccaccaagatcaacatggatgacctccagcccaatgaaaatgaggataagagcccctaccccaacccagaaactacaggagaagaggatgaggaggagccagagatgcctgtcggccctcgcccacgaccactctctgagcttcaccttaaggaaaaggcagtgcccatgccagaagccagcgcgtttttcatcttcagctctaacaacaggtttcgcctccagtgccaccgcattgtcaatgacacgatcttcaccaacctgatcctcttcttcattctgctcagcagcatttccctggctgctgaggacccggtccagcacacctccttcaggaaccatattctgttttattttgatattgtttttaccaccattttcaccattgaaattgctctgaagatgactgcttatggggctttcttgcacaagggttctttctgccggaactacttcaacatcctggacctgctggtggtcagcgtgtccctcatctcctttggcatccagtccagtgcaatcaatgtcgtgaagatcttgcgagtcctgcgagtactcaggcccctgagggccatcaacagggccaaggggctaaagcatgtggttcagtgtgtgtttgtcgccatccggaccatcgggaacatcgtgattgtcaccaccctgctgcagttcatgtttgcctgcatcggggtccagctcttcaagggaaagctgtacacctgttcagacagttccaagcagacagaggcggaatgcaagggcaactacatcacgtacaaagacggggaggttgaccaccccatcatccaaccccgcagctgggagaacagcaagtttgactttgacaatgttctggcagccatgatggccctcttcaccgtctccaccttcgaagggtggccagagctgctgtaccgctccatcgactcccacacggaagacaagggccccatctacaactaccgtgtggagatctccatcttcttcatcatctacatcatcatcatcgccttcttcatgatgaacatcttcgtgggcttcgtcatcgtcacctttcaggagcagggggagcaggagtacaagaactgtgagctggacaagaaccagcgacagtgcgtggaatacgccctcaaggcccggcccctgcggaggtacatccccaagaaccagcaccagtacaaagtgtggtacgtggtcaactccacctacttcgagtacctgatgttcgtcctcatcctgctcaacaccatctgcctggccatgcagcactacggccagagctgcctgttcaaaatcgccatgaacatcctcaacatgctcttcactggcctcttcaccgtggagatgatcctgaagctcattgccttcaaacccaagcactatttctgtgatgcatggaatacatttgacgccttgattgttgtgggtagcattgttgatatagcaatcaccgaggtaaacaacgcagaggaaaactcccgcatctccatcaccttcttccgcctgttccgggtcatgcgtctggtgaagctgctgagccgtggggagggcatccggacgctgctgtggaccttcatcaagtccttccaggccctgccctatgtggccctcctgatcgtgatgctgttcttcatctacgcggtgatcgggatgcaggtgtttgggaaaattgccctgaatgataccacagagatcaaccggaacaacaactttcagaccttcccccaggccgtgctgctcctcttcaggtgtgccaccggggaggcctggcaggacatcatgctggcctgcatgccaggcaagaagtgtgccccagagtccgagcccagcaacagcacggagggtgaaacaccctgtggtagcagctttgctgtcttctacttcatcagcttctacatgctctgtgccttcctgatcatcaacctctttgtagctgtcatcatggacaactttgactacctgacaagggactggtccatccttggtccccaccacctggatgagtttaaaagaatctgggcagagtatgaccctgaagccaagggtcgtatcaaacacctggatgtggtgaccctcctccggcggattcagccgccactaggttttgggaagctgtgccctcaccgcgtggcttgcaaacgcctggtctccatgaacatgcctctgaacagcgacgggacagtcatgttcaatgccaccctgtttgccctggtcaggacggccctgaggatcaaaacagaagggaacctagaacaagccaatgaggagctgcgggcgatcatcaagaagatctggaagcggaccagcatgaagctgctggaccaggtggtgccccctgcaggtgatgatgaggtcaccgttggcaagttctacgccacgttcctgatccaggagtacttccggaagttcaagaagcgcaaagagcagggccttgtgggcaagccctcccagaggaacgcgctgtctctgcaggctggcttgcgcacactgcatgacatcgggcctgagatccgacgggccatctctggagatctcaccgctgaggaggagctggacaaggccatgaaggaggctgtgtccgctgcttctgaagatgacatcttcaggagggccggtggcctgttcggcaaccacgtcagctactaccaaagcgacggccggagcgccttcccccagaccttcaccactcagcgcccgctgcacatcaacaaggcgggcagcagccagggcgacactgagtcgccatcccacgagaagctggtggactccaccttcaccccgagcagctactcgtccaccggctccaacgccaacatcaacaacgccaacaacaccgccctgggtcgcctccctcgccccgccggctaccccagcacggtcagcactgtggagggccacgggccccccttgtcccctgccatccgggtgcaggaggtggcgtggaagctcagctccaacaggatgcactgctgtgacatgctggatggtgggaccttccctcccgccctgggcccccgcagggctcctccctgtctgcatcagcagctccagggttccctggcggggctgagagaggacacaccctgcatcgtgcctggccacgcttcactgtgctgctcttccagagtaggagagtggctcccagcaggctgcacagccccccagcatgccaggtgccactcccgggagagccaggcagccatggcgggtcaggaggagacgtctcaggatgagacctatgaagtgaagatgaaccatgacacggaggcctgcagtgagcccagcctgctctccacagagatgctctcctaccaggatgacgaaaatcggcaactgacgctcccagaggaggacaagagggacatccggcaatctccgaagaggggtttcctccgctctgcctcactaggtcgaagggcctccttccacctggaatgtctgaagcgacagaaggaccgagggggagacatctctcagaagacagtcctgcccttgcatctggttcatcatcaggcattggcagtggcaggcctgagccccctcctccagagaagccattcccctgcctcattccctaggccttttgccaccccaccagccacacctggcagccgaggctggcccccacagcccgtccccaccctgcggcttgagggggtcgagtccagtgagaaactcaacagcagcttcccatccatccactgcggctcctgggctgagaccacccccggtggcgggggcagcagcgccgcccggagagtccggcccgtctccctcatggtgcccagccaggctggggccccagggaggcagttccacggcagtgccagcagcctggtggaagcggtcttgatttcagaaggactggggcagtttgctcaagatcccaagttcatcgaggtcaccacccaggagctggccgacgcctgcgacatgaccatagaggagatggagagcgcggccgacaacatcctcagcgggggcgccccacagagccccaatggcgccctcttaccctttgtgaactgcagggacgcggggcaggaccgagccgggggcgaagaggacgcgggctgtgtgcgcgcgcggggtcgaccgagtgaggaggagctccaggacagcagggtctacgtcagcagcctgtagtgggcgctgccagatgcgggcttttttttatttgtttcaatgttcctaatgggttcgtttcagaagtgcctcactgttctcgtgacctggagttaaccggaacagcgtcttcattcatttctgttgggaccagacgcggagcctgggtgcgcgagccgccctccgggaggaaggcgcccggctgcgtctgcagaggcggggagaggaggcggcgagggtcccggggcgcgaggaaggcgcctgccctctcccagctcgcaggccccgggcccggccgcgcctccgcggggagagcaccccggcttcccgcgcgccctcaccaaaaggaccctacagcaaacgggtgtctttcgactctgcttgtagaaaccatttgcacatattctgtacgagcctcgctgtctccctagagccagggccctgcggatttggagaagggagcggggcaggacttccaggaggaccccaacccggcccggagagggaggaggaggcctccaggggcgcggagctctggggatgggcgtcgggccggcagtggtgcggctcactccgtccctgcccacctgcgacgggatcccccgaccggcacgggccacgccgagctcccggccagccgccggcccgcaggcagcgcgagggaggagctgcgccgccggctccgcccaaccaggtggtgctgagcttccgctgagcgctcttttgttttgtggtttgacacttttcttgacagcatgttgcagtttcttttcggttttggttttttttaaatgttttattttgctttcccagcgggaggggaggaagaagagtgtttacaaagtcctgtagccccctcacctttctgttttcacttttgccaatgtacatcgggtttggttttcttgtattatttaaacggttgtggtttcctttttccacggaggttcaatagaagccgctgcaggagagttttaccaaccattgtgtatgcccaataatttgttatcatttccttaggtagtaacctatttttgttctggtttggttcggttatctaatggaaaggtaactggcaatgcacttgatgtggtcttgcacatgtgggtgatagagttgggttcctttttatgctgggtgtacaggtgggtttgggagagaggagcatgcgcgagagagtctccgagtgtgtgcgacgcgtgtgtgtgtggtgggttgtctgtgtgcatatgtcctgcccgtgtatatgcacccacaccatgtgcccgtgcacaccagtgactacgcagtcccccctttctggtttagctgtgggaagatctgaatctggggccgtttgaaagcaaaaacaaaccactgtctctgcttctgaaacgggaatcagtaactctttgcattttctgtcccacaagatatgcaaaaacaatgcaataatattcatttaaaaatacaattgtgagttgtgttggcattaaaactgtattttaaaaaaagacagaaatttaagggaaaaacacaagaaggcattttgcttcaatatattccgtgtaatgttttattgcattgataatgtttctgttgaagaaaccgttatacttgaattcaggtcagtttcagtatttttcaaatatttttttaaaactgaattgcaattgtgccaagcgaatataatgaattgaattaagttggttttcggattcacttcttgtatattttgctgcatgtaaagtaaatcattttgtatttggagtgtgacaagctttacctttgaactcaagtgcttttctatatgtggttgggggaaagggaacaagttttctttagtttgcacaatgagcaaaggtatcaccagtgtagtcattattctgctctccacaaacaggtttggacattactgttttgcatatcttgtgtttgcttacatttccctcaatttttccaaaatcgtttgctgggtatgtttgtaccgcctcttgctgtgagagaccaggacctattttattccagtcttcactctgtccactctgctctggtcatctgatttggtacttctccaagaacagcccttcactgtgaggtgcagggaggcgttctgatgagccctcagtcactgggccgtcatccgcatcccccatggaagaggtagctggctttcccttcccttccaccacacggaattttctctttggcttccttaggaaagtgtacactaaccgggaggataaaattaaagtcaggctgcttggagggaggggcatcctcacttccggattcttgttgctctacccaacaaggacagcaggggctcgagaaaggaactggtgaaaccctgatccatctgaaagtcaactctgcgtgctcctttctccatcccttcctcactctggagcagcctttccttcaggcttgccctaatgtttgggctgccggggagggggccaggacaagggaagaggcatccggagctcacagtgggggtgggaacagatttttgtgggggcatctctaatgctcacttatatctccctagaacatcactcttttggtgctgtgtccttcaaatgtatgtcaacagtggtggctgaaaagggactgctttggggaaaacaggacccaaccattcacccagaattgacccattaaatctcttccagtcctagtgttccctgagcccctcttggcacatatataagtaagctagaaattacaataagggacagtccattcctctatgacagcttgctggactgattcatgacaaagtggagaaatgtactcaatactccccggttaacacagtctagaaacagagtttctttatggatatccacacccaagtcatccaaactttcttgattccttttcactgccatcaaggtcctctagaaattgagtttaggtatcatcctttgaaaagttcccaagatttctaccaggaggtacacacaggcgttccctgtctagggcaggaggactatcctagcttgaccttctgatccactagaataagactggcgtatgatgcctgtcatcagaacagactggcacaagtagtgacatcaatgaaccacagcacaatcttccaagtgatgtctactctccacctaaaatggaattttccccatgaccttgtaaaacataattgtcacatcttccatacccctcctgacagcccccaagtgtcaggagaaaacagtcaggggctaagggcccaagggacttgaagaaacaacagtttaaggtctgcagtttggtcaacttaattcttgtcctccgaccagccctgcctctttcatttccagaccttggagaatttttcccagctttgattcagaaggtactagttataacccctttccttcttcttaatccaataggcctcactctcactgggaaatccactcaaaggaacaaggcaatgtctctcattctatttcccagttccaaattccaggtgcttgtctggagtgaagctacccgttactttctcccagcttttctccacccagcatgtctcctgcccatgcagctgaagacagtggggcaacctcaggagaagcagacctttccatgcccaagttcatctcctgagcaacagtgacacctagaaaatgaggactttggaagtcacccaaaagatggtggctactttatggagtcctgaagatacacagccaccactcctaaaggcaaagaaagaaaacacgaatgtaggtcagggatagagtggaaccctggtcatcggggtttttagcctcatcgtgggaaaggtggtaaaggaggatgatggcatctccatccctagaggccaagaattgaaatatcattgtcaaggattagaaacaattcagcaaagaggccacaaaaagggcctgctgactcccagaagacctctttaaaccccaggggaggcaaatacttgctgatggagtctgggccgtttccatattttaaagaagacctgcctctggggcaaatgtcagcacagagaggactgggaggagaatggaggcaagaaaagggcatattttgactccctctgtgcctcttcccagttcatggaaggatgtgttcagcttacccacccacagtgaccagtgtggtggagccgctgacatctcaaggatctatttgggaaggtgagaagagtactcattccatctgggggtgttgttccagccacatcagcctacctggtgggatgtgggggtgtctgccaccctgtcccccctctgctgatgtccctcccctcaggctgtccaggtgccacctgacacaggctgctgtgcaaagacaggcggggaagcccaaacctcactcccagggaggccctcagccgccagagtccaggttctccagaggctacgatttgaggaggttgagggggaagacaggagggaaagaaaagtcctacaactgtcaggaatggggcacctttccctgtccctaagcaaagctccctcttcccactgccctccccagccccagctccctgtcctccccaacacctagtgagaaagacggtgcgtggaagggagtcccatgggcagatgcttacacgacctctttgtgaagcctcttctgggtttaacttcattcatcaatttattcttatgtcaaagcaatgaaacttttctttctggagccagataccaatacaacaggtgaacgggtttctgccacatctctacattgacgggggatgcttgaacaacccccctcactacacagacacacaccgttaaggcacaagggctggggttgagctctagatgagggactttcctgctcctgcaagggtgagcactgtatacacagacaaggagggtgcagtagagtgactcccttggatggaagtagtaccatcagaacctactattattatgacataaattctatttacatacattgagagaatactacaatcaacactttttcctgggatgactttaagaggtttgagccacagcacctgaagtggcaaagatccatggtctttgtagggtattagagaactcttccagtcacctctgaaagcactctagatcttgcagctgagtggatgaagtgtaacaaatctgttgcacgctgagaggagtcagaattagcatttttcatgaaagttccccacgtctctactaagaatgaggaagaaaagactaagactaggtaattacacagaggcttgaaatgttacatcaccagagccaagtcctctcccttcagatcagttactggctgctacacagggacacccccaccttttcagggcatcccatgcactccacttctcaggatctaaggaatttgactttgtagggatcccagaaagggcactgtgccacttcccctggtgtgaatcagacatacattgtacattcatttctaaaattcactcatgcacctcaaaccaaggtcattatccaaaaaaaaaaaaaaaaagctctgggtggaagagtttgtaagttttaagagagggtcatttctatgtgaggaaatgcagaaatggacagaatgattcttattcactgtttgggtctggagaattcccattgtggaaatcttagagatctcaagtttattaccaagggaataaggaaaaaaaggtgagcaggcaccaggccaagcagtggctcccttgccaaggaacctgaggctgcaggtttcagggacccccttgaagaaacctctcctggccattggccaggagaaaagagaagtctctcctgtagagtcacaagagaagcaaaagagggtgggtcactgggtcctggacatagcccccaaccccaagacttcccaatatggagaaactacaccaatgtttaaaaggggaaaaggaaagaacttgtacatcaagggaagatgatttgtaaacacacagtcctgtgcagaaagatccccttcaggaggtgtctccagcatcccaaagctgtgcgcaccttctcttttcctgcctcaggccacctatgcatccagctgcagcccatacccacacctgaaatccatctcttgaatcccagccaggttatataccaccccattgccatgtcctgtcctggccagaatgcatgctgttcccccaagcctcgtgggagtgaggccatgggaaacagagatgagcatgtctggacaagtctgtgatggtagtggatgagaataacccatggcaaaacacgcacattcattaagaaatagggcgacagattccccgttggtgaagcactgaaaggtctattactctcataatattgctgttttattttaatccaccagagctaccatgcaaaactttcctcctgtgaaacgctccagataaagctcctctaatctccccttccctcatgtcctccagctcaaacccaccttcatcccccaaaccaatctgtatcatgcctgttatcagagaggcacagaaagatgggcagtgcctccgttgtcaccattccccacacccctacacacccccacaccctcccctccaggctccacgacttcacagtcttactgttgtaaatatcattgtacagtttgtaatcctcaaataatcccattgtcagaggcctcgcctgatgggccttctcaccctcgagaaaggccagggaatctagaaggggcaacccttcaaggagagcttcagggtcatctctgtgtgagacactattgtatattcctgtaagattgcatttttatctaaggaatgatgttatttaaaaaacaaacaaaaaacacaaaaaataagaattgcaaataaatttcttaacaatgtct

SEQ ID NO: 65340 - DNA, 6120 bp, Artificial Sequence
  derived and/or modified sequence
gagagagtggagtacctgttcctgatcatcttcaccgtggaggccttcctgaaggtgatcgcctacggcctgctgttccaccccaacgcctacctgagaaacggctggaacctgctggacttcatcatcgtggtggtgggcctgttcagcgccatcctggagcaggccaccaaggccgacggcgccaacgccctgggcggcaagggcgccggcttcgacgtgaaggccctgagagccttcagagtgctgagacccctgagactggtgagcggcgtgcccagcctgcaggtggtgctgaacagcatcatcaaggccatggtgcccctgctgcacatcgccctgctggtgctgttcgtgatcatcatctacgccatcatcggcctggagctgttcatgggcaagatgcacaagacctgctacaaccaggagggcatcgccgacgtgcccgccgaggacgaccccagcccctgcgccctggagaccggccacggcagacagtgccagaacggcaccgtgtgcaagcccggctgggacggccccaagcacggcatcaccaacttcgacaacttcgccttcgccatgctgaccgtgttccagtgcatcaccatggagggctggaccgacgtgctgtactggatgcaggacgccatgggctacgagctgccctgggtgtacttcgtgagcctggtgatcttcggcagcttcttcgtgctgaacctggtgctgggcgtgctgagcggcgagttcagcaaggagagagagaaggccaaggccagaggcgacttccagaagctgagagagaagcagcagctggaggaggacctgaagggctacctggactggatcacccaggccgaggacatcgaccccgagaacgaggacgagggcatggacgaggagaagcccagaaacatgagcatgcccaccagcgagaccgagagcgtgaacaccgagaacgtggccggcggcgacatcgagggcgagaactgcggcgccagactggcccacagaatcagcaagagcaagttcagcagatactggagaagatggaacagattctgcagaagaaagtgcagagccgccgtgaagagcaacgtgttctactggctggtgatcttcctggtgttcctgaacaccctgaccatcgccagcgagcactacaaccagcccaactggctgaccgaggtgcaggacaccgccaacaaggccctgctggccctgttcaccgccgagatgctgctgaagatgtacagcctgggcctgcaggcctacttcgtgagcctgttcaacagattcgactgcttcgtggtgtgcggcggcatcctggagaccatcctggtggagaccaagatcatgagccccctgggcatcagcgtgctgagatgcgtgagactgctgagaatcttcaagatcaccagatactggaacagcctgagcaacctggtggccagcctgctgaacagcgtgagaagcatcgccagcctgctgctgctgctgttcctgttcatcatcatcttcagcctgctgggcatgcagctgttcggcggcaagttcaacttcgacgagatgcagaccagaagaagcaccttcgacaacttcccccagagcctgctgaccgtgttccagatcctgaccggcgaggactggaacagcgtgatgtacgacggcatcatggcctacggcggccccagcttccccggcatgctggtgtgcatctacttcatcatcctgttcatctgcggcaactacatcctgctgaacgtgttcctggccatcgccgtggacaacctggccgacgccgagagcctgaccagcgcccagaaggaggaggaggaggagaaggagagaaagaagctggccagaaccgccagccccgagaagaagcaggagctggtggagaagcccgccgtgggcgagagcaaggaggagaagatcgagctgaagagcatcaccgccgacggcgagagcccccccgccaccaagatcaacatggacgacctgcagcccaacgagaacgaggacaagagcccctaccccaaccccgagaccaccggcgaggaggacgaggaggagcccgagatgcccgtgggccccagacccagacccctgagcgagctgcacctgaaggagaaggccgtgcccatgcccgaggccagcgccttcttcatcttcagcagcaacaacagattcagactgcagtgccacagaatcgtgaacgacaccatcttcaccaacctgatcctgttcttcatcctgctgagcagcatcagcctggccgccgaggaccccgtgcagcacaccagcttcagaaaccacatcctgttctacttcgacatcgtgttcaccaccatcttcaccatcgagatcgccctgaagatgaccgcctacggcgccttcctgcacaagggcagcttctgcagaaactacttcaacatcctggacctgctggtggtgagcgtgagcctgatcagcttcggcatccagagcagcgccatcaacgtggtgaagatcctgagagtgctgagagtgctgagacccctgagagccatcaacagagccaagggcctgaagcacgtggtgcagtgcgtgttcgtggccatcagaaccatcggcaacatcgtgatcgtgaccaccctgctgcagttcatgttcgcctgcatcggcgtgcagctgttcaagggcaagctgtacacctgcagcgacagcagcaagcagaccgaggccgagtgcaagggcaactacatcacctacaaggacggcgaggtggaccaccccatcatccagcccagaagctgggagaacagcaagttcgacttcgacaacgtgctggccgccatgatggccctgttcaccgtgagcaccttcgagggctggcccgagctgctgtacagaagcatcgacagccacaccgaggacaagggccccatctacaactacagagtggagatcagcatcttcttcatcatctacatcatcatcatcgccttcttcatgatgaacatcttcgtgggcttcgtgatcgtgaccttccaggagcagggcgagcaggagtacaagaactgcgagctggacaagaaccagagacagtgcgtggagtacgccctgaaggccagacccctgagaagatacatccccaagaaccagcaccagtacaaggtgtggtacgtggtgaacagcacctacttcgagtacctgatgttcgtgctgatcctgctgaacaccatctgcctggccatgcagcactacggccagagctgcctgttcaagatcgccatgaacatcctgaacatgctgttcaccggcctgttcaccgtggagatgatcctgaagctgatcgccttcaagcccaagcactacttctgcgacgcctggaacaccttcgacgccctgatcgtggtgggcagcatcgtggacatcgccatcaccgaggtgaacaacgccgaggagaacagcagaatcagcatcaccttcttcagactgttcagagtgatgagactggtgaagctgctgagcagaggcgagggcatcagaaccctgctgtggaccttcatcaagagcttccaggccctgccctacgtggccctgctgatcgtgatgctgttcttcatctacgccgtgatcggcatgcaggtgttcggcaagatcgccctgaacgacaccaccgagatcaacagaaacaacaacttccagaccttcccccaggccgtgctgctgctgttcagatgcgccaccggcgaggcctggcaggacatcatgctggcctgcatgcccggcaagaagtgcgcccccgagagcgagcccagcaacagcaccgagggcgagaccccctgcggcagcagcttcgccgtgttctacttcatcagcttctacatgctgtgcgccttcctgatcatcaacctgttcgtggccgtgatcatggacaacttcgactacctgaccagagactggagcatcctgggcccccaccacctggacgagttcaagagaatctgggccgagtacgaccccgaggccaagggcagaatcaagcacctggacgtggtgaccctgctgagaagaatccagccccccctgggcttcggcaagctgtgcccccacagagtggcctgcaagagactggtgagcatgaacatgcccctgaacagcgacggcaccgtgatgttcaacgccaccctgttcgccctggtgagaaccgccctgagaatcaagaccgagggcaacctggagcaggccaacgaggagctgagagccatcatcaagaagatctggaagagaaccagcatgaagctgctggaccaggtggtgccccccgccggcgacgacgaggtgaccgtgggcaagttctacgccaccttcctgatccaggagtacttcagaaagttcaagaagagaaaggagcagggcctggtgggcaagcccagccagagaaacgccctgagcctgcaggccggcctgagaaccctgcacgacatcggccccgagatcagaagagccatcagcggcgacctgaccgccgaggaggagctggacaaggccatgaaggaggccgtgagcgccgccagcgaggacgacatcttcagaagagccggcggcctgttcggcaaccacgtgagctactaccagagcgacggcagaagcgccttcccccagaccttcaccacccagagacccctgcacatcaacaaggccggcagcagccagggcgacaccgagagccccagccacgagaagctggtggacagcaccttcacccccagcagctacagcagcaccggcagcaacgccaacatcaacaacgccaacaacaccgccctgggcagactgcccagacccgccggctaccccagcaccgtgagcaccgtggagggccacggcccccccctgagccccgccatcagagtgcaggaggtggcctggaagctgagcagcaacagaatgcactgctgcgacatgctggacggcggcaccttcccccccgccctgggccccagaagagcccccccctgcctgcaccagcagctgcagggcagcctggccggcctgagagaggacaccccctgcatcgtgcccggccacgccagcctgtgctgcagcagcagagtgggcgagtggctgcccgccggctgcaccgccccccagcacgccagatgccacagcagagagagccaggccgccatggccggccaggaggagaccagccaggacgagacctacgaggtgaagatgaaccacgacaccgaggcctgcagcgagcccagcctgctgagcaccgagatgctgagctaccaggacgacgagaacagacagctgaccctgcccgaggaggacaagagagacatcagacagagccccaagagaggcttcctgagaagcgccagcctgggcagaagagccagcttccacctggagtgcctgaagagacagaaggacagaggcggcgacatcagccagaagaccgtgctgcccctgcacctggtgcaccaccaggccctggccgtggccggcctgagccccctgctgcagagaagccacagccccgccagcttccccagacccttcgccaccccccccgccacccccggcagcagaggctggcccccccagcccgtgcccaccctgagactggagggcgtggagagcagcgagaagctgaacagcagcttccccagcatccactgcggcagctgggccgagaccacccccggcggcggcggcagcagcgccgccagaagagtgagacccgtgagcctgatggtgcccagccaggccggcgcccccggcagacagttccacggcagcgccagcagcctggtggaggccgtgctgatcagcgagggcctgggccagttcgcccaggaccccaagttcatcgaggtgaccacccaggagctggccgacgcctgcgacatgaccatcgaggagatggagagcgccgccgacaacatcctgagcggcggcgccccccagagccccaacggcgccctgctgcccttcgtgaactgcagagacgccggccaggacagagccggcggcgaggaggacgccggctgcgtgagagccagaggcagacccagcgaggaggagctgcaggacagcagagtgtacgtgagcagcctgtag

SEQ ID NO: 65341 - DNA, 6120 bp, Artificial Sequence
  derived and/or modified sequence
gagagggttgaatacctgttcctgatcatcttcaccgtagaagcctttctgaaagtgatagcatacgggctgttgttccaccctaatgcttatctcaggaacggatggaatctattggacttcatcatagtggtggtggggctgttctcagctattcttgagcaggcgactaaggccgacggtgctaacgcactgggcggcaaaggggctggttttgacgtgaaggctctgagggcctttcgagtccttcgtccgctgcgccttgttagtggggtcccttctttgcaggtggtgctgaacagcatcatcaaagccatggtgcccctcctccacattgctctattggtgctgtttgttattataatctatgccattatcggcttagagttgtttatggggaagatgcacaaaacctgctacaaccaggaaggcattgccgacgtgcctgccgaagacgacccctcaccgtgtgcactcgaaacaggtcacgggaggcagtgtcagaacggcacagtgtgcaagcctgggtgggatggccccaagcacggtatcactaacttcgataacttcgcattcgctatgctgaccgtgttccagtgtatcacaatggaggggtggaccgacgttctttattggatgcaggacgccatggggtacgaactgccatgggtctattttgtgtcgctcgtgatcttcgggtccttcttcgtgcttaacctcgtactcggggttctctcaggcgaattcagcaaggaacgcgaaaaagccaaagctcgtggcgattttcagaagttgagagagaaacagcaactggaggaagacctgaaaggatatcttgactggataacacaggcagaggacatagatccggagaacgaagacgaaggcatggatgaggaaaagcctcggaacatgtcgatgcccacatctgagactgaatccgttaacactgagaatgtggcaggaggcgacatcgagggtgagaattgtggagctcgcttggcacatcgtatttcaaagtccaaattctccaggtattggagacgttggaaccgcttttgccgacggaaatgtcgcgcagcagttaaaagtaacgttttctattggctggtgatctttctcgtctttctgaacaccctgactattgctagcgagcactataaccagcccaactggctgaccgaggtccaagatactgctaacaaggctttgctagccttgtttaccgcagagatgctcttaaagatgtatagccttggtcttcaggcctattttgtctcactgtttaacagattcgattgtttcgtggtgtgtggtggtattttggaaaccatcttggtggagacgaagattatgtcccccctcggcatctcggtcctaagatgcgtacggctccttcgtattttcaaaatcacaagatactggaattcactatccaatcttgtggcctcgctgctgaacagcgtgagatccatcgcctcactccttctgctgctgttcctgtttatcatcatattctcattgctgggaatgcaactcttcggagggaaatttaacttcgatgagatgcaaactcggagatcaaccttcgataattttccacaatccctcttgaccgtcttccagatcctgacaggtgaagactggaattcggtgatgtacgatggtataatggcttacggaggaccatcctttcctggcatgcttgtctgtatctatttcataatcctcttcatatgcggcaattacattctattgaacgtgtttttggctatcgccgtggacaacctcgctgacgcggagagcctgacctcagcacagaaggaggaagaggaggaaaaagagcggaaaaaactagctcggacagccagtcccgagaagaagcaggagctcgtcgaaaagcccgccgtgggcgagtcaaaagaggagaaaattgagctcaagtctatcacagccgatggtgagagccccccggcgactaagattaatatggatgatcttcagccaaacgaaaacgaggataagtctccctaccccaatccggaaactaccggtgaagaggatgaagaagagcccgagatgcctgtaggccctaggcctagacccctcagcgagctacacctgaaggaaaaggccgtgcccatgccggaggcgagcgcctttttcatattttcctcaaacaaccgcttccggcttcagtgccacagaatcgtgaacgatacgatcttcactaatttgattctgttctttatcctccttagctctatttccctcgccgctgaagatcccgtccagcatacctcatttcggaaccacattcttttttactttgacatcgtcttcacaaccatcttcaccatagagattgctcttaagatgacggcttatggggcctttctacacaaagggtcattttgtcgcaattatttcaacatcctcgatctcttggtggtgtcagtgtcccttatatccttcgggattcagtcgtctgcgataaatgttgtgaagatcctgagagtcctgcgtgttcttcggccgctgagggccattaatcgggcgaagggcttaaaacacgttgtgcagtgtgtttttgtggccattcgcaccatcggcaatatagtgatagttactactcttctccaattcatgtttgcttgcatcggggtccagctgttcaaggggaagctgtatacctgttctgattcatctaagcagaccgaggccgaatgcaaagggaattacataacatacaaggatggagaggttgatcatcctatcatccagcctcggagttgggagaatagtaaattcgactttgacaacgtgctggcggctatgatggccctattcacagtatcaacatttgagggctggcctgaacttctatataggtcaatcgacagtcacaccgaggataagggtcccatctacaattaccgagttgaaatcagcatcttcttcattatttacataatcattattgctttcttcatgatgaacatctttgtgggtttcgtgatcgtaaccttccaagagcagggggaacaggagtacaagaattgcgagctggacaaaaaccagaggcagtgcgtggaatacgccctgaaggcccgaccattgagacgttacatacctaagaaccaacaccagtacaaggtctggtacgtcgtgaattcaacctatttcgaatatttgatgttcgtcctcatattgctgaatactatctgtctcgccatgcaacactacggccagagctgtttgttcaaaatcgctatgaatatcctgaacatgctttttacaggcctgtttaccgtagagatgatcctaaagcttatagcattcaagcccaaacattatttttgcgacgcttggaacaccttcgatgcattgatcgtagtgggcagcatcgttgatatcgccataactgaggtcaataatgccgaggaaaacagcaggatcagtatcacatttttccgactgttccgagtcatgaggcttgtgaaactgctgtccaggggggagggaattcgcaccctgctctggacgtttattaaaagcttccaggctttgccttatgtggcactgctcatcgtgatgctgtttttcatatacgcagtgataggcatgcaggtcttcgggaaaatagcattgaacgacactactgaaatcaacaggaataataacttccagacctttccccaggctgttttgttgctcttccggtgtgccaccggggaggcttggcaggatattatgcttgcctgcatgcctggaaagaagtgtgctcctgaatcagagccttctaacagcacagaaggggagactccttgcggatcctccttcgctgtcttttatttcatctcattctacatgctttgcgcatttctcatcattaatctcttcgtggccgttatcatggataattttgactacctaaccagggattggtccattcttggcccacatcatttggatgagttcaagagaatttgggccgaatatgatccagaggccaaaggacgaatcaaacatctcgatgtggttactctgctacgcaggatacaacctcccttgggcttcgggaaactctgcccccaccgagtggcctgcaagcgtctggtttccatgaatatgccgctgaattcggacggtaccgtcatgtttaacgccacactctttgcactcgtcaggactgcactcagaatcaaaaccgagggtaatttggaacaggcgaacgaggagctgcgggccattatcaaaaagatctggaaaagaacctcaatgaagctcctggatcaggtcgtccccccggcaggggacgacgaggtcaccgtggggaagttctatgctaccttcctgattcaagagtacttcaggaagttcaagaagaggaaagagcagggtctcgtgggcaagccttctcagcgaaacgccttgagtctgcaggccggtttacgaactttgcacgatataggcccagagatcagacgagcgatttcaggcgacctgaccgccgaagaggagctagacaaggccatgaaggaagcggtgtccgcggcctcagaggacgacattttccgcagggccggggggttgtttggtaaccatgtctcatactaccagtcagatggcagatcagcctttcctcagacattcacgacgcagaggccactgcacattaacaaggccgggtcctcgcagggtgacacggagtccccctctcatgaaaagctcgtcgattctaccttcactccttcgtcctactctagcacaggcagcaatgcaaacattaataatgcgaacaacacagcactgggccgcttgccaagacctgccggctatcccagtactgtctcaactgttgaaggacatgggcccccactgagcccagccatcagagtgcaggaagtggcctggaaactaagttccaatcgcatgcattgttgtgatatgctggatggaggcaccttcccgccagccctggggcctcggcgcgctcccccatgtctacaccagcagctgcagggctctctggctggtctgagggaggacactccctgcatcgtaccaggccacgcttctctctgttgcagcagcagagtaggggaatggttgcccgccggttgtaccgccccccaacatgcaagatgccattcgagggaaagccaggccgctatggccggacaggaggagacttcacaggatgagacatacgaagtaaaaatgaatcacgacacagaagcttgttccgaacccagcctgctgtcaaccgaaatgctctcctaccaggatgacgagaacagacagctgactttaccagaagaggataagagggacatccgccagtctcccaaaagagggttcctgcggagcgcttccctgggacggagggcatcattccatttagagtgtttaaagagacagaaagacagaggcggggatatcagccagaaaaccgtgttgccactgcatctcgtacaccaccaagcactggctgttgcagggctatcccccctcctgcaacgtagtcattcacctgcgagcttcccccgaccttttgctacacctcccgccactccaggctctagaggctggccaccacagccagtgccaacactccgcctagagggagtggaaagtagcgagaagttaaatagttccttcccttcaatccactgcggcagctgggctgagactacccctgggggcgggggctcatccgctgcccgccgcgtacgccccgtgtccctgatggtgcctagtcaagctggcgctccgggaagacagttccatggatccgctagtagtctcgtggaggcagtactcatttcagagggcctggggcaatttgcacaggatccaaaatttatcgaggttaccactcaagaactggccgatgcctgcgatatgaccatcgaagagatggaaagcgccgcggataatatcctgtctggcggcgcaccccagagccccaacggagccctcctgccctttgtgaactgccgcgacgcaggccaggatagagcaggaggggaagaggatgctgggtgcgttagagcccggggcaggccttccgaggaggagctgcaggattcccgagtatacgtgtcttccctttag

SEQ ID NO: 65342 - DNA, 6120 bp, Artificial Sequence
  derived and/or modified sequence
gagcgggtggagtacctgttcctgatcatcttcaccgtggaggccttcctgaaggtgattgcctacggcctgctcttccaccccaatgcctacctgagaaatggctggaacctgctggacttcatcatcgtggtggtgggcctcttcagcgccatcctggagcaggccaccaaggcagatggagccaatgccctgggcggcaagggggccggctttgatgtgaaggccctgcgggccttccgggtgctgcggcccctgcggctggtgtctggagtgcccagcctgcaggtggtgctgaacagcatcatcaaggccatggtgcccctgctgcacatcgccctgctggtgctcttcgtcatcatcatctatgccatcatcggcctggagctgttcatgggcaagatgcacaagacctgctacaaccaggagggcattgctgatgtgcctgcagaagatgaccccagcccctgtgccctggagactggacatggccggcagtgccagaatggaacagtgtgcaagccaggctgggatggccccaagcacggcatcaccaactttgacaactttgcctttgccatgctgaccgtcttccagtgcatcaccatggagggctggacagatgtgctgtactggatgcaggatgccatgggctatgagctgccctgggtgtactttgtgtccctggtgatcttcggcagcttctttgtgctgaacctggtgctgggcgtgctgagcggggagttcagcaaggagcgggagaaggccaaggcccggggggacttccagaagctgcgggagaagcagcagctggaggaggacctgaagggctacctggactggatcacccaggccgaggacatcgaccctgaaaatgaagatgagggcatggatgaggagaagcccaggaacatgtccatgcccaccagcgagacagagagcgtgaacacagaaaatgtggccggcggggacattgaaggagagaactgtggggcccggctggcccaccgcatcagcaagagcaagttcagccgctactggaggcgctggaaccgcttctgcagaagaaaatgtagagctgctgtgaagagcaatgtgttctactggctggtgatcttcctggtgttcctgaacaccctgaccatcgccagcgagcactacaaccagcccaactggctgacagaggtgcaggacacagccaacaaggccctgctggccctcttcaccgctgagatgctgctgaagatgtacagcctgggcctgcaggcctactttgtgtccctcttcaacagatttgactgctttgtggtgtgtggcggcatcctggagaccatcctggtggagaccaagatcatgagccccctgggcatctctgtgctgcgctgtgtgcggctgctgcgcatcttcaagatcacccgctactggaacagcctgagcaacctggtggccagcctgctgaacagcgtgcgcagcatcgccagcctgctgctgctgctcttcctgttcatcatcatcttcagcctgctgggcatgcagctgtttggaggcaagttcaactttgatgagatgcagacccggcgcagcacctttgacaacttcccccagagcctgctgactgtgttccagatcctgactggagaggactggaacagcgtgatgtatgatggcatcatggcctacggcggccccagcttccctggcatgctggtgtgcatctacttcatcatcctcttcatctgtggcaactacatcctgctgaatgtgttcctggccatcgctgtggacaacctggctgatgctgagagcctgaccagcgcccagaaggaggaggaggaggagaaggagaggaagaagctggccaggacagccagccctgagaagaagcaggagctggtggagaagccagctgtgggggagagcaaggaggagaagattgagctgaagagcatcacagcagatggagagagccccccagccaccaagatcaacatggatgacctgcagcccaatgaaaatgaagacaagagcccctaccccaaccctgagaccaccggggaggaggatgaggaggagcctgagatgcctgtgggcccccggccccggcccctgtctgagctgcacctgaaggagaaggctgtgcccatgcctgaggccagcgccttcttcatcttcagcagcaacaaccgcttccggctgcagtgccacagaattgtgaatgacaccatcttcaccaacctgatcctcttcttcatcctgctgagcagcatcagcctggccgcagaagatcctgtgcagcacaccagcttcaggaaccacatcctcttctactttgatattgtgttcaccaccatcttcaccattgaaattgccctgaagatgacagcctacggggccttcctgcacaagggcagcttctgcaggaactacttcaacatcctggacctgctggtggtgtctgtgtccctcatcagctttggcatccagagcagcgccatcaacgtggtgaagatcctgcgggtgctgcgggtgctgcggcccctgcgggccatcaacagagccaagggcctgaagcacgtggtgcagtgtgtgtttgtggccatccgcaccatcggcaacatcgtgattgtgaccaccctgctgcagttcatgtttgcctgcattggagtgcagctgttcaagggcaagctgtacacctgcagcgacagcagcaagcagacagaagcagaatgtaaaggaaactacatcacctacaaggatggagaggtggaccaccccatcatccagcccaggtcctgggagaacagcaagtttgattttgacaacgtgctggccgccatgatggccctcttcaccgtgtccacctttgagggctggccagagctgctgtaccgcagcattgacagccacacagaagataaaggccccatctacaactacagagtggagatcagcatcttcttcatcatctacatcatcatcatcgccttcttcatgatgaacatctttgtgggctttgtgattgtgaccttccaggagcagggcgagcaggagtacaagaactgtgagctggacaagaaccagaggcagtgtgtggagtatgccctgaaggcccggcccctgcggcgctacatccccaagaaccagcaccagtacaaggtgtggtacgtggtgaacagcacctactttgagtacctgatgtttgtgctgatcctgctgaacaccatctgcctggccatgcagcactacggccagagctgcctcttcaagatcgccatgaacatcctgaacatgctgttcaccggcctcttcaccgtggagatgatcctgaagctgattgccttcaagcccaagcactacttctgtgatgcctggaacacctttgatgccctgattgtggtgggcagcatcgtggacatcgccatcacagaggtgaacaatgctgaggagaacagccgcatcagcatcaccttcttccgcctcttccgggtgatgaggctggtgaagctgctgagcagaggagagggcatccgcaccctgctgtggaccttcatcaagagcttccaggccctgccctacgtggccctgctgattgtgatgctgttcttcatctatgctgtgattggcatgcaggtgtttgggaagatcgccctgaatgacaccacagagatcaacagaaacaacaacttccagaccttcccccaggccgtgctgctgctcttccgctgtgccaccggggaggcctggcaggacatcatgctggcctgcatgcctgggaagaagtgtgcccctgagagcgagcccagcaacagcacagaaggagagaccccctgtggcagcagctttgctgtgttctacttcatctccttctacatgctgtgtgccttcctgatcatcaacctgtttgtggccgtcatcatggacaactttgactacctgacccgggactggagcatcctgggcccccaccacctggatgagttcaagaggatctgggccgagtatgaccctgaggccaagggccgcatcaagcacctggatgtggtgaccctgctgcggcgcatccagccccccctgggctttgggaagctgtgcccccaccgggtggcctgcaagaggctggtgtccatgaacatgcccctgaacagtgatggcaccgtgatgtttaatgccaccctgtttgccctggtgaggacagccctgcgcatcaagacagagggcaacctggagcaggccaatgaggagctgcgggccatcatcaagaagatctggaagaggacctccatgaagctgctggaccaggtggtgcccccagctggagatgatgaggtgacagtgggcaagttctacgccaccttcctgatccaggagtacttcaggaagttcaagaagaggaaggagcagggcctggtgggcaagcccagccagagaaatgccctgagcctgcaggccggcctgcggaccctgcatgacatcggccctgagatccggcgggccatcagcggggacctgacagctgaggaggagctggacaaggccatgaaggaggccgtgtctgctgcctctgaagatgacatcttcagaagagctgggggcctgtttggaaaccacgtgtcctactaccagagtgatggccgcagcgccttcccccagaccttcaccacccagaggcccctgcacatcaacaaggccggcagcagccagggcgacacagagagccccagccatgagaagctggtggacagcaccttcacccccagcagctacagcagcacaggcagcaatgccaacatcaacaatgccaacaacacagccctgggccgcctgcccaggcctgctggctaccccagcacagtgtccacagtggagggccacggcccccccctgagccctgccatccgggtgcaggaggtggcctggaagctgagcagcaacaggatgcactgctgtgacatgctggatggcggcaccttccccccagccctgggcccccggcgggccccaccctgcctgcaccagcagctgcagggcagcctggccggcctgcgggaggacaccccctgcatcgtgcccggccacgccagcctgtgctgcagcagccgggtgggggagtggctgcctgctggctgcacagccccccagcacgcccgctgccacagccgggagagccaggccgccatggccggccaggaggagaccagccaggatgagacctatgaggtgaagatgaaccacgacacagaggcctgcagcgagcccagcctgctgagcacagagatgctgagctaccaggatgatgagaaccggcagctgaccctgcctgaggaggacaagagggacatccggcagagccccaagaggggcttcctgcggagcgccagcctgggccggcgggccagcttccacctggagtgcctgaagaggcagaaggaccggggcggggacatcagccagaagacagtgctgcccctgcacctggtgcaccaccaggccctggccgtggccggcctgagccccctgctgcagaggagccacagccctgccagcttcccccggccctttgccaccccaccagccaccccaggcagccggggctggccaccccagcctgtgcccaccctgcggctggagggcgtggagagcagcgagaagctgaacagcagcttccccagcatccactgcggctcctgggccgagaccaccccaggcggcggcggcagcagcgctgcccggcgggtgcggcctgtgtccctgatggtgcccagccaggccggggcccctggccggcagttccacggcagcgccagcagcctggtggaggccgtgctgatcagcgagggcctgggccagtttgcccaggaccccaagttcatcgaggtgaccacccaggagctggctgatgcctgtgacatgaccatcgaggagatggagagcgctgctgacaacatcctgagcggcggggccccccagagccccaacggggccctgctgccctttgtgaactgcagagatgctggccaggacagagctggaggagaagaagatgctggctgtgtgcgggcccggggccggcccagcgaggaggagctgcaggacagccgggtgtatgtgagcagcctgtag

SEQ ID NO: 65343 - DNA, 6120 bp, Artificial Sequence
  derived and/or modified sequence
gagcgggtggagtacctgttcctgatcatcttcaccgtggaggcctttctgaaggtcatcgcctacggcctgctttttcacccaaacgcctacctccgcaatggttggaatcttctcgatttcatcatagtcgtggttggtcttttctcagctattctcgaacaggctaccaaagcagacggggctaacgcccttgggggcaaaggtgcgggctttgacgtcaaagcactcagggccttccgtgttcttcggcctctacggctggtctccggcgttccctccctgcaagtggtcctgaacagcatcattaaggcgatggtgcccttattgcacattgccctgctggtactgtttgtaattatcatatacgctattatcgggctggaactctttatgggcaaaatgcataagacatgctataatcaagaggggattgctgatgttccagcagaggacgatccgagcccttgcgcgcttgagactggccacggcagacaatgccagaatggcactgtgtgtaagcccgggtgggatgggcccaagcatgggattactaactttgataatttcgcttttgcaatgctcacggtgttccaatgcatcaccatggaagggtggacagacgttctttactggatgcaggatgcaatggggtacgagctgccctgggtctactttgtgagcttagtaatttttggttcttttttcgtgcttaacctggttctgggagtactctccggggaattctccaaggaacgtgagaaagcaaaagcacggggcgactttcagaaactgcgggaaaaacaacagcttgaggaagacctgaagggatacttggattggattacccaggcggaggacatcgatccagagaacgaagacgaagggatggacgaagaaaaacccaggaatatgtccatgccaacaagcgaaaccgagagtgtgaacacagagaatgtcgctggcggagatatagagggtgaaaactgcggggcaagactggcacacaggatttcaaaatcaaagttctctcggtattggaggcggtggaaccgtttctgccggcgtaaatgtcgtgctgccgttaagagtaacgtgttctactggctggtaatatttttagtgtttctgaacaccctcaccatcgccagtgaacactataatcagccaaattggttaaccgaggtgcaggacacagctaataaagcccttctggccttattcactgctgaaatgctgctgaagatgtactctctcggtctccaggcctatttcgtgagtttgtttaatcggttcgactgttttgtcgtttgcggggggatactggaaactatcctggtggaaaccaagatcatgtcgccccttgggatatccgtcttgagatgcgtccgcctgttacgtattttcaagatcacgaggtactggaattcattgtctaacctggtggccagcttactgaacagtgtgagatctatcgccagcctcctgctgctcttatttctttttattataatctttagcctgttaggcatgcagctttttggcggcaaatttaacttcgacgaaatgcaaacccgtcgttcaacttttgacaatttccctcaatctctgctgactgtgttccagattctcaccggagaggattggaacagcgtgatgtacgacggtattatggcatatgggggaccgagcttccccggcatgctggtgtgtatttattttataatcctatttatctgtggaaactatattttattgaacgtgtttttggctattgctgtggacaatcttgccgatgccgagagtctaacatctgcacagaaggaagaagaggaggagaaagagcgtaaaaaacttgcccggaccgcgtctccggaaaaaaaacaggaacttgttgaaaagccggcggtcggcgaatccaaagaggaaaaaatcgagctcaagagtattactgcagacggtgaaagcccaccagcaacgaaaattaatatggacgacctgcagccaaatgaaaatgaggacaagagtccctacccaaatccagaaacaactggagaagaggatgaggaggagcctgagatgcccgttggaccccggccacggccactgagcgagctgcatctaaaggagaaagctgtccccatgccggaggcatctgccttttttatcttcagcagcaataaccggtttaggctgcagtgtcaccgcatcgttaacgacacaatattcaccaatttgatcctgttttttatcctactgtcttcaatcagcctcgcagccgaagatcccgtgcagcatacctcattccggaaccacatcttgttttactttgacattgttttcacaacaatattcaccatcgagattgcacttaagatgacagcctatggcgcctttctgcataagggctccttctgccggaattactttaacatcctggacctgttggtggtgtccgtgtccttgatctcgttcgggattcagtcttccgcgatcaacgtggtcaaaatcctgcgagtactgcgcgtcttacgacctcttcgggccatcaacagagctaaaggattaaagcacgtggttcagtgcgtcttcgttgccatccggaccattgggaatatagtgattgttacgacccttctccagtttatgtttgcgtgtatcggtgtgcagcttttcaagggcaagctttatacttgctccgatagcagcaagcagacagaagcagaatgtaagggaaattatatcacttacaaggacggagaggttgaccatccaataatacaacccagatcttgggaaaattccaagttcgatttcgataacgtgctggcggcgatgatggcactgttcacggtgagcacatttgagggctggccggagctgctttatagatccatcgacagtcacacagaagacaagggcccaatttacaactaccgcgtcgagatttctatcttctttatcatctatatcattattatcgctttttttatgatgaatatttttgtggggttcgtgatagtgacttttcaggaacagggcgagcaggaatataaaaactgcgaactggataaaaaccaacgtcagtgcgtggaatatgcgctgaaagctcgccctcttcggcggtatatccctaaaaaccagcaccaatacaaggtatggtatgtagtgaactccacctatttcgaatatctgatgtttgtgctgattctcttaaatactatctgtctagctatgcagcattatgggcagtcttgtcttttcaagatcgctatgaacatcctcaacatgctcttcacagggttattcacggtggagatgattctcaagcttatagctttcaaaccaaaacactacttttgcgatgcctggaatacttttgacgcactgatcgtagtaggcagcatcgtagacatagccatcacagaagttaataacgcagaggaaaattcaaggatcagcatcaccttcttcaggctgttcagagtgatgcggctggtaaaattgctgagccggggagagggtataaggacccttctctggacatttattaaaagttttcaagccctgccctatgtggctttactgatcgtgatgctcttttttatttatgcagtgatcggtatgcaggtgtttggaaagatagcgttgaatgatactacagagattaacaggaataataactttcaaacttttcctcaggcggtccttctgctgtttcgctgtgcgacaggagaagcttggcaggacatcatgctggcctgcatgcctggcaagaaatgcgcgcctgagtctgagccctcaaatagcacggagggggaaaccccatgtggatccagctttgccgtcttttactttatttccttctatatgctgtgtgccttcctcattattaatcttttcgtcgcggtaattatggataactttgattatctgactcgggattggtcgattctcggaccacaccatctggacgaatttaagcggatatgggccgagtacgatcccgaagcgaaaggacgaataaagcatcttgatgtcgtgactctgctcagaaggattcaacctccgctcggcttcggcaagctgtgcccacatagagtggcatgcaagcgcttggtttctatgaacatgccactgaatagtgatggaacagtaatgttcaacgctaccctcttcgctctggtgcgcaccgcattgaggatcaagaccgaagggaacctggaacaggctaatgaggaactcagggccatcattaagaagatctggaaaaggacatccatgaagctactcgaccaggtcgtcccccctgccggtgacgacgaggtgacagtgggcaagttctacgcaacattcctgatccaagagtattttaggaagtttaaaaagaggaaggaacaaggattagtcggaaagccgagccagcggaacgcgctgtctctgcaggccggccttcgtactctgcatgacatcggccccgaaatccgaagagccatttccggcgatctgacagcagaagaagaacttgataaggcgatgaaggaggcagtgtctgctgcctccgaggacgatatttttaggcgtgcaggggggctgtttggcaaccacgtgagctattaccagagtgacggaaggagcgcttttcctcaaaccttcaccacccagaggccactgcacataaacaaggctgggtcttcccagggggacaccgaatcccccagtcatgagaagctggtggattcgacattcactccatcatcatattcatcaacgggctcaaatgcgaatattaataatgctaacaatactgccctgggcaggctgccccggccagccgggtacccgtccacagttagtacagtggaaggtcacgggcctccactgtcacctgccattagagttcaagaagtggcatggaagttatcatcaaaccgcatgcactgctgtgacatgttggacggcgggaccttcccacctgccctgggcccacgccgggcacctccatgtttacaccaacaactgcaagggtccctggcaggcctgagggaagatactccatgcatagttccaggccacgcctcgctgtgttgttcctcgcgggtgggcgagtggctcccagcaggatgtacggctccgcagcacgcccgctgccatagcagggagagtcaagccgccatggctggacaggaggaaacctcgcaagacgagacctacgaggtaaagatgaatcacgacacagaagcttgctctgaacctagcttgcttagtaccgagatgctgtcataccaggatgatgaaaaccggcagctcacactgcctgaggaggacaagcgcgacattcggcaatcgccaaaacgcggattccttaggagcgctagtctgggacgcagggcctctttccacctggagtgcctcaagcgccagaaagacagaggaggagatatcagccaaaaaacagtgctgcccctgcatctggtgcatcaccaggctcttgccgtggcaggactgtcccctcttctgcagcggtcgcattccccagcttcattcccccggccctttgcaacccccccagccacaccaggcagtcgcggctggcccccacagccagtcccgacactgagacttgagggggtcgaatcatccgagaaactgaactcctcatttccttctatccactgtggctcttgggccgaaactacgccagggggcgggggttcctcagcagcgcgtcgggtgcggcctgtgtcattgatggtgccttcacaagcaggtgccccagggcggcagttccatggcagcgcaagctcactggtggaggccgtgctgatctcagagggtctggggcagttcgcccaggatcctaagtttatagaagtcacaacccaggaactagccgatgcctgcgatatgacaatagaagaaatggagtccgctgcagacaacatcctttcaggcggggcaccccagagccctaatggtgcactccttccttttgtgaactgccgtgacgctggacaggaccgcgctggtggtgaggaggatgctggctgcgttagggcaagagggcggcccagtgaagaagagctacaggatagcagggtgtacgtctcttcactgtag

SEQ ID NO: 65344 - DNA, 6119 bp, Artificial Sequence
  derived and/or modified sequence
gaaagagtcgagtacctgtttctcataatttttaccgtggaggcattcctgaaagtgattgcatacggtctcttgttccacccaaacgcttatcttcggaacggttggaatcttctcgatttcattattgttgtcgtcggactatttagtgccattttagagcaggctactaaggcggatggagctaatgcgttgggaggcaagggggcaggctttgatgtcaaagccctgcgagccttccgggtgctgcgtcctctgaggctggtaagtggtgtgccttccctgcaggtggtgctcaactctattatcaaggcaatggtccccctcctacatattgccctgctcgtactattcgtgatcataatttacgcgattataggactggagctgttcatgggaaaaatgcacaaaacctgttacaatcaggagggcatcgctgacgttcctgcagaagatgatccctcaccctgcgccctggagaccgggcacggacgccagtgccagaatggcaccgtttgcaagccaggttgggacgggccaaagcatggtattacaaacttcgacaactttgcctttgccatgctcaccgtgttccagtgcatcactatggaagggtggaccgatgttctttattggatgcaggatgccatgggctatgagttgccttgggtgtactttgtatctctcgtgatattcggaagcttctttgttctgaacttggtgctgggggttctgagtggggaatttagcaaggaaagagagaaggcaaaggcccgtggtgatttccagaagcttcgggagaagcaacagcttgaagaagacctgaaaggatacctagactggatcacccaggccgaggacatagatcccgagaacgaagacgagggtatggacgaagaaaaaccaagaaacatgtcaatgcccaccagcgagaccgaaagcgtaaatacggaaaacgtcgctggcggagatatcgaaggggagaactgtggggctaggctcgcacatagaatctccaagtcgaagttttctagatactggcggaggtggaatagattctgtaggcgaaaatgtagagccgcagtgaagagcaatgtgttttactggctggtcatattccttgtgtttttaaatacgctcacgattgccagcgagcattataatcagcccaactggttaacagaggtgcaggacacagctaataaggctctgctggccttatttacagctgaaatgctactcaagatgtacagtctcggattgcaagcttacttcgtcagcctattcaacagatttgactgtttcgtggtgtgcggaggaatcctggaaaccattctggtagaaacaaaaattatgagccccctcggtattagcgtgctccgctgcgtgagactgctccggatttttaaaatcacacgatattggaatagtttatctaatctagtggcctcattgctcaattctgtccgatcgatcgcctccctgctcctgctgctgttcttgttcattattatctttagcctgctaggaatgcaactgttcggtgggaagttcaactttgatgagatgcagacccggaggagcacctttgacaatttcccccagtcacttctgaccgtgtttcagatactgaccggcgaagattggaattccgttatgtatgacggaatcatggcctatggaggcccatctttcccaggaatgctggtgtgcatctatttcattatccttttcatctgcggcaattacatcctgctgaatgtttttctcgctattgctgtggacaatctcgcagatgccgagtcactcacctccgctcagaaggaagaagaagaagaaaaagagcggaagaagctggctaggacagcatccccggaaaagaagcaggagcttgttgagaaacccgctgtgggtgaaagtaaagaagaaaagatcgaactgaaatcaatcactgccgatggtgagtccccccctgccaccaagatcaatatggatgacctgcaaccgaatgagaacgaggacaagtcaccttatcctaatccagagacaacaggagaagaggacgaggaggaacccgagatgcctgtggggccaaggccaaggcccctctctgaactacatctcaaagagaaggcagttcctatgcccgaagcatcggctttcttcatcttctcctctaacaaccgatttcggctacaatgccaccgaattgtcaacgacacgattttcacaaaccttatcttgtttttcattcttctcagctccatatcgttggccgcagaggatcccgtgcagcacacatccttccggaatcatattctgttctacttcgatatcgtatttacaacaatctttaccatcgagatcgctttgaagatgaccgcctacggcgctttcctccacaaggggtcattttgccggaattattttaacattctcgatcttctcgtcgtgtcagtgtctctgatcagtttcggaatccagagcagcgcgattaacgtggtcaagattcttagagttttacgggtcctcaggcctttgcgggcaattaacagggcgaaggggctgaaacacgtggtccagtgtgtctttgtcgctatccgaacaatcgggaatatcgtgatcgttacaactttgctgcagtttatgttcgcgtgcattggtgtccagcttttcaagggtaaactttatacttgctcagacagcagcaaacagactgaggcagagtgcaagggcaattacatcacgtataaggacggagaggttgaccatccaattatccagccgcgtagttgggaaaactctaaatttgacttcgataatgtcttggctgctatgatggccctgtttaccgtgtcgacctttgaaggctggcccgagctcctttatcgcagtattgatagtcacaccgaggacaaggggccaatctataattatcgtgttgagatatcaatattttttattatttacatcattatcatcgctttttttatgatgaacatcttcgttggcttcgtgatagtgaccttccaagagcagggcgagcaggagtataagaattgtgagctcgacaagaatcaaaggcagtgcgtggaatacgctctgaaggccaggcccctgcgcaggtacatacccaagaaccaacaccagtataaggtatggtacgtagttaatagcacctactttgagtaccttatgtttgtgttgatcctgctgaacacaatctgcttagcgatgcagcattatggccaatcctgtctgttcaagatcgcaatgaacattctgaatatgctttttaccggactgtttaccgtcgagatgattttgaagctcatcgctttcaagccaaaacactacttctgcgacgcctggaatactttcgacgcgttgattgtcgtgggctctatcgtcgacatcgccataacggaggtgaataacgccgaggaaaactctcgaatttccattaccttttttcggcttttcagggttatgagacttgtaaaactcctatcgcggggagagggtattcgcacactgctatggacatttatcaagtctttccaagctcttccgtacgtggccttgcttattgtcatgcttttttttatctacgccgttattggcatgcaggtatttggtaaaattgcactcaacgataccactgaaattaatcgcaacaacaactttcagaccttcccccaggccgtgttactgctcttccgatgtgctactggagaagcctggcaggatatcatgctggcctgtatgccaggtaaaaaatgcgcaccggaatcagaaccaagcaactcgaccgaaggggaaactccatgcggctcaagctttgctgtgttttactttatttcattctatatgctgtgtgccttcctgattattaacttgtttgtcgctgttattatggacaacttcgattacttgacccgggattggtcaattctgggcccacatcacttggacgaatttaaaagaatttgggctgagtatgatcctgaagccaaagggcgtatcaaacatttggatgtggtgaccctgttaagacgtattcaacctcccctcggatttgggaaactgtgcccccaccgtgtcgcatgcaagaggctcgtgtccatgaacatgcccttgaattccgacgggaccgtgatgttcaacgccaccctgtttgctctagtccggaccgctttacgaattaagactgaagggaacttggaacaggccaacgaagagctgcgcgctattataaaaaaaatatggaaaaggacaagcatgaagctgcttgatcaagtcgtccctcctgccggtgatgacgaggttacagtaggtaaattctatgccacctttttgatccaggaatactttaggaaatttaaaaagcgtaaggagcaggggctcgtcgggaagccctcccaaagaaacgccctgagtctgcaggctggactgcgcacgcttcatgatattggacctgaaattcgccgtgccatttctggtgatctcaccgcggaggaagagctggataaagctatgaaggaggctgtgtctgcggctagcgaggatgacatcttcaggagagcgggtggtctgtttggcaaccatgttagctattatcagagcgacgggaggagcgcctttccccaaactttcacgactcaacggcctttgcacatcaataaggcaggctcttcccaaggggacacggaatccccgtctcacgaaaagctggtggactcaacttttactccgtcgtcatactcgtcaaccggttcgaatgcgaacatcaataatgctaacaataccgcgctcggacgcctgccgagacctgcaggatatccatctaccgtcagtactgtggaggggcacggcccacccctgtcccctgccatccgggtccaagaggtcgcgtggaagctgtcttcaaaccgtatgcattgctgtgacatgttggatggcggtacgtttcctccagcactggggccacggagagcccctccttgcttgcaccagcaactgcaggggtcccttgccggactccgggaagataccccatgcatagtcccaggtcacgcttccctctgctgtagttcccgggttggtgagtggttacccgctggatgtacagcaccccaacacgctaggtgtcacagtagggaatcccaagccgcaatggccggacaggaagagactagtcaggacgagacatacgaggtgaagatgaatcacgacaccgaagcttgtagcgaaccttcacttctttctaccgaaatgttaagctatcaggacgatgagaaccgtcagttgaccctgccagaagaggataaaagggacatcagacaatctccaaagagaggcttcctgcgtagcgcctccctcgggcgtcgcgcatcctttcatcttgagtgcctgaagcgacagaaagaccgcggtggcgacattagtcaaaagacagttttgcccctgcacctggtgcaccatcaagccctggccgtggcaggcctctcccctctgcttcagaggtctcactcgccagccagcttccctcggccatttgcgacgccacctgccactcccggaagtcgagggtggcctccgcagccagtgccaaccttgaggctagagggtgtggagtcctctgagaagctaaacagcagtttcccctcgattcactgtggaagttgggcagaaaccaccccgggaggcggaggctcaagtgccgcaagacgcgtccgaccagttagtctcatggtcccctcccaggcaggggcacccggacggcagtttcatggttcagcgtcttcactggtggaggctgtgcttatttccgagggactggggcaattcgcacaggacccgaaatttattgaagtgacaacgcaggagctggcagatgcatgcgacatgacaatagaggaaatggaatccgcagccgataacatactgagtggcggagcccctcagagccccaacggagctctgctcccgtttgtgaattgccgtgacgccggtcaggatcgcgctggaggcgaggaggatgctgggtgcgttagggcccgtggaaggccctccgaagaagaacttcaggacagtcgggtatatgtcagctccctata

SEQ ID NO: 65345 - DNA, 12870 bp, Artificial Sequence
  derived and/or modified sequence
gaacgagtggaatatctctttctcataatttttacggtggaagcgtttttaaaagtaatcgcctatggactcctctttcaccccaatgcctacctccgcaacggctggaacctactagattttataattgtggttgtggggctttttagtgcaattttagaacaagcaaccaaagcagatggggcaaacgctctcggagggaaaggggccggatttgatgtgaaggcgctgagggccttccgcgtgctgcgccccctgcggctggtgtccggagtcccaagtctccaggtggtcctgaattccatcatcaaggccatggtccccctgctgcacatcgccctgcttgtgctgtttgtcatcatcatctacgccatcatcggcttggagctcttcatggggaagatgcacaagacctgctacaaccaggagggcatagcagatgttccagcagaagatgacccttccccttgtgcgctggaaacgggccacgggcggcagtgccagaacggcacggtgtgcaagcccggctgggatggtcccaagcacggcatcaccaactttgacaactttgccttcgccatgctcacggtgttccagtgcatcaccatggagggctggacggacgtgctgtactggatgcaggacgctatgggctatgagttaccctgggtgtattttgtcagtctggtcatctttggatcctttttcgttctaaatctggttctcggtgtgttgagcggagagttttccaaagagagggagaaggccaaggcccggggagatttccagaagctgcgggagaagcagcagctagaagaggatctcaaaggctacctggattggatcactcaggccgaagacatcgatcctgagaatgaggacgaaggcatggatgaggagaagccccgaaacatgagcatgcccaccagtgagaccgagtccgtcaacaccgaaaacgtggctggaggtgacatcgagggagaaaactgcggggccaggctggcccaccggatctccaagtcaaagttcagccgctactggcgccggtggaatcggttctgcagaaggaagtgccgcgccgcagtcaagtctaatgtcttctactggctggtgattttcctggtgttcctcaacacgctcaccattgcctctgagcactacaaccagcccaactggctcacagaagtccaagacacggcaaacaaggccctgctggccctgttcacggcagagatgctcctgaagatgtacagcctgggcctgcaggcctacttcgtgtccctcttcaaccgctttgactgcttcgtcgtgtgtggcggcatcctggagaccatcctggtggagaccaagatcatgtccccactgggcatctccgtgctcagatgcgtccggctgctgaggattttcaagatcacgaggtactggaactccttgagcaacctggtggcatccttgctgaactctgtgcgctccatcgcctccctgctccttctcctcttcctcttcatcatcatcttctccctcctggggatgcagctctttggaggaaagttcaactttgatgagatgcagacccggaggagcacattcgataacttcccccagtccctcctcactgtgtttcagatcctgaccggggaggactggaattcggtgatgtatgatgggatcatggcttatggcggcccctcttttccagggatgttagtctgtatttacttcatcatcctcttcatctgtggaaactatatcctactgaatgtgttcttggccattgctgtggacaacctggctgatgctgagagcctcacatctgcccaaaaggaggaggaagaggagaaggagagaaagaagctggccaggactgccagcccagagaagaaacaagagttggtggagaagccggcagtgggggaatccaaggaggagaagattgagctgaaatccatcacggctgacggagagtctccacccgccaccaagatcaacatggatgacctccagcccaatgaaaatgaggataagagcccctaccccaacccagaaactacaggagaagaggatgaggaggagccagagatgcctgtcggccctcgcccacgaccactctctgagcttcaccttaaggaaaaggcagtgcccatgccagaagccagcgcgtttttcatcttcagctctaacaacaggtttcgcctccagtgccaccgcattgtcaatgacacgatcttcaccaacctgatcctcttcttcattctgctcagcagcatttccctggctgctgaggacccggtccagcacacctccttcaggaaccatattctgttttattttgatattgtttttaccaccattttcaccattgaaattgctctgaagatgactgcttatggggctttcttgcacaagggttctttctgccggaactacttcaacatcctggacctgctggtggtcagcgtgtccctcatctcctttggcatccagtccagtgcaatcaatgtcgtgaagatcttgcgagtcctgcgagtactcaggcccctgagggccatcaacagggccaaggggctaaagcatgtggttcagtgtgtgtttgtcgccatccggaccatcgggaacatcgtgattgtcaccaccctgctgcagttcatgtttgcctgcatcggggtccagctcttcaagggaaagctgtacacctgttcagacagttccaagcagacagaggcggaatgcaagggcaactacatcacgtacaaagacggggaggttgaccaccccatcatccaaccccgcagctgggagaacagcaagtttgactttgacaatgttctggcagccatgatggccctcttcaccgtctccaccttcgaagggtggccagagctgctgtaccgctccatcgactcccacacggaagacaagggccccatctacaactaccgtgtggagatctccatcttcttcatcatctacatcatcatcatcgccttcttcatgatgaacatcttcgtgggcttcgtcatcgtcacctttcaggagcagggggagcaggagtacaagaactgtgagctggacaagaaccagcgacagtgcgtggaatacgccctcaaggcccggcccctgcggaggtacatccccaagaaccagcaccagtacaaagtgtggtacgtggtcaactccacctacttcgagtacctgatgttcgtcctcatcctgctcaacaccatctgcctggccatgcagcactacggccagagctgcctgttcaaaatcgccatgaacatcctcaacatgctcttcactggcctcttcaccgtggagatgatcctgaagctcattgccttcaaacccaagcactatttctgtgatgcatggaatacatttgacgccttgattgttgtgggtagcattgttgatatagcaatcaccgaggtaaacaacgcagaggaaaactcccgcatctccatcaccttcttccgcctgttccgggtcatgcgtctggtgaagctgctgagccgtggggagggcatccggacgctgctgtggaccttcatcaagtccttccaggccctgccctatgtggccctcctgatcgtgatgctgttcttcatctacgcggtgatcgggatgcaggtgtttgggaaaattgccctgaatgataccacagagatcaaccggaacaacaactttcagaccttcccccaggccgtgctgctcctcttcaggtgtgccaccggggaggcctggcaggacatcatgctggcctgcatgccaggcaagaagtgtgccccagagtccgagcccagcaacagcacggagggtgaaacaccctgtggtagcagctttgctgtcttctacttcatcagcttctacatgctctgtgccttcctgatcatcaacctctttgtagctgtcatcatggacaactttgactacctgacaagggactggtccatccttggtccccaccacctggatgagtttaaaagaatctgggcagagtatgaccctgaagccaagggtcgtatcaaacacctggatgtggtgaccctcctccggcggattcagccgccactaggttttgggaagctgtgccctcaccgcgtggcttgcaaacgcctggtctccatgaacatgcctctgaacagcgacgggacagtcatgttcaatgccaccctgtttgccctggtcaggacggccctgaggatcaaaacagaagggaacctagaacaagccaatgaggagctgcgggcgatcatcaagaagatctggaagcggaccagcatgaagctgctggaccaggtggtgccccctgcaggtgatgatgaggtcaccgttggcaagttctacgccacgttcctgatccaggagtacttccggaagttcaagaagcgcaaagagcagggccttgtgggcaagccctcccagaggaacgcgctgtctctgcaggctggcttgcgcacactgcatgacatcgggcctgagatccgacgggccatctctggagatctcaccgctgaggaggagctggacaaggccatgaaggaggctgtgtccgctgcttctgaagatgacatcttcaggagggccggtggcctgttcggcaaccacgtcagctactaccaaagcgacggccggagcgccttcccccagaccttcaccactcagcgcccgctgcacatcaacaaggcgggcagcagccagggcgacactgagtcgccatcccacgagaagctggtggactccaccttcaccccgagcagctactcgtccaccggctccaacgccaacatcaacaacgccaacaacaccgccctgggtcgcctccctcgccccgccggctaccccagcacggtcagcactgtggagggccacgggccccccttgtcccctgccatccgggtgcaggaggtggcgtggaagctcagctccaacaggatgcactgctgtgacatgctggatggtgggaccttccctcccgccctgggcccccgcagggctcctccctgtctgcatcagcagctccagggttccctggcggggctgagagaggacacaccctgcatcgtgcctggccacgcttcactgtgctgctcttccagagtaggagagtggctcccagcaggctgcacagccccccagcatgccaggtgccactcccgggagagccaggcagccatggcgggtcaggaggagacgtctcaggatgagacctatgaagtgaagatgaaccatgacacggaggcctgcagtgagcccagcctgctctccacagagatgctctcctaccaggatgacgaaaatcggcaactgacgctcccagaggaggacaagagggacatccggcaatctccgaagaggggtttcctccgctctgcctcactaggtcgaagggcctccttccacctggaatgtctgaagcgacagaaggaccgagggggagacatctctcagaagacagtcctgcccttgcatctggttcatcatcaggcattggcagtggcaggcctgagccccctcctccagagaagccattcccctgcctcattccctaggccttttgccaccccaccagccacacctggcagccgaggctggcccccacagcccgtccccaccctgcggcttgagggggtcgagtccagtgagaaactcaacagcagcttcccatccatccactgcggctcctgggctgagaccacccccggtggcgggggcagcagcgccgcccggagagtccggcccgtctccctcatggtgcccagccaggctggggccccagggaggcagttccacggcagtgccagcagcctggtggaagcggtcttgatttcagaaggactggggcagtttgctcaagatcccaagttcatcgaggtcaccacccaggagctggccgacgcctgcgacatgaccatagaggagatggagagcgcggccgacaacatcctcagcgggggcgccccacagagccccaatggcgccctcttaccctttgtgaactgcagggacgcggggcaggaccgagccgggggcgaagaggacgcgggctgtgtgcgcgcgcggggtcgaccgagtgaggaggagctccaggacagcagggtctacgtcagcagcctgtagtgggcgctgccagatgcgggcttttttttatttgtttcaatgttcctaatgggttcgtttcagaagtgcctcactgttctcgtgacctggagttaaccggaacagcgtcttcattcatttctgttgggaccagacgcggagcctgggtgcgcgagccgccctccgggaggaaggcgcccggctgcgtctgcagaggcggggagaggaggcggcgagggtcccggggcgcgaggaaggcgcctgccctctcccagctcgcaggccccgggcccggccgcgcctccgcggggagagcaccccggcttcccgcgcgccctcaccaaaaggaccctacagcaaacgggtgtctttcgactctgcttgtagaaaccatttgcacatattctgtacgagcctcgctgtctccctagagccagggccctgcggatttggagaagggagcggggcaggacttccaggaggaccccaacccggcccggagagggaggaggaggcctccaggggcgcggagctctggggatgggcgtcgggccggcagtggtgcggctcactccgtccctgcccacctgcgacgggatcccccgaccggcacgggccacgccgagctcccggccagccgccggcccgcaggcagcgcgagggaggagctgcgccgccggctccgcccaaccaggtggtgctgagcttccgctgagcgctcttttgttttgtggtttgacacttttcttgacagcatgttgcagtttcttttcggttttggttttttttaaatgttttattttgctttcccagcgggaggggaggaagaagagtgtttacaaagtcctgtagccccctcacctttctgttttcacttttgccaatgtacatcgggtttggttttcttgtattatttaaacggttgtggtttcctttttccacggaggttcaatagaagccgctgcaggagagttttaccaaccattgtgtatgcccaataatttgttatcatttccttaggtagtaacctatttttgttctggtttggttcggttatctaatggaaaggtaactggcaatgcacttgatgtggtcttgcacatgtgggtgatagagttgggttcctttttatgctgggtgtacaggtgggtttgggagagaggagcatgcgcgagagagtctccgagtgtgtgcgacgcgtgtgtgtgtggtgggttgtctgtgtgcatatgtcctgcccgtgtatatgcacccacaccatgtgcccgtgcacaccagtgactacgcagtcccccctttctggtttagctgtgggaagatctgaatctggggccgtttgaaagcaaaaacaaaccactgtctctgcttctgaaacgggaatcagtaactctttgcattttctgtcccacaagatatgcaaaaacaatgcaataatattcatttaaaaatacaattgtgagttgtgttggcattaaaactgtattttaaaaaaagacagaaatttaagggaaaaacacaagaaggcattttgcttcaatatattccgtgtaatgttttattgcattgataatgtttctgttgaagaaaccgttatacttgaattcaggtcagtttcagtatttttcaaatatttttttaaaactgaattgcaattgtgccaagcgaatataatgaattgaattaagttggttttcggattcacttcttgtatattttgctgcatgtaaagtaaatcattttgtatttggagtgtgacaagctttacctttgaactcaagtgcttttctatatgtggttgggggaaagggaacaagttttctttagtttgcacaatgagcaaaggtatcaccagtgtagtcattattctgctctccacaaacaggtttggacattactgttttgcatatcttgtgtttgcttacatttccctcaatttttccaaaatcgtttgctgggtatgtttgtaccgcctcttgctgtgagagaccaggacctattttattccagtcttcactctgtccactctgctctggtcatctgatttggtacttctccaagaacagcccttcactgtgaggtgcagggaggcgttctgatgagccctcagtcactgggccgtcatccgcatcccccatggaagaggtagctggctttcccttcccttccaccacacggaattttctctttggcttccttaggaaagtgtacactaaccgggaggataaaattaaagtcaggctgcttggagggaggggcatcctcacttccggattcttgttgctctacccaacaaggacagcaggggctcgagaaaggaactggtgaaaccctgatccatctgaaagtcaactctgcgtgctcctttctccatcccttcctcactctggagcagcctttccttcaggcttgccctaatgtttgggctgccggggagggggccaggacaagggaagaggcatccggagctcacagtgggggtgggaacagatttttgtgggggcatctctaatgctcacttatatctccctagaacatcactcttttggtgctgtgtccttcaaatgtatgtcaacagtggtggctgaaaagggactgctttggggaaaacaggacccaaccattcacccagaattgacccattaaatctcttccagtcctagtgttccctgagcccctcttggcacatatataagtaagctagaaattacaataagggacagtccattcctctatgacagcttgctggactgattcatgacaaagtggagaaatgtactcaatactccccggttaacacagtctagaaacagagtttctttatggatatccacacccaagtcatccaaactttcttgattccttttcactgccatcaaggtcctctagaaattgagtttaggtatcatcctttgaaaagttcccaagatttctaccaggaggtacacacaggcgttccctgtctagggcaggaggactatcctagcttgaccttctgatccactagaataagactggcgtatgatgcctgtcatcagaacagactggcacaagtagtgacatcaatgaaccacagcacaatcttccaagtgatgtctactctccacctaaaatggaattttccccatgaccttgtaaaacataattgtcacatcttccatacccctcctgacagcccccaagtgtcaggagaaaacagtcaggggctaagggcccaagggacttgaagaaacaacagtttaaggtctgcagtttggtcaacttaattcttgtcctccgaccagccctgcctctttcatttccagaccttggagaatttttcccagctttgattcagaaggtactagttataacccctttccttcttcttaatccaataggcctcactctcactgggaaatccactcaaaggaacaaggcaatgtctctcattctatttcccagttccaaattccaggtgcttgtctggagtgaagctacccgttactttctcccagcttttctccacccagcatgtctcctgcccatgcagctgaagacagtggggcaacctcaggagaagcagacctttccatgcccaagttcatctcctgagcaacagtgacacctagaaaatgaggactttggaagtcacccaaaagatggtggctactttatggagtcctgaagatacacagccaccactcctaaaggcaaagaaagaaaacacgaatgtaggtcagggatagagtggaaccctggtcatcggggtttttagcctcatcgtgggaaaggtggtaaaggaggatgatggcatctccatccctagaggccaagaattgaaatatcattgtcaaggattagaaacaattcagcaaagaggccacaaaaagggcctgctgactcccagaagacctctttaaaccccaggggaggcaaatacttgctgatggagtctgggccgtttccatattttaaagaagacctgcctctggggcaaatgtcagcacagagaggactgggaggagaatggaggcaagaaaagggcatattttgactccctctgtgcctcttcccagttcatggaaggatgtgttcagcttacccacccacagtgaccagtgtggtggagccgctgacatctcaaggatctatttgggaaggtgagaagagtactcattccatctgggggtgttgttccagccacatcagcctacctggtgggatgtgggggtgtctgccaccctgtcccccctctgctgatgtccctcccctcaggctgtccaggtgccacctgacacaggctgctgtgcaaagacaggcggggaagcccaaacctcactcccagggaggccctcagccgccagagtccaggttctccagaggctacgatttgaggaggttgagggggaagacaggagggaaagaaaagtcctacaactgtcaggaatggggcacctttccctgtccctaagcaaagctccctcttcccactgccctccccagccccagctccctgtcctccccaacacctagtgagaaagacggtgcgtggaagggagtcccatgggcagatgcttacacgacctctttgtgaagcctcttctgggtttaacttcattcatcaatttattcttatgtcaaagcaatgaaacttttctttctggagccagataccaatacaacaggtgaacgggtttctgccacatctctacattgacgggggatgcttgaacaacccccctcactacacagacacacaccgttaaggcacaagggctggggttgagctctagatgagggactttcctgctcctgcaagggtgagcactgtatacacagacaaggagggtgcagtagagtgactcccttggatggaagtagtaccatcagaacctactattattatgacataaattctatttacatacattgagagaatactacaatcaacactttttcctgggatgactttaagaggtttgagccacagcacctgaagtggcaaagatccatggtctttgtagggtattagagaactcttccagtcacctctgaaagcactctagatcttgcagctgagtggatgaagtgtaacaaatctgttgcacgctgagaggagtcagaattagcatttttcatgaaagttccccacgtctctactaagaatgaggaagaaaagactaagactaggtaattacacagaggcttgaaatgttacatcaccagagccaagtcctctcccttcagatcagttactggctgctacacagggacacccccaccttttcagggcatcccatgcactccacttctcaggatctaaggaatttgactttgtagggatcccagaaagggcactgtgccacttcccctggtgtgaatcagacatacattgtacattcatttctaaaattcactcatgcacctcaaaccaaggtcattatccaaaaaaaaaaaaaaaaagctctgggtggaagagtttgtaagttttaagagagggtcatttctatgtgaggaaatgcagaaatggacagaatgattcttattcactgtttgggtctggagaattcccattgtggaaatcttagagatctcaagtttattaccaagggaataaggaaaaaaaggtgagcaggcaccaggccaagcagtggctcccttgccaaggaacctgaggctgcaggtttcagggacccccttgaagaaacctctcctggccattggccaggagaaaagagaagtctctcctgtagagtcacaagagaagcaaaagagggtgggtcactgggtcctggacatagcccccaaccccaagacttcccaatatggagaaactacaccaatgtttaaaaggggaaaaggaaagaacttgtacatcaagggaagatgatttgtaaacacacagtcctgtgcagaaagatccccttcaggaggtgtctccagcatcccaaagctgtgcgcaccttctcttttcctgcctcaggccacctatgcatccagctgcagcccatacccacacctgaaatccatctcttgaatcccagccaggttatataccaccccattgccatgtcctgtcctggccagaatgcatgctgttcccccaagcctcgtgggagtgaggccatgggaaacagagatgagcatgtctggacaagtctgtgatggtagtggatgagaataacccatggcaaaacacgcacattcattaagaaatagggcgacagattccccgttggtgaagcactgaaaggtctattactctcataatattgctgttttattttaatccaccagagctaccatgcaaaactttcctcctgtgaaacgctccagataaagctcctctaatctccccttccctcatgtcctccagctcaaacccaccttcatcccccaaaccaatctgtatcatgcctgttatcagagaggcacagaaagatgggcagtgcctccgttgtcaccattccccacacccctacacacccccacaccctcccctccaggctccacgacttcacagtcttactgttgtaaatatcattgtacagtttgtaatcctcaaataatcccattgtcagaggcctcgcctgatgggccttctcaccctcgagaaaggccagggaatctagaaggggcaacccttcaaggagagcttcagggtcatctctgtgtgagacactattgtatattcctgtaagattgcatttttatctaaggaatgatgttatttaaaaaacaaacaaaaaacacaaaaaataagaattgcaaataaatttcttaacaatgtct

SEQ ID NO: 65346 - DNA, 6630 bp, Artificial Sequence
  derived and/or modified sequence
atggttaatgagaacacgcggatgtatatcccagaggaaaaccaccagggaagcaactacggcagtccccgccctgcacacgccaatatgaacgcaaacgcagctgccggtttggcgccagagcatataccgacacctggggccgcactcagctggcaggccgccatagacgcagccagacaggcgaagcttatggggagtgcgggaaatgcaacgatatccacagtcagttcaactcagaggaaacgccagcagtacggaaagcctaagaagcagggctcgactaccgccactagacctcccagagccctgttatgtctaactctgaagaaccctattaggcgtgcttgcatatcaatcgtcgagtggaaaccatttgaaatcattatcctactgaccatctttgctaattgtgtggctctggcaatttatattcccttcccagaggacgattcaaatgccacgaactctaacctagaacgggtggaatatctgtttttaatcatcttcaccgtcgaggctttcctgaaggtaatagcctatggtctcctgtttcatcccaatgcgtacctgcgaaatggctggaacctgcttgacttcataatcgtcgtggtgggcctctttagcgccatcctggaacaagccacaaaagctgacggagccaatgctttaggagggaagggggcaggtttcgatgtgaaagctctacgggccttcagagtgctgcgtcccctaagactggtgtctggagtcccttccctgcaggttgttctgaattcaataatcaaagccatggtccccctcctgcatatcgctctactggtcttattcgtgataataatatatgccattatcggcttggagctgttcatgggcaaaatgcacaagacctgttataatcaggaaggaatcgccgatgtacctgcggaagatgacccgtctccctgcgccctcgagaccgggcatggcagacagtgtcagaacggcaccgtctgtaaaccgggctgggacggacccaaacacggcatcacgaattttgataactttgctttcgcaatgttgactgtgttccaatgtatcacaatggaaggatggactgacgttctgtactggatgcaggacgccatgggctatgaactgccgtgggtctattttgttagtctggtgatcttcggctcctttttcgtgttaaaccttgttctaggggttctttctggcgagttcagcaaggagagagaaaaagccaaggctagaggggatttccagaagttgagagagaagcagcaactggaagaggacctgaagggttatctggattggatcactcaggctgaggacatcgatccagaaaatgaggatgaagggatggacgaggagaaaccccggaatatgtccatgcccaccagcgaaacagaatccgtgaacaccgagaacgtagcgggcggtgatatagagggggaaaactgtggagcccggctcgctcacagaatctctaaaagtaaattctcccggtactggcgtcgctggaatcgattttgccgccgtaagtgtagggctgcagtcaagtccaatgttttttactggctggtgatcttcctggtcttcctgaacacgttgacaatcgcgagcgagcactataatcagccgaattggttgactgaggttcaggacaccgccaataaggccctgttggccttattcacagctgaaatgctgctcaagatgtattccttaggactacaggcctacttcgtgtctctgtttaacagattcgactgcttcgtcgtttgcgggggcatactcgaaactatattggtagagacgaagataatgtcccccctcggaatcagcgtgctaaggtgcgtgcgattgcttcgcatcttcaagatcacaagatattggaattctttgagcaacctggtggcctctttgctgaacagcgtcaggtcaatagcctcgttgctgctgctgctgtttctatttatcattattttcagtctgctgggcatgcagttattcggaggtaaattcaatttcgacgaaatgcagacccgtaggtcaacatttgacaattttccacaatccctgttgacagtcttccagatactgaccggcgaagactggaattcagtaatgtatgatgggatcatggcctacggcggaccctcttttccagggatgctggtgtgcatctactttattattctcttcatctgtggtaactatatcctgctgaatgtgttcttagctatcgccgtggataatttagctgatgcagagtctctcactagcgcccagaaggaggaagaggaggaaaaggagcggaagaagctcgccagaacagctagcccagagaagaagcaagaactagtagagaagccagccgtgggcgaaagcaaggaagagaagattgagctcaagtctattacagccgatggagagtctccccctgccacaaaaattaacatggacgacctgcagcccaatgagaacgaagacaagagcccatatcctaatcctgaaacgacaggcgaagaggatgaggaagaacccgagatgcccgtggggccacggccccggccgctctcggagctccacctgaaagaaaaagccgtacccatgcccgaagccagtgccttttttatattttctagtaataatcgattccgactccagtgtcaccgtatcgtcaatgatactatttttacaaaccttattctcttttttatactcctcagttccatctcgcttgctgccgaggatccggtgcaacacacgtcttttagaaatcacatcctcttttacttcgatattgtgttcacgaccattttcacgatcgagatcgccctgaagatgaccgcttatggggcgtttctgcacaaaggtagcttttgcaggaattacttcaatatcctggacctgctagtggtgtcagtaagtctaatatcgtttgggatacagtcatcggctatcaacgtcgtgaagattctccgagtgctccgtgtcctgaggccccttcgggcaatcaatagagcgaagggactcaagcatgtagtacagtgtgttttcgtggccatccggacaatcggaaatatcgtcattgtaactacactcctccagtttatgttcgcatgcatcggggtgcagctgttcaaaggaaagttatatacatgttccgattcttctaaacaaactgaggccgagtgtaagggcaattatattacctacaaggacggtgaagtggatcatcccattatccaaccacggagctgggagaatagcaagttcgacttcgacaatgtgcttgctgcaatgatggctctgttcactgtcagtactttcgaaggctggcccgagctgttgtaccggtcaatcgattctcatacagaggacaaaggaccgatctataactatcgtgtggagattagcattttctttatcatctatatcataatcattgctttcttcatgatgaatattttcgtggggttcgtgattgtcacgttccaggagcagggtgaacaggagtataagaactgcgagctcgataaaaatcagcgccagtgcgtcgagtacgcgctgaaagcccgaccactgcgccgttacatccccaaaaatcaacaccagtacaaggtttggtatgtagtgaactctacatacttcgaatacctgatgtttgtgttaatcctgttgaacacaatttgcctcgccatgcaacactatggacagtcctgcctgtttaaaatcgcaatgaacatccttaatatgcttttcactggactctttacagttgagatgatcctcaagctaattgctttcaagccaaaacactatttctgcgacgcttggaacacgttcgatgcactgatcgtggtgggctcgattgttgacatcgcaatcacagaggtcaatcctgctgagcatactcagtgttctccatctatgaatgcagaggaaaactctcgtatcagcattactttttttagacttttccgggtgatgcgcttggtcaagcttctgtcacggggtgaggggattcgcacattgctttggacatttattaaatcgtttcaagccctgccttacgtggccttactgatcgtgatgttgttcttcatatatgccgtgatcggcatgcaggtgttcggtaaaatcgcactgaatgatactacagagattaaccgaaataataactttcaaacgttcccacaggccgtgttgttgctattccggtgtgccaccggtgaagcctggcaggacatcatgcttgcctgtatgcccgggaaaaaatgtgcccctgaatccgagccgagcaatagcactgaaggagaaaccccttgtgggagcagtttcgctgtgttctacttcataagcttttatatgttatgtgcgttccttattattaacctgttcgtagctgtgattatggacaacttcgattacttaacacgtgactggagcatcttagggcctcatcatttggacgaatttaaacgaatttgggctgagtatgaccctgaagcgaaaggtcggattaaacatctggacgtggtgactctgctgaggagaatacaaccccccctcggcttcgggaagctgtgcccccacagagtggcctgcaagagattggtttccatgaatatgcctctcaattcagacggcaccgtgatgttcaatgctacactgtttgctcttgttagaacagcactcagaattaagaccgaaggtaacctggagcaggccaatgaagaacttcgagcaattataaaaaagatctggaagcgcacgagtatgaaacttctggaccaagtggtgccacctgctggtgacgacgaagtaacagtggggaaattttacgcaacttttctgattcaagagtattttcggaagttcaaaaaacgtaaggagcaaggcctcgtgggcaagccatctcaaagaaacgctctctctctgcaggccgggctcagaacactccatgatatcgggcctgagatacgccgggcaatctccggcgatctgacggcagaggaagaacttgataaagctatgaaggaagctgtgtccgccgcaagtgaggatgatatttttagacgagccggcggcctcttcggcaaccacgttagttactaccagagcgatggtcgtagcgccttccctcaaaccttcacaacccagaggccactccacatcaacaaggccggtagtagtcagggagacacagaaagcccaagtcacgagaaactagtggacagcacattcactccaagctcctacagcagtacggggtccaacgctaacattaataacgctaataatactgccctgggtaggttacctcgcccggcgggatatcccagtaccgtctccacggtggagggtcacggtccacccctgtccccagcaatccgggtgcaggaggtcgcttggaagctcagctcaaatagaatgcactgttgcgatatgcttgatgggggtactttccctccagccctcggacccaggcgggccccaccctgtctgcaccagcaacttcaaggcagcttagctggcctacgtgaagatacaccctgcatcgtcccaggccacgcctccctttgctgttcctcacgggtgggagaatggcttccagccgggtgcacagcccctcagcatgctagatgccatagccgggaatctcaggccgctatggcagggcaggaagaaacatcacaagacgaaacttatgaggtcaaaatgaatcatgacacagaagcttgttctgagccgagcctgttatcaaccgagatgttgtcttaccaggatgatgaaaaccgccagctcactctgccagaagaagacaaacgcgatatcaggcaatctcccaagcgaggcttcctgaggagcgctagtcttggacgccgagcatcattccacttggaatgcctaaagagacagaaagaccggggaggagacatcagccaaaagaccgttctgccgctgcacctggtccaccaccaggcactcgcggtggcaggtctttctccactactgcagcgcagccattctcctgcctctttcccccggccctttgctaccccccctgcgacaccaggatctcggggctggcctcctcagcctgtgccgactctgaggctggaaggagtggagagctcagagaagctcaactcctctttcccatccatccactgcggatcttgggctgagaccaccccgggaggcggcggaagttccgctgcacgacgcgttaggcccgtgagcctgatggtgccgtcccaagctggcgcccctggacgtcaatttcatggttccgccagcagtctggtcgaggccgtgttgatcagtgagggacttgggcagttcgcccaagatcccaagttcattgaggtgacaacacaggaacttgccgatgcctgtgatatgactatagaagagatggagagcgcagctgacaatatcctgtctggcggtgctcctcagtctccaaatggcgctttgcttcccttcgtcaattgtagagatgccgggcaggaccgcgctggcggcgaggaagacgcggggtgcgtgcgcgccagaggcagacctagcgaggaggagttgcaggactcaagagtgtacgtctccagcctttag

SEQ ID NO: 65347 - DNA, 6630 bp, Artificial Sequence
  derived and/or modified sequence
atggtgaatgaaaacaccaggatgtacatccctgaggagaaccaccagggcagcaactacggcagccccaggcctgcccacgccaacatgaatgccaatgctgctgctggcctggcccctgagcacatccccacccctggggccgccctgtcctggcaggccgccattgatgctgcccggcaggccaagctgatgggcagcgctggaaatgccaccatcagcacagtgagcagcacccagaggaagaggcagcagtatggcaagcccaagaagcagggcagcaccacagccacccggcccccccgggccctgctgtgcctgaccctgaagaaccccatccggcgggcctgcatcagcatcgtggagtggaagccctttgagatcatcatcctgctgaccatctttgccaactgtgtggccctggccatctacatccccttcccagaagatgacagcaatgccaccaacagcaacctggagcgggtggagtacctgttcctgatcatcttcaccgtggaggccttcctgaaggtgattgcctacggcctgctcttccaccccaatgcctacctgagaaatggctggaacctgctggacttcatcatcgtggtggtgggcctcttcagcgccatcctggagcaggccaccaaggcagatggagccaatgccctgggcggcaaaggagctggctttgatgtgaaggccctgcgggccttccgggtgctgcggcccctgcggctggtgtctggagtgcccagcctgcaggtggtgctgaacagcatcatcaaggccatggtgcccctgctgcacatcgccctgctggtgctgtttgtgatcatcatctatgccatcatcggcctggagctgttcatgggcaagatgcacaagacctgctacaaccaggagggcattgctgatgtgcctgcagaagatgaccccagcccctgtgccctggagaccggccacggccggcagtgccagaatggcaccgtgtgcaagccaggctgggatggccccaagcacggcatcaccaactttgacaactttgcctttgccatgctgactgtgttccagtgcatcaccatggagggctggacagatgtgctgtactggatgcaggatgccatgggctatgagctgccctgggtgtactttgtgtccctggtgatcttcggcagcttctttgtgctgaacctggtgctgggcgtgctgtctggagagttcagcaaggagcgggagaaggccaaggcccggggggacttccagaagctgcgggagaagcagcagctggaggaggacctgaagggctacctggactggatcacccaggctgaagatattgatcctgaaaatgaagatgagggcatggatgaggagaagcccaggaacatgtccatgcccaccagcgagacagaatctgtgaacacagaaaatgtggccggcggggacatcgagggggagaactgtggggcccggctggcccaccgcatcagcaagagcaagttcagccgctactggaggcgctggaaccgcttctgcaggaggaagtgcagagctgctgtgaagagcaatgtgttctactggctggtgatcttcctggtgttcctgaacaccctgaccatcgccagcgagcactacaaccagcccaactggctgacagaggtgcaggacacagccaacaaggccctgctggccctcttcaccgctgagatgctgctgaagatgtacagcctgggcctgcaggcctactttgtgtccctcttcaacagatttgactgctttgtggtgtgtggcggcatcctggagaccatcctggtggagaccaagatcatgagccccctgggcatctctgtgctgcgctgtgtgcggctgctgcgcatcttcaagatcacccgctactggaacagcctgagcaacctggtggccagcctgctgaacagcgtgcgcagcatcgccagcctgctgctgctgctcttcctgttcatcatcatcttcagcctgctgggcatgcagctgtttggaggcaagttcaactttgatgagatgcagaccaggaggagcacctttgacaacttcccccagagcctgctgaccgtcttccagatcctgaccggggaggactggaacagcgtgatgtatgatggcatcatggcctatggaggccccagcttccctggcatgctggtgtgcatctacttcatcatcctcttcatctgtggcaactacatcctgctgaatgtgttcctggccatcgctgtggacaacctggctgatgctgagagcctgaccagcgcccagaaggaggaggaggaggagaaggagaggaagaagctggccaggacagccagccctgagaagaagcaggagctggtggagaagccagctgtgggggagagcaaggaggagaagattgagctgaagagcatcacagcagatggagagagccccccagccaccaagatcaacatggatgacctgcagcccaatgaaaatgaagacaagagcccctaccccaaccctgagaccactggagaggaggatgaggaggagcctgagatgcctgtgggcccccggccccggcccctgtctgagctgcacctgaaggagaaggctgtgcccatgcctgaggccagcgccttcttcatcttcagcagcaacaaccgcttccggctgcagtgccaccgcatcgtgaatgacaccatcttcaccaacctgatcctcttcttcatcctgctgagcagcatcagcctggccgctgaggaccctgtgcagcacaccagcttcaggaaccacatcctcttctactttgacatcgtgttcaccaccatcttcaccatcgagatcgccctgaagatgacagcctatggagccttcctgcacaagggcagcttctgcaggaactacttcaacatcctggacctgctggtggtgtctgtgtccctcatcagctttggcatccagagcagcgccatcaacgtggtgaagatcctgcgggtgctgcgggtgctgcggcccctgcgggccatcaacagagccaagggcctgaagcacgtggtgcagtgtgtgtttgtggccatccgcaccatcggcaacatcgtcatcgtgaccaccctgctgcagttcatgtttgcctgcatcggcgtgcagctgttcaagggcaagctgtacacctgcagcgacagcagcaagcagacagaagctgagtgcaagggcaactacatcacctacaaggatggagaggtggaccaccccatcatccagcccaggtcctgggagaacagcaagtttgattttgacaacgtgctggccgccatgatggccctcttcaccgtgtccacctttgagggctggccagagctgctgtaccgcagcattgacagccacacagaggacaagggccccatctacaactacagagtggagatcagcatcttcttcatcatctacatcatcatcatcgccttcttcatgatgaacatctttgtgggcttcgtcatcgtgaccttccaggagcagggcgagcaggagtacaagaactgtgagctggacaagaaccagaggcagtgtgtggagtatgccctgaaggcccggcccctgcggcgctacatccccaagaaccagcaccagtacaaggtgtggtacgtggtgaacagcacctactttgagtacctgatgtttgtgctgatcctgctgaacaccatctgcctggccatgcagcactacggccagagctgcctcttcaagatcgccatgaacatcctgaacatgctgttcaccggcctcttcaccgtggagatgatcctgaagctgattgccttcaagcccaagcactacttctgtgatgcctggaacacctttgatgccctgattgtggtgggcagcatcgtggacatcgccatcacagaggtgaacccagctgagcacacccagtgcagccccagcatgaatgctgaggagaacagccgcatcagcatcaccttcttccgcctcttccgggtgatgaggctggtgaagctgctgagcagaggagagggcatccgcaccctgctgtggaccttcatcaagagcttccaggccctgccctacgtggccctgctgattgtgatgctgttcttcatctatgctgtgattggcatgcaggtgtttgggaagatcgccctgaatgacaccacagagatcaacagaaacaacaacttccagaccttcccccaggccgtgctgctgctcttccgctgtgccaccggggaggcctggcaggacatcatgctggcctgcatgcctgggaagaagtgtgcccctgagagcgagcccagcaacagcacagaaggagagaccccctgtggcagcagctttgctgtgttctacttcatctccttctacatgctgtgtgccttcctgatcatcaacctgtttgtggccgtcatcatggacaactttgactacctgacccgggactggagcatcctgggcccccaccacctggatgagttcaagaggatctgggccgagtatgaccctgaggccaagggccgcatcaagcacctggatgtggtgaccctgctgcggcgcatccagccccccctgggctttgggaagctgtgcccccaccgggtggcctgcaagaggctggtgtccatgaacatgcccctgaacagtgatggcaccgtgatgtttaatgccaccctgtttgccctggtgaggacagccctgcgcatcaagacagagggcaacctggagcaggccaatgaggagctgcgggccatcatcaagaagatctggaagaggacctccatgaagctgctggaccaggtggtgcccccagctggagatgatgaggtgacagtgggcaagttctacgccaccttcctgatccaggagtacttcaggaagttcaagaagaggaaggagcagggcctggtgggcaagcccagccagagaaatgccctgagcctgcaggccggcctgcggaccctgcatgacatcggccctgagatccggcgggccatcagcggggacctgacagctgaggaggagctggacaaggccatgaaggaggccgtgtctgctgcctctgaagatgacatcttcagaagagctgggggcctgtttggaaaccacgtgtcctactaccagagtgatggccgcagcgccttcccccagaccttcaccacccagaggcccctgcacatcaacaaggccggcagcagccagggcgacacagagagccccagccatgagaagctggtggacagcaccttcacccccagcagctacagcagcacaggcagcaatgccaacatcaacaatgccaacaacacagccctgggccgcctgcccaggcctgctggctaccccagcacagtgtccacagtggagggccacggcccccccctgagccctgccatccgggtgcaggaggtggcctggaagctgagcagcaacaggatgcactgctgtgacatgctggatggcggcaccttccccccagccctgggcccccggcgggccccaccctgcctgcaccagcagctgcagggcagcctggccggcctgcgggaggacaccccctgcatcgtgcccggccacgccagcctgtgctgcagcagccgggtgggggagtggctgcctgctggctgcacagccccccagcacgcccgctgccacagccgggagagccaggccgccatggccggccaggaggagaccagccaggatgagacctatgaggtgaagatgaaccacgacacagaggcctgcagcgagcccagcctgctgagcacagagatgctgagctaccaggatgatgagaaccggcagctgaccctgcctgaggaggacaagagggacatccggcagagccccaagaggggcttcctgcggagcgccagcctgggccggcgggccagcttccacctggagtgcctgaagaggcagaaggaccggggcggggacatcagccagaagacagtgctgcccctgcacctggtgcaccaccaggccctggccgtggccggcctgagccccctgctgcagaggagccacagccctgccagcttcccccggccctttgccaccccaccagccaccccaggcagccggggctggccaccccagcctgtgcccaccctgcggctggagggcgtggagagcagcgagaagctgaacagcagcttccccagcatccactgcggctcctgggccgagaccaccccaggcggcggcggcagcagcgctgcccggcgggtgcggcctgtgtccctgatggtgcccagccaggccggggcccctggccggcagttccacggcagcgccagcagcctggtggaggccgtgctgatcagcgagggcctgggccagtttgcccaggaccccaagttcatcgaggtgaccacccaggagctggctgatgcctgtgacatgaccatcgaggagatggagagcgctgctgacaacatcctgagcggcggggccccccagagccccaacggggccctgctgccctttgtgaactgcagagatgctggccaggacagagctggaggagaagaagatgctggctgtgtgcgggcccggggccggcccagcgaggaggagctgcaggacagccgggtgtatgtgagcagcctgtag

SEQ ID NO: 65348 - DNA, 6630 bp, Artificial Sequence
  derived and/or modified sequence
atggtgaacgagaacacccggatgtacatccccgaggagaaccaccagggcagcaattacggctctccccggcccgcacatgcaaacatgaacgcgaacgccgccgccgggttggctcctgaacacatccccaccccaggagccgccttatcctggcaggctgccatcgacgctgctcgccaggctaaattaatgggatcggcgggaaatgctacaatctcaaccgtctcatccacacaacgcaagaggcagcagtatggcaagcccaaaaagcagggcagcactaccgccacccggccaccaagggccctgctttgtcttacactcaagaatcccatacggcgagcctgcatttctatcgtggagtggaagccctttgaaatcatcatcctccttaccatttttgcaaactgtgttgcacttgcaatttacatcccttttcccgaggacgattctaatgccacaaactcaaacttggagcgggtggaatatctgttcctaatcatttttacagtggaggcctttctcaaggtaattgcttacggtcttttattccatccaaacgcataccttcggaacggctggaacctcctcgattttatcattgtagttgtgggcttattttcggcgattctggaacaggccactaaagctgacggtgccaatgccctggggggtaaaggggcaggctttgacgttaaagcgctgcgggctttccgggtcttgcgcccactgaggctggtgagcggcgtcccctcactccaagtggtgctcaactctattatcaaagccatggttcccctcctgcatatagcgttacttgtgctgtttgttatcattatatacgctattattgggttagagctgtttatgggcaagatgcacaagacctgttataatcaggaaggtatcgccgacgtcccggcagaagatgatcccagtccttgtgcactggaaacaggccacgggcgacagtgccaaaatggcactgtctgtaagcctggttgggatggaccaaagcacggcattactaacttcgacaattttgctttcgctatgttgacagtctttcagtgcatcactatggagggttggactgacgttctgtactggatgcaggatgccatgggttacgagctgccatgggtttattttgttagtctcgtgatttttggcagcttcttcgttctgaatttggtccttggggttctgtctggcgaattttctaaggagcgagagaaagccaaggcccgaggtgattttcagaagcttagggagaaacaacaactggaggaagatctgaagggctatctcgattggatcacccaagctgaagacatcgaccctgaaaatgaggatgagggaatggatgaggaaaaacccaggaatatgtcgatgccgaccagcgagaccgagtccgtcaatacagagaacgttgccggcggagacatcgaaggcgagaattgcggggcacgccttgcccatcgtatttctaagtctaagttctccagatactggagaaggtggaataggttttgtagacgcaagtgtagggccgccgtcaaatccaatgtgttctattggcttgtgattttccttgtcttccttaacaccctgactatcgcttcggaacattataaccagccaaattggcttacagaagtccaggataccgccaataaggccctgctggctctgttcaccgctgaaatgctactgaaaatgtactccttgggcttgcaggcctatttcgtgtctctgttcaatcggtttgactgcttcgtcgtctgcggcggaatcctagagactattctcgtagagacaaaaatcatgtccccactcggcatttcagtcctgcgatgcgtcaggctgctgcggatattcaaaataacacgttattggaatagtctgtctaacctggtggcctcactcttgaactcagtcaggtcaatcgcctctctgctgctcctcctattcctttttatcatcatcttcagtttgctgggcatgcagttattcggcggcaagtttaacttcgacgaaatgcaaactcgcaggagcactttcgataattttccccagagtttactgactgtcttccaaattctgaccggagaggactggaacagtgttatgtacgatggcattatggcctatggcgggccctccttcccagggatgttagtttgtatctatttcatcatactgttcatctgcggaaattacattcttttgaatgtgtttctggcaattgccgttgataaccttgcggacgccgagtcattgacatccgcgcagaaggaggaggaggaggaaaaggagcgcaaaaaactagcccgaaccgccagcccagaaaaaaagcaggaactggtggaaaagccagctgtgggagagtccaaagaggagaagattgaactcaagagtataacggctgacggcgagtcgccccccgctacaaaaatcaacatggatgatctccaacctaatgagaacgaagacaagtcgccctacccgaacccagagaccacgggcgaggaggacgaggaagaacctgagatgcctgtgggccctcgcccccgccccctttctgaactgcatcttaaggagaaggcggtcccgatgcccgaggcatcagccttttttatattcagctccaataatcgcttcaggttgcagtgccatcgcattgtgaatgacactatctttaccaatctcatactgttcttcattctcttgagttcaatttctctggccgcagaagacccagttcagcacacatcttttcgcaaccatatcctgttctactttgatatcgtcttcacaacaatctttacaatcgagatcgccctgaagatgacagcctacggcgcatttctgcataagggaagcttctgtcggaattactttaacatcctggatttgctggtggtctccgtcagtctgatcagcttcggaattcagagttccgcaattaatgtagtgaagatcctgagggtgctcagggtgcttagacctttgcgcgccatcaacagggccaagggactgaaacacgtggtgcagtgtgtattcgtggcaattcgcacaataggaaatattgtgatcgtgaccacgcttctgcagtttatgtttgcatgcattggagttcagctcttcaagggtaagctgtatacatgttcagatagttcaaagcagacagaggccgaatgtaagggaaattacatcacatacaaagatggagaagtggaccatcctatcatacagccacgaagctgggaaaactctaaattcgatttcgataatgtcctggctgccatgatggcactgtttaccgtgagtactttcgagggctggcctgagcttctgtaccgcagcattgattcccatacagaagacaagggcccaatctataactaccgcgtggagatatctatattcttcattatctacattattataatcgcattttttatgatgaacatctttgttgggttcgtgattgtgacgttccaggagcagggcgaacaagaatataaaaactgcgaattagataaaaatcagcgtcagtgtgtcgagtacgccctgaaggctaggcccttgagaagatatatcccaaaaaaccaacaccagtataaagtttggtacgtcgtcaacagtacgtattttgaatatctgatgtttgtcttgattctgctcaacaccatttgccttgccatgcagcactacggccagtcatgtctgttcaaaattgctatgaacatcctgaacatgctcttcaccgggcttttcactgtcgaaatgatactgaagctgattgccttcaagcccaagcattacttctgcgatgcctggaacacattcgatgcattaattgtcgtgggaagcattgtggatatagctatcaccgaggtgaaccccgcggaacacacccaatgttctccatccatgaatgcagaggagaattcaaggattagtatcacttttttcagactcttcagggttatgaggcttgtcaaattgcttagcaggggcgagggtattaggacgctgttgtggactttcattaagtctttccaggcactcccctacgtcgccttattgattgtgatgttgtttttcatatacgccgttattggcatgcaggtcttcgggaaaatagctctgaatgataccacggaaattaaccggaacaataattttcagactttcccccaagccgtattgctgctgttcaggtgtgccactggagaagcctggcaggacatcatgcttgcatgcatgcccggcaagaaatgcgcaccagagtccgagccttcaaactcaacagaaggcgagaccccctgtgggtcctcatttgcggtgttttattttatctccttttacatgttatgcgcttttctcattattaaccttttcgttgcagttatcatggacaattttgactacctcactagagactggagcatactggggccgcaccacctggacgaatttaagaggatctgggccgagtatgaccccgaggctaagggtcgaatcaagcacctggacgttgtgaccctcctacgacgaatccaaccccctttagggttcggcaagctctgtccccatcgcgtggcatgtaagcgcttggtgtcgatgaatatgcctctgaatagtgatggcaccgtcatgttcaatgccacattgtttgccctggtgaggaccgcacttcggattaagaccgagggaaacctggaacaggctaacgaagagctgcgggcaatcatcaagaaaatttggaagcgcacctctatgaagttgctcgatcaggtcgtacctcccgctggcgacgatgaggtcacagttggtaaattctatgccaccttcctgatacaagagtacttccgaaagtttaaaaaaagaaaagagcaaggcctggtgggcaaacccagccagcggaacgccttgagcctgcaggccggcttgcgcaccctgcatgacattggccctgagattaggcgagcgatttccggagacctcaccgccgaggaggaattggataaagcaatgaaggaggccgtctccgccgcctcggaagacgatatttttaggcgcgccggcggcctgtttggcaaccatgtctcatactaccagtctgatggacgcagcgcattcccccagaccttcaccacccagagaccccttcacatcaacaaggcgggttcttcccaaggggacacagagagtcctagccacgagaagctagtggactctaccttcaccccatccagctactcttcaaccgggagtaacgctaatattaacaacgcaaacaacactgccctaggtcgcctgccgcgacctgctggatatccaagtactgtttctaccgtggaagggcatggcccaccattgtcccccgctatacgcgtgcaggaggttgcctggaagctgagcagcaaccgaatgcactgctgcgatatgctggacggtggaacattcccaccagctctcgggccacgccgcgccccaccctgcctgcaccagcaactgcagggatctttagctggcctaagggaggacacaccttgtatagttcccggccatgcatccctgtgctgcagtagcagagtcggcgagtggctcccagccggatgtacagctccccagcacgccaggtgtcactctagggagtcacaggccgccatggcgggtcaagaggaaacctcccaagacgaaacgtatgaagtcaagatgaatcatgacaccgaggcgtgttctgagccgtcccttctctcaacggaaatgttgagttatcaggacgacgaaaacaggcaactcactctgccagaggaggacaaacgggatatccggcaatcccccaaacgtgggtttctaagaagtgcctccctgggtcgaagggcttctttccacttagagtgtctgaagcgtcagaaagataggggcggagatatttcacagaaaaccgttcttccgctgcacctggtgcatcaccaggcattggcagttgcgggcctttcaccgcttttgcaaaggagtcactcgccagcttctttcccccgaccattcgccactccccctgcgactcctggctcgaggggatggccaccacaaccagtgcctaccctgcggctcgagggtgtcgagagttcagagaagttgaatagctctttcccctccattcactgcggttcatgggcagaaacaacgccaggaggcggcggatcaagcgccgcgagacgagtgaggcctgtgtccttaatggttccttctcaagccggggcccctggaaggcagttccatggttcagcatcctccctcgtagaggccgtgttgatttccgaaggtctcggacagttcgctcaggatccgaagtttattgaagtcaccactcaggaactggccgacgcgtgcgacatgacaattgaagagatggagagcgccgccgacaacatcctctctggaggggcaccacagtcccctaatggcgctctgctgccattcgtgaattgccgcgacgcggggcaagacagggcagggggcgaggaggacgctggctgcgtacgagcacggggacgtccttctgaagaggagcttcaagacagccgggtctacgtcagtagcctgtag

SEQ ID NO: 65349 - DNA, 6629 bp, Artificial Sequence
  derived and/or modified sequence
atggtgaatgaaaatacaagaatgtatatccccgaagagaaccatcaggggtccaactatggatcaccgagaccagcccacgccaatatgaatgctaatgccgcagccggtctagcacctgaacacattcccaccccaggcgcagcattatcttggcaagcggcaattgacgcagccaggcaggcgaagttgatggggagtgcaggcaacgcgaccatctctactgtatctagcacccagaggaagcgccagcagtatggcaaacctaagaaacaaggtagcactaccgccactcgccctccccgagctttactttgtctgacgctaaagaacccgatccgcagggcttgcatctcaattgtggaatggaagccgtttgagattattatcctccttaccattttcgctaactgtgtggcactcgccatctacatccctttcccggaagacgattccaatgctacgaactccaacttagagagggtggagtatctgttcttgatcatcttcacagtcgaagcttttctgaaggtgattgcgtacggcctgcttttccaccccaacgcttacctgcgcaacggatggaatctgctggactttatcatcgttgtcgtcgggttgtttagtgcaattctggagcaggctaccaaagcagatggggctaacgcactggggggaaaaggcgctggcttcgatgtcaaagctctgagagcgttccgtgtgctaagaccactcaggttggtcagcggagtgccgagcctccaggtagtgctgaatagtattataaaggccatggtcccattactgcacatagcattattggttttgtttgtgatcattatctacgccattattggcctggagctgttcatgggcaagatgcacaagacttgttataatcaggaggggatcgccgatgtcccagccgaggatgatccttcaccttgtgccctggagaccggacacggtagacaatgccagaatggaaccgtctgtaaaccaggctgggacggaccaaagcacggtatcaccaactttgacaatttcgcctttgcaatgctgactgtgttccagtgtatcactatggaaggatggaccgatgttctttactggatgcaggacgctatggggtacgagttaccttgggtctactttgtaagcctggtaatctttggttctttcttcgtactgaatttagtgctcggcgtgctgagcggagaatttagcaaagagcgcgagaaggcgaaggccagaggcgactttcagaagctacgcgagaaacaacaattggaggaagaccttaagggatacttggactggatcacacaggccgaagacattgacccggagaacgaggatgaggggatggatgaggaaaaacctcgaaatatgtctatgccgacatccgaaacagaatctgtgaataccgaaaacgtcgctggcggagatatcgagggggaaaattgcggtgctaggttagcacacagaatctcaaagagcaagttttccagatactggagacgatggaatcggttctgtcggagaaagtgtcgagctgccgttaaatccaacgtgttttactggctggtgatctttctggtatttctcaacaccctcactattgcctccgaacactacaatcaacctaactggctgaccgaagtgcaggatacagcaaacaaggccttactggcactatttacagctgagatgctgctgaagatgtattcgctcgggctgcaggcatattttgtgtctctcttcaatcgcttcgactgcttcgtcgtgtgcggagggattttagagacaatcctggtggagaccaagataatgagtcctctgggtatcagcgtcttgagatgtgttcgcttgctgcgtatattcaagatcactcggtactggaattctctttctaacctggtagcgtcattgctgaacagcgtgcgcagcatcgcaagtctcctcctcctgctgttcctgtttattatcatcttttctctcctcggaatgcaattgtttggtggaaaattcaacttcgacgaaatgcagacgagacgctctactttcgataatttcccccagtcacttctgactgtttttcagatcctgaccggtgaggactggaactctgtgatgtacgatggcattatggcgtacggcggaccttctttcccgggtatgctggtgtgcatctacttcatcatcctgtttatctgcggaaattatatcttgttaaacgtttttctcgcgattgctgtcgacaatctcgcggacgctgagtctttaacttcggcccagaaagaagaggaagaagaaaaggagcggaaaaagttagcccgaactgccagccccgaaaaaaaacaggagttagtcgagaaacccgctgtaggagagagcaaggaggagaagatcgaactcaaatcgatcacggccgatggagaaagtccccctgctacaaagattaacatggacgatctgcagcccaatgaaaatgaggataagagtccctatcctaatcctgaaaccactggcgaagaagacgaggaggaaccagaaatgccagtgggccctcgcccaaggcctttgagcgaactgcacctcaaggaaaaagctgtccccatgccagaagcatctgcgttttttatttttagctcgaataacaggtttcgtctccagtgtcaccgcatagtgaacgatacaatttttacaaacctcatcctttttttcatactcctgtccagcattagtctcgccgcagaggacccggtgcagcatacatcttttcggaatcacatcctcttttacttcgacattgtattcactaccattttcaccatcgaaattgcactcaagatgactgcctacggggctttcttacacaagggatccttctgtcggaattacttcaacatcttggacttactggtagttagtgtgagtctgatatcctttgggatccagtcttccgccattaatgtcgttaagatcttgcgtgtgctgcgcgtcttgagacccctgcgggctatcaatcgggctaagggcctgaaacacgtggtgcaatgcgtcttcgtcgctatcaggacgatcggcaacattgtcattgtgactacattgctgcagttcatgttcgcatgtatcggcgtgcagctgtttaagggaaaactctatacatgctcagactccagcaagcagacagaggccgaatgcaaaggcaactatatcacctataaggatggagaagtggaccacccgatcatccagccacgatcctgggagaacagcaaattcgacttcgacaatgtgttagcagcaatgatggccttgttcacagtgtccacgtttgaggggtggccagagcttctgtaccgatcaattgactcacacacagaggacaaaggccctatttacaactaccgcgtggagatttccattttcttcatcatctatatcatcatcatcgcattctttatgatgaacatattcgtaggtttcgtaatcgttacgtttcaggaacagggtgagcaagagtacaagaattgtgaactcgataagaatcaacgccaatgtgtcgagtatgctctgaaagcccgaccgctgaggcgctacatacctaagaaccagcatcagtacaaggtgtggtatgtagtcaactctacctactttgaatatctgatgttcgtgctgatcctgttgaataccatatgtctggcaatgcaacactatggccaaagttgcttattcaagatcgcaatgaatatcttgaacatgctgttcacgggcctgtttactgtggaaatgattctgaaacttatcgcatttaaaccaaaacactatttctgtgatgcctggaataccttcgacgccctcattgtggtaggctcaatagttgatatagctatcactgaggtgaatccggcagaacatacacagtgttccccgtccatgaatgccgaggaaaactctcggatctctataacattttttcgccttttcagggttatgcgtttggtgaaattgcttagtcgtggagaagggatcaggactctgctgtggacgttcatcaagtccttccaggctctgccctatgtggcactgctgatcgtgatgctcttctttatctacgcagttatcggcatgcaagtctttggtaagattgctctcaacgacaccaccgagatcaataggaacaataattttcagacctttccgcaggcagtgttgctcctattcagatgtgctaccggagaagcatggcaagatattatgctggcctgtatgcccggtaagaagtgcgcacctgaatcggaaccaagcaactccactgagggggaaactccctgcggcagtagcttcgcagttttttatttcatcagcttctacatgctttgtgccttcctgatcataaacctcttcgttgccgtcatcatggacaacttcgactatttgacacgggattggtccattctgggccctcatcacttggacgagtttaagcgaatctgggcggagtatgatcccgaggccaagggacgcattaagcacctcgacgtggttactctattgagacggattcagccgccactcgggtttggaaagctctgccctcatcgtgtggcatgcaaacggctggtaagcatgaacatgccactcaattctgacgggaccgttatgttcaatgccaccctcttcgctcttgtgagaacagccctacggattaaaacagaggggaacctggagcaggccaatgaggaactgagggctataatcaaaaagatttggaaacgaacctccatgaagttgcttgatcaagttgtcccacctgccggagacgacgaggttaccgtcggcaaattttacgccacttttctcatccaagagtactttcgtaagttcaaaaaaaggaaggagcagggcctcgtgggcaagcccagccagcggaatgcccttagtctgcaggccggactgcggaccttgcacgatatcgggcctgagattcggagggccatctctggggacctgacagccgaagaagagctggataaggccatgaaggaagccgtgagcgctgcctcggaggatgatatatttagacgcgcaggaggactcttcggtaaccatgtgtcctattatcaatccgacggaagatctgcgttccctcagacgttcaccactcagcggcctttacacattaataaagctgggtcatcacagggggatacagaatctccctctcatgaaaagttggtcgacagtacatttacccctagttcatactccagcactggctcaaatgccaatatcaacaatgccaacaataccgctctaggcagactgcccaggcctgctggctatccttctactgtgtcgaccgtggagggccacgggcctccactgtctccagcaattcgggtgcaggaggtcgcgtggaagctgagctcaaaccgcatgcattgctgcgacatgttggatgggggaacctttccacctgccttagggcctcgcagggctcctccctgtctgcatcagcagctacagggaagtctggccggattgagggaggacaccccctgcatagtaccaggacatgccagtctgtgttgctctagtcgagtgggggagtggctgccggcaggttgcactgcaccacagcatgcgagatgccatagccgggagagccaagctgctatggcaggtcaggaagaaacaagtcaagacgaaacgtacgaggtgaaaatgaatcacgatacagaggcatgttccgagcctagcctgttatctacagaaatgctcagctatcaagatgatgaaaacaggcagctgactctgccggaggaggataaacgggacattaggcagagcccaaagagaggattcctgcgtagcgcttcccttggacggagagccagtttccacctggaatgtctcaagaggcaaaaggatcgtggtggagatattagccaaaagacggtccttccactgcaccttgtgcatcaccaggctttggccgtcgcgggattaagtccactacttcagcgaagtcattcccccgcatccttccctcgccctttcgctactccgccagcaacaccgggaagccggggatggccaccccaacccgtgcccacccttagactggagggagttgagagctctgaaaagctgaactcctcttttccaagcatccactgtgggagttgggcagaaaccacccccggaggagggggatctagcgctgccagacgcgttagaccagttagtctcatggtcccaagccaagcgggagcccctggacggcagtttcacggatctgcaagcagcctcgttgaggctgtgctcatctctgaaggactcgggcagttcgcccaagatcctaaattcattgaggttaccacccaggagctggcggatgcttgtgatatgaccatcgaggagatggaaagcgcagcggataatatcctttcaggtggagcgcctcagtcacccaatggcgctcttctgcctttcgtcaattgtagagacgcaggacaggacagggctggcggtgaagaggacgctggctgcgtgcgcgcacggggacgcccttccgaggaagagttacaagacagtagagtttatgtaagctcacttta

SEQ ID NO: 65350 - DNA, 7590 bp, Artificial Sequence
  derived and/or modified sequence
atggtcaatgagaatacgaggatgtacattccagaggaaaaccaccaaggttccaactatgggagcccacgccccgcccatgccaacatgaatgccaatgcggcagcggggctggcccctgagcacatccccaccccgggggctgccctgtcgtggcaggcggccatcgacgcagcccggcaggctaagctgatgggcagcgctggcaatgcgaccatctccacagtcagctccacgcagcggaagcggcagcaatatgggaaacccaagaagcagggcagcaccacggccacacgcccgccccgagccctgctctgcctgaccctgaagaaccccatccggagggcctgcatcagcattgtcgaatggaaaccatttgaaataattattttactgactatttttgccaattgtgtggccttagcgatctatattccctttccagaagatgattccaacgccaccaattccaacctggaacgagtggaatatctctttctcataatttttacggtggaagcgtttttaaaagtaatcgcctatggactcctctttcaccccaatgcctacctccgcaacggctggaacctactagattttataattgtggttgtggggctttttagtgcaattttagaacaagcaaccaaagcagatggggcaaacgctctcggagggaaaggggccggatttgatgtgaaggcgctgagggccttccgcgtgctgcgccccctgcggctggtgtccggagtcccaagtctccaggtggtcctgaattccatcatcaaggccatggtccccctgctgcacatcgccctgcttgtgctgtttgtcatcatcatctacgccatcatcggcttggagctcttcatggggaagatgcacaagacctgctacaaccaggagggcatagcagatgttccagcagaagatgacccttccccttgtgcgctggaaacgggccacgggcggcagtgccagaacggcacggtgtgcaagcccggctgggatggtcccaagcacggcatcaccaactttgacaactttgccttcgccatgctcacggtgttccagtgcatcaccatggagggctggacggacgtgctgtactggatgcaggacgctatgggctatgagttaccctgggtgtattttgtcagtctggtcatctttggatcctttttcgttctaaatctggttctcggtgtgttgagcggagagttttccaaagagagggagaaggccaaggcccggggagatttccagaagctgcgggagaagcagcagctagaagaggatctcaaaggctacctggattggatcactcaggccgaagacatcgatcctgagaatgaggacgaaggcatggatgaggagaagccccgaaacatgagcatgcccaccagtgagaccgagtccgtcaacaccgaaaacgtggctggaggtgacatcgagggagaaaactgcggggccaggctggcccaccggatctccaagtcaaagttcagccgctactggcgccggtggaatcggttctgcagaaggaagtgccgcgccgcagtcaagtctaatgtcttctactggctggtgattttcctggtgttcctcaacacgctcaccattgcctctgagcactacaaccagcccaactggctcacagaagtccaagacacggcaaacaaggccctgctggccctgttcacggcagagatgctcctgaagatgtacagcctgggcctgcaggcctacttcgtgtccctcttcaaccgctttgactgcttcgtcgtgtgtggcggcatcctggagaccatcctggtggagaccaagatcatgtccccactgggcatctccgtgctcagatgcgtccggctgctgaggattttcaagatcacgaggtactggaactccttgagcaacctggtggcatccttgctgaactctgtgcgctccatcgcctccctgctccttctcctcttcctcttcatcatcatcttctccctcctggggatgcagctctttggaggaaagttcaactttgatgagatgcagacccggaggagcacattcgataacttcccccagtccctcctcactgtgtttcagatcctgaccggggaggactggaattcggtgatgtatgatgggatcatggcttatggcggcccctcttttccagggatgttagtctgtatttacttcatcatcctcttcatctgtggaaactatatcctactgaatgtgttcttggccattgctgtggacaacctggctgatgctgagagcctcacatctgcccaaaaggaggaggaagaggagaaggagagaaagaagctggccaggactgccagcccagagaagaaacaagagttggtggagaagccggcagtgggggaatccaaggaggagaagattgagctgaaatccatcacggctgacggagagtctccacccgccaccaagatcaacatggatgacctccagcccaatgaaaatgaggataagagcccctaccccaacccagaaactacaggagaagaggatgaggaggagccagagatgcctgtcggccctcgcccacgaccactctctgagcttcaccttaaggaaaaggcagtgcccatgccagaagccagcgcgtttttcatcttcagctctaacaacaggtttcgcctccagtgccaccgcattgtcaatgacacgatcttcaccaacctgatcctcttcttcattctgctcagcagcatttccctggctgctgaggacccggtccagcacacctccttcaggaaccatattctgttttattttgatattgtttttaccaccattttcaccattgaaattgctctgaagatgactgcttatggggctttcttgcacaagggttctttctgccggaactacttcaacatcctggacctgctggtggtcagcgtgtccctcatctcctttggcatccagtccagtgcaatcaatgtcgtgaagatcttgcgagtcctgcgagtactcaggcccctgagggccatcaacagggccaaggggctaaagcatgtggttcagtgtgtgtttgtcgccatccggaccatcgggaacatcgtgattgtcaccaccctgctgcagttcatgtttgcctgcatcggggtccagctcttcaagggaaagctgtacacctgttcagacagttccaagcagacagaggcggaatgcaagggcaactacatcacgtacaaagacggggaggttgaccaccccatcatccaaccccgcagctgggagaacagcaagtttgactttgacaatgttctggcagccatgatggccctcttcaccgtctccaccttcgaagggtggccagagctgctgtaccgctccatcgactcccacacggaagacaagggccccatctacaactaccgtgtggagatctccatcttcttcatcatctacatcatcatcatcgccttcttcatgatgaacatcttcgtgggcttcgtcatcgtcacctttcaggagcagggggagcaggagtacaagaactgtgagctggacaagaaccagcgacagtgcgtggaatacgccctcaaggcccggcccctgcggaggtacatccccaagaaccagcaccagtacaaagtgtggtacgtggtcaactccacctacttcgagtacctgatgttcgtcctcatcctgctcaacaccatctgcctggccatgcagcactacggccagagctgcctgttcaaaatcgccatgaacatcctcaacatgctcttcactggcctcttcaccgtggagatgatcctgaagctcattgccttcaaacccaagcactatttctgtgatgcatggaatacatttgacgccttgattgttgtgggtagcattgttgatatagcaatcaccgaggtaaacccagctgaacatacccaatgctctccctctatgaacgcagaggaaaactcccgcatctccatcaccttcttccgcctgttccgggtcatgcgtctggtgaagctgctgagccgtggggagggcatccggacgctgctgtggaccttcatcaagtccttccaggccctgccctatgtggccctcctgatcgtgatgctgttcttcatctacgcggtgatcgggatgcaggtgtttgggaaaattgccctgaatgataccacagagatcaaccggaacaacaactttcagaccttcccccaggccgtgctgctcctcttcaggtgtgccaccggggaggcctggcaggacatcatgctggcctgcatgccaggcaagaagtgtgccccagagtccgagcccagcaacagcacggagggtgaaacaccctgtggtagcagctttgctgtcttctacttcatcagcttctacatgctctgtgccttcctgatcatcaacctctttgtagctgtcatcatggacaactttgactacctgacaagggactggtccatccttggtccccaccacctggatgagtttaaaagaatctgggcagagtatgaccctgaagccaagggtcgtatcaaacacctggatgtggtgaccctcctccggcggattcagccgccactaggttttgggaagctgtgccctcaccgcgtggcttgcaaacgcctggtctccatgaacatgcctctgaacagcgacgggacagtcatgttcaatgccaccctgtttgccctggtcaggacggccctgaggatcaaaacagaagggaacctagaacaagccaatgaggagctgcgggcgatcatcaagaagatctggaagcggaccagcatgaagctgctggaccaggtggtgccccctgcaggtgatgatgaggtcaccgttggcaagttctacgccacgttcctgatccaggagtacttccggaagttcaagaagcgcaaagagcagggccttgtgggcaagccctcccagaggaacgcgctgtctctgcaggctggcttgcgcacactgcatgacatcgggcctgagatccgacgggccatctctggagatctcaccgctgaggaggagctggacaaggccatgaaggaggctgtgtccgctgcttctgaagatgacatcttcaggagggccggtggcctgttcggcaaccacgtcagctactaccaaagcgacggccggagcgccttcccccagaccttcaccactcagcgcccgctgcacatcaacaaggcgggcagcagccagggcgacactgagtcgccatcccacgagaagctggtggactccaccttcaccccgagcagctactcgtccaccggctccaacgccaacatcaacaacgccaacaacaccgccctgggtcgcctccctcgccccgccggctaccccagcacggtcagcactgtggagggccacgggccccccttgtcccctgccatccgggtgcaggaggtggcgtggaagctcagctccaacaggatgcactgctgtgacatgctggatggtgggaccttccctcccgccctgggcccccgcagggctcctccctgtctgcatcagcagctccagggttccctggcggggctgagagaggacacaccctgcatcgtgcctggccacgcttcactgtgctgctcttccagagtaggagagtggctcccagcaggctgcacagccccccagcatgccaggtgccactcccgggagagccaggcagccatggcgggtcaggaggagacgtctcaggatgagacctatgaagtgaagatgaaccatgacacggaggcctgcagtgagcccagcctgctctccacagagatgctctcctaccaggatgacgaaaatcggcaactgacgctcccagaggaggacaagagggacatccggcaatctccgaagaggggtttcctccgctctgcctcactaggtcgaagggcctccttccacctggaatgtctgaagcgacagaaggaccgagggggagacatctctcagaagacagtcctgcccttgcatctggttcatcatcaggcattggcagtggcaggcctgagccccctcctccagagaagccattcccctgcctcattccctaggccttttgccaccccaccagccacacctggcagccgaggctggcccccacagcccgtccccaccctgcggcttgagggggtcgagtccagtgagaaactcaacagcagcttcccatccatccactgcggctcctgggctgagaccacccccggtggcgggggcagcagcgccgcccggagagtccggcccgtctccctcatggtgcccagccaggctggggccccagggaggcagttccacggcagtgccagcagcctggtggaagcggtcttgatttcagaaggactggggcagtttgctcaagatcccaagttcatcgaggtcaccacccaggagctggccgacgcctgcgacatgaccatagaggagatggagagcgcggccgacaacatcctcagcgggggcgccccacagagccccaatggcgccctcttaccctttgtgaactgcagggacgcggggcaggaccgagccgggggcgaagaggacgcgggctgtgtgcgcgcgcggggtcgaccgagtgaggaggagctccaggacagcagggtctacgtcagcagcctgtagtgggcgctgccagatgcgggcttttttttatttgtttcaatgttcctaatgggttcgtttcagaagtgcctcactgttctcgtgacctggagttaaccggaacagcgtcttcattcatttctgttgggaccagacgcggagcctgggtgcgcgagccgccctccgggaggaaggcgcccggctgcgtctgcagaggcggggagaggaggcggcgagggtcccggggcgcgaggaaggcgcctgccctctcccagctcgcaggccccgggcccggccgcgcctccgcggggagagcaccccggcttcccgcgcgccctcaccaaaaggaccctacagcaaacgggtgtctttcgactctgcttgtagaaaccatttgcacatattctgtacgagcctcgctgtctccctagagccagggccctgcggatttggagaagggagcggggcaggacttccaggaggaccccaacccggcccggagagggaggaggaggcctccaggggcgcggagctctggggatgggcgtcgggccggcagtggtgcggctcactccgtccctgcccacctgcgacgggatcccccgaccggcacgggccacgccgagctcccggccagccgccggcccgcaggcagcgcgagggaggagctgcgccgccggctccgcccaaccaggtggtgctgagcttccgctgagcgctcttttgttttgtggtttgacacttttcttgacagcatgttgcagtttcttttcggttttggttttttttaaatgttttattttgctttcccagcgggaggggaggaagaagagtgtttacaaagtcctgtagccccctcacctttctgttttcacttttgccaatgtacatcgggtttggttttcttgtattatttaaacggttgtggtttcctttttccacggaggttcaatagaagccgctgcaggagagttttaccaa

SEQ ID NO: 65351 - DNA, 6630 bp, Artificial Sequence
  derived and/or modified sequence
atggtgaacgagaacaccagaatgtacatccccgaggagaaccaccagggcagcaactacggcagccccagacccgcccacgccaacatgaacgccaacgccgccgccggcctggcccccgagcacatccccacccccggcgccgccctgagctggcaggccgccatcgacgccgccagacaggccaagctgatgggcagcgccggcaacgccaccatcagcaccgtgagcagcacccagagaaagagacagcagtacggcaagcccaagaagcagggcagcaccaccgccaccagaccccccagagccctgctgtgcctgaccctgaagaaccccatcagaagagcctgcatcagcatcgtggagtggaagcccttcgagatcatcatcctgctgaccatcttcgccaactgcgtggccctggccatctacatccccttccccgaggacgacagcaacgccaccaacagcaacctggagagagtggagtacctgttcctgatcatcttcaccgtggaggccttcctgaaggtgatcgcctacggcctgctgttccaccccaacgcctacctgagaaacggctggaacctgctggacttcatcatcgtggtggtgggcctgttcagcgccatcctggagcaggccaccaaggccgacggcgccaacgccctgggcggcaagggcgccggcttcgacgtgaaggccctgagagccttcagagtgctgagacccctgagactggtgagcggcgtgcccagcctgcaggtggtgctgaacagcatcatcaaggccatggtgcccctgctgcacatcgccctgctggtgctgttcgtgatcatcatctacgccatcatcggcctggagctgttcatgggcaagatgcacaagacctgctacaaccaggagggcatcgccgacgtgcccgccgaggacgaccccagcccctgcgccctggagaccggccacggcagacagtgccagaacggcaccgtgtgcaagcccggctgggacggccccaagcacggcatcaccaacttcgacaacttcgccttcgccatgctgaccgtgttccagtgcatcaccatggagggctggaccgacgtgctgtactggatgcaggacgccatgggctacgagctgccctgggtgtacttcgtgagcctggtgatcttcggcagcttcttcgtgctgaacctggtgctgggcgtgctgagcggcgagttcagcaaggagagagagaaggccaaggccagaggcgacttccagaagctgagagagaagcagcagctggaggaggacctgaagggctacctggactggatcacccaggccgaggacatcgaccccgagaacgaggacgagggcatggacgaggagaagcccagaaacatgagcatgcccaccagcgagaccgagagcgtgaacaccgagaacgtggccggcggcgacatcgagggcgagaactgcggcgccagactggcccacagaatcagcaagagcaagttcagcagatactggagaagatggaacagattctgcagaagaaagtgcagagccgccgtgaagagcaacgtgttctactggctggtgatcttcctggtgttcctgaacaccctgaccatcgccagcgagcactacaaccagcccaactggctgaccgaggtgcaggacaccgccaacaaggccctgctggccctgttcaccgccgagatgctgctgaagatgtacagcctgggcctgcaggcctacttcgtgagcctgttcaacagattcgactgcttcgtggtgtgcggcggcatcctggagaccatcctggtggagaccaagatcatgagccccctgggcatcagcgtgctgagatgcgtgagactgctgagaatcttcaagatcaccagatactggaacagcctgagcaacctggtggccagcctgctgaacagcgtgagaagcatcgccagcctgctgctgctgctgttcctgttcatcatcatcttcagcctgctgggcatgcagctgttcggcggcaagttcaacttcgacgagatgcagaccagaagaagcaccttcgacaacttcccccagagcctgctgaccgtgttccagatcctgaccggcgaggactggaacagcgtgatgtacgacggcatcatggcctacggcggccccagcttccccggcatgctggtgtgcatctacttcatcatcctgttcatctgcggcaactacatcctgctgaacgtgttcctggccatcgccgtggacaacctggccgacgccgagagcctgaccagcgcccagaaggaggaggaggaggagaaggagagaaagaagctggccagaaccgccagccccgagaagaagcaggagctggtggagaagcccgccgtgggcgagagcaaggaggagaagatcgagctgaagagcatcaccgccgacggcgagagcccccccgccaccaagatcaacatggacgacctgcagcccaacgagaacgaggacaagagcccctaccccaaccccgagaccaccggcgaggaggacgaggaggagcccgagatgcccgtgggccccagacccagacccctgagcgagctgcacctgaaggagaaggccgtgcccatgcccgaggccagcgccttcttcatcttcagcagcaacaacagattcagactgcagtgccacagaatcgtgaacgacaccatcttcaccaacctgatcctgttcttcatcctgctgagcagcatcagcctggccgccgaggaccccgtgcagcacaccagcttcagaaaccacatcctgttctacttcgacatcgtgttcaccaccatcttcaccatcgagatcgccctgaagatgaccgcctacggcgccttcctgcacaagggcagcttctgcagaaactacttcaacatcctggacctgctggtggtgagcgtgagcctgatcagcttcggcatccagagcagcgccatcaacgtggtgaagatcctgagagtgctgagagtgctgagacccctgagagccatcaacagagccaagggcctgaagcacgtggtgcagtgcgtgttcgtggccatcagaaccatcggcaacatcgtgatcgtgaccaccctgctgcagttcatgttcgcctgcatcggcgtgcagctgttcaagggcaagctgtacacctgcagcgacagcagcaagcagaccgaggccgagtgcaagggcaactacatcacctacaaggacggcgaggtggaccaccccatcatccagcccagaagctgggagaacagcaagttcgacttcgacaacgtgctggccgccatgatggccctgttcaccgtgagcaccttcgagggctggcccgagctgctgtacagaagcatcgacagccacaccgaggacaagggccccatctacaactacagagtggagatcagcatcttcttcatcatctacatcatcatcatcgccttcttcatgatgaacatcttcgtgggcttcgtgatcgtgaccttccaggagcagggcgagcaggagtacaagaactgcgagctggacaagaaccagagacagtgcgtggagtacgccctgaaggccagacccctgagaagatacatccccaagaaccagcaccagtacaaggtgtggtacgtggtgaacagcacctacttcgagtacctgatgttcgtgctgatcctgctgaacaccatctgcctggccatgcagcactacggccagagctgcctgttcaagatcgccatgaacatcctgaacatgctgttcaccggcctgttcaccgtggagatgatcctgaagctgatcgccttcaagcccaagcactacttctgcgacgcctggaacaccttcgacgccctgatcgtggtgggcagcatcgtggacatcgccatcaccgaggtgaaccccgccgagcacacccagtgcagccccagcatgaacgccgaggagaacagcagaatcagcatcaccttcttcagactgttcagagtgatgagactggtgaagctgctgagcagaggcgagggcatcagaaccctgctgtggaccttcatcaagagcttccaggccctgccctacgtggccctgctgatcgtgatgctgttcttcatctacgccgtgatcggcatgcaggtgttcggcaagatcgccctgaacgacaccaccgagatcaacagaaacaacaacttccagaccttcccccaggccgtgctgctgctgttcagatgcgccaccggcgaggcctggcaggacatcatgctggcctgcatgcccggcaagaagtgcgcccccgagagcgagcccagcaacagcaccgagggcgagaccccctgcggcagcagcttcgccgtgttctacttcatcagcttctacatgctgtgcgccttcctgatcatcaacctgttcgtggccgtgatcatggacaacttcgactacctgaccagagactggagcatcctgggcccccaccacctggacgagttcaagagaatctgggccgagtacgaccccgaggccaagggcagaatcaagcacctggacgtggtgaccctgctgagaagaatccagccccccctgggcttcggcaagctgtgcccccacagagtggcctgcaagagactggtgagcatgaacatgcccctgaacagcgacggcaccgtgatgttcaacgccaccctgttcgccctggtgagaaccgccctgagaatcaagaccgagggcaacctggagcaggccaacgaggagctgagagccatcatcaagaagatctggaagagaaccagcatgaagctgctggaccaggtggtgccccccgccggcgacgacgaggtgaccgtgggcaagttctacgccaccttcctgatccaggagtacttcagaaagttcaagaagagaaaggagcagggcctggtgggcaagcccagccagagaaacgccctgagcctgcaggccggcctgagaaccctgcacgacatcggccccgagatcagaagagccatcagcggcgacctgaccgccgaggaggagctggacaaggccatgaaggaggccgtgagcgccgccagcgaggacgacatcttcagaagagccggcggcctgttcggcaaccacgtgagctactaccagagcgacggcagaagcgccttcccccagaccttcaccacccagagacccctgcacatcaacaaggccggcagcagccagggcgacaccgagagccccagccacgagaagctggtggacagcaccttcacccccagcagctacagcagcaccggcagcaacgccaacatcaacaacgccaacaacaccgccctgggcagactgcccagacccgccggctaccccagcaccgtgagcaccgtggagggccacggcccccccctgagccccgccatcagagtgcaggaggtggcctggaagctgagcagcaacagaatgcactgctgcgacatgctggacggcggcaccttcccccccgccctgggccccagaagagcccccccctgcctgcaccagcagctgcagggcagcctggccggcctgagagaggacaccccctgcatcgtgcccggccacgccagcctgtgctgcagcagcagagtgggcgagtggctgcccgccggctgcaccgccccccagcacgccagatgccacagcagagagagccaggccgccatggccggccaggaggagaccagccaggacgagacctacgaggtgaagatgaaccacgacaccgaggcctgcagcgagcccagcctgctgagcaccgagatgctgagctaccaggacgacgagaacagacagctgaccctgcccgaggaggacaagagagacatcagacagagccccaagagaggcttcctgagaagcgccagcctgggcagaagagccagcttccacctggagtgcctgaagagacagaaggacagaggcggcgacatcagccagaagaccgtgctgcccctgcacctggtgcaccaccaggccctggccgtggccggcctgagccccctgctgcagagaagccacagccccgccagcttccccagacccttcgccaccccccccgccacccccggcagcagaggctggcccccccagcccgtgcccaccctgagactggagggcgtggagagcagcgagaagctgaacagcagcttccccagcatccactgcggcagctgggccgagaccacccccggcggcggcggcagcagcgccgccagaagagtgagacccgtgagcctgatggtgcccagccaggccggcgcccccggcagacagttccacggcagcgccagcagcctggtggaggccgtgctgatcagcgagggcctgggccagttcgcccaggaccccaagttcatcgaggtgaccacccaggagctggccgacgcctgcgacatgaccatcgaggagatggagagcgccgccgacaacatcctgagcggcggcgccccccagagccccaacggcgccctgctgcccttcgtgaactgcagagacgccggccaggacagagccggcggcgaggaggacgccggctgcgtgagagccagaggcagacccagcgaggaggagctgcaggacagcagagtgtacgtgagcagcctgtag

SEQ ID NO: 65352 - protein, 574 aa, Artificial Sequence
  derived and/or modified sequence
MKITSTSCICPVLVCLCFVQRCYGTAHHSSIKVMRNQTKHIEGETEVHHRPKRGWVWNQFFVLEEHMGPDPQYVGKLHSNSDKGDGSVKYILTGEGAGTIFIIDDTTGDIHSTKSLDREQKTHYVLHAQAIDRRTNKPLEPESEFIIKVQDINDNAPKFTDGPYIVTVPEMSDMGTSVLQVTATDADDPTYGNSARVVYSILQGQPYFSVDPKTGVIRTALHNMDREAREHYSVVIQAKDMAGQVGGLSGSTTVNITLTDVNDNPPRFPQKHYQLYVPESAQVGSAVGKIKANDADTGSNADMTYSIINGDGMGIFSISTDKETREGILSLKKPLNYEKKKSYTLNIEGANTHLDFRFSHLGPFKDATMLKIIVGDVDEPPLFSMPSYLMEVYENAKIGTVVGTVLAQDPDSTNSLVRYFINYNVEDDRFFNIDANTGTIRTTKVLDREETPWYNITVTASEIDNPDLLSHVTVGIRVLDVNDNPPELAREYDIIVCENSKPGQVIHTISATDKDDFANGPRFNFFLDERLPVNPNFTLKDNEAAAPSPSGFVHAREMGVCGPAMQKPSCPRLV

SEQ ID NO: 65353 - DNA, 1725 bp, Artificial Sequence
  derived and/or modified sequence
atgaagataactagtactagttgcatttgccccgttttagtgtgtctctgtttcgttcagaggtgctacgggaccgctcaccatagctctatcaaagtcatgcgaaaccagaccaaacatattgaaggtgagaccgaagtgcaccataggccaaagcgaggttgggtctggaatcagttcttcgttctcgaagagcacatggggcccgacccacagtatgtcggcaaactgcattcaaacagtgacaaaggtgacggcagcgtgaaatacatcctgaccggtgagggggccggcaccatctttattatcgacgacaccaccggggacatccatagtacaaaatctttagatagagaacaaaagactcactacgtcctgcatgcccaggcaatagacaggaggacaaataagccattggagccagagtcagagttcattatcaaagtgcaggacataaatgataacgcacccaagtttacagacgggccctatattgtaaccgtacctgagatgagtgacatggggacatcagtgctgcaggtgacggccaccgatgcggatgaccccacatacgggaactctgctagggtcgtatacagcatccttcaggggcagccctatttttccgtcgacccaaagacgggcgttatacgtacagccctgcacaacatggaccgggaggctagggagcactatagcgttgtaatccaggctaaggatatggcaggtcaggttggtgggttgagtggaagcacaaccgtaaatattacactcaccgatgtaaatgacaacccaccacgcttccctcagaaacactaccagctgtacgtgccggaaagcgcgcaagttggctctgctgtgggcaagatcaaagcaaacgacgcagacaccggctcaaacgccgatatgacctactcaattattaatggcgatggtatgggaatctttagcatctcaaccgacaaagaaacacgtgagggcatcctgtccctgaagaagccgctcaactacgaaaaaaaaaagagctacaccctgaacatcgaaggtgcaaacacccaccttgacttccgatttagccatctcgggccttttaaggacgctactatgcttaaaattatcgtcggcgatgtagatgagcctccattgttctcgatgccttcctacttaatggaggtctatgagaatgccaaaatcgggaccgtggtgggaactgtcctggcacaggatcctgacagtaccaactccctggtccgctactttatcaactataatgtagaggacgacagattctttaacatcgatgcaaacaccggaactatcagaactaccaaggttctggacagagaggagacaccttggtataatataacggtcacggcttcagagatcgacaatcctgatttgctgagccatgttacagtgggaatacgagtgcttgatgtgaacgataatcccccagaattagccagagagtacgacataattgtgtgcgaaaactcaaaacctggacaggtcatccataccattagcgctactgataaggacgatttcgctaacgggcctcgcttcaactttttcctggatgaaagactacctgtgaatcccaacttcacactcaaagacaatgaggccgctgctccatctccgtctggttttgtgcacgctcgcgaaatgggcgtgtgtggcccagcaatgcagaaaccgtcatgtcccaggctcgtctag

SEQ ID NO: 65354 - DNA, 1725 bp, Artificial Sequence
  derived and/or modified sequence
atgaagatcaccagcaccagctgcatctgccctgtgctggtgtgcctgtgctttgtgcagcgctgctatggaacagcccaccacagcagcatcaaggtgatgaggaaccagaccaagcacattgaaggagaaacagaggtgcaccaccggcccaagaggggctgggtgtggaaccagttctttgtgctggaggagcacatgggccctgacccccagtatgtgggcaagctgcacagcaacagcgacaagggagatggctctgtgaagtacatcctgactggagagggcgccggcaccatcttcatcattgatgacaccactggagacatccacagcaccaagagcctggaccgggagcagaagacccactacgtgctgcacgcccaggccatcgacaggaggaccaacaagcccctggagcctgagagcgagttcatcatcaaggtgcaggacatcaatgacaatgcccccaagttcacagatggcccctacatcgtgacagtgcctgagatgtctgacatgggcacctctgtgctgcaggtgacagccacagatgctgatgaccccacctacggcaacagcgcccgggtggtgtacagcatcctgcagggccagccctacttctctgtggaccccaagacaggagtcatcagaacagccctgcacaacatggaccgggaggcccgggagcactacagcgtggtgatccaggccaaggacatggccggccaggtgggcggcctgagcggcagcaccaccgtgaacatcaccctgacagatgtgaatgacaaccccccacgcttcccccagaagcactaccagctgtatgtgcctgagagcgcccaggtgggcagcgctgtgggcaagatcaaggccaatgatgctgacaccggcagcaatgctgacatgacctacagcatcatcaatggagatggcatgggcatcttcagcatcagcacagacaaggagacccgggagggcatcctgagcctgaagaagcccctgaactatgagaagaagaagagctacaccctgaacattgaaggagccaacacccacctggacttccgcttcagccacctgggccccttcaaggatgccaccatgctgaagatcatcgtgggagatgtggatgagcccccactcttctccatgcccagctacctgatggaggtgtatgaaaatgccaagattggcaccgtggtgggcaccgtgctggcccaggaccctgacagcaccaacagcctggtgcgctacttcatcaactacaacgtggaggatgaccgcttcttcaacattgatgccaacacaggcaccatccgcaccaccaaggtgctggaccgggaggagaccccctggtacaacatcaccgtgacagccagcgagattgacaacccagacctgctgagccacgtgacagtgggcatccgggtgctggatgtgaatgacaaccccccagagctggcccgggagtatgacatcatcgtgtgtgagaacagcaagccaggccaggtgatccacaccatcagcgccacagacaaggatgactttgccaacggcccccgcttcaacttcttcctggatgagcggctgcctgtgaaccccaacttcaccctgaaggacaatgaggccgccgcccccagccccagcggctttgtgcacgcccgggagatgggcgtgtgtggccctgccatgcagaagcccagctgcccccggctggtgtag

SEQ ID NO: 65355 - DNA, 1725 bp, Artificial Sequence
  derived and/or modified sequence
atgaagatcaccagcaccagctgcatctgccccgtgctggtgtgcctatgcttcgtccagaggtgctacggaaccgcccaccactcgtccatcaaggtgatgcgaaaccaaaccaaacacatagagggagaaacagaagtgcaccaccgtccgaagagagggtgggtgtggaatcagtttttcgtccttgaagaacacatgggcccggatcctcaatatgtgggcaagctccattccaacagcgacaagggtgacggatccgtgaagtatatactgacaggagagggcgccgggactatcttcattatagacgataccactggggacatccacagtactaaaagccttgaccgggaacagaagacccattatgtattgcacgctcaggctatcgataggaggaccaacaagccgctcgaaccagagagtgaatttataatcaaagtccaggacattaacgacaacgcccccaagttcaccgacggcccctacatcgtgactgtacctgaaatgagcgacatggggacctccgtgctacaggtcaccgctaccgacgctgacgacccaacatacggtaacagtgcccgggtggtatactcaattctgcagggacagccatacttcagtgtcgatcccaagacaggagtgattcgcaccgcactgcataacatggatagagaagcacgagagcactattcagtcgtcatccaggccaaggacatggcgggccaagttggaggattatccgggtctaccactgtgaacatcactttaaccgacgtgaacgataaccctcccagatttcctcagaaacactaccagctttacgttcccgagagtgctcaggtcggcagcgccgtcggcaagataaaggccaatgatgcagataccggatccaatgcggatatgacatatagtatcattaacggagatggcatgggaattttttccataagcaccgataaggagactcgtgaagggatcctgtctctgaaaaaaccactgaattacgaaaaaaaaaaatcgtacacattaaatatcgaaggggccaatacacatctcgatttccgcttttctcacctgggccccttcaaggacgcaacgatgctaaagattatcgtaggagacgtagacgagcccccactcttctctatgccctcctacctgatggaagtgtatgagaacgcgaagatcggcaccgtggtcggtacggtgttggcccaggacccagactcgacaaattcgttggtgcggtatttcataaactataacgtggaggacgacagattcttcaatatcgacgctaacactggcactattcgtactacaaaagtgcttgaccgggaggagaccccctggtacaatattaccgtcacggcttcagaaattgacaacccagatttgctctctcatgtcactgtggggataagggtactggatgtgaacgacaatcctccagagctggccagagaatacgacatcattgtgtgcgagaattcaaagccagggcaagtgatccatactatctctgcaaccgacaaagatgatttcgctaatggacctcgattcaatttcttcctggacgaaagactgccagtaaacccaaacttcacattgaaggacaatgaagctgctgcaccttctccaagcggttttgtgcatgcccgcgagatgggggtgtgcggccctgccatgcagaagccatcatgcccacggctcgtatag

SEQ ID NO: 65356 - DNA, 1725 bp, Artificial Sequence
  derived and/or modified sequence
atgaagatcacttctacgtcctgcatttgtcctgtacttgtgtgcttgtgctttgttcagaggtgctatgggaccgctcaccattcctcaatcaaagtcatgaggaaccagaccaagcatatagaaggggagacagaagtgcatcatcgacccaagcggggatgggtctggaaccagttcttcgtgctggaggagcacatgggtcccgacccacaatacgtcggaaagctccactcgaatagcgacaaaggtgatggctcagtgaaatacatcttgacaggcgaaggggcagggaccatcttcatcatcgacgatacaacaggggacatccacagtactaaatctttggatcgtgaacagaaaactcattacgtgctgcacgcacaggccatcgacaggagaaccaataagccactggagccagaaagcgaattcataattaaggtgcaggatatcaacgacaacgcccctaagttcaccgacggtccatatattgtgaccgtccccgaaatgtccgatatgggcaccagtgtgctacaagttactgccacagacgccgacgaccctacgtacgggaattcagcccgtgtcgtctatagcatattgcaggggcagccctacttctcagtggacccaaagactggagtgatacgtacagctttgcacaatatggatagggaagccagagaacactacagcgtcgtgattcaggccaaagatatggccggacaggtgggcggtctgagtggtagcactacagtgaatatcaccctgacagatgtcaacgacaacccccctagattcccacagaagcactaccagttgtacgtccccgaatctgctcaggttggatctgcagtcggaaagataaaggctaacgatgcagacactggcagcaatgcagacatgacctattcaataattaatggagacgggatgggtatctttagcatctcaaccgacaaagaaacaagagaaggcatccttagtctgaagaaacccctgaactacgagaagaaaaagtcttacactctaaacatcgagggagccaatactcatctggatttcaggttctcccatttaggaccatttaaagacgcaacaatgctgaagatcatcgtaggcgacgttgacgaacctcctctattttccatgccaagctacttgatggaggtttatgaaaacgcaaagattggaacggtcgtcggcacggtcctggcacaggaccccgacagtactaactccctcgttagatatttcataaattacaacgtcgaggacgacagattttttaacatcgatgctaacacgggaactatccggacaacaaaggtgctggatagggaggaaacaccatggtacaacattaccgtgacggcatctgaaattgataatcctgacctgctatctcatgtgacggtcggtatccgggtcctcgatgttaatgacaaccccccagagcttgcacgggaatatgacataattgtgtgtgagaactccaagcctggccaggtgatccacacaatcagcgctaccgacaaggacgacttcgcaaatggacctcgctttaatttcttcctggacgagcggctgcctgttaacccgaacttcaccctgaaggacaacgaagctgcagccccttccccatccggcttcgtgcatgctcgggagatgggggtttgcggacccgctatgcagaagccctcgtgccctagactagtttag

SEQ ID NO: 65357 - DNA, 2386 bp, Artificial Sequence
  derived and/or modified sequence
gaggacggcgagcagctgtgcccagagctctgggaaagtcccctctctttgcttcttataaattaagttcctttccaccagttagggcaagtccgccaagatagactgaagaggagcaagaacagaaacagggagccagttacagatctatcccaagaattctggggagagatgatggtgtctgcagcagagtgacagcagtggagattgagagaaaaggttgaaaatggttgcttgtgttcaactactgtgaagagttggaatcagacaactacggctttgattttccaagtggttcagaatgtaaatatgatctgacctttccctgatggacagttaaatcatggacacgctaaacaatttactttggactgtccttcctaaagatgctctggcttctctcttgaatgctcactaagctttcgtagctgacaaggaaaggaaggaaaactgtgaactggaaagttatcttacaatgaaaattactagcacatcttgcatctgtccagtcctagtgtgtctctgttttgtgcagaggtgttatggaactgctcaccacagctccatcaaggtgatgagaaaccaaaccaaacacattgaaggtgaaaccgaagtccatcatcgtcccaaaaggggatgggtatggaatcagttctttgttttagaagaacatatgggaccagatcctcagtatgttggaaagctgcactccaattctgacaaaggtgatggatctgtcaagtacatccttactggagagggtgctgggactatatttatcattgacgataccacgggtgatatccactcaacaaaaagcctagacagagagcagaagacccactatgtgcttcatgctcaagctattgatagacgtacaaacaaacctcttgagcctgaatccgagttcatcatcaaagtgcaagacatcaatgacaacgctccaaaattcacagatggaccatacattgttactgtgcctgaaatgtcagatatgggtacctctgttctacaggtgacagctactgatgcagatgaccctacctatggaaacagcgctcgggtggtttacagcattctccaaggacaaccctacttctccgtcgaccctaaaacaggagttattagaacggccttacataacatggacagagaagccagagaacattactccgtagtcattcaagccaaagacatggctgggcaagttggagggctttcaggatctacaacagtcaacatcaccttaaccgatgtcaatgacaacccaccacgctttcctcaaaaacactatcagctatatgttcctgagtcagctcaagttggttcagctgttgggaaaatcaaggcaaatgatgctgacactggctcaaatgctgacatgacctactccatcataaatggtgatggcatgggaatattctcaatctccactgacaaagagaccagagaaggaatcctttctttaaagaagccactgaactatgagaaaaagaagtcatataccctcaacatagaaggagcaaatacacatcttgattttcgcttttctcacttgggtccttttaaagatgctactatgctgaagatcattgttggggatgtagatgaaccaccactattttccatgccttcctacctcatggaagtctacgaaaatgccaagattgggaccgtcgttggtacagttttggcacaagatcctgacagtactaacagcttagtaagatacttcatcaactacaatgttgaagacgacagatttttcaacattgatgccaatactgggaccattaggactacaaaggttctcgacagagaagaaactccatggtacaacatcacagtcactgcttcagaaattgataatcctgatttgctgagccatgtcacagtgggtattagagttctggatgtcaatgacaatccacccgaacttgccagggaatatgatattattgtatgtgaaaattctaagcctggccaggttattcataccatcagtgccactgataaagatgattttgccaatggaccaaggtttaacttctttcttgatgaacgcctgcctgtaaatccaaacttcactctgaaggacaatgaagcagcagcaccctcaccatcagggtttgtgcatgcgagagagatgggcgtgtgcggacctgccatgcagaagccttcctgtcctcggctggtttgagtacaggagccttaatcgctattcttctctgtgttctcattctcctggcaattgtggtactttttatcaccctgaggcgcagcaaaaaagagcccttgatcatttcagaagaggatgtacgggagaacgtggtcacctatgatgatgaaggaggcggagaggaagacacagaggcctttgacatca

SEQ ID NO: 65358 - DNA, 1725 bp, Artificial Sequence
  derived and/or modified sequence
atgaagatcaccagcaccagctgcatctgccccgtgctggtgtgcctgtgcttcgtgcagagatgctacggcaccgcccaccacagcagcatcaaggtgatgagaaaccagaccaagcacatcgagggcgagaccgaggtgcaccacagacccaagagaggctgggtgtggaaccagttcttcgtgctggaggagcacatgggccccgacccccagtacgtgggcaagctgcacagcaacagcgacaagggcgacggcagcgtgaagtacatcctgaccggcgagggcgccggcaccatcttcatcatcgacgacaccaccggcgacatccacagcaccaagagcctggacagagagcagaagacccactacgtgctgcacgcccaggccatcgacagaagaaccaacaagcccctggagcccgagagcgagttcatcatcaaggtgcaggacatcaacgacaacgcccccaagttcaccgacggcccctacatcgtgaccgtgcccgagatgagcgacatgggcaccagcgtgctgcaggtgaccgccaccgacgccgacgaccccacctacggcaacagcgccagagtggtgtacagcatcctgcagggccagccctacttcagcgtggaccccaagaccggcgtgatcagaaccgccctgcacaacatggacagagaggccagagagcactacagcgtggtgatccaggccaaggacatggccggccaggtgggcggcctgagcggcagcaccaccgtgaacatcaccctgaccgacgtgaacgacaacccccccagattcccccagaagcactaccagctgtacgtgcccgagagcgcccaggtgggcagcgccgtgggcaagatcaaggccaacgacgccgacaccggcagcaacgccgacatgacctacagcatcatcaacggcgacggcatgggcatcttcagcatcagcaccgacaaggagaccagagagggcatcctgagcctgaagaagcccctgaactacgagaagaagaagagctacaccctgaacatcgagggcgccaacacccacctggacttcagattcagccacctgggccccttcaaggacgccaccatgctgaagatcatcgtgggcgacgtggacgagccccccctgttcagcatgcccagctacctgatggaggtgtacgagaacgccaagatcggcaccgtggtgggcaccgtgctggcccaggaccccgacagcaccaacagcctggtgagatacttcatcaactacaacgtggaggacgacagattcttcaacatcgacgccaacaccggcaccatcagaaccaccaaggtgctggacagagaggagaccccctggtacaacatcaccgtgaccgccagcgagatcgacaaccccgacctgctgagccacgtgaccgtgggcatcagagtgctggacgtgaacgacaacccccccgagctggccagagagtacgacatcatcgtgtgcgagaacagcaagcccggccaggtgatccacaccatcagcgccaccgacaaggacgacttcgccaacggccccagattcaacttcttcctggacgagagactgcccgtgaaccccaacttcaccctgaaggacaacgaggccgccgcccccagccccagcggcttcgtgcacgccagagagatgggcgtgtgcggccccgccatgcagaagcccagctgccccagactggtgtag

SEQ ID NO: 65359 - protein, 428 aa, Artificial Sequence
  derived and/or modified sequence
MSHPSWLPPKSTGEPLGHVPARMETTHSFGNPSISVSTQQPPKKFAPVVAPKPKYNPYKQPGGEGDFLPPPPPPLDDSSALPSISGNFPPPPPLDEEAFKVQGNPGGKTLEERRSSLDAEIDSLTSILADLECSSPYKPRPPQSSTGSTASPPVSTPVTGHKRMVIPNQPPLTATKKSTLKPQPAPQAGPIPVAPIGTLKPQPQPVPASYTTASTSSRPTFNVQVKSAQPSPHYMAAPSSGQIYGSGPQGYNTQPVPVSGQCPPPSTRGGMDYAYIPPPGLQPEPGYGYAPNQGRYYEGYYAAGPGYGGRNDSDPTYGQQGHPNTWKREPGYTPPGAGNQNPPGMYPVTGPKKTYITDPVSAPCAPPLQPKGGHSGQLGPSSVAPSFRPEDELEHLTKKMLYDMENPPADEYFGEWGLELTSEVTILL

SEQ ID NO: 65360 - DNA, 1839 bp, Artificial Sequence
  derived and/or modified sequence
atgagtcacccatcttggctaccccccaaatccactggggaacccctggggcacgttcccgctcgtatggaaaccacacatagctttggaaatcctagcatttcggtctctacgcagcagcctcccaagaagttcgcccccgtggtagctcccaagcctaagtataatccttataagcagcccgggggggagggagatttcctccctccaccacccccccctttagacgatagctcagcgctcccaagcatctctgggaacttccccccccctcctccgctcgacgaggaggcattcaaggttcagggtaaccctggcggcaaaaccctggaagagaggagatcaagcctagacgcggagatcgatagtttgacctcaattcttgccgatctggagtgttcaagtccgtacaagccccgccctccccagtcttctacaggatccacggccagcccacccgtgagtacgcctgtgacaggccataagcgtatggtcatacctaatcagcctccactgacggccactaagaagtctacccttaaaccccagcctgctcctcaggctgggcctatacccgtggcccctatcgggaccctcaagcctcagccccagccagtcccggcatcttacacaacagcatcaacaagctctagaccaacttttaatgtccaggtgaagagcgctcagccgtcccctcactatatggccgccccatccagcggacagatttacggctccggaccccagggctataacacacagcccgtgcctgtatcgggccagtgtccccctcctagcacaaggggaggaatggattatgcttacatcccaccacccgggctgcagcccgaaccgggttacggctacgctccgaatcagggaagatattacgagggttattacgctgcaggcccaggctacggtgggaggaatgattctgatccaacctatgggcagcaaggccacccgaatacttggaagagggagccaggctacactcctcctggcgctggaaaccagaacccccctggaatgtaccccgtgacaggccctaagaaaacttacattactgaccctgttagcgccccgtgcgcgcctcccttacagccaaaaggcggccattctggacagctgggtccttcttcggttgcaccttctttcaggccggaagacgagctggagcatttaactaagaagatgctgtatgatatggagaatccaccggcagatgaatactttggcagatgtgcaagatgtggagaaaatgtggtaggggagggcaccggctgtaccgccatggaccaggtgttccacgtggattgcttcacctgtatcatttgcaataataagctcagaggccagcctttttatgccgttgagaagaaggcgtactgtgaaccatgctatattaatacgctcgagcagtgtaacgtttgctctaagcctatcatggagagaatactgcgggctacaggcaaggcctaccacccacattgtttcacctgcgtcatgtgtcacaggtccctagacggcattccattcaccgttgatgcagggggattaattcattgtattgaggactttcacaaaaagttcgcacctcgttgcagcgtctgcaaggaaccaatcatgccagccccaggccaggaggagactgtgaggatcgtggccttggatagggactttcacgtgcattgttaccgatgcgaggactgcggaggcttgctgtccgaaggggataaccaaggctgctatccactcgacggccacattttgtgcaagacgtgcaatagcgctagaataagagtgctcaccgcgaaggccagtaccgatttatag

SEQ ID NO: 65361 - DNA, 1839 bp, Artificial Sequence
  derived and/or modified sequence
atgagtcatccttcttggcttccgccaaagtcgaccggggaaccactaggacatgtgcctgctcgtatggaaacgacgcacagcttcgggaacccaagcatttctgtatccacacagcagcctccaaaaaagtttgctcctgtggttgcccccaagcctaagtacaacccttataagcaaccaggaggagaaggcgatttcttacccccaccacccccccccctggatgattcatccgccttaccttccatttctggtaatttccctcccccgcctcctttagatgaagaggccttcaaagtccaaggaaacccaggcggtaagactctggaggagcgtcgatcttcgctcgatgcagaaatcgattcactgacaagcatactagcggatttagagtgctcctcaccatacaaacctaggcccccacagtcctcaactggatcgactgcctccccccctgtgtctactcccgtgaccgggcataaacgcatggtgatacccaatcaaccgccccttaccgctaccaaaaaatccactctgaagccacagccagcaccccaagctggacctatccctgtggcccctattggaaccctgaagcctcagcctcagcctgtgcctgcctcctatactacagcatctactagctcgcggccaacgttcaatgtacaggtcaaatccgcccagcccagcccccattacatggctgccccaagctctggccagatttacggctctggtccccagggctacaacacccagccagtaccagtgagcgggcagtgtcccccaccctcgacccggggcggaatggactacgcatacattccaccacccgggctccagcctgagcctggttatgggtacgcacctaatcagggccgatactatgaaggctactacgctgccggcccaggctacgggggaagaaacgactccgatcctacctatgggcagcaaggccaccctaacacatggaaaagagaaccaggatacacccccccaggagctgggaatcaaaatccacccgggatgtaccctgtgactgggccaaagaaaacctacattacggatcctgtcagtgcaccctgcgccccgcccctgcaaccaaagggaggccacagcggccagctaggaccatcaagtgtcgccccatccttcaggccagaagatgagcttgagcatctgactaaaaaaatgttatatgacatggaaaacccccctgctgacgaatatttcggccggtgtgcgaggtgcggagaaaacgtcgtgggcgaaggcacgggatgcaccgccatggaccaagtgtttcatgtcgactgcttcacctgcattatttgcaacaacaagctccgtggacagccattctatgccgtggaaaaaaaggcctactgcgagccttgttatattaatacgctagaacagtgcaacgtgtgttcgaaaccaatcatggaacgcattctgcgggcgacaggcaaggcctaccatccccattgttttacttgcgtgatgtgtcaccgctcactggacggaattccattcaccgtcgatgctggagggctgatccattgtatcgaggattttcacaaaaaatttgccccgcgctgttccgtgtgcaaagagcctataatgcctgcacccggtcaagaggaaaccgtgcgaatagttgctctggacagagactttcacgttcactgttaccgatgcgaggattgtgggggattgctcagcgagggggacaaccagggttgttaccccctcgacggccatattctgtgtaaaacttgtaacagcgcgaggatcagagttctcacagccaaggcctccaccgatctctag

SEQ ID NO: 65362 - DNA, 1839 bp, Artificial Sequence
  derived and/or modified sequence
atgagccaccccagctggctgccccccaagagcactggagagcccctgggccacgtgcctgccaggatggagaccacccacagctttggaaaccccagcatctctgtgtccacccagcagccccccaagaagtttgcccctgtggtggcccccaagcccaagtacaacccctacaagcagcctggaggagagggggacttcctgcccccacctcctccacccctggatgacagcagcgccctgcccagcatcagcggcaacttccccccacctccacccctggatgaggaggccttcaaggtgcagggcaaccctgggggcaagaccctggaggagaggaggagcagcctggatgctgagattgacagcctgaccagcatcctggccgacctggagtgcagcagcccctacaagcccaggcctccccagagcagcacaggcagcacagccagcccccctgtgtccacccctgtgacaggccacaagaggatggtgatccccaaccagccccccctgacagccaccaagaagagcaccctgaagccccagcctgccccccaggccggccccatccctgtggcccccatcggcaccctgaagccccagccccagcctgtgcctgccagctacaccacagccagcaccagcagccggcccaccttcaacgtgcaggtgaagagcgcccagcccagcccccactacatggccgcccccagcagcggccagatctacggcagcggcccccagggctacaacacccagcctgtgcctgtgtctggccagtgccccccacccagcacccggggcggcatggactatgcctacatccccccacctggcctgcagcctgagcccggctacggctacgcccccaaccagggccgctactatgagggctactatgctgctggccctggctatggaggaagaaatgacagcgaccccacctacggccagcagggccaccccaacacctggaagcgggagcccggctacaccccacctggagctggcaaccagaaccccccaggcatgtaccctgtgacaggccccaagaagacctacatcacagatcctgtgtctgccccctgtgccccacccctgcagcccaagggcggccacagcggccagctgggccccagctctgtggcccccagcttccggccagaagatgagctggagcacctgaccaagaagatgctgtatgacatggagaaccccccagcagatgagtacttcggccgctgtgcccgctgtggagaaaatgtggtgggggagggcaccggctgcacagccatggaccaggtgttccacgtggactgcttcacctgcatcatctgcaacaacaagctgcggggccagcccttctatgctgtggagaagaaggcctactgtgagccctgctacatcaacaccctggagcagtgcaatgtgtgcagcaagcccatcatggagcgcatcctgcgggccaccgggaaggcctaccacccccactgcttcacctgtgtgatgtgccacaggagcctggatggcatccccttcaccgtggatgctgggggcctcatccactgcatcgaggacttccacaagaagtttgccccccgctgcagcgtgtgcaaggagcccatcatgcctgcccctggccaggaggagaccgtgagaattgtggccctggaccgggacttccacgtgcactgctaccgctgtgaggactgtggcggcctgctgtctgagggggacaaccagggctgctaccccctggatggccacatcctgtgcaagacctgcaacagcgcccgcatccgggtgctgacagccaaggccagcacagacctgtag

SEQ ID NO: 65363 - DNA, 1839 bp, Artificial Sequence
  derived and/or modified sequence
atgagccaccccagctggctgccccccaagagcaccggcgagcccttgggtcatgttcccgcccgcatggagacaacacattccttcggcaacccttccatcagcgtcagcacccaacagccccccaaaaaattcgccccggtcgttgccccaaagccaaaatataatccgtataagcagcccgggggggagggcgacttcctccctccccctcctcctccactggacgactccagtgccttgccatctattagtggcaatttcccaccaccacctcccctcgacgaggaagcattcaaagtgcaaggtaaccctggtggcaaaactttggaggagagacggtcctcactggacgctgagatagactcgttaacctcaatactggccgatttggagtgctcgtctccttataagccgcgacctccacaatccagtacgggatccaccgcatctcctcccgtgtctactcctgttactggccacaagcggatggttatcccgaaccagcctcccctcaccgcaaccaagaagtctaccctgaagcctcagcctgccccacaagcaggcccaatccctgtcgcacctatagggacactgaagccacaaccccagccagtgccagccagttatacaaccgcctctacctcaagtcgcccaactttcaacgtacaggtaaagtcggcacaaccctcccctcactacatggccgctccctccagcgggcagatatacggctccggaccccagggttataatacacagcccgtccccgtatcaggccaatgcccccctccttcgacacgaggaggcatggattacgcatatatcccgcccccaggccttcaaccagagccaggatatggatatgcaccaaatcaggggcgttattacgagggatactacgctgctggacccgggtacggcggtcggaatgattccgatcctacgtatgggcaacagggccaccccaacacgtggaagcgtgaaccaggttatacccccccgggcgctgggaatcagaacccccccggcatgtaccctgtgacaggtccaaagaaaacctacattaccgaccccgtgtctgccccgtgtgccccaccactacagcctaaaggtggtcattccggccagttgggtccctccagcgtggcgccaagctttagaccagaagacgaactggaacacctcacgaagaaaatgctctatgacatggagaatccgccagccgacgaatactttggcaggtgtgctagatgtggtgagaacgtggtaggcgaagggacagggtgtaccgctatggaccaagtctttcacgtcgattgctttacttgtataatctgtaataataagctgcgcggtcagccgttttatgctgtggaaaaaaaggcttattgcgagccatgctacataaatacattagagcaatgtaacgtgtgctccaagccgattatggaacgcattctcagggccaccgggaaggcttaccaccctcactgcttcacctgcgttatgtgtcataggagcctagacggtattccatttaccgtagacgctgggggactgatccattgtatcgaagactttcacaaaaagttcgctcctcgatgttccgtgtgcaaggagcccatcatgccggccccagggcaggaagagacggtgagaatcgtggcactggaccgcgatttccacgtccactgctaccgttgtgaggattgcggcgggctcctttctgagggcgataatcagggttgctatcctttggacggtcatatactgtgtaaaacctgtaacagcgcgagaatccgagtcttgaccgccaaggcctcaacagatctgtag

SEQ ID NO: 65364 - DNA, 1839 bp, Artificial Sequence
  derived and/or modified sequence
atgagccaccccagctggctgccccccaagagcaccggcgagcccctggggcacgtcccggcaaggatggagactacacacagcttcgggaatccgtctatctctgtaagtacccagcagccgccgaaaaagttcgctcctgtggtcgcccctaagcccaagtataatccgtacaagcagcctggcggcgaaggggattttctcccccccccgcctccgcctttggatgactctagtgccttgccatctattagcggaaacttccccccccctcctccattagatgaggaggcatttaaagtacagggaaacccgggtggaaaaacactggaggaaaggcgctctagcctggatgctgagatcgattcgcttacatcaatcttggctgatctggagtgtagttcaccctacaaaccaagacctccccagagcagcactggcagcaccgcaagcccaccggttagtacccctgtcacgggccataagagaatggtcattccaaatcagcctccattaaccgcaactaagaaaagtacacttaagcctcagcccgcccctcaagctggtcccattcctgtagccccgattggcacactcaaaccccagccacaaccagttccagccagctataccaccgccagcacaagctccagacccacattcaacgtgcaggtaaagagtgcacagccctctcctcactacatggccgctcctagctcagggcagatatacggctccggaccccaggggtacaacacacagcctgtcccagtatccggccagtgccctcctcccagcacacgtggcggcatggattatgcttacataccccctcctggtctgcagccggaacctggttacggctacgcccccaatcagggccggtactacgagggatactatgcggcagggcccggatatggagggcgcaatgattccgaccccacatacgggcagcagggccacccgaacacttggaagagagagcctggctacactccacccggcgctggcaaccagaatccgccaggaatgtaccctgtcaccgggccaaagaagacatacatcactgacccggtgagcgccccatgcgcccctcccctacaacccaagggggggcactcgggccagctcggtccttcttccgttgcccctagcttccgccccgaggatgagctggaacacctgacaaagaagatgctatacgacatggaaaatcccccggcagatgagtacttcggtagatgcgcccggtgcggggagaacgtagtcggcgagggaaccggctgtaccgccatggatcaagtcttccacgttgactgtttcacttgcatcatctgcaacaacaagctgagagggcagccattttacgccgtggagaagaaagcgtactgtgagccgtgctacattaatactctggaacagtgtaacgtgtgctctaagccaattatggagagaatcctgcgagccaccggcaaagcttaccacccacattgtttcacttgcgtcatgtgtcaccggtcactggatggcatccccttcacggttgatgcaggcggcctgatccattgcatcgaagattttcacaaaaagttcgccccccgctgtagcgtgtgcaaagagccaattatgcctgccccgggccaagaggaaacggtccgtatcgttgcacttgaccgtgatttccatgtccattgttataggtgtgaggattgcggaggcctgctctccgagggggataaccagggttgctatccactcgacggtcatattctgtgtaagacctgcaacagcgccagaatccgggtgcttacagccaaggcttcaacagatctgtag

SEQ ID NO: 65365 - DNA, 1839 bp, Artificial Sequence
  derived and/or modified sequence
atgagccatccatcttggctgccaccgaagtcaacaggcgagcccctcgggcatgttcctgccaggatggagacgacccattcgttcgggaacccatccatctccgtgtccacacagcagcctcctaaaaaattcgcgccagtggtcgcacctaagcccaagtacaatccctataagcagcctgggggagagggagactttttgcctccaccaccacctcctctcgacgattcatcagcccttcctagtatttctgggaacttcccacccccaccccctttagacgaggaagccttcaaggtgcagggaaatcccggaggcaagaccttagaggagcgcaggtcatctctggacgcagagatcgactctctgacctccatcttggccgatctggaatgttcctccccctacaagcctcgaccgcctcagtcaagcacaggatctacggccagtccgccagtaagcacccccgttaccggccacaaacggatggtcatcccgaatcagcccccactgaccgctacaaaaaaaagtaccctgaagcctcagcccgcaccccaggcaggacccattcctgtggcccctattggcaccttaaaaccccaacctcagcctgtgccagcctcatacacgacagcgagtacttcttctcgacccacttttaacgtgcaggtgaagagtgcgcaaccatcaccgcattacatggcagcgccatcaagcggacagatttatggttccggaccccagggttacaacacacagccagtaccggtgtcgggacaatgtcctccaccatcaacacgcggaggtatggattacgcttacattcccccaccaggtctccagcctgaacccggatacgggtacgcgcctaatcagggcagatactatgaagggtattatgccgctggtccagggtatggtgggagaaacgacagcgaccctacttacggccagcagggacaccctaacacttggaaaagggagcccggatacacacctccaggcgcagggaatcaaaatccacccggaatgtaccccgtgacaggaccgaagaagacatacattaccgacccagtgtctgcgccttgcgccccaccgttgcagcctaaagggggtcattcagggcagctcggtccaagcagcgtggccccttcgtttaggccagaagacgaattggagcacctgactaaaaagatgctgtacgacatggaaaatcccccagccgacgaatactttggaagatgcgcacgctgcggtgaaaacgtggttggcgaggggaccggctgtaccgccatggatcaggtgttccatgtcgattgtttcacttgcatcatttgtaataataaattacgaggacagccattctacgccgtggaaaaaaaagcttattgcgagccgtgctacattaacacactggaacaatgcaacgtctgttccaagcctattatggaaaggatcctgcgggctacaggtaaagcctatcacccccactgtttcacatgtgtcatgtgccaccgatccctggatgggattccttttacagtggacgccggtggacttatccactgcatagaagatttccacaagaaattcgctcctaggtgctctgtttgtaaagagcctatcatgcccgcacctggccaggaggagaccgtgcggatcgttgctcttgacagggactttcacgttcattgttaccgctgcgaagactgcgggggactcctctctgaaggggacaaccaaggatgttacccacttgacgggcacatcctgtgcaaaacctgcaatagtgcccgaattcgagtacttacagcaaaggcttctactgacttgtag

SEQ ID NO: 65366 - DNA, 1839 bp, Artificial Sequence
  derived and/or modified sequence
atgagccacccatcgtggcttccccctaaatcaactggggagcctttgggccacgtcccagccagaatggaaaccacacattctttcggcaacccctccatctctgttagcacgcaacagcccccaaagaaattcgctcccgtggttgcacccaagccgaaatataacccgtacaaacagccaggtggggagggcgattttttgccacccccaccaccacccctggacgatagttcagctttacctagtatctcgggcaactttccccctccgccaccactagatgaggaagcgtttaaagtacagggaaatcctgggggaaaaaccttagaagaacgcaggtccagcctcgatgcagagatagactctctgacaagcattctggccgatctggaatgctcatccccttataagcctcgcccaccccagtccagcacaggttcgacagcctccccacccgtgtccacacctgttaccgggcataaacgcatggttattccaaatcagccccctctgacggcgactaagaagtctacactcaaaccccagccagcccctcaggccggacctatccctgtggcgccaattggcactcttaaaccgcagccccagcccgtgcccgctagctacacaacagcctcaacgtccagccgcccaacatttaacgtgcaggtgaagtctgcccaaccatccccccattacatggctgctccctctagcggccagatctacggatctggcccacagggttataatacccagcctgtgccagtctctggacagtgcccacctcccagtacacggggagggatggactatgcttacatcccccctcccggactccagcctgagcccggatacggatacgcacctaatcaaggcagatattatgaaggttattacgccgcaggtccgggatacgggggaagaaacgacagcgaccctacgtatggacagcaggggcacccgaatacgtggaagcgtgagccaggctatacgcccccaggggctggcaaccaaaatccaccaggcatgtacccagtgacgggtcccaagaaaacttacatcaccgaccctgttagtgctccgtgtgcccctccgctgcagcccaagggaggccactccggacagttgggcccatccagtgtagctccttcatttcgccctgaggacgaactggaacatcttaccaagaagatgctctacgacatggagaacccacctgctgatgaatacttcgggaggtgtgcgagatgtggggagaatgttgttggggaaggtacggggtgtacagccatggatcaggtgtttcacgtcgactgtttcacttgtattatatgtaacaacaagctgcggggtcagcccttctatgcggtggagaaaaaggcttactgcgagccttgttatattaatactttggaacaatgcaatgtgtgctctaaacctattatggaacgtatcctgcgtgcaacggggaaggcttaccacccacattgttttacctgtgtcatgtgccaccggagtctcgacggcattccttttactgtggacgcgggtggactgatacattgcatcgaagactttcacaagaaatttgcacccaggtgttcggtgtgcaaagagccgatcatgcctgctcctggccaagaggaaaccgtacggatcgtcgcactcgaccgggactttcatgttcattgttacaggtgcgaagactgtggtggcctgttgtccgagggagacaaccagggctgctatcccctggacggccacatcttatgtaaaacttgcaacagtgcgagaatcagggtgctcacagccaaggcctctactgacctttag

SEQ ID NO: 65367 - DNA, 1839 bp, Artificial Sequence
  derived and/or modified sequence
atgagccaccccagctggctgccccccaagagcaccggcgagcccctgggccacgtgcccgccagaatggagaccacccacagcttcggcaaccccagcatcagcgtgagcacccagcagccccccaagaagttcgcccccgtggtggcccccaagcccaagtacaacccctacaagcagcccggcggcgagggcgacttcctgccccccccccccccccccctggacgacagcagcgccctgcccagcatcagcggcaacttccccccccccccccccctggacgaggaggccttcaaggtgcagggcaaccccggcggcaagaccctggaggagagaagaagcagcctggacgccgagatcgacagcctgaccagcatcctggccgacctggagtgcagcagcccctacaagcccagacccccccagagcagcaccggcagcaccgccagcccccccgtgagcacccccgtgaccggccacaagagaatggtgatccccaaccagccccccctgaccgccaccaagaagagcaccctgaagccccagcccgccccccaggccggccccatccccgtggcccccatcggcaccctgaagccccagccccagcccgtgcccgccagctacaccaccgccagcaccagcagcagacccaccttcaacgtgcaggtgaagagcgcccagcccagcccccactacatggccgcccccagcagcggccagatctacggcagcggcccccagggctacaacacccagcccgtgcccgtgagcggccagtgccccccccccagcaccagaggcggcatggactacgcctacatccccccccccggcctgcagcccgagcccggctacggctacgcccccaaccagggcagatactacgagggctactacgccgccggccccggctacggcggcagaaacgacagcgaccccacctacggccagcagggccaccccaacacctggaagagagagcccggctacaccccccccggcgccggcaaccagaacccccccggcatgtaccccgtgaccggccccaagaagacctacatcaccgaccccgtgagcgccccctgcgccccccccctgcagcccaagggcggccacagcggccagctgggccccagcagcgtggcccccagcttcagacccgaggacgagctggagcacctgaccaagaagatgctgtacgacatggagaacccccccgccgacgagtacttcggcagatgcgccagatgcggcgagaacgtggtgggcgagggcaccggctgcaccgccatggaccaggtgttccacgtggactgcttcacctgcatcatctgcaacaacaagctgagaggccagcccttctacgccgtggagaagaaggcctactgcgagccctgctacatcaacaccctggagcagtgcaacgtgtgcagcaagcccatcatggagagaatcctgagagccaccggcaaggcctaccacccccactgcttcacctgcgtgatgtgccacagaagcctggacggcatccccttcaccgtggacgccggcggcctgatccactgcatcgaggacttccacaagaagttcgcccccagatgcagcgtgtgcaaggagcccatcatgcccgcccccggccaggaggagaccgtgagaatcgtggccctggacagagacttccacgtgcactgctacagatgcgaggactgcggcggcctgctgagcgagggcgacaaccagggctgctaccccctggacggccacatcctgtgcaagacctgcaacagcgccagaatcagagtgctgaccgccaaggccagcaccgacctgtag

SEQ ID NO: 65368 - protein, 93 aa, Artificial Sequence
  derived and/or modified sequence
MSHPSWLPPKSTGEPLGHVPARMETTHSFGNPSISVSTQQPPKKFAPVVAPKPKYNPYKQPGGEGDFLPPPPPPLDDSSALPSISGNFPPPPP

SEQ ID NO: 65369 - protein, 151 aa, Artificial Sequence
  derived and/or modified sequence
MSHPSWLPPKSTGEPLGHVPARMETTHSFGNPSISVSTQQPPKKFAPVVAPKPKYNPYKQPGGEGDFLPPPPPPLDDSSALPSISGNFPPPPPLDEEAFKVQGNPGGKTLEERRSSLDAEIDSLTSILADLECSSPYKPRPPQSSTGSTAS

SEQ ID NO: 65370 - protein, 111 aa, Artificial Sequence
  derived and/or modified sequence
MSHPSWLPPKSTGEPLGHVPARMETTHSFGNPSISVSTQQPPKKFAPVVAPKPKYNPYKQPGGEGDFLPPPPPPLDDSSALPSISGNFPPPPPLDEEAFKVQGNPGGKTLE

SEQ ID NO: 65371 - protein, 66 aa, Artificial Sequence
  derived and/or modified sequence
MSHPSWLPPKSTGEPLGHVPARMETTHSFGNPSISVSTQQPPKKFAPVVAPKPKYNPYKQPGGEGD

SEQ ID NO: 65372 - protein, 53 aa, Artificial Sequence
  derived and/or modified sequence
MSHPSWLPPKSTGEPLGHVPARMETTHSFGNPSISVSTQQPPKKFAPVVAPKP

SEQ ID NO: 65373 - protein, 47 aa, Artificial Sequence
  derived and/or modified sequence
MSHPSWLPPKSTGEPLGHVPARMETTHSFGNPSISVSTQQPPKKFAP

SEQ ID NO: 65374 - protein, 65 aa, Artificial Sequence
  derived and/or modified sequence
MSHPSWLPPKSTGEPLGHVPARMETTHSFGNPSISVSTQQPPKKFAPVVAPKPKYNPYKQPGGEG

SEQ ID NO: 65375 - protein, 57 aa, Artificial Sequence
  derived and/or modified sequence
MSHPSWLPPKSTGEPLGHVPARMETTHSFGNPSISVSTQQPPKKFAPVVAPKPKYNP

SEQ ID NO: 65376 - protein, 435 aa, Artificial Sequence
  derived and/or modified sequence
MIWKRSAVLRFYSVCGLLLQGSQGQFPLTQNVTVVEGGTAILTCRVDQNDNTSLQWSNPAQQTLYFDDKKALRDNRIELVRASWHELSISVSDVSLSDEGQYTCSLFTMPVKTSKAYLTVLGVPEKPQISGFSSPVMEGDLMQLTCKTSGSKPAADIRWFKNDKEIKDVKYLKEEDANRKTFTVSSTLDFRVDRSDDGVAVICRVDHESLNATPQVAMQVLEIHYTPSVKIIPSTPFPQEGQPLILTCESKGKPLPEPVLWTKDGGELPDPDRMVVSGRELNILFLNKTDNGTYRCEATNTIGQSSAEYVLIVHDVPNTLLPTTIIPSLTTATVTTTVAITTSPTTSATTSSIRDPNALAGQNGPDHALIGGIVAVVVFVTLCSIFLLGRYLARHKGTYLTNEAKGAEDAPDADTAIINAEGSQVNAEEKKEYFI

SEQ ID NO: 65377 - DNA, 1308 bp, Artificial Sequence
  derived and/or modified sequence
atgatctggaagagaagcgccgtgctgagattctacagcgtgtgcggcctgctgctgcagggcagccagggccagttccccctgacccagaacgtgaccgtggtggagggcggcaccgccatcctgacctgcagagtggaccagaacgacaacaccagcctgcagtggagcaaccccgcccagcagaccctgtacttcgacgacaagaaggccctgagagacaacagaatcgagctggtgagagccagctggcacgagctgagcatcagcgtgagcgacgtgagcctgagcgacgagggccagtacacctgcagcctgttcaccatgcccgtgaagaccagcaaggcctacctgaccgtgctgggcgtgcccgagaagccccagatcagcggcttcagcagccccgtgatggagggcgacctgatgcagctgacctgcaagaccagcggcagcaagcccgccgccgacatcagatggttcaagaacgacaaggagatcaaggacgtgaagtacctgaaggaggaggacgccaacagaaagaccttcaccgtgagcagcaccctggacttcagagtggacagaagcgacgacggcgtggccgtgatctgcagagtggaccacgagagcctgaacgccaccccccaggtggccatgcaggtgctggagatccactacacccccagcgtgaagatcatccccagcacccccttcccccaggagggccagcccctgatcctgacctgcgagagcaagggcaagcccctgcccgagcccgtgctgtggaccaaggacggcggcgagctgcccgaccccgacagaatggtggtgagcggcagagagctgaacatcctgttcctgaacaagaccgacaacggcacctacagatgcgaggccaccaacaccatcggccagagcagcgccgagtacgtgctgatcgtgcacgacgtgcccaacaccctgctgcccaccaccatcatccccagcctgaccaccgccaccgtgaccaccaccgtggccatcaccaccagccccaccaccagcgccaccaccagcagcatcagagaccccaacgccctggccggccagaacggccccgaccacgccctgatcggcggcatcgtggccgtggtggtgttcgtgaccctgtgcagcatcttcctgctgggcagatacctggccagacacaagggcacctacctgaccaacgaggccaagggcgccgaggacgcccccgacgccgacaccgccatcatcaacgccgagggcagccaggtgaacgccgaggagaagaaggagtacttcatctag

SEQ ID NO: 65378 - DNA, 1308 bp, Artificial Sequence
  derived and/or modified sequence
atgatctggaagcggtccgctgtgctcaggttctattccgtttgtggtctcttattacagggatctcagggtcaattcccccttactcaaaacgtgacggtcgtcgaaggtggcacagccatcctgacatgtcgagtcgaccagaacgacaatactagcctgcaatggtcgaatccagcacaacagacactttattttgacgataaaaaggcactgcgtgacaacagaattgaattagtcagagcctcttggcatgaactgtctattagcgtgtccgatgtctcgctcagtgatgaagggcagtatacttgctccctgttcactatgccagttaaaacttcaaaggcgtatttaacagtacttggtgtccccgagaagccacagatttctggcttcagttcacctgtgatggagggggatctgatgcagcttacttgtaaaacatctggtagcaaacccgctgcagacatacggtggtttaagaacgacaaggaaatcaaggacgtgaaatacttaaaagaagaggacgccaatcgcaagacctttacagtctcctctacattggactttagggttgaccgatctgatgacggtgttgctgttatttgtagagtggatcacgagtccctaaacgccacaccccaggtagccatgcaggttttggaaattcactacactccttccgttaaaatcatcccctcaacaccattcccgcaggaaggacagccactgatcctgacctgcgaatccaaaggaaaaccgctccccgagcccgttctgtggacgaaagatgggggtgagttgcctgatccggaccggatggtcgtgtccgggagggagctcaatattctgtttctgaacaaaacagataacgggacttataggtgcgaagccactaataccataggccagagcagcgccgaatatgtgctcatagtccatgatgtgccgaacacccttttgcctacgacaattattccatccttgacaaccgccaccgtaaccacaacggttgcgatcactacttctcccaccacctcagcaactacctctagtatacgggatcccaatgctttggcagggcagaacgggccagaccatgctttgatcggcgggatcgtcgcagtggtggttttcgttaccctttgcagtatcttcctgctggggagatacttggctcggcacaagggcacatatttaacaaatgaggccaagggcgctgaggacgcacctgatgcagacaccgcgatcataaatgccgagggatcacaggttaatgccgaagaaaaaaaggagtactttatctag

SEQ ID NO: 65379 - DNA, 1308 bp, Artificial Sequence
  derived and/or modified sequence
atgatctggaagaggtctgctgtgctgcgcttctacagcgtgtgtggcctgctgctgcagggcagccagggccagttccccctgacccagaatgtgacagtggtggagggcggcacagccatcctgacctgccgggtggaccagaatgacaacaccagcctgcagtggagcaacccagcccagcagaccctgtactttgatgacaagaaggccctgcgggacaacagaattgagctggtgcgggcctcctggcatgagctgagcatctctgtgtctgatgtgtccctgagtgatgagggccagtacacctgcagcctcttcaccatgcctgtgaagaccagcaaggcctacctgactgtgctgggcgtgcctgagaagccccagatcagcggcttcagcagccctgtgatggagggggacctgatgcagctgacctgcaagaccagcggcagcaagccagctgctgacatccgctggttcaagaatgacaaggagatcaaggatgtgaagtacctgaaggaggaggatgccaacaggaagaccttcaccgtgagcagcaccctggacttccgggtggacagaagtgatgatggagtggccgtcatctgccgggtggaccacgagagcctgaatgccaccccccaggtggccatgcaggtgctggagatccactacacccccagcgtgaagatcatccccagcacccccttcccccaggagggccagcccctcatcctgacctgtgagagcaagggcaagcccctgcctgagcctgtgctgtggaccaaggatggaggagagctgcctgaccctgacaggatggtggtgtctggccgggagctgaacatcctcttcctgaacaagacagacaatggcacctaccgctgtgaggccaccaacaccatcggccagagcagcgcagaatatgtgctgattgtgcatgatgtgcccaacaccctgctgcccaccaccatcatccccagcctgaccacagccaccgtgaccaccaccgtggccatcaccaccagccccaccaccagcgccaccaccagcagcatccgggaccccaatgccctggccggccagaatggaccagaccacgccctgattggaggcatcgtggccgtggtggtgtttgtgaccctgtgcagcatcttcctgctgggccgctacctggcccggcacaagggcacctacctgaccaatgaggccaagggagcagaagatgccccagatgctgacacagccatcatcaatgctgagggcagccaggtgaatgctgaggagaagaaggagtacttcatctag

SEQ ID NO: 65380 - DNA, 1308 bp, Artificial Sequence
  derived and/or modified sequence
atgatctggaagcggagcgccgtgctgcggttctacagcgtgtgcggcctgctgttgcagggctcacaggggcagtttcccctgactcagaatgtcaccgtcgtggaaggtgggaccgccatcctgacatgcagggtcgatcagaatgacaatacttccctccagtggtctaatccagcacagcaaactctttatttcgacgacaaaaaagccctgcgcgacaaccgcatcgaactggtgcgcgccagctggcatgagctgagtatttctgtgtcggacgtgtcactgtccgacgaagggcagtatacctgcagcctgttcacgatgccagttaagacatcgaaagcatatctcaccgtcctgggcgtccccgagaagccccagatctccgggttttctagtccagttatggagggggatctgatgcagctaacttgcaaaacgagcgggtccaagcctgcagcagatatccggtggtttaagaacgacaaggagataaaggacgtgaaatatctgaaagaggaggacgctaataggaagacttttaccgtgtccagcacgttggacttcagggttgatagatctgacgatggcgtggctgtgatctgtcgggttgaccatgagagtctcaatgctaccccccaggtggccatgcaggtgctcgaaattcattatacacccagtgtgaagatcatcccttcaacacctttccctcaagagggccagccccttatccttacatgtgaatccaaaggcaagccccttccggagcctgttctatggacaaaagacgggggagagctgcccgatccagatagaatggtagtgagtggtagagaactcaatattttgttcctaaataaaacagataacggcacctacagatgcgaggccaccaacactattggccagagttcagccgagtatgtgctgatcgtgcacgatgtgcctaacacattactcccaacaacaattatcccatccctgaccactgcaaccgttacaaccacagtcgcaatcacgactagcccgactactagcgctaccaccagctccatcagagacccgaacgcattggccggacagaatggcccagaccacgctctgataggcggcatagtggcagttgtcgtgttcgtgaccctgtgtagtatctttctactgggccggtatctggcccggcataaggggacatatctgacaaatgaagcaaagggcgctgaagatgcccccgacgccgatacagccatcataaatgcagagggcagccaagtgaatgccgaagagaagaaggagtactttatctag

SEQ ID NO: 65381 - DNA, 1308 bp, Artificial Sequence
  derived and/or modified sequence
atgatctggaaacgcagtgctgtcttgcgattttattccgtttgcgggcttctactccagggctctcagggtcagtttccactaacacagaatgtcacagttgttgagggaggcacggcaatcctgacttgtagagtcgatcagaacgataatactagcctgcagtggtctaatccggcacagcagactctctatttcgatgacaagaaagctctgcgggataataggatagagttggtaagagcctcctggcatgagttgtccattagcgtgtcggacgtaagtctcagcgacgagggtcaatacacttgcagcctgttcactatgcccgttaagacgtcaaaggcctatctcactgtcttgggggtgccggagaaaccgcaaatttccggttttagtagccccgtgatggaaggggacctgatgcaacttacatgcaaaacaagtggatcaaagcctgctgctgacattaggtggtttaaaaacgacaaggagattaaggatgtgaagtatttgaaggaagaggatgccaatcgaaagactttcactgtatcatccacactcgattttcgcgtcgatcggagtgatgatggggttgctgtgatctgccgcgttgatcacgagtctctcaacgctactccacaggtcgcaatgcaggtgctggagattcattacacaccctcggtgaagatcatcccttctaccccatttcctcaggaaggccagccactaatccttacctgcgagtctaaagggaagccgttgcctgagcccgttctctggactaaagacggcggtgaactgcccgatcctgaccgaatggtggtgtcgggcagagagctgaacattttgttcctgaacaaaaccgataacgggacataccgctgcgaggcaacgaataccatcggacaaagctccgccgaatacgtcttgatcgtccacgacgtgcccaacaccctgcttcccacaacaataataccttctctaaccactgccaccgtgactacaacagtggccataactactagtccaacaaccagtgcgacaacatcgagcattagggatccaaacgcgctcgccggtcaaaatggaccggaccacgcacttatcggaggaattgtggctgtcgtggtcttcgtgaccttgtgctctatttttctgttgggaagatatctagcacgacataaggggacttacctgaccaatgaagccaagggggcagaagacgcgcctgacgcagacactgctattatcaatgccgaagggagccaggtcaacgctgaggaaaaaaaggaatattttatctag

SEQ ID NO: 65382 - DNA, 1422 bp, Artificial Sequence
  derived and/or modified sequence
gccccgctcaccagcatctacttgccccctcgttccttccccagccctttagagaagggaccatgatttggaaacgcagcgccgttctccgcttctacagtgtctgcgggctcctgctacaaggcagccaagggcagtttccactaacacagaatgtaaccgttgttgaaggtggaactgcaattttgacctgcagggttgatcaaaatgataacacctccctccagtggtcaaatccagctcaacagactctgtactttgacgacaagaaagctttaagggacaataggatcgagctggttcgcgcttcctggcatgaattgagtattagtgtcagtgatgtgtctctctctgatgaaggacagtacacctgttctttatttacaatgcctgtcaaaacttccaaggcatatctcaccgttctgggtgttcctgaaaagcctcagattagtggattctcatcaccagttatggagggtgacttgatgcagctgacttgcaaaacatctggtagtaaacctgcagctgatataagatggttcaaaaatgacaaagagattaaagatgtaaaatatttaaaagaagaggatgcaaatcgcaagacattcactgtcagcagcacactggacttccgagtggaccggagtgatgatggagtggcggtcatctgcagagtagatcacgaatccctcaatgccacccctcaggtagccatgcaggtgctagaaatacactatacaccatcagttaagattataccatcgactccttttccacaagaaggacagcctttaattttgacttgtgaatccaaaggaaaaccactgccagaacctgttttgtggacaaaggatggcggagaattaccagatcctgaccgaatggttgtgagtggtagggagctaaacattcttttcctgaacaaaacggataatggtacatatcgatgtgaagccacaaacaccattggccaaagcagtgcggaatatgttctcattgtgcatgatgttcccaacactttgcttcccactactatcatcccctcccttaccactgcaacagtcacaaccactgtagccataacaaccagcccaaccacatctgcaacaaccagcagcatcagagatcctaatgctttggctggccagaatggccctgaccatgctctcataggaggaatagtggctgtagttgtatttgtcacgctgtgttctatctttctgcttggtcgatatctggcaaggcataaaggaacgtatttaacaaatgaagctaaaggagctgaagatgcaccagatgctgatacagccattatcaatgctgaaggcagccaagtcaatgctgaagagaaaaaagagtatttcatttaagatgcaggccaagattctgagttttactaccaggctgaatgctggagaaaac

SEQ ID NO: 65383 - protein, 404 aa, Artificial Sequence
  derived and/or modified sequence
MIWKRSAVLRFYSVCGLLLQAAASKNKVKGSQGQFPLTQNVTVVEGGTAILTCRVDQNDNTSLQWSNPAQQTLYFDDKKALRDNRIELVRASWHELSISVSDVSLSDEGQYTCSLFTMPVKTSKAYLTVLGVPEKPQISGFSSPVMEGDLMQLTCKTSGSKPAADIRWFKNDKEIKDVKYLKEEDANRKTFTVSSTLDFRVDRSDDGVAVICRVDHESLNATPQVAMQVLEIHYTPSVKIIPSTPFPQEGQPLILTCESKGKPLPEPVLWTKDGGELPDPDRMVVSGRELNILFLNKTDNGTYRCEATNTIGQSSAEYVLIVHDPNALAGQNGPDHALIGGIVAVVVFVTLCSIFLLGRYLARHKGTYLTNEAKGAEDAPDADTAIINAEGSQVNAEEKKEYFI

SEQ ID NO: 65384 - DNA, 1215 bp, Artificial Sequence
  derived and/or modified sequence
atgatctggaagagaagcgccgtgctgagattctacagcgtgtgcggcctgctgctgcaggccgccgccagcaagaacaaggtgaagggcagccagggccagttccccctgacccagaacgtgaccgtggtggagggcggcaccgccatcctgacctgcagagtggaccagaacgacaacaccagcctgcagtggagcaaccccgcccagcagaccctgtacttcgacgacaagaaggccctgagagacaacagaatcgagctggtgagagccagctggcacgagctgagcatcagcgtgagcgacgtgagcctgagcgacgagggccagtacacctgcagcctgttcaccatgcccgtgaagaccagcaaggcctacctgaccgtgctgggcgtgcccgagaagccccagatcagcggcttcagcagccccgtgatggagggcgacctgatgcagctgacctgcaagaccagcggcagcaagcccgccgccgacatcagatggttcaagaacgacaaggagatcaaggacgtgaagtacctgaaggaggaggacgccaacagaaagaccttcaccgtgagcagcaccctggacttcagagtggacagaagcgacgacggcgtggccgtgatctgcagagtggaccacgagagcctgaacgccaccccccaggtggccatgcaggtgctggagatccactacacccccagcgtgaagatcatccccagcacccccttcccccaggagggccagcccctgatcctgacctgcgagagcaagggcaagcccctgcccgagcccgtgctgtggaccaaggacggcggcgagctgcccgaccccgacagaatggtggtgagcggcagagagctgaacatcctgttcctgaacaagaccgacaacggcacctacagatgcgaggccaccaacaccatcggccagagcagcgccgagtacgtgctgatcgtgcacgaccccaacgccctggccggccagaacggccccgaccacgccctgatcggcggcatcgtggccgtggtggtgttcgtgaccctgtgcagcatcttcctgctgggcagatacctggccagacacaagggcacctacctgaccaacgaggccaagggcgccgaggacgcccccgacgccgacaccgccatcatcaacgccgagggcagccaggtgaacgccgaggagaagaaggagtacttcatctag

SEQ ID NO: 65385 - DNA, 1215 bp, Artificial Sequence
  derived and/or modified sequence
atgatttggaaaagatcagcagtgctgcggttctattccgtgtgcggactgctgctgcaggctgcggccagtaagaacaaagtcaaaggcagccagggacaattccctctgacacagaacgtgacagtcgtcgaggggggcaccgctatattgacatgtagggtcgaccagaatgacaacacctcgttacagtggtcaaatccagctcagcagacattgtactttgatgataaaaaggcccttcgcgacaaccggattgaactcgtccgggcctcttggcacgaactgtcaatttccgtttcagacgtttcactctcagatgagggccagtatacctgtagcctgtttacaatgccggtgaaaactagcaaggcctacctcacggtgctgggggtgcctgagaagccccagattagtgggttctcttcccctgtgatggagggggacctgatgcaacttacttgtaaaaccagtggctcaaaacccgctgccgacataaggtggtttaaaaacgacaaagaaatcaaagatgtcaaataccttaaggaagaagacgcaaacagaaagactttcaccgtatcttcaaccctggacttcagggtggatcggtccgacgacggagttgccgtcatttgtcgcgtggaccacgaatcgcttaacgctaccccacaagttgcgatgcaggttctcgagattcactatacaccatccgtgaaaataattccttccacacccttcccccaggagggccagcctctgatcctgacctgtgagagcaagggtaaaccactcccggaacctgtcttatggactaaagacggtggtgagttgccggaccctgacaggatggtggtgtcaggccgcgagctcaacatcttgttcctcaataagactgataatgggacctatcgatgcgaagccacaaataccatcggccagtccagtgccgagtatgtgctgatcgtgcatgatccaaacgccctcgccgggcagaacggcccagaccatgcactgatcggaggcatcgtagcagtcgttgtctttgtgacactgtgcagtatatttctgctagggaggtacctcgctcgacacaaaggcacctacctgacaaacgaggcaaaaggcgcagaggatgcaccagacgccgacacagccataatcaacgcggaaggttcccaggtgaatgcggaggagaagaaggaatattttatctag

SEQ ID NO: 65386 - DNA, 1215 bp, Artificial Sequence
  derived and/or modified sequence
atgatctggaagaggtctgctgtgctgcgcttctacagcgtgtgtggcctgctgctgcaggccgccgccagcaagaacaaggtgaagggcagccagggccagttccccctgacccagaatgtgacagtggtggagggcggcacagccatcctgacctgccgggtggaccagaatgacaacaccagcctgcagtggagcaacccagcccagcagaccctgtactttgatgacaagaaggccctgcgggacaaccgcatcgagctggtgcgggcctcctggcatgagctgagcatctctgtgtctgatgtgtccctgagtgatgagggccagtacacctgcagcctcttcaccatgcctgtgaagaccagcaaggcctacctgactgtgctgggcgtgcctgagaagccccagatcagcggcttcagcagccctgtgatggagggggacctgatgcagctgacctgcaagaccagcggcagcaagccagctgctgacatccgctggttcaagaatgacaaggagatcaaggatgtgaagtacctgaaggaggaggatgccaacaggaagaccttcaccgtgagcagcaccctggacttccgggtggacagaagtgatgatggagtggccgtcatctgccgggtggaccacgagagcctgaatgccaccccccaggtggccatgcaggtgctggagatccactacaccccatctgtgaagatcatccccagcacccccttcccccaggagggccagcccctcatcctgacctgtgagagcaagggcaagcccctgcctgagcctgtgctgtggaccaaggatggaggagagctgcctgaccctgacaggatggtggtgtctggccgggagctgaacatcctcttcctgaacaagacagacaatggcacctaccgctgtgaggccaccaacaccatcggccagagcagcgcagaatatgtgctgattgtgcatgaccccaatgccctggccggccagaatggaccagaccacgccctgattggaggcatcgtggccgtggtggtgtttgtgaccctgtgcagcatcttcctgctgggccgctacctggcccggcacaagggcacctacctgaccaatgaggccaagggagcagaagatgccccagatgctgacacagccatcatcaatgctgagggcagccaggtgaatgctgaggagaagaaggagtacttcatctag

SEQ ID NO: 65387 - DNA, 1215 bp, Artificial Sequence
  derived and/or modified sequence
atgatctggaagcggagcgccgtgctgcggttctacagcgtgtgcgggttgctgctgcaagcggccgccagcaaaaataaggttaagggttcacagggccagtttccactgacacaaaacgtcactgtcgtggaggggggtaccgcgatcctcacctgtagggtggaccagaatgataataccagccttcaatggagcaaccccgcccagcaaaccctgtatttcgacgacaagaaagcactgagagataaccggattgaactagtgcgcgcatcctggcatgagctgagtatctccgttagcgatgtgtcccttagtgacgaaggtcagtacacttgttccctcttcaccatgcctgtaaagacaagcaaagcctacttgaccgtgttgggtgtcccagagaagccgcagatctctggcttctcatcacctgtgatggaaggcgacctgatgcagctgacctgcaagactagtggcagtaaacccgccgcggatatacgatggttcaagaacgacaaagagattaaggacgtaaagtacttgaaagaggaggatgcaaatcggaagacctttacagtctcatccaccctagatttccgcgttgatcgttcagatgacggcgttgccgtaatttgcagagtggatcacgagtctctcaacgcaacaccccaagtggccatgcaggtgctcgaaattcactacacaccctccgtgaaaatcataccatccacaccattcccccaggagggacagcctcttatcctgacatgcgaaagcaaaggcaagcctctgcctgagcccgtgttgtggacgaaagacggcggtgaactccctgatccggacagaatggtggtgagcggcagggaactcaacatcttgtttctcaacaagacagacaacggcacctacagatgcgaggccactaatacaattggccagtccagtgccgagtatgtcctcattgtgcacgatccaaacgccctggcagggcagaatgggcccgaccacgcgctcatcggagggatcgtcgccgttgtggtgttcgtcaccctgtgctctattttcctgctggggcgctacctagccaggcataaaggaacctatcttacgaacgaggcaaagggcgccgaggacgcccctgacgctgacactgccatcattaacgccgagggatcccaggtgaatgccgaggagaaaaaggagtactttatttag

SEQ ID NO: 65388 - DNA, 1215 bp, Artificial Sequence
  derived and/or modified sequence
atgatttggaagaggtccgctgtgcttagattctacagcgtctgcggcctgctcctgcaggccgctgctagcaaaaataaggtcaaggggtcccaaggccaatttcctctaacgcagaacgtaaccgttgtagagggtgggacagccatcctgacctgtcgagtggatcaaaatgacaatacttctcttcagtggagcaatcctgctcaacagaccctgtatttcgacgataagaaggcacttcgggacaaccggatcgaattagtccgcgcaagctggcatgaactcagcatttcagtgtccgatgtcagtctgagtgatgaagggcagtacacatgcagtctttttactatgcctgtcaaaaccagtaaggcgtatctgaccgtcttgggggtacccgaaaagccacagatttctggattcagctcgccagtgatggaaggcgaccttatgcagctaacctgtaagacctccggatcaaaaccagccgcagacatccgctggttcaagaacgataaggagattaaagacgtcaagtacttgaaagaggaagacgccaaccggaaaacgttcacggtgtcttcaactcttgactttagggtcgatcgcagcgacgacggggtagctgtaatttgccgtgtggatcacgaatccctgaatgctaccccccaggtcgccatgcaagtgttagagatacattatactccttccgtgaaaatcattccgagcacacctttccctcaggagggccaacctcttattctgacctgcgagtcaaaaggtaaacctctccccgaacccgttctgtggaccaaagacggaggcgagctgcctgacccagatagaatggtggtttctggtcgcgagttgaacatcctgttcctcaataagactgacaatgggacctacaggtgtgaggctaccaatactattggtcaaagttcagccgagtacgtgctcattgtccatgaccctaatgccctagccggacagaacggtcccgatcatgctctgattggcggaatcgtagccgtggttgtgtttgtgactctatgctctatattcctcttgggaaggtatctcgctcgtcacaaaggaacctacctcaccaacgaggcaaaaggagccgaagatgctccggatgccgatactgcgatcatcaacgccgagggctcacaagtgaatgcagaggaaaaaaaggagtattttatctag

SEQ ID NO: 65389 - DNA, 3853 bp, Artificial Sequence
  derived and/or modified sequence
ggtgcttcgtagagctgccgccgtcgccgctgccgctgccgccacagccgccgctgcagccggagcatccgggagccgccactgccgccgccgctgccgctgctaccgccactagcgctgcttccactgcttctacctcccctcccaggaccccgagacaccccgggcgcgagcggcagtgctgcttgcttgctcctcctctcccccagcccttcccctccgtgacctacccactccttgcagccctcgcccgcaccttctccaacaccccggcatccctgcaccacctgctcgggcagccccggcgggctctgggacttgctgtgcgcgccgagaggaaggcaagctccaaacccctgcctggaagacgggctgtcgcggctgcaccaccagcaggaggaggaggagaagaaactatttcgcgataccccattctgcgggtgctttgccgctgccgcttctgctgccgccgatccgagtccgcgggttcgaacaccgcagcggtggggacggtgggtccggcgggcgccgggaggaggacaccagcggagccctgcactctcgtgccccgctcaccagcatctacttgccccctcgttccttccccagccctttagagaagggaccatgatttggaaacgcagcgccgttctccgcttctacagtgtctgcgggctcctgctacaagcggctgcttcaaagaataaagttaaaggcagccaagggcagtttccactaacacagaatgtaaccgttgttgaaggtggaactgcaattttgacctgcagggttgatcaaaatgataacacctccctccagtggtcaaatccagctcaacagactctgtactttgacgacaagaaagctttaagggacaataggatcgagctggttcgcgcttcctggcatgaattgagtattagtgtcagtgatgtgtctctctctgatgaaggacagtacacctgttctttatttacaatgcctgtcaaaacttccaaggcatatctcaccgttctgggtgttcctgaaaagcctcagattagtggattctcatcaccagttatggagggtgacttgatgcagctgacttgcaaaacatctggtagtaaacctgcagctgatataagatggttcaaaaatgacaaagagattaaagatgtaaaatatttaaaagaagaggatgcaaatcgcaagacattcactgtcagcagcacactggacttccgagtggaccggagtgatgatggagtggcggtcatctgcagagtagatcacgaatccctcaatgccacccctcaggtagccatgcaggtgctagaaatacactatacaccatcagttaagattataccatcgactccttttccacaagaaggacagcctttaattttgacttgtgaatccaaaggaaaaccactgccagaacctgttttgtggacaaaggatggcggagaattaccagatcctgaccgaatggttgtgagtggtagggagctaaacattcttttcctgaacaaaacggataatggtacatatcgatgtgaagccacaaacaccattggccaaagcagtgcggaatatgttctcattgtgcatgatcctaatgctttggctggccagaatggccctgaccatgctctcataggaggaatagtggctgtagttgtatttgtcacgctgtgttctatctttctgcttggtcgatatctggcaaggcataaaggaacgtatttaacaaatgaagctaaaggagctgaagatgcaccagatgctgatacagccattatcaatgctgaaggcagccaagtcaatgctgaagagaaaaaagagtatttcatttaagatgcaggccaagattctgagttttactaccaggctgaatgctggagaaaactggctatcatctttcagaagtcatttctaccatcgtctgctacccttattaactcccatactgtactgctatcagtagccagtgtataccaacaatcagctgttgaaagcatcattctttaattactgtaccatccataatgcaggacatttcttactgcctaaatttcacaccattgctcttttaacatacagtgcttgaatatacagccttaacaatgttaatcatctccttggatcattatattgagtggtttttatacattaaaaaatgtatgcagagtttttttcccccattttttcccctttaagtcatagaccttatcagtttgccattggacagctttcacaagtaacaggattagggaaggacataatgtatttaagaataagtgaaggttagaggtttacaattaatgttttctacatgtctgtcttcaaagacaacatgctttggaaacatatgtcctagaaaacataaaattaaaaaaaaacactatagtgtagtttttggaatgttggagattatactggtaaagctgtatcgatttgctattgaaatatagtatttgatacaggagccatgtgtacgaattgcaatcatgacatggtattttctataattatagagatcttactattaggatattgtagcttcatttaccaataaattattccaaatgatttactgcttttggaatcacaaatatttaattcatttctctaatttgattctataatttatttgcttcataaagattcacctgcctaaacaatattgaagtatccatagggcacaattttcagacattttagtatctgtatatagtgcatataataaatccaattaaacattatttgatacatatttaacttttttggctgtatgtaattcagtcataagtaagcattttctaacgtccattatatccctttaggtattacttaaaccaatattataagtagataacatgtattagtatttttgtctgtatgtcctagcactgttcaacaacaaatttttctagttcttgttaatttttatttgttatacaatggaagcacaatgttataaggaaaggtaattttaagctaacaaccagtgcacagcctcaggttttaaattacaaccacagttgaataataacctaaaaataaattttagtttgctaaaaatttacaaattttcattttgcagttccagagctgcttacctatgttggtttgccaaaaagaagtgtttaagatatgttttctgtataaatgaactaattctttatattaaattcctgtctatgcattttgtgaggtacaaactgatgaaacagtgagtgatagagaatttctgccatgcttttaactccaaagtgaaagtctctttctctggattattttaaaattttggcgtgtttaaccattaagaaatgctgtattcttaaatatgaaacagttaatctaaagtcttattatttcttctagtaaaataaaatattgttagattagttctcattaaatttattatatgctaaagaataaaactccagttagatttaaaaaaatcccatttacaagcattgcacctttaagaagaaaacaaatatgacagtatggtagctatacttgtgatgtctgacgcatgatggcctatggttttaaaaatagtattgtggaatatatttttgggtaataagaatggttgagtgcaacatcatgtattaatatcaaatgaaagacaagggtgctgtatctttgattatttatcaaaaaagtataaatcttttaaggaaaatgttagaattttaaagtttttttttgattgttgaagcatttatcttgttgatttcttacaaaagaaaaaggacgatgtcagtcaagcagcactttttcagaatatacagaacataaataatatgatgtggttgagtgttaacataataaatcatatacagtatgacatttt

SEQ ID NO: 65390 - protein, 923 aa, Artificial Sequence [sequence omitted]

SEQ ID NO: 65391 - protein, 1093 aa, Artificial Sequence
  derived and/or modified sequence
MGGKAWPRRAVGTAGGPCAEQISAPFQTLLMPHLPLASFRPPFWGLRHSRGLPRFHSVSTQSEPHGSPISRRNREAKQKRLREKQATLEAEIAGESKSPAESIKAWRPKELVLYEIPTKPGEKKDVSGPLPPAYSPRYVEAAWYPWWVREGFFKPEYQARLPQATGETFSMCIPPPNVTGSLHIGHALTVAIQDALVRWHRMRGDQVLWVPGSDHAGIATQAVVEKQLWKERGVRRHELSREAFLREVWQWKEAKGGEICEQLRALGASLDWDRECFTMDVGSSVAVTEAFVRLYKAGLLYRNHQLVNWSCALRSAISDIEVENRPLPGHTQLRLPGCPTPVSFGLLFSVAFPVDGEPDAEVVVGTTRPETLPGDVAVAVHPDDSRYTHLHGRQLRHPLMGQPLPLITDYAVQPHVGTGAVKVTPAHSPADAEMGARHGLSPLNVIAEDGTMTSLCGDWLQGLHRFVAREKIMSVLSEWGLFRGLQNHPMVLPICSRSGDVIEYLLKNQWFVRCQEMGARAAKAVESGALELSPSFHQKNWQHWFSHIGDWCVSRQLWWGHQIPAYLVVEDHAQGEEDCWVVGRSEAEAREVAAELTGRPGAELTLERDPDVLDTWFSSALFPFSALGWPQETPDLARFYPLSLLETGSDLLLFWVGRMVMLGTQLTGQLPFSKVLLHPMVRDRQGRKMSKSLGNVLDPRDIISGVEMQVLQEKLRSGNLDPAELAIVAAAQKKDFPHGIPECGTDALRFTLCSHGVQAGDLHLSVSEVQSCRHFCNKIWNALRFILNALGEKFVPQPAEELSPSSPMDAWILSRLALAAQECERGFLTRELSLVTHALHHFWLHNLCDVYLEAVKPVLWHSPRPLGPPQVLFSCADLGLRLLAPLMPFLAEELWQRLPPRPGCPPAPSISVAPYPSACSLEHWRQPELERRFSRVQEVVQVLRALRATYQLTKARPRVLLQSSEPGDQGLFEAFLEPLGTLGYCGAVGLLPPGAAAPSGWAQAPLSDTAQVYMELQGLVDPQIQLPLLAARRYKLQKQLDSLTARTPSEGEAGTQRQQKLSSLQLELSKLDKAASHLQQLMDEPPAPGSPEL

SEQ ID NO: 65392 - protein, 1093 aa, Artificial Sequence
  derived and/or modified sequence
MGGKAWPRRAVGTAGGPCAEQISAPFQTLLMPHLPLASFRPPFWGLRHSRGLPRFHSVSTQSEPHGSPISRRNREAKQKRLREKQATLEAEIAGESKSPAESIKAWRPKELVLYEIPTKPGEKKDVSGPLPPAYSPRYVEAAWYPWWVREGFFKPEYQARLPQATGETFSMCIPPPNVTGSLHIGHALTVAIQDALVRWHRMRGDQVLWVPGSDHAGIATQAVVEKQLWKERGVRRHELSREAFLREVWQWKEAKGGEICEQLRALGASLDWDRECFTMDVGSSVAVTEAFVRLYKAGLLYRNHQLVNWSCALRSAISDIEVENRPLPGHTQLRLPGCPTPVSFGLLFSVAFPVDGEPDAEVVVGTTRPETLPGDVAVAVHPDDSRYTHLHGRQLRHPLMGQPLPLITDYAVQPHVGTGAVKVTPAHSPADAEMGARHGLSPLNVIAEDGTMTSLCGDWLQGLHRFVAREKIMSVLSEWGLFRGLQNHPMVLPICSRSGDVIEYLLKNQWFVRCQEMGARAAKAVESGALELSPSFHQKNWQHWFSHIGDWCVSRQLWWGHQIPAYLVVEDHAQGEEDCWVVGRSEAEAREVAAELTGRPGAELTLERDPDVLDTWFSSALFPFSALGWPQETPDLARFYPLSLLETGSDLLLFWVGRMVMLGTQLTGQLPFSKVLLHPMVRDRQGRKMSKSLGNVLDPRDIISGVEMQVLQEKLRSGNLDPAELAIVAAAQKKDFPHGIPECGTDALRFTLCSHGVQAGDLHLSVSEVQSCRHFCNKIWNALRFILNALGEKFVPQPAEELSPSSPMDAWILSRLALAAQECERGFLTRELSLVTHALHHFWLHNLCDVYLEAVKPVLWHSPRPLGPPQVLFSCADLGLRLLAPLMPFLAEELWQRLPPRPGCPPAPSISVAPYPSACSLEHWRQPELERRFSRVQEVVQVLRALRATYQLTKARPRVLLQSSEPGDQGLFEAFLEPLGTLGYCGAVGLLPPGAAAPSGWAQAPLSDTAQVYMELQGLVDPQIQLPLLAARRYKLQKQLDSLTARTPSEGEAGTQRQQKLSSLQLELSKLDKAASHLRQLMDEPPAPGSPEL

SEQ ID NO: 65393 - protein, 1093 aa, Artificial Sequence
  derived and/or modified sequence
MGGKAWPRRAVGTAGGPCAEQISAPFQTLLMPHLPLASFRPPFWGLRHSRGLPRFHSVSTQSEPHGSPISRRNREAKQKRLREKQATLEAEIAGESKSPAESIKAWRPKELVLYEIPTKPGEKKDVSGPLPPAYSPRYVEAAWYPWWVREGFFKPEYQARLPQATGETFSMCIPPPNVTGSLHIGHALTVAIQDALVRWHRMRGDQVLWVPGSDHAGIATQAVVEKQLWKERGVRRHELSREAFLREVWQWKEAKGGEICEQLRALGASLDWDRECFTMDVGSSVAVTEAFVRLYKAGLLYRNHQLVNWSCALRSAISDIEVENRPLPGHTQLRLPGCPTPVSFGLLFSVAFPVDGEPDAEVVVGTTRPETLPGDVAVAVHPDDSRYTHLHGRQLRHPLMGQPLPLITDYAVQPHVGTGAVKVTPAHSPADAEMGARHGLSPLNVIAEDGTMTSLCGDWLQGLHRFVAREKIMSVLSERGLFRGLQNHPMVLPICSRSGDVIEYLLKNQWFVRCQEMGARAAKAVESGALELSPSFHQKNWQHWFSHIGDWCVSRQLWWGHQIPAYLVVEDHAQGEEDCWVVGRSEAEAREVAAELTGRPGAELTLERDPDVLDTWFSSALFPFSALGWPQETPDLARFYPLSLLETGSDLLLFWVGRMVMLGTQLTGQLPFSKVLLHPMVRDRQGRKMSKSLGNVLDPRDIISGVEMQLLQEKLRSGNLDPAELAIVAAAQKKDFPHGIPECGTDALRFTLCSHGVQAGDLHLSVSEVQSCRHFCNKIWNALRFILNALGEKFVPQPAEELSPSSPMDAWILSRLALAAQECERGFLTRELSLVTHALHHFWLHNLCDVYLEAVKPVLWHSPRPLGPPQVLFSCADLGLRLLAPLMPFLAEELWQRLPPRPGCPPAPSISVAPYPSACSLEHWRQPELERRFSRVQEVVQVLRALRATYQLTKARPRVLLQSSEPGDQGLFEAFLEPLGTLGYCGAVGLLPPGTAAPSGWAQAPLSDTAQVYMELQGLVDPQIQLPLLAARRYKLQKQLDSLTARTPSEGEAGTQRQQKLSSLQLELSKLDKAASHLRQLMDEPPAPGSPEL

SEQ ID NO: 65394 - protein, 1093 aa, Artificial Sequence
  derived and/or modified sequence
MGGKAWPRRAVGTAGGPCAEQISAPFQTLLMPHLPLASFRPPFWGLRHSRGLPRFHSVSTQSEPHGSPISRRNREAKQKRLREKQATLEAEIAGESKSPAESIKAWRPKELVLYEIPTKPGEKKDVSGPLPPAYSPRYVEAAWYPWWVREGFFKPEYQARLPQATGETFSMCIPPPNVTGSLHIGHALTVAIQDALVRWHRMRGDQVLWVPGSDHAGIATQAVVEKQLWKERGVRRHELSREAFLREVWQWKEAKGGEICEQLRALGASLDWDRECFTMDVGSSVAVTEAFVRLYKAGLLYRNHQLVNWSCALRSAISDIEVENRPLPGHTQLRLPGCPTPVSFGLLFSVAFPVDGEPDAEVVVGTTRPETLPGDVAVAVHPDDSRYTHLHGRQLRHPLMGQPLPLITDYAVQPHVGTGAVKVTPAHSPADAEMGARHGLSPLNVIAEDGTMTSLCGDWLQGLHRFVAREKIMSVLSERGLFRGLQNHPMVLPICSRSGDVIEYLLKNQWFVRCQEMGARAAKAVESGALELSPSFHQKNWQHWFSHIGDWCVSRQLWWGHQIPAYLVVEDHAQGEEDCWVVGRSEAEAREVAAELTGRPGAELTLERDPDVLDTWFSSALFPFSALGWPQETPDLARFYPLSLLETGSDLLLFWVGRMVMLGTQLTGQLPFSKVLLHPMVRDRQGRKMSKSLGNVLDPRDIISGVEMQVLQEKLRSGNLDPAELAIVAAAQKKDFPHGIPECGTDALRFTLCSHGVQAGDLHLSVSEVQSCRHFCNKIWNALRFILNALGEKFVPQPAEELSPSSPMDAWILSRLALAAQECERGFLTRELSLVTHALHHFWLHNLCDVYLEAVKPVLWHSPRPLGPPQVLFSCADLGLRLLAPLMPFLAEELWQRLPPRPGCPPAPSISVAPYPSACSLEHWRQPELERRFSRVQEVVQVLRALQATYQLTKARPRVLLQSSEPGDQGLFEAFLEPLGTLGYCGAVGLLPPGAAAPSGWAQAPLSDTAQVYMELQGLVDPQIQLPLLAARRYKLQKQLDSLTARTPSEGEAGTQRQQKLSSLQLELSKLDKAASHLRQLMDEPPAPGSPEL

SEQ ID NO: 65395 - DNA, 3192 bp, Artificial Sequence
  derived and/or modified sequence
atgccccacctgcccctggccagcttcagaccccccttctggggcctgagacacagcagaggcctgcccagattccacagcgtgagcacccagagcgagccccacggcagccccatcagcagaagaaacagagaggccaagcagaagagactgagagagaagcaggccaccctggaggccgagatcgccggcgagagcaagagccccgccgagagcatcaaggcctggagacccaaggagctggtgctgtacgagatccccaccaagcccggcgagaagaaggacgtgagcggccccctgccccccgcctacagccccagatacgtggaggccgcctggtacccctggtgggtgagagagggcttcttcaagcccgagtaccaggccagactgccccaggccaccggcgagaccttcagcatgtgcatccccccccccaacgtgaccggcagcctgcacatcggccacgccctgaccgtggccatccaggacgccctggtgagatggcacagaatgagaggcgaccaggtgctgtgggtgcccggcagcgaccacgccggcatcgccacccaggccgtggtggagaagcagctgtggaaggagagaggcgtgagaagacacgagctgagcagagaggccttcctgagagaggtgtggcagtggaaggaggccaagggcggcgagatctgcgagcagctgagagccctgggcgccagcctggactgggacagagagtgcttcaccatggacgtgggcagcagcgtggccgtgaccgaggccttcgtgagactgtacaaggccggcctgctgtacagaaaccaccagctggtgaactggagctgcgccctgagaagcgccatcagcgacatcgaggtggagaacagacccctgcccggccacacccagctgagactgcccggctgccccacccccgtgagcttcggcctgctgttcagcgtggccttccccgtggacggcgagcccgacgccgaggtggtggtgggcaccaccagacccgagaccctgcccggcgacgtggccgtggccgtgcaccccgacgacagcagatacacccacctgcacggcagacagctgagacaccccctgatgggccagcccctgcccctgatcaccgactacgccgtgcagccccacgtgggcaccggcgccgtgaaggtgacccccgcccacagccccgccgacgccgagatgggcgccagacacggcctgagccccctgaacgtgatcgccgaggacggcaccatgaccagcctgtgcggcgactggctgcagggcctgcacagattcgtggccagagagaagatcatgagcgtgctgagcgagtggggcctgttcagaggcctgcagaaccaccccatggtgctgcccatctgcagcagaagcggcgacgtgatcgagtacctgctgaagaaccagtggttcgtgagatgccaggagatgggcgccagagccgccaaggccgtggagagcggcgccctggagctgagccccagcttccaccagaagaactggcagcactggttcagccacatcggcgactggtgcgtgagcagacagctgtggtggggccaccagatccccgcctacctggtggtggaggaccacgcccagggcgaggaggactgctgggtggtgggcagaagcgaggccgaggccagagaggtggccgccgagctgaccggcagacccggcgccgagctgaccctggagagagaccccgacgtgctggacacctggttcagcagcgccctgttccccttcagcgccctgggctggccccaggagacccccgacctggccagattctaccccctgagcctgctggagaccggcagcgacctgctgctgttctgggtgggcagaatggtgatgctgggcacccagctgaccggccagctgcccttcagcaaggtgctgctgcaccccatggtgagagacagacagggcagaaagatgagcaagagcctgggcaacgtgctggaccccagagacatcatcagcggcgtggagatgcaggtgctgcaggagaagctgagaagcggcaacctggaccccgccgagctggccatcgtggccgccgcccagaagaaggacttcccccacggcatccccgagtgcggcaccgacgccctgagattcaccctgtgcagccacggcgtgcaggccggcgacctgcacctgagcgtgagcgaggtgcagagctgcagacacttctgcaacaagatctggaacgccctgagattcatcctgaacgccctgggcgagaagttcgtgccccagcccgccgaggagctgagccccagcagccccatggacgcctggatcctgagcagactggccctggccgcccaggagtgcgagagaggcttcctgaccagagagctgagcctggtgacccacgccctgcaccacttctggctgcacaacctgtgcgacgtgtacctggaggccgtgaagcccgtgctgtggcacagccccagacccctgggccccccccaggtgctgttcagctgcgccgacctgggcctgagactgctggcccccctgatgcccttcctggccgaggagctgtggcagagactgccccccagacccggctgcccccccgcccccagcatcagcgtggccccctaccccagcgcctgcagcctggagcactggagacagcccgagctggagagaagattcagcagagtgcaggaggtggtgcaggtgctgagagccctgagagccacctaccagctgaccaaggccagacccagagtgctgctgcagagcagcgagcccggcgaccagggcctgttcgaggccttcctggagcccctgggcaccctgggctactgcggcgccgtgggcctgctgccccccggcgccgccgcccccagcggctgggcccaggcccccctgagcgacaccgcccaggtgtacatggagctgcagggcctggtggacccccagatccagctgcccctgctggccgccagaagatacaagctgcagaagcagctggacagcctgaccgccagaacccccagcgagggcgaggccggcacccagagacagcagaagctgagcagcctgcagctggagctgagcaagctggacaaggccgccagccacctgcagcagctgatggacgagccccccgcccccggcagccccgagctgtag

SEQ ID NO: 65396 - DNA, 2772 bp, Artificial Sequence
  derived and/or modified sequence
atgtgcatccccccccccaacgtgaccggcagcctgcacatcggccacgccctgaccgtggccatccaggacgccctggtgagatggcacagaatgagaggcgaccaggtgctgtgggtgcccggcagcgaccacgccggcatcgccacccaggccgtggtggagaagcagctgtggaaggagagaggcgtgagaagacacgagctgagcagagaggccttcctgagagaggtgtggcagtggaaggaggccaagggcggcgagatctgcgagcagctgagagccctgggcgccagcctggactgggacagagagtgcttcaccatggacgtgggcagcagcgtggccgtgaccgaggccttcgtgagactgtacaaggccggcctgctgtacagaaaccaccagctggtgaactggagctgcgccctgagaagcgccatcagcgacatcgaggtggagaacagacccctgcccggccacacccagctgagactgcccggctgccccacccccgtgagcttcggcctgctgttcagcgtggccttccccgtggacggcgagcccgacgccgaggtggtggtgggcaccaccagacccgagaccctgcccggcgacgtggccgtggccgtgcaccccgacgacagcagatacacccacctgcacggcagacagctgagacaccccctgatgggccagcccctgcccctgatcaccgactacgccgtgcagccccacgtgggcaccggcgccgtgaaggtgacccccgcccacagccccgccgacgccgagatgggcgccagacacggcctgagccccctgaacgtgatcgccgaggacggcaccatgaccagcctgtgcggcgactggctgcagggcctgcacagattcgtggccagagagaagatcatgagcgtgctgagcgagtggggcctgttcagaggcctgcagaaccaccccatggtgctgcccatctgcagcagaagcggcgacgtgatcgagtacctgctgaagaaccagtggttcgtgagatgccaggagatgggcgccagagccgccaaggccgtggagagcggcgccctggagctgagccccagcttccaccagaagaactggcagcactggttcagccacatcggcgactggtgcgtgagcagacagctgtggtggggccaccagatccccgcctacctggtggtggaggaccacgcccagggcgaggaggactgctgggtggtgggcagaagcgaggccgaggccagagaggtggccgccgagctgaccggcagacccggcgccgagctgaccctggagagagaccccgacgtgctggacacctggttcagcagcgccctgttccccttcagcgccctgggctggccccaggagacccccgacctggccagattctaccccctgagcctgctggagaccggcagcgacctgctgctgttctgggtgggcagaatggtgatgctgggcacccagctgaccggccagctgcccttcagcaaggtgctgctgcaccccatggtgagagacagacagggcagaaagatgagcaagagcctgggcaacgtgctggaccccagagacatcatcagcggcgtggagatgcaggtgctgcaggagaagctgagaagcggcaacctggaccccgccgagctggccatcgtggccgccgcccagaagaaggacttcccccacggcatccccgagtgcggcaccgacgccctgagattcaccctgtgcagccacggcgtgcaggccggcgacctgcacctgagcgtgagcgaggtgcagagctgcagacacttctgcaacaagatctggaacgccctgagattcatcctgaacgccctgggcgagaagttcgtgccccagcccgccgaggagctgagccccagcagccccatggacgcctggatcctgagcagactggccctggccgcccaggagtgcgagagaggcttcctgaccagagagctgagcctggtgacccacgccctgcaccacttctggctgcacaacctgtgcgacgtgtacctggaggccgtgaagcccgtgctgtggcacagccccagacccctgggccccccccaggtgctgttcagctgcgccgacctgggcctgagactgctggcccccctgatgcccttcctggccgaggagctgtggcagagactgccccccagacccggctgcccccccgcccccagcatcagcgtggccccctaccccagcgcctgcagcctggagcactggagacagcccgagctggagagaagattcagcagagtgcaggaggtggtgcaggtgctgagagccctgagagccacctaccagctgaccaaggccagacccagagtgctgctgcagagcagcgagcccggcgaccagggcctgttcgaggccttcctggagcccctgggcaccctgggctactgcggcgccgtgggcctgctgccccccggcgccgccgcccccagcggctgggcccaggcccccctgagcgacaccgcccaggtgtacatggagctgcagggcctggtggacccccagatccagctgcccctgctggccgccagaagatacaagctgcagaagcagctggacagcctgaccgccagaacccccagcgagggcgaggccggcacccagagacagcagaagctgagcagcctgcagctggagctgagcaagctggacaaggccgccagccacctgcagcagctgatggacgagccccccgcccccggcagccccgagctgtag

SEQ ID NO: 65397 - DNA, 3282 bp, Artificial Sequence
  derived and/or modified sequence
atgggcggcaaggcctggcccagaagagccgtgggcaccgccggcggcccctgcgccgagcagatcagcgcccccttccagaccctgctgatgccccacctgcccctggccagcttcagaccccccttctggggcctgagacacagcagaggcctgcccagattccacagcgtgagcacccagagcgagccccacggcagccccatcagcagaagaaacagagaggccaagcagaagagactgagagagaagcaggccaccctggaggccgagatcgccggcgagagcaagagccccgccgagagcatcaaggcctggagacccaaggagctggtgctgtacgagatccccaccaagcccggcgagaagaaggacgtgagcggccccctgccccccgcctacagccccagatacgtggaggccgcctggtacccctggtgggtgagagagggcttcttcaagcccgagtaccaggccagactgccccaggccaccggcgagaccttcagcatgtgcatccccccccccaacgtgaccggcagcctgcacatcggccacgccctgaccgtggccatccaggacgccctggtgagatggcacagaatgagaggcgaccaggtgctgtgggtgcccggcagcgaccacgccggcatcgccacccaggccgtggtggagaagcagctgtggaaggagagaggcgtgagaagacacgagctgagcagagaggccttcctgagagaggtgtggcagtggaaggaggccaagggcggcgagatctgcgagcagctgagagccctgggcgccagcctggactgggacagagagtgcttcaccatggacgtgggcagcagcgtggccgtgaccgaggccttcgtgagactgtacaaggccggcctgctgtacagaaaccaccagctggtgaactggagctgcgccctgagaagcgccatcagcgacatcgaggtggagaacagacccctgcccggccacacccagctgagactgcccggctgccccacccccgtgagcttcggcctgctgttcagcgtggccttccccgtggacggcgagcccgacgccgaggtggtggtgggcaccaccagacccgagaccctgcccggcgacgtggccgtggccgtgcaccccgacgacagcagatacacccacctgcacggcagacagctgagacaccccctgatgggccagcccctgcccctgatcaccgactacgccgtgcagccccacgtgggcaccggcgccgtgaaggtgacccccgcccacagccccgccgacgccgagatgggcgccagacacggcctgagccccctgaacgtgatcgccgaggacggcaccatgaccagcctgtgcggcgactggctgcagggcctgcacagattcgtggccagagagaagatcatgagcgtgctgagcgagtggggcctgttcagaggcctgcagaaccaccccatggtgctgcccatctgcagcagaagcggcgacgtgatcgagtacctgctgaagaaccagtggttcgtgagatgccaggagatgggcgccagagccgccaaggccgtggagagcggcgccctggagctgagccccagcttccaccagaagaactggcagcactggttcagccacatcggcgactggtgcgtgagcagacagctgtggtggggccaccagatccccgcctacctggtggtggaggaccacgcccagggcgaggaggactgctgggtggtgggcagaagcgaggccgaggccagagaggtggccgccgagctgaccggcagacccggcgccgagctgaccctggagagagaccccgacgtgctggacacctggttcagcagcgccctgttccccttcagcgccctgggctggccccaggagacccccgacctggccagattctaccccctgagcctgctggagaccggcagcgacctgctgctgttctgggtgggcagaatggtgatgctgggcacccagctgaccggccagctgcccttcagcaaggtgctgctgcaccccatggtgagagacagacagggcagaaagatgagcaagagcctgggcaacgtgctggaccccagagacatcatcagcggcgtggagatgcaggtgctgcaggagaagctgagaagcggcaacctggaccccgccgagctggccatcgtggccgccgcccagaagaaggacttcccccacggcatccccgagtgcggcaccgacgccctgagattcaccctgtgcagccacggcgtgcaggccggcgacctgcacctgagcgtgagcgaggtgcagagctgcagacacttctgcaacaagatctggaacgccctgagattcatcctgaacgccctgggcgagaagttcgtgccccagcccgccgaggagctgagccccagcagccccatggacgcctggatcctgagcagactggccctggccgcccaggagtgcgagagaggcttcctgaccagagagctgagcctggtgacccacgccctgcaccacttctggctgcacaacctgtgcgacgtgtacctggaggccgtgaagcccgtgctgtggcacagccccagacccctgggccccccccaggtgctgttcagctgcgccgacctgggcctgagactgctggcccccctgatgcccttcctggccgaggagctgtggcagagactgccccccagacccggctgcccccccgcccccagcatcagcgtggccccctaccccagcgcctgcagcctggagcactggagacagcccgagctggagagaagattcagcagagtgcaggaggtggtgcaggtgctgagagccctgagagccacctaccagctgaccaaggccagacccagagtgctgctgcagagcagcgagcccggcgaccagggcctgttcgaggccttcctggagcccctgggcaccctgggctactgcggcgccgtgggcctgctgccccccggcgccgccgcccccagcggctgggcccaggcccccctgagcgacaccgcccaggtgtacatggagctgcagggcctggtggacccccagatccagctgcccctgctggccgccagaagatacaagctgcagaagcagctggacagcctgaccgccagaacccccagcgagggcgaggccggcacccagagacagcagaagctgagcagcctgcagctggagctgagcaagctggacaaggccgccagccacctgcagcagctgatggacgagccccccgcccccggcagccccgagctgtag

SEQ ID NO: 65398 - DNA, 3192 bp, Artificial Sequence
  derived and/or modified sequence
atgccacacttgcccctggcttcatttcggccacccttttggggccttagacactctcggggattgcctcgctttcacagcgtgagcacccaatcggagccgcatggcagcccaatttccagacgcaatcgagaggctaagcagaaacggcttcgagagaagcaggcaacactggaggccgagattgcgggcgaatcaaagtccccagctgagtcaatcaaggcctggcgacccaaagagctggtcctttacgagatccctactaaacccggcgagaaaaaggacgtgtccggcccactgccaccagcgtattccccccgctacgtggaagccgcatggtacccctggtgggtacgcgagggattctttaaaccggaataccaggccagactccctcaagccaccggcgaaactttttctatgtgtatccctcctccaaacgtcaccggcagcctccacataggccatgctttaaccgttgctattcaggatgctttggtccgatggcatagaatgagaggcgaccaggtactgtgggtacctggctcggatcacgctggtattgcaacgcaggcagtggtggaaaaacagttgtggaaggagagaggggtaagacgccacgaattgtccagagaggcctttctcagggaagtgtggcagtggaaagaggctaagggaggggagatctgtgaacaacttcgcgccctgggagccagcctcgattgggacagagaatgtttcaccatggacgtcggaagctctgtggcagtgaccgaggcttttgttcgcctgtataaggcgggattgctctatagaaaccatcagcttgtaaactggagctgcgctttacgctcagccattagcgatattgaggttgaaaaccgcccacttccaggccacactcagctccggcttccagggtgccctactccggttagcttcggcctgctgttctcggtggcttttcccgttgatggtgagcccgacgccgaggtggtggtgggaaccactcgccccgagacccttccaggcgatgtggctgtggctgtgcaccctgacgattcaagatacactcacctgcacgggcgccagctcaggcaccccctgatgggtcagcctttacctctcatcacagactacgctgtgcagcctcacgtcggaactggagcagttaaagtcactccagctcactctcccgctgacgccgaaatgggggccagacatgggctgagtcctttgaatgtgatcgctgaggatggaaccatgacttccctgtgcggcgactggttacagggtctgcaccgattcgtggcgcgtgaaaagatcatgtcagtgctgagcgagtggggactgtttaggggcctccagaaccaccctatggtcctgcccatctgtagccgcagcggagacgtgattgagtatctactgaagaatcagtggttcgtacggtgccaggagatgggggctcgagctgcaaaggcagtggaatcaggtgcactggagctgagcccttcatttcatcagaagaactggcagcactggttttcacacattggggactggtgtgtctccagacagctttggtggggtcatcagatacccgcctacctggtggtcgaggaccatgcacagggggaggaggattgttgggttgtgggaagaagcgaggctgaggcgcgcgaggtagcagctgagctgacaggaaggcccggagccgaactgacactggagagggatccagatgtattggacacgtggttcagttctgcgcttttccctttctctgctttgggttggccccaggagacgcctgatttagcccgattttatcccctatcgctgctggaaactggaagcgatctcttattattctgggtcggtagaatggtaatgctgggcacacagctgaccggccagctcccgttctccaaggtcctgctgcatccgatggtcagggatcgacaaggaaggaagatgagtaaaagcctcggaaatgtcctcgatccacgcgacatcatctctggggtcgagatgcaggtgctgcaagagaagctccggtcagggaacctggacccggccgaacttgctatcgtggcggctgcgcagaaaaaagattttccccatggcatacccgagtgcggtaccgacgccttgaggttcactctttgttctcatggcgttcaagccggagatctccatctatcagtcagcgaagtccagagctgcagacatttctgtaacaaaatttggaatgccttaaggtttatactcaatgcattgggcgaaaagttcgtacctcagccagcggaggagctcagcccgagctcccccatggacgcctggatcctgtcacggcttgcactggctgctcaggagtgcgagagagggtttttaacacgcgagctgtccttggtgacccacgctctgcatcacttttggctacacaatctgtgcgacgtgtatctggaagcagttaaaccagtcctatggcactcgcctaggcccctgggtccgccacaagtgttgttttcgtgcgctgacctggggcttagactccttgcaccactgatgccgttcctggccgaagaactttggcaaagattacctcctcggcccggctgcccacctgctcctagtatcagcgtggctccctatccctctgcgtgctccctcgaacactggcgccagccagagctggaacggagattctcaagagtgcaggaggtggtacaggtgctgcgggctcttagagcaacataccagctgacgaaggctcgcccccgcgtgctactccagtcatcggagcccggagaccaaggtctgttcgaggcgtttttggaacctctgggtactctgggatactgtggggccgttggactgctgcccccaggggcggctgctccctccgggtgggcccaagcccccctttctgacacagcacaggtctatatggagcttcagggactggttgatccccaaatccagttgccccttctcgctgctcgaagatacaaactccagaagcagctggactccctcaccgcacgaacaccctccgagggagaggccggcacacagcgacagcagaaactgagcagcctccagctggagctgtctaaactggacaaagcagctagtcacctgcagcagctcatggatgaacctccagcccctgggtccccagaactgtag

SEQ ID NO: 65399 - DNA, 2772 bp, Artificial Sequence
  derived and/or modified sequence
atgtgtatcccacctcccaacgtgacagggtccttacatattggccacgcgcttaccgtggccattcaggatgcactcgttagatggcatcggatgcgcggtgaccaagtgctgtgggtgccgggctcagaccatgctggcatcgctactcaggccgtggtagagaagcaactttggaaagagaggggagttagacgccatgagctcagtcgggaagccttcttgagagaagtgtggcagtggaaagaagcgaaaggcggcgagatatgcgagcagttacgtgctctcggagccagcttagactgggaccgtgagtgctttactatggatgtgggaagtagtgtggccgtcaccgaggcctttgtacgcttatataaagctggtttgctgtaccggaaccatcagctggtcaattggagttgtgcactccgcagtgctataagcgatatagaagtagaaaaccggcccctgcctgggcatacccagctccgcctccccgggtgtcccacccccgtgtcttttggtctgcttttcagtgtcgcatttcccgtggacggtgaaccggacgcggaggtggtggtgggaaccacacgccctgaaacactcccgggagacgttgccgtggcagtgcatccagatgatagcagatacacccaccttcatggtcgccagcttcgccacccactgatggggcaacccctccccctcataactgactatgctgtgcaaccccacgttgggacgggcgcagtgaaagtgacacccgcacattctcctgcagacgcagaaatgggagctcgacatggcctgtccccattaaacgtgattgctgaggacggcacaatgacctccctgtgcggcgactggttgcaggggttacatcgtttcgtggcccgcgaaaagattatgagcgtactcagcgagtggggtctcttccgcggtctccaaaaccaccccatggtgctgccaatttgctcaagaagtggcgatgtcatcgaatacctgctgaagaaccagtggtttgtgaggtgtcaggagatgggcgccagggcagcaaaggccgtggaaagtggagccctagagctgtctccaagctttcaccagaagaattggcagcactggttctcccatattggagactggtgtgtctctcgacagctctggtggggccaccagattcccgcatacctggtggtcgaggaccacgctcagggggaagaggattgttgggtggtgggccggagtgaagcagaggcacgtgaggtggcagccgaacttacaggccgacccggcgctgagctgacactcgaacgagaccctgacgtgctggacacttggtttagctcagccctgttccctttctctgctctcggctggccccaggaaacccccgacctggctaggttctaccctctctccctcttggaaactgggtcagacttgttgctgttctgggtcggcagaatggtaatgttgggcacccaactcaccgggcaactcccgttttccaaggtgctactgcatcctatggtgcgcgacagacagggccggaaaatgagtaaaagtcttgggaacgtccttgatcctcgggacataatctccggtgtggagatgcaggtgttacaggaaaaattgcggagtggcaatctagatccagccgagttggcaattgtagcggcggctcaaaaaaaggattttccacatgggatcccagagtgtggtacagatgcactgcgtttcacactgtgctctcacggcgtgcaggctggagacctccatctgagtgtttcagaagtccaaagctgccgccatttttgtaacaaaatctggaatgcacttcggtttatccttaacgcgctaggagaaaaattcgtgcctcaaccggccgaggagctttctccctcttctccgatggacgcttggattctaagtcggctcgctctcgccgcgcaggagtgtgagcgtggctttttaacgagagagctgagcttagttacccacgctctgcaccacttttggctgcacaatctgtgtgatgtctatctggaagctgtgaaaccggtgctgtggcactctccacgccccttggggccgccacaggttttgttttcgtgtgccgatctagggctgcggcttctggcccctctgatgccgtttctagccgaagagctttggcagcgcctgccgccccgtcctggctgcccgcctgcacctagcatctccgtggccccctaccccagtgcctgcagcctggagcactggcgccagcctgagttggaacggagatttagccgggtacaagaggtggttcaggtgctcagagctttgcgcgctacttaccagcttacaaaggcccgccctagagtcctgctccagtctagcgagcctggcgaccaaggactgtttgaagcgtttctcgaacctttgggcaccctgggatactgtggggccgtgggacttctgcctcctggagccgctgctccatctggctgggctcaggccccgcttagcgatacggcccaggtgtacatggaacttcaggggctggtcgacccacagatacagctgccactgcttgccgccagacgctacaagttacagaagcagcttgactccctcacagcccggacaccttcagaaggcgaggctggaacacagaggcagcaaaaattatcttccctgcaactcgagctgtcgaagctcgacaaagctgccagtcacctgcagcagctgatggacgagccccctgcccccggtagtccagaactttag

SEQ ID NO: 65400 - DNA, 3282 bp, Artificial Sequence
  derived and/or modified sequence
atgggcggcaaggcatggcccaggcgggccgtgggcaccgccggaggtccctgcgcagagcagatctctgctccctttcagacactgctgatgccccatctgccccttgcaagcttccgcccacctttttggggcctgagacatagtaggggcctgcctaggtttcactcggtatccacacaaagtgaaccacatggttcgccgatttctcggcgcaatcgggaagcaaagcagaaaaggctgcgagagaagcaggctacactggaagccgagattgccggggagtccaaatccccggctgaatctattaaggcttggcggcctaaagaactggtactgtacgaaattcccactaaaccaggggaaaagaaagacgtgtccgggcccctccctccggcctactctccccggtacgtagaagccgcatggtatccctggtgggtgagagaaggttttttcaagcctgagtatcaggcccggctcccacaggctactggggagaccttctccatgtgcattcctccccctaacgtgacgggtagccttcacattgggcacgctttgaccgtggcgattcaggacgccctggttcgatggcaccgcatgcggggcgaccaagtgctatgggtgcctggtagcgatcacgccggtatcgcaacccaagccgtggtcgagaagcaactgtggaaagagaggggtgttaggcgccacgagttgagccgcgaagcgtttttgcgcgaagtgtggcagtggaaggaggcaaaggggggtgagatctgcgagcagctgcgcgcactgggagctagcctggactgggacagggaatgtttcactatggatgttggaagctctgtggcagtcacagaagcttttgtgagactctataaggcaggcctgctgtatcggaaccaccagctggttaattggagctgcgctctgcgttctgcaataagtgacatagaggtggaaaaccgcccactcccagggcacacacagctgagattacccggctgccctacccctgtctcatttggactgctgttttccgtagccttccctgtggatggggagcccgacgccgaagttgtggtgggtaccacaagacccgaaaccttgcccggcgacgtggctgtcgcagtacatcccgatgatagtcgatatactcacctgcacggacgacagctccgacacccgctgatgggtcagcccttacctctcatcaccgactatgctgtacagcctcatgtcggcacaggcgccgtgaaagtcacacctgctcactccccagccgatgcggagatgggcgcaagacatggactgtcccctctgaatgtgatcgcagaggatgggactatgaccagcctatgtggcgattggttgcagggactgcaccggttcgtcgccagagaaaaaatcatgtctgtgttgagcgagtggggattgtttaggggactccagaaccatcccatggtactccccatctgctcccgcagtggcgatgtgatcgagtatctgttgaagaaccagtggtttgtgagatgtcaggagatgggtgcaagagcagccaaagcggtggaatccggcgccctggaactgtcccccagcttccatcaaaaaaactggcaacattggttctcacatattggcgattggtgcgtgtcccggcagctgtggtggggccaccaaatccccgcttatctagtggtggaagatcacgcgcagggtgaagaggattgttgggttgtgggccggtccgaggctgaagctcgggaggtggctgcggaacttactggacggcctggcgctgaactgacgctagaaagggatcctgatgttctggatacctggttcagctctgccctctttccgttcagcgctctcggatggccacaagagactcctgatctggctaggttttatcccctttctcttctcgaaactgggtctgacttgcttctgttctgggttggccggatggtgatgttggggactcagctgacgggccagctgccattttcgaaggttctgttacatccgatggtccgggatcgccaaggccgtaaaatgtctaagtctcttgggaacgtgttggatcctcgcgacatcatttcgggtgtggagatgcaagtcctgcaagaaaagttgcgatcagggaacttggatccggcggagctagctatcgttgcggctgctcaaaaaaaggatttcccccacggcatccccgagtgcggcactgatgccctcaggtttaccctctgtagccatggggtccaggccggagacttgcacttgagtgtctctgaggttcagagttgcagacatttctgtaacaagatctggaacgcactccggtttattttgaacgccctgggcgagaagttcgtacctcagcccgccgaagaactgtcaccctcatctcctatggatgcttggatcttatctaggctggccctggctgctcaagaatgcgaacgaggttttctcactcgggaattgagtctggtgactcatgccttacaccatttctggctgcacaatctctgcgacgtatacctggaagccgtgaagccggtgctgtggcatagcccaagaccgctaggcccgccacaagtgctctttagctgtgcagatctgggcctcaggctgcttgcaccattaatgccatttctggcggaggaactgtggcagcggttaccccccaggcccggttgtcctccagccccctccatcagtgtagcaccctacccaagcgcatgttccctggagcattggcgccagcctgaactcgagcgcagattcagccgagtgcaggaagtggtccaggtgctgcgggcgctccgcgccacttatcaattgactaaagcgagacccagagtgctgttacaatcctccgaaccaggagaccagggtcttttcgaagccttcctagagcctcttggcacactgggttactgcggcgcggtgggactgttaccacccggggctgccgcccctagtggatgggcccaggcgccactgagcgacacagctcaggtgtatatggagctgcaggggctggtagatccacagattcagctgcctctgcttgccgccagacggtataaactccaaaaacaactcgattctctgacagcccgaactccaagtgagggagaggccggcacccaaaggcagcaaaaattatcatctcttcagcttgaactgtccaagctggacaaggctgccagtcacctgcaacagctgatggatgaacccccggcgcctggatctccagaactgtag

SEQ ID NO: 65401 - DNA, 3192 bp, Artificial Sequence
  derived and/or modified sequence
atgccccacctgcccctggccagcttccggccccccttctggggcctgcggcacagccggggcctgccccgcttccacagcgtgtccacccagagcgagccccacggcagccccatcagcagaagaaaccgggaggccaagcagaagaggctgcgggagaagcaggccaccctggaggccgagattgctggggagagcaagagccctgctgagagcatcaaggcctggaggcccaaggagctggtgctgtatgagatccccaccaagccaggagagaagaaggatgtgtctggccccctgcccccagcctacagcccccgctacgtggaggccgcctggtacccctggtgggtgcgggagggcttcttcaagccagagtaccaggcccggctgccccaggccactggagagaccttctccatgtgcatccccccaccaaatgtgacaggcagcctgcacatcggccacgccctgactgtggccatccaggatgccctggtgcgctggcacaggatgagaggagaccaggtgctgtgggtgcccggcagtgaccacgccggcatcgccacccaggccgtggtggagaagcagctgtggaaggagcggggcgtgagaagacatgagctgagccgggaggccttcctgcgggaggtgtggcagtggaaggaggccaagggcggggagatctgtgagcagctgcgggccctgggcgccagcctggactgggaccgggagtgcttcaccatggatgtgggcagctctgtggccgtgacagaggcctttgtgcggctgtacaaggccggcctgctgtacagaaaccaccagctggtgaactggagctgtgccctgcggagcgccatcagtgacatcgaggtggagaaccggcccctgcccggccacacccagctgcggctgcccggctgccccacccctgtgtcctttggcctgctcttctctgtggccttccctgtggatggagagccagatgctgaggtggtggtgggcaccaccaggcctgagaccctgcctggagatgtggccgtggccgtgcacccagatgacagccgctacacccacctgcacggccggcagctgcggcaccccctgatgggccagcccctgcccctcatcacagattatgctgtgcagccccacgtgggcaccggggctgtgaaggtgaccccagcccacagccctgcagatgctgagatgggcgcccggcacggcctgagccccctgaatgtgattgctgaagatggcaccatgaccagcctgtgtggggactggctgcagggcctgcacagatttgtggcccgggagaagatcatgtctgtgctgtctgagtggggcctcttccggggcctgcagaaccaccccatggtgctgcccatctgcagccgctctggagatgtgattgagtacctgctgaagaaccagtggtttgtgcgctgccaggagatgggcgcccgggccgccaaggctgtggagagcggggccctggagctgagccccagcttccaccagaagaactggcagcactggttcagccacatcggggactggtgtgtgtcccggcagctgtggtggggccaccagatcccagcctacctggtggtggaggaccacgcccagggcgaggaggactgctgggtggtgggccgctctgaggccgaggcccgggaggtggccgctgagctgaccggccggcctggagctgagctgaccctggagcgggaccctgatgtgctggacacctggttcagcagcgccctcttccccttcagcgccctgggctggccccaggagaccccagacctggcccgcttctaccccctgagcctgctggagactggaagtgacctgctgctcttctgggtgggccgcatggtgatgctgggcacccagctgaccggccagctgcccttcagcaaggtgctgctgcaccccatggtgcgggaccggcagggcaggaagatgagcaagagcctgggcaatgtgctggacccccgggacatcatcagcggcgtggagatgcaggtgctgcaggagaagctgcggagcggcaacctggaccctgctgagctggccatcgtggccgccgcccagaagaaggacttcccccacggcatcccagaatgtggcacagatgccctgcgcttcaccctgtgcagccatggagtgcaggccggggacctgcacctgtctgtgtctgaggtgcagagctgccgccacttctgcaacaagatctggaatgccctgcgcttcatcctgaatgccctgggggagaagtttgtgccccagcctgctgaggagctgagccccagcagccccatggatgcctggatcctgagccggctggccctggccgcccaggagtgtgagcggggcttcctgacccgggagctgagcctggtgacccacgccctgcaccacttctggctgcacaacctgtgtgatgtgtacctggaggccgtgaagcctgtgctgtggcacagcccccggcccctgggccccccccaggtgctcttcagctgtgccgacctgggcctgcggctgctggcccccctgatgcccttcctggccgaggagctgtggcagaggctgcccccccggcccggctgccccccagcccccagcatctctgtggccccctaccccagcgcctgcagcctggagcactggaggcagcctgagctggagcggcgcttcagccgggtgcaggaggtggtgcaggtgctgcgggccctgcgggccacctaccagctgaccaaggcccggccccgggtgctgctgcagagcagcgagcccggggaccagggcctgtttgaggccttcctggagcccctgggcaccctgggctactgtggggctgtgggcctgctgcccccaggagctgctgcccccagcggctgggcccaggcccccctgagtgacacagcccaggtgtacatggagctgcagggcctggtggacccccagatccagctgcccctgctggccgcccggcgctacaagctgcagaagcagctggacagcctgacagcccggaccccatctgagggggaggccggcacccagaggcagcagaagctgagcagcctgcagctggagctgagcaagctggacaaggccgccagccacctgcagcagctgatggatgagcccccagcccctggcagccctgagctgtag

SEQ ID NO: 65402 - DNA, 2772 bp, Artificial Sequence
  derived and/or modified sequence
atgtgcatccccccaccaaatgtgacaggcagcctgcacatcggccacgccctgactgtggccatccaggatgccctggtgcgctggcacaggatgagaggagaccaggtgctgtgggtgcccggcagtgaccacgccggcatcgccacccaggccgtggtggagaagcagctgtggaaggagcggggcgtgagaagacatgagctgagccgggaggccttcctgcgggaggtgtggcagtggaaggaggccaagggcggggagatctgtgagcagctgcgggccctgggcgccagcctggactgggaccgggagtgcttcaccatggatgtgggcagctctgtggccgtgacagaggcctttgtgcggctgtacaaggccggcctgctgtacagaaaccaccagctggtgaactggagctgtgccctgcggagcgccatcagtgacatcgaggtggagaaccggcccctgcccggccacacccagctgcggctgcccggctgccccacccctgtgtcctttggcctgctcttctctgtggccttccctgtggatggagagccagatgctgaggtggtggtgggcaccaccaggcctgagaccctgcctggagatgtggccgtggccgtgcacccagatgacagccgctacacccacctgcacggccggcagctgcggcaccccctgatgggccagcccctgcccctcatcacagattatgctgtgcagccccacgtgggcaccggggctgtgaaggtgaccccagcccacagccctgcagatgctgagatgggcgcccggcacggcctgagccccctgaatgtgattgctgaagatggcaccatgaccagcctgtgtggggactggctgcagggcctgcacagatttgtggcccgggagaagatcatgtctgtgctgtctgagtggggcctcttccggggcctgcagaaccaccccatggtgctgcccatctgcagccgctctggagatgtgattgagtacctgctgaagaaccagtggtttgtgcgctgccaggagatgggcgcccgggccgccaaggctgtggagagcggggccctggagctgagccccagcttccaccagaagaactggcagcactggttcagccacatcggggactggtgtgtgtcccggcagctgtggtggggccaccagatcccagcctacctggtggtggaggaccacgcccagggcgaggaggactgctgggtggtgggccgctctgaggccgaggcccgggaggtggccgctgagctgaccggccggcctggagctgagctgaccctggagcgggaccctgatgtgctggacacctggttcagcagcgccctcttccccttcagcgccctgggctggccccaggagaccccagacctggcccgcttctaccccctgagcctgctggagactggaagtgacctgctgctcttctgggtgggccgcatggtgatgctgggcacccagctgaccggccagctgcccttcagcaaggtgctgctgcaccccatggtgcgggaccggcagggcaggaagatgagcaagagcctgggcaatgtgctggacccccgggacatcatcagcggcgtggagatgcaggtgctgcaggagaagctgcggagcggcaacctggaccctgctgagctggccatcgtggccgccgcccagaagaaggacttcccccacggcatcccagaatgtggcacagatgccctgcgcttcaccctgtgcagccatggagtgcaggccggggacctgcacctgtctgtgtctgaggtgcagagctgccgccacttctgcaacaagatctggaatgccctgcgcttcatcctgaatgccctgggggagaagtttgtgccccagcctgctgaggagctgagccccagcagccccatggatgcctggatcctgagccggctggccctggccgcccaggagtgtgagcggggcttcctgacccgggagctgagcctggtgacccacgccctgcaccacttctggctgcacaacctgtgtgatgtgtacctggaggccgtgaagcctgtgctgtggcacagcccccggcccctgggccccccccaggtgctcttcagctgtgccgacctgggcctgcggctgctggcccccctgatgcccttcctggccgaggagctgtggcagaggctgcccccccggcccggctgccccccagcccccagcatctctgtggccccctaccccagcgcctgcagcctggagcactggaggcagcctgagctggagcggcgcttcagccgggtgcaggaggtggtgcaggtgctgcgggccctgcgggccacctaccagctgaccaaggcccggccccgggtgctgctgcagagcagcgagcccggggaccagggcctgtttgaggccttcctggagcccctgggcaccctgggctactgtggggctgtgggcctgctgcccccaggagctgctgcccccagcggctgggcccaggcccccctgagtgacacagcccaggtgtacatggagctgcagggcctggtggacccccagatccagctgcccctgctggccgcccggcgctacaagctgcagaagcagctggacagcctgacagcccggaccccatctgagggggaggccggcacccagaggcagcagaagctgagcagcctgcagctggagctgagcaagctggacaaggccgccagccacctgcagcagctgatggatgagcccccagcccctggcagccctgagctgtag

SEQ ID NO: 65403 - DNA, 3282 bp, Artificial Sequence
  derived and/or modified sequence
atgggcggcaaggcctggccccggcgggctgtgggcacagctgggggcccctgtgccgagcagatcagcgcccccttccagaccctgctgatgccccacctgcccctggccagcttccggccccccttctggggcctgcggcacagccggggcctgccccgcttccacagcgtgtccacccagagcgagccccacggcagccccatcagcagaagaaaccgggaggccaagcagaagaggctgcgggagaagcaggccaccctggaggccgagattgctggggagagcaagagccctgctgagagcatcaaggcctggaggcccaaggagctggtgctgtatgagatccccaccaagccaggagagaagaaggatgtgtctggccccctgcccccagcctacagcccccgctacgtggaggccgcctggtacccctggtgggtgcgggagggcttcttcaagccagagtaccaggcccggctgccccaggccactggagagaccttctccatgtgcatccccccaccaaatgtgacaggcagcctgcacatcggccacgccctgactgtggccatccaggatgccctggtgcgctggcacaggatgagaggagaccaggtgctgtgggtgcccggcagtgaccacgccggcatcgccacccaggccgtggtggagaagcagctgtggaaggagcggggcgtgagaagacatgagctgagccgggaggccttcctgcgggaggtgtggcagtggaaggaggccaagggcggggagatctgtgagcagctgcgggccctgggcgccagcctggactgggaccgggagtgcttcaccatggatgtgggcagctctgtggccgtgacagaggcctttgtgcggctgtacaaggccggcctgctgtacagaaaccaccagctggtgaactggagctgtgccctgcggagcgccatcagtgacatcgaggtggagaaccggcccctgcccggccacacccagctgcggctgcccggctgccccacccctgtgtcctttggcctgctcttctctgtggccttccctgtggatggagagccagatgctgaggtggtggtgggcaccaccaggcctgagaccctgcctggagatgtggccgtggccgtgcacccagatgacagccgctacacccacctgcacggccggcagctgcggcaccccctgatgggccagcccctgcccctcatcacagattatgctgtgcagccccacgtgggcaccggggctgtgaaggtgaccccagcccacagccctgcagatgctgagatgggcgcccggcacggcctgagccccctgaatgtgattgctgaagatggcaccatgaccagcctgtgtggggactggctgcagggcctgcacagatttgtggcccgggagaagatcatgtctgtgctgtctgagtggggcctcttccggggcctgcagaaccaccccatggtgctgcccatctgcagccgctctggagatgtgattgagtacctgctgaagaaccagtggtttgtgcgctgccaggagatgggcgcccgggccgccaaggctgtggagagcggggccctggagctgagccccagcttccaccagaagaactggcagcactggttcagccacatcggggactggtgtgtgtcccggcagctgtggtggggccaccagatcccagcctacctggtggtggaggaccacgcccagggcgaggaggactgctgggtggtgggccgctctgaggccgaggcccgggaggtggccgctgagctgaccggccggcctggagctgagctgaccctggagcgggaccctgatgtgctggacacctggttcagcagcgccctcttccccttcagcgccctgggctggccccaggagaccccagacctggcccgcttctaccccctgagcctgctggagactggaagtgacctgctgctcttctgggtgggccgcatggtgatgctgggcacccagctgaccggccagctgcccttcagcaaggtgctgctgcaccccatggtgcgggaccggcagggcaggaagatgagcaagagcctgggcaatgtgctggacccccgggacatcatcagcggcgtggagatgcaggtgctgcaggagaagctgcggagcggcaacctggaccctgctgagctggccatcgtggccgccgcccagaagaaggacttcccccacggcatcccagaatgtggcacagatgccctgcgcttcaccctgtgcagccatggagtgcaggccggggacctgcacctgtctgtgtctgaggtgcagagctgccgccacttctgcaacaagatctggaatgccctgcgcttcatcctgaatgccctgggggagaagtttgtgccccagcctgctgaggagctgagccccagcagccccatggatgcctggatcctgagccggctggccctggccgcccaggagtgtgagcggggcttcctgacccgggagctgagcctggtgacccacgccctgcaccacttctggctgcacaacctgtgtgatgtgtacctggaggccgtgaagcctgtgctgtggcacagcccccggcccctgggccccccccaggtgctcttcagctgtgccgacctgggcctgcggctgctggcccccctgatgcccttcctggccgaggagctgtggcagaggctgcccccccggcccggctgccccccagcccccagcatctctgtggccccctaccccagcgcctgcagcctggagcactggaggcagcctgagctggagcggcgcttcagccgggtgcaggaggtggtgcaggtgctgcgggccctgcgggccacctaccagctgaccaaggcccggccccgggtgctgctgcagagcagcgagcccggggaccagggcctgtttgaggccttcctggagcccctgggcaccctgggctactgtggggctgtgggcctgctgcccccaggagctgctgcccccagcggctgggcccaggcccccctgagtgacacagcccaggtgtacatggagctgcagggcctggtggacccccagatccagctgcccctgctggccgcccggcgctacaagctgcagaagcagctggacagcctgacagcccggaccccatctgagggggaggccggcacccagaggcagcagaagctgagcagcctgcagctggagctgagcaagctggacaaggccgccagccacctgcagcagctgatggatgagcccccagcccctggcagccctgagctgtag

SEQ ID NO: 65404 - DNA, 3192 bp, Artificial Sequence
  derived and/or modified sequence
atgccccacctgcccctggccagcttccggccccccttctggggcttacgacattcccgagggctacctaggtttcatagcgtcagtacacagagcgagcctcatggaagcccaataagtcgcaggaaccgcgaggccaagcagaagagactacgagagaaacaagcgactctcgaagctgaaatcgcaggcgaatcaaaatcgcctgctgagagcatcaaagcttggcggccaaaagaattggttctctacgagattccgacaaaaccgggtgaaaaaaaggatgtcagcggaccattacctccagcttactccccccgctatgtcgaagccgcatggtacccctggtgggtccgggagggttttttcaagccagagtaccaggcgaggcttccacaagctacgggggaaactttcagcatgtgtattcccccccctaatgtgaccgggagcctacacattggccatgctctgacggtggccatccaggatgcactggtgagatggcatcggatgaggggcgatcaagtgttatgggtgccaggtagtgaccatgcgggcattgcaacccaggcagtcgtggagaagcagctgtggaaggagcgcggtgttagaagacacgaactgtctcgggaggcgttcctgcgtgaggtctggcagtggaaggaggctaaagggggcgagatttgtgaacaattgcgggccctgggagcctctctggactgggatagagagtgcttcaccatggatgtgggatctagcgtagctgtcaccgaggcatttgtgagattgtataaggcgggactactttatagaaatcatcagctggtgaattggagctgcgccctgcgaagcgcaattagtgacattgaggtcgaaaacagacccctgccagggcacacacagcttaggctgcccggctgcccaactcccgtatccttcggtctgttgttctctgttgccttcccggtggacggggaacccgacgccgaggtagtcgtcggcaccaccagaccggagactttaccaggggatgtcgctgtcgctgtgcacccagacgatagcaggtatacacacttgcacggtcgccagctccggcatcccctcatgggccaacctttgcccctgattacagactatgctgtgcaacctcacgtggggacaggcgcggtgaaagtcacacccgcccactctcctgccgatgcagagatgggcgctaggcatggcttatcccccctgaatgtaatcgcagaagacggaacaatgacctccctgtgcggcgactggttgcagggtctccatcgcttcgtcgcccgtgagaaaatcatgagtgtcctatcagagtggggtttattccgaggtcttcaaaatcatcccatggtgctccctatctgtagtcggtccggtgacgtaatcgaatacctgctcaaaaaccaatggtttgtaaggtgccaggagatgggagcccgagctgccaaggcagttgaatcaggtgccctggaactcagccccagtttccatcaaaaaaactggcaacattggttttcacacattggcgactggtgtgtgtctcgccagttatggtggggacaccagattcccgcctatctcgttgtggaggatcacgcccaaggagaagaagactgctgggttgttggacggtcagaggccgaagccagagaggttgctgcagaactgaccggcagaccaggagctgagttgactctggagagggatcccgacgtgttagatacctggttttcttctgcactcttcccattctcagcgctgggatggcctcaggagacacctgatctggcacgtttttaccccctcagtcttctcgaaacaggctctgacctgctgctgttttgggtgggtcgaatggtgatgctggggacccaattaaccggacagctgcctttttccaaagttctgctgcatcccatggttcgcgataggcagggtaggaagatgtcaaaatcactggggaacgtacttgatccgagggacattatttccggtgtagagatgcaggtcctgcaggaaaagctcagaagcggtaacctggaccctgccgagctcgctatcgttgctgccgcccagaagaaggattttcctcacgggatcccggagtgtggaaccgacgcgctccggtttaccctgtgttctcatggggttcaagccggagatctccatttgagcgtgtctgaggtgcagtcttgtcggcatttttgcaataagatttggaacgccctcaggtttatcctcaatgccctcggtgagaaatttgtccctcagccagctgaggaactttcgccaagcagccctatggatgcatggatcctctcccgtctcgctcttgctgcccaggagtgcgaacgaggtttcctcacgcgggaactgtctctggtgacacatgccttgcatcatttctggctacacaacctctgtgacgtatacctcgaagcggtgaagccagtgctgtggcattccccacggcccctaggccccccccaggttctatttagctgcgccgacctgggccttcgccttctcgccccacttatgccatttttagcggaagagctctggcagcggctcccccctcgaccaggctgtccaccagccccctccattagcgtggcaccatatccatctgcctgcagcctggaacactggaggcaaccagagctggagcgccgcttcagcagagtccaggaggtggtccaagttcttcgagctctgcgggccacctatcagttgaccaaggccagaccgcgcgtattactgcagtcatcagaaccaggggatcagggcttattcgaagcatttctagagccgctggggacactcggatactgcggggcagtcgggctcttaccccctggagccgctgcccctagcggatgggctcaagcgcccctttctgacaccgcccaggtctacatggagctgcaggggttggttgatccccagatacagctcccactgctggccgccaggcgctacaaactacagaaacaacttgacagcctgacggcccgaacgccttctgagggcgaagcaggaacgcagcgtcagcagaagcttagttccctccagctcgagttgtcaaaactggataaagctgcatcccatctgcagcagctgatggatgagcctcccgccccaggctctccagaattgtag

SEQ ID NO: 65405 - DNA, 2772 bp, Artificial Sequence
  derived and/or modified sequence
atgtgcatccccccccccaacgtgaccggcagcctgcacatcggccatgccctgactgttgcaattcaggacgccctagttaggtggcatcgcatgaggggagaccaggtgttgtgggtgccaggctcagaccatgccggcattgccacacaggccgtagtcgaaaagcaactgtggaaggaacgcggagtgcgccgccacgaactctcacgcgaggccttcctccgcgaggtgtggcagtggaaggaggccaaaggtggagaaatctgtgagcagctccgtgctctgggggccagtctggactgggaccgagagtgcttcacaatggacgtaggtagttcagtagcggtgacagaggcatttgtgcgattgtacaaagctggcctcctgtatagaaatcaccaactcgtcaactggagctgtgccctgcgttccgcaatttcggacattgaagtagaaaatagacccctccccgggcacacccagttacggcttccggggtgccctactcctgtttccttcggtttgctctttagcgttgcatttccagtagatggagaaccggacgctgaggtggtcgtggggaccactcgacccgagactctgcccggcgacgtcgccgtcgccgtgcatccagacgacagcagatacacccatctacacgggcgtcaactgcggcaccctcttatgggccagccactccccctgattactgattatgcagtgcagccacatgtcggcacgggggccgtaaaggtgacacccgcgcacagcccagctgatgcagagatgggggccagacatggactctcaccactaaatgtgatcgccgaagacggtacaatgacaagtctgtgtggggactggttgcagggactccataggtttgtagccagggagaagattatgtccgttctcagcgagtggggattgtttcggggtttacagaaccaccccatggtgctgcctatctgttctcgatccggcgatgtgattgagtatctgctgaaaaatcagtggttcgtgaggtgtcaggaaatgggtgctcgggccgccaaggccgtcgagagtggtgcactggagctttccccctcatttcaccagaaaaactggcagcactggttctctcacatcggagactggtgcgtcagcaggcagctttggtggggtcatcaaatccctgcgtacctggtggtggaagatcacgcccagggggaagaagactgctgggtggtcggccgctccgaggcggaagcacgagaggtcgctgctgagctcacaggcaggcccggcgcggaactgactcttgagagagatcccgacgtacttgacacatggttttcaagcgccctctttcctttctccgcactgggctggccacaggagactccggatctggcccgcttctacccactgtcgctgctggaaacaggctccgacctcctcctgttttgggttggcaggatggtgatgctgggaacgcaactgacgggacagctgcctttttccaaggtcctgttgcacccaatggtgcgggataggcagggacgtaaaatgtctaagagcctgggcaatgttctggatccgagagatatcatttcaggggtagagatgcaggtgctccaagagaaactgagaagcgggaacttagaccccgctgagctcgccatcgtcgccgctgcacaaaagaaagattttccacatggaattcccgaatgcggcaccgacgctctgcggttcactctgtgctctcacggcgtccaggcaggcgacctacacctctctgtctcggaggtgcaaagctgcaggcatttctgcaacaaaatctggaatgccctgagattcatactaaacgccctgggcgaaaaatttgtgccacagcccgccgaggagttatcgccttccagtccgatggatgcctggattctttccagacttgcactggccgcccaggagtgcgagagaggatttctgactagagagctcagtctcgttacacacgccctgcatcatttctggcttcacaatctgtgtgatgtgtatttggaagctgtcaaacccgtgctctggcatagtcctaggcccctcggacccccgcaggtgctgttttcctgtgctgacctgggcctgcgtttgctggcgcctctgatgcctttcctggctgaggaactctggcaaagactcccacccagaccaggctgtcctcctgccccttccatttctgtggcaccttatccaagtgcatgctctctggaacactggcgacagccggagctggagcggcggttctccagggttcaggaggttgtgcaggtactgagagccctgcgggcaacttatcaactcaccaaagcacgaccacgcgtgctgctgcagagtagcgagccaggggatcaggggctttttgaagcctttctggaacctcttgggacactcgggtattgtggtgccgttggcttgctcccgcccggcgcagctgccccaagtggttgggctcaggctcctctgtccgataccgcccaggtctacatggagctacaaggcctggtggacccacaaatccaacttcccttgcttgcagccagaagatacaagcttcaaaaacagctggattctcttacagccaggaccccctcagagggcgaggccggcacacagaggcagcagaagttatccagtcttcagttggaactgagcaaattagacaaggccgccagtcatctgcagcagctgatggacgagccccctgcgcccggctctccggagctctag

SEQ ID NO: 65406 - DNA, 3282 bp, Artificial Sequence
  derived and/or modified sequence
atgggcggcaaggcctggccccggcgggccgtgggcaccgccggcggcccctgtgccgagcagatctccgccccttttcagacactcctcatgcctcaccttccgttggcctctttccgaccacctttctggggcctaagacattctcgaggactgccaagatttcactctgtcagtacccaaagtgagcctcacggaagcccaattagcaggcgcaaccgagaggcaaagcagaagagacttagagaaaaacaggccaccttagaggcggagattgccggagagtctaagtcgcccgccgaaagtattaaagcttggcggcccaaggagctcgtcctctatgaaatccctaccaaaccaggagagaagaaggacgtgtctggacccctgcccccagcctatagcccccgttacgtggaagcagcctggtacccttggtgggtccgagagggcttttttaaacctgagtaccaagcgagattgccccaggcaaccggcgagacattctctatgtgcataccccctcctaacgtcaccggatccctccatataggacatgccttaacagtggcgattcaggatgctctggtgcggtggcatcggatgaggggggaccaggtgttatgggtccccggcagcgatcacgccggaattgccactcaagccgtggtggagaagcagctgtggaaggagagaggggtgcggcgacatgagctcagcagagaggcttttcttagggaggtgtggcaatggaaagaggccaagggcggggagatctgtgagcagcttcgcgcccttggggcttctctagactgggacagggagtgctttacgatggacgtgggctctagcgtcgctgtgactgaggcatttgtccgcttgtacaaggctggactgctgtaccggaatcaccagctggtcaactggtcatgcgccctgagatctgctatctctgatatcgaagtggaaaaccgaccactgccaggtcacacacagctgcggctgcccggctgccctacacccgtctcctttggattactgttttctgttgctttccccgtcgacggtgaacccgacgcagaagtggtagtgggcacaacccggccagaaacactcccgggagatgtggcagttgcagtgcacccagacgactccagatacacgcatctgcatggaaggcaattacgccacccactgatgggccaacctctgccattaatcaccgattacgctgtccagcctcatgtcggaacaggggctgttaaggtgacacccgcacattccccagctgacgccgaaatgggggctcgccacggcctcagccctctgaatgtgattgcagaggacggcacaatgaccagtctttgtggagactggctgcagggcctgcaccggttcgtggcgcgtgaaaaaatcatgtccgtcttatcggagtggggactttttaggggcttacagaaccacccaatggtgttacccatatgttcacgaagcggcgacgtcattgaatatttgcttaaaaatcaatggttcgtgcgatgccaagaaatgggcgctcgcgcagcaaaagccgtcgagtctggcgcgcttgagttgtctcctagctttcatcagaagaactggcagcactggttcagccatattggcgattggtgtgtttcgcgacagctgtggtggggccatcagatccctgcatatcttgtggtcgaagaccacgcacaaggggaggaggactgttgggtggtagggagatccgaggcagaggcccgcgaggtggctgcagagctgaccgggcggcccggcgctgagttaactctggaaagggacccagatgtgctggacacctggttttcatctgccctctttcctttttccgccttaggatggccacaggagacacctgatcttgcgagattttatcctcttagtcttcttgagactggctcggacctcttactgttctgggtgggccgcatggtgatgttgggtacccagctaaccggacaactgccctttagtaaagtgctgcttcacccaatggtaagggacagacaaggccggaagatgtctaagagtctgggcaacgttctcgaccccagagatatcattagtggggtggagatgcaagtcttgcaggaaaagctgagaagtgggaatctcgaccctgccgagctagccatcgtggcagctgctcagaaaaaagacttcccccacggaatacctgagtgcggtacagacgctctgaggttcacactatgtagccacggggtacaggcgggcgacttacatctatcagtgagcgaagtgcaaagttgtaggcacttttgcaacaaaatttggaacgccttgcgttttatcctgaacgctctcggtgaaaagttcgtcccacaaccagcggaggagctttcccccagctcgcccatggacgcttggatcctgtcaagactggctctcgcagctcaagaatgtgagcgaggcttcttaacaagggagctaagcctcgtcacacacgcactgcatcacttttggctgcacaacctgtgtgacgtgtacttggaggccgtgaaaccggttctttggcacagcccaagacctttagggcctccgcaggtgttgttttcatgcgccgacttggggttgcggctgctcgcccccctgatgccgttcctcgcagaggagctttggcagcgcctgccgccacggcccggatgtcccccagccccttccataagtgtagcaccttatcctagcgcttgctccctcgaacactggagacaaccagaactggagcggcgattttccagagtgcaagaggtagtccaggtgctacgggctcttcgggcgacttaccagctaaccaaagctcgccccagggtcctgttgcagtcctctgagcctggcgatcaaggactattcgaagcattcctggagcccctcggcactctaggttattgcggggctgtgggcctgctgccccctggagccgctgccccttctggctgggctcaggcacctctgtcagacacagcgcaggtttatatggaattgcaggggcttgtagatccacagatccagttaccgttgctggcagcgcggcggtataaactgcaaaagcagttggacagtctgactgcacgtaccccttcggaaggggaggccggtacccagagacagcagaaactgtcttccttgcagctggaacttagcaagctggataaggccgcctctcatctccagcagcttatggatgagcccccagcccccggtagccctgaactgtag

SEQ ID NO: 65407 - DNA, 3192 bp, Artificial Sequence
  derived and/or modified sequence
atgccacacctgcccctcgcctcttttcgtcccccattctggggcctgagacactctcgcggactgccccgttttcatagcgtgtctacgcagtcagagccccatgggtcacccattagccgaagaaacagagaagccaagcagaagagactgagggaaaaacaagccacactggaggcagaaattgctggggaaagtaagagcccggcagagtctatcaaggcttggagaccgaaagagctcgtcttgtatgagatccccaccaagcctggcgagaaaaaggatgtatcaggtccgctcccgccagcatactctcctaggtatgtcgaggccgcttggtacccctggtgggtaagagaaggtttttttaaacctgagtaccaagctagactgccccaagcaaccggagaaaccttctctatgtgcatccccccacccaacgttaccggctccctgcatatcggtcacgccttaaccgtggctattcaggatgcgctggtccgttggcaccgaatgcggggagatcaggtcctctgggtgccgggaagcgaccacgccggtatcgctacccaggcagtggtcgagaaacagctgtggaaggagcgtggagtgcggagacacgagctgtctcgggaggccttcctaagagaagtgtggcagtggaaggaagcaaagggtggggaaatctgtgagcagctgcgcgctctgggtgccagcctggactgggatcgtgagtgctttaccatggacgtgggaagttctgtcgctgtgaccgaagcatttgtgagactgtacaaggccggacttctgtaccggaaccaccagctggttaactggtcttgcgccctgcgctcggctatctccgatatcgaagtcgaaaatcgacctctacccggtcacacccagctgcgattacctgggtgccccaccccagtgtctttcggcctcctgttcagtgtggcatttcccgttgacggggagcctgacgccgaagtggtcgtcggaaccacacggccagaaaccctacccggagatgtagccgtagcagtgcacccagatgactcaagatacacccacctccacggtaggcagctaagacatccactgatgggtcaaccactgcctcttatcacagactatgcggtccaaccccatgtaggcactggggctgtaaaggtcactcctgctcactcacctgccgacgcagaaatgggcgctcgtcatggcctgtctcctttgaacgtgattgccgaagatggtaccatgacatcactgtgtggcgactggttacagggactgcatcgatttgtagccagagagaagatcatgtctgttctgtctgaatggggacttttcagaggtttacagaatcacccaatggtgctgccaatttgtagccgatccggtgatgtgatcgagtacctgctgaagaatcagtggttcgtgaggtgccaagagatgggagcaagagccgcaaaagccgtggaatctggagccctggaactctctcccagcttccaccagaagaattggcagcattggttcagccatatcggtgattggtgcgtttcacggcagttgtggtggggacatcagatcccagcctatctggtcgttgaagaccacgcacagggcgaggaggattgttgggtcgtgggccgatctgaggccgaagcaagagaagtggccgctgagctgactggcagacccggtgctgaactgactctcgaacgcgaccccgatgtattggatacttggttttcgtcagcactcttcccttttagcgctcttgggtggccccaggagacccccgatttagcgaggttctaccctctctccctgctggaaaccggatcagatctgctcctgttttgggtgggacgaatggtgatgcttgggacccaattaactggacagctgccattctctaaggtgctcctgcatccaatggtgagggaccgacagggacggaaaatgagcaaatcacttggaaacgtgctcgatcctagggacatcatatcaggggtcgagatgcaggtgttgcaggagaagcttcggtccggcaatttggaccccgctgaattagccattgtggccgctgcccaaaaaaaggacttcccgcacggaattcctgaatgcggaactgatgcactgaggttcaccctctgttcgcatggcgtgcaggccggtgatctccacctctcagtttcagaggtgcagtcctgtcgtcatttctgcaataagatttggaacgcgcttcgcttcatcctgaacgccctgggcgagaaatttgttcctcagcctgcagaggagctttcccccagctcccccatggacgcatggatcctgagtcgtcttgctctcgccgctcaagagtgcgagagaggcttcttgacacgcgaactgagtttggtaacacatgctctgcatcacttctggctgcacaatttgtgcgacgtgtacttggaggcagtgaagcctgttctctggcatagtcccaggcctctggggcctcctcaggtgctgttttcatgcgccgacctgggactgcggctgcttgctccgttaatgccatttctggcggaagagctctggcaacggctgccccctcgcccaggctgccctcccgctcccagcatatcagtagcaccttatccttcagcttgcagtctcgagcattggcgtcaacccgaacttgaacgcaggtttagccgcgtgcaggaggttgtacaggtgcttagggccctgcgcgcaacttaccaattaacaaaagctaggccccgagtgctgttgcaaagttcggaacccggagaccagggccttttcgaggcattcctcgagccactgggcactctcggctactgtggagccgttgggttgctaccaccaggtgctgcagccccatcagggtgggctcaagcccctctgtccgatacagcccaggtgtatatggagctccaagggcttgtcgacccacagattcagcttccattactcgccgctcgcaggtacaaactgcagaagcagctggacagtttaactgctcgaacaccaagcgaaggtgaggccggaacacagcgacagcagaagctgtcctcactgcagctagagctcagtaaactggataaagccgcatcccacctgcagcaactcatggatgaaccacctgccccaggatccccggaattgtag

SEQ ID NO: 65408 - DNA, 2772 bp, Artificial Sequence
  derived and/or modified sequence
atgtgcatcccccctcctaacgtaaccggatcactgcacatcggacacgctctaacggtcgcaatccaggatgctttagtgcgatggcatcggatgcgcggagatcaggtgctgtgggtgcctggctctgaccacgctggaatcgctacccaagccgtagtcgagaaacagctatggaaggaacgcggtgtgaggcgtcacgagctaagcagagaggcattcttgagagaggtgtggcaatggaaagaggccaaaggcggtgagatctgtgaacagcttagagccctcggagcgtccctagattgggaccgtgaatgttttacaatggacgtagggtcgtcagtagctgtcactgaggcttttgtcagactgtataaggcagggctactgtaccgaaatcatcaactggtgaattggtcttgtgccctgagaagcgcgatttcggatatcgaggtcgagaaccggccactgcccggacatacacaattgcgcctgccaggctgtccaacccctgtgtcctttggactgctgttttccgtggcgttccccgttgatggggaacccgacgcagaggtggtcgtcggcaccacccgtcctgagacactcccaggtgatgttgctgtagctgtgcaccccgatgacagtcggtacactcacctgcacgggaggcagctacgacatcccttgatgggtcagccactgcctctcattaccgactatgccgtgcaacctcacgtaggaaccggagccgtgaaagtgactccggcacactcacccgctgatgctgaaatgggggctagacacggcctttcaccactcaatgtaatcgccgaggatgggactatgacatcactttgcggagattggctccagggcttgcatcggttcgttgccagggagaagatcatgagcgtcctgtctgagtggggcttatttcgcggtctccagaaccatcccatggtactgccaatctgcagtagaagcggggacgtgattgaatacctgctgaaaaaccagtggtttgtgcggtgtcaggaaatgggagccagagcggcaaaggcagtcgaatctggggcactggagctgagtcccagcttccaccagaaaaactggcagcactggttctcacatattggggactggtgcgtgtcacggcagttatggtggggacaccaaattccagcatacctagtggttgaagaccacgcccagggagaagaagattgttgggttgtcggcagatccgaggccgaggcgagagaagttgccgcagaactcaccggcagaccgggtgccgaacttaccctggaacgcgatcctgacgttttagatacgtggttttctagcgcattattccctttcagcgcactgggttggcctcaagaaacgccggatctggctcggttctatcctctgtcactgctggagacgggcagcgatttgttgttgttctgggtggggaggatggtcatgttgggcacccagctaacaggccagcttccctttagcaaggtgctcttgcatcccatggtgcgggatagacagggacggaagatgtccaagtctctgggcaatgttcttgacccccgagacatcatatcaggagtggagatgcaggttctccaggaaaaactcagatcgggcaacctcgacccagccgagcttgctattgtagcagctgcccagaaaaaggactttcctcacggaatccctgagtgtggcactgatgccctccggttcacactgtgttcccacggggtccaggctggggatttacacctctcggtgtcagaggtgcagtcctgcagacatttctgtaataaaatttggaacgcactgaggtttatcctcaacgcactgggcgaaaagtttgttccacagcccgctgaggaactgagcccatcttcaccaatggatgcgtggatcctgagcaggttggccctggccgcacaggagtgcgaacgcggatttttgaccagggaattgtcactggtaacccatgccttgcaccacttctggctccacaatctctgtgatgtatacctggaggccgtcaagcccgttttatggcactcgcctcgacctttaggtcctccccaggttctcttctcttgcgccgatttaggtttgcggctgctggcccctttaatgccattcctggctgaggagctatggcaaaggctgcccccaagacccggttgtcctcccgctccctccatctcggtcgctccgtatccttctgcttgctccctggaacattggcgccagcctgagctggaaaggcgattttcacgcgtacaggaggtcgttcaggttcttcgtgctctaagagcaacgtaccagctcaccaaggcccgtcccagagtgctgctgcaatccagcgagcctggcgaccagggcctgttcgaagcctttctggagccactgggtaccctgggttactgcggagccgtgggactgctcccaccaggcgctgctgctccttccgggtgggcacaggccccactttctgacacagcacaggtatatatggaacttcaagggctcgtagatccgcaaatccaacttccactgctcgctgccagaaggtacaagttgcagaaacagctggactcactgactgcccgtacgccctcagaaggcgaagcaggcacccagaggcagcaaaagttatcctcactgcagctggagcttagcaaactcgacaaagctgcgtctcacctgcagcagcttatggacgagccgccagctcctggttcccctgaattatag

SEQ ID NO: 65409 - DNA, 3282 bp, Artificial Sequence
  derived and/or modified sequence
atggggggaaaggcctggccacgcagagctgtgggaacagccggaggcccttgtgccgaacagatcagcgcccctttccagacattattaatgcctcacctgccattggcgtctttccggcctcctttctggggccttcgccactctagaggcctaccacgttttcacagtgtttcaacacagtccgagccacacgggagtcccatttcccgcagaaatagggaagcgaagcagaaaaggttgagggagaagcaggctacactcgaggcagaaatcgctggcgagtctaaaagtcccgcagagtctattaaagcatggaggccgaaggaactcgtgctgtatgagatccctaccaagccaggcgaaaagaaggatgtgtctggcccactgccgcctgcatacagcccacgctatgtggaggcagcatggtacccatggtgggtccgcgaggggtttttcaagccagagtaccaggctcgcttgccgcaggcaaccggagagacgttctcaatgtgtattccaccacctaatgtaacaggttccttacatataggtcatgcgcttacggtcgctatccaggatgcgctagtgcgctggcatcggatgcgtggggaccaggttctgtgggttcctggatccgaccatgctggtatcgctacacaggcagtggtcgaaaagcagctgtggaaggagcgtggggtgagaagacatgagctgtccagggaggcgtttctgagagaagtgtggcagtggaaagaggccaaggggggtgaaatttgcgaacagttgagagccctcggcgcatccttggattgggatcgcgaatgcttcacaatggacgtgggctcgtcagtggcagtgactgaggcctttgtgagactttacaaagccggtctcctgtaccgtaatcatcaactcgtgaattggtcctgcgccctaaggagcgcaatctcagatatcgaagtggaaaatcgtcccctgccaggtcacactcagctacggctgccaggctgtccaacccccgtgtcttttgggctccttttttctgtcgcgtttcctgtggatggcgaaccagacgcagaggtagttgtaggcacaacacgcccagagaccttgcctggcgacgtcgcggtcgctgttcaccctgacgatagccggtacacacacctgcacgggcgtcaacttcgccatccactgatgggacagccgctgcccctaattactgactatgccgtacagccccacgttgggaccggtgctgtgaaagtgaccccagctcactcccccgcagacgccgagatgggcgcacgtcacggcctcagccctctcaacgtgattgcagaagacgggacgatgacaagcttgtgcggcgattggttgcaaggactccaccgctttgtggcacgagagaagataatgtctgtgttgtccgaatggggcctgttccggggtctccagaatcacccaatggtgctgcctatttgctctcggtccggggacgtgatcgagtatctgctgaaaaatcagtggttcgtccggtgccaggaaatgggagccagggccgctaaagcagtggaaagtggggcattagagctctctccatcctttcaccagaagaattggcagcactggttttctcacataggcgattggtgcgtgagtcgccagctgtggtggggacatcagattcctgcctacctggtggtcgaggaccacgcgcagggggaggaagactgttgggtggtcggcagatctgaggcggaagctagggaggtggccgcagagctgactggacgcccaggggcagagcttactcttgagcgagatcccgatgtgctggacacatggttttcttccgccctcttcccgttcagcgccctcgggtggccccaggaaaccccagacctggcacggttttaccccctgtccttgcttgaaactggctcagacctcttactcttctgggtgggcagaatggtcatgttgggtacccaacttaccggacagctcccattctctaaggtgttgcttcacccgatggtgagagaccggcagggcagaaagatgtccaagtcactggggaacgtgttggatcccagagatattatctcaggagtggagatgcaggtgttacaggagaaactccgaagcgggaacctggatcctgccgagctggcgatagtcgccgcagcccagaagaaggactttccacacgggattcctgaatgtggcactgatgccttgagattcacactttgctcacacggtgtacaggcaggcgacctccacctgtctgtgtccgaggtccagtcgtgcaggcacttttgtaacaagatatggaacgcactccggtttatcctcaatgctctgggagagaaattcgtcccccagcctgcagaagaattgagcccatcttctcccatggacgcatggatattaagtcgtctggccctggcggcacaggagtgcgaacggggatttctcacccgagagctcagcctcgtaacgcacgcccttcaccacttttggctgcataacctctgcgatgtgtatctcgaagccgttaagccggtgctctggcacagccccaggcctctgggcccacctcaggttttgttttcctgtgccgacctggggttaaggctgctggccccattaatgcccttcctcgctgaggagctctggcagcgcctgcccccacgtcctgggtgcccaccggcaccatcaatctcagtggctccttacccctcagcgtgtagcctcgagcattggcggcagccggagttagaacgccgattttctagagtccaggaggtcgtccaggtccttcgagcacttcgggcaacttatcaactaactaaagccaggccaagagtcttgctgcagtccagtgaacccggagatcagggccttttcgaggcattccttgagccgctaggaactcttggatactgcggcgctgtgggacttctgcctccaggtgcggcagccccatccggatgggcccaggccccactctccgatacagcacaagtgtacatggaattacaagggctggttgacccacagattcagctgccactgctggccgcacggagatacaagctccagaaacagctggatagtttaaccgcgaggaccccaagtgaaggcgaagccggtacccagcgccagcagaagctgagtagcttgcagctggagttaagtaagctagacaaagctgccagccacctacagcagcttatggatgagccacctgcccctggctcccccgaactttag

SEQ ID NO: 65410 - DNA, 4073 bp, Artificial Sequence
  derived and/or modified sequence
gccagctgctgcgcatgcgccggccggggccccgcccccatgcgccgcgcggctccagggccacgttccagggtcgggtttggtggattcctcagtccctgccgccgcggggcgccctgggatagcggcggggcctcctggtgagcgcgcgccggggcggcctccgggaagtgggagacgctgcgggtcctgggcccaggccttgggatgggcgggaaggcttggccgcgccgggctgtgggcactgcaggaggcccctgtgcaggtggagatcgccgcggccctggcgggactccttgctggctcttgggcgcgctgatgcccatcatctccctgagtttctgagccctatctctcatgtgtcagtggtcaccgccgaatccagacactccggccctgttccggaagagccctgatatccgtggctccatggtgctgtctgtcgataccatgcactctagctctcaaggaggaaaggttttgtggaagggaatagagacttggaataacagacctgtgctaattagagacaggaaagatggaacaaggggagtgacccttctccacccccatatcctaatgtgctctctctctatccagaacagatctcggcccctttccaaacactcctgatgcctcatttgcctctcgcctcttttcgaccaccattttgggggctgaggcactcacggggcctccccaggtttcactccgtttctacacagtcggagccccatggatctcccatctcccggaggaaccgtgaagccaaacagaagcgcctgcgagagaagcaggcgactctggaggctgagatagcaggggagagcaagtcacctgcagaatccattaaggcctggaggcctaaggagttagtattgtatgaaatccctacgaaacccggtgaaaagaaagatgtctctgggcccctgcctcctgcatacagcccccgatatgttgaggctgcctggtacccgtggtgggtacgagagggcttcttcaaaccagaatatcaggcccggctgccccaagctacaggggagaccttttccatgtgtatcccacctcccaatgtcactggctccctgcacattggccacgcactcacggtggccatacaggatgccctcgtgcgctggcaccggatgcgtggggatcaagtgctgtgggtccctggttcagatcatgcaggaattgctacacaagctgtggtggagaaacaactgtggaaggaacggggagtgaggagacatgagctgagccgggaggccttccttagggaggtgtggcagtggaaggaggcgaaaggtggagagatctgtgagcagctgcgagctctgggtgcctccctggactgggatcgagagtgttttaccatggatgttggctcctcagtggctgtgactgaagcttttgtgcggctctacaaggcggggttgctgtaccggaaccatcagcttgtcaactggtcatgtgctttaagatcagccatctcggacattgaggtggagaaccggcccctgcctggccacacacagcttcgactgcctggctgccccacccccgtgtcttttggcctcctattttctgttgccttccccgtggatggagagcctgatgcagaggttgtggtaggaaccacaaggccagagacgctgcctggagatgtggctgtggccgttcatccagacgactcgcgatacacacatctacacgggcgacagcttcgtcaccccttgatggggcagcctcttcccctcatcacagactatgctgttcagccacatgtgggcacgggggcagtgaaggtgactccagctcacagtcctgccgatgctgagatgggggcccgacatggcttgagccccttgaatgtcattgcggaggatgggaccatgacctccctctgcggggactggctgcagggtcttcaccggtttgtggcccgggaaaagataatgtctgtgctgagtgaatggggcctgttccggggcctccagaaccaccccatggtactgcccatctgcagccgttctggggatgtgatagaatacctgctgaagaaccagtggtttgtccgctgccaggaaatgggggcccgagctgccaaggctgtggagtcgggggccctggagctcagtccctccttccaccagaagaactggcagcactggttttcccatattggggactggtgtgtctcccggcagctgtggtggggccatcagattccagcctacctggttgtagaggaccatgcgcagggagaagaggactgttgggtggttgggcggtcagaggctgaggccagagaggtagcagcggaactgacagggaggccaggggcagagctgaccctggagagggatcctgatgtcctagacacatggttttcttctgccctgttccccttttctgccctgggctggccccaagagaccccagaccttgctcgtttctaccccctgtcacttttggaaacgggcagcgaccttctgctgttctgggtgggccgcatggtcatgttggggacccagctcacagggcagctgcccttcagcaaggtgcttcttcatcccatggttcgggacaggcagggccggaagatgagcaagtccctggggaatgtgctggacccaagagacatcatcagtggggtggagatgcaggtgctgcaggaaaagctgagaagcggaaatttggaccctgcagagctggccattgtggctgcagcacagaaaaaggactttcctcacgggatccctgagtgtgggacagatgccctgagattcacactctgctcccatggagttcaggcgggcgacttgcacctgtcagtctctgaggtccagagctgccgacatttctgcaacaagatctggaatgctcttcgctttatcctcaatgctttaggggagaaatttgtgccacagcctgctgaggagctgtctccctcctccccgatggatgcctggatcctgagccgccttgccctggctgcccaggagtgtgagcggggcttcctcacccgagagctctcgctcgtcactcatgccctgcaccacttctggcttcacaacctctgtgacgtctacctggaggctgtgaagcccgtgctgtggcactcgccccgccccctggggccccctcaggtcctgttctcctgcgctgacctcggcctccgcctcctggccccactgatgcccttcctggctgaagagctctggcagaggctgccccccaggcctggttgcccccctgcccccagcatctcggttgccccctaccccagcgcctgcagcttggagcactggcgccagccagagctggagcggcgcttctcccgggtccaagaggtcgtgcaggtgctaagggctctccgagccacgtaccagctcaccaaagcccggccccgagtgctgctgcagagctcagagcctggggaccagggcctcttcgaggccttcttggagcccctgggcaccctgggctactgtggggctgtgggcctgttacccccaggcgcagcagctccctccggctgggcccaggctccactcagtgacacggctcaagtctacatggagctgcagggcctggtggacccgcagatccagctacctctgttagccgcccgaaggtacaagttgcagaagcagcttgatagcctcacagccaggaccccatcagaaggggaggcagggactcagaggcaacaaaagctttcttccctccagctggaattgtcaaaactggacaaggcagcctctcacctccagcagctgatggatgagcctccagccccagggagcccggagctctaactcatcatccccatcagttttcctccctctcagacctgtctttgaggacaaacagatttgtcagctgtcagggtgcagtgggacgtcagagactatgtggtccatcgccttcattgtgtaaatgaggacacagactggcttggtcgcagtgactgtggtgtccttgagatgctcacattactgcccggcctgcctcccacctggaagtctgggaatgaggagattgagataaacttttgaaatcccaaa

SEQ ID NO: 65411 - DNA, 460 bp, Artificial Sequence
  derived and/or modified sequence
acgctgcgggtcctgggcccaggccttgggatgggcgggaaggcttggccgcgccgggctgtgggcactgcaggaggcccctgtgcagatctcggcccctttccaaacactcctgatgcctcatttgcctctcgcctcttttcgaccaccattttgggggctgaggcactcacggggcctccccaggtttcactccgtttctacacagtcggagccccatggatctcccatctcccggaggaaccgtgaagccaaacagaagcgcctgcgagagaagcaggcgactctggaggctgagatagcaggggagagcaagtcacctgcagaatccattaaggcctggaggcctaaggagttagtattgtatgaaatccctacgaaacccggtgaaaagaaagatgtctctgggcccctgcctcctgcatacagcccccgatatgttgaggctgcctggtacccg

SEQ ID NO: 65412 - DNA, 1103 bp, Artificial Sequence
  derived and/or modified sequence
cgcggctccagggccacgttccagggtcgggtttggtggattcctcagtccctgccgccgcggggcgccctgggatagcggcggggcctcctgaacagatctcggcccctttccaaacactcctgatgcctcatttgcctctcgcctcttttcgaccaccattttgggggctgaggcactcacggggcctccccaggtttcactccgtttctacacagtcggagccccatggatctcccatctcccggaggaaccgtgaagccaaacagaagcgcctgcgagagaagcaggcgactctggaggctgagatagcaggggagagcaagtcacctgcagaatccattaaggcctggaggcctaaggagttagtattgtatgaaatccctacgaaacccggtgaaaagaaagatgtctctgggcccctgcctcctgcatacagcccccgatatgttgaggctgcctggtacccgtggtgggtacgagagggcttcttcaaaccagaatatcaggcccggctgccccaagctacaggggagaccttttccatgtgtatcccacctcccaatgtcactggctccctgcacattggccacgcactcacggtggccatacaggatgccctcgtgcgctggcaccggatgcgtggggatcaagtgctgtgggtccctggttcagatcatgcaggaattgctacacaagctgtggtggagaaacaactgtggaaggaacggggagtgaggagacatgagctgagccgggaggccttccttagggaggtgtggcagtggaaggaggcgaaaggtggagagatctgtgagcagctgcgagctctgggtgcctccctggactgggatcgagagtgttttaccatggatgttggctcctcagtggctgtgactgaagcttttgtgcggctctacaaggcggggttgctgtaccggaaccatcagcttgtcaactggtcatgtgctttaagatcagccatctcggacattgaggtggagaaccggcccctgcctggccacacacagcttcgactgcctggctgccccacccccgtgtcttttggcctcctattttctgttgccttccccgtggatgga

SEQ ID NO: 65413 - DNA, 1029 bp, Artificial Sequence
  derived and/or modified sequence
gttccagggtcgggtttggtggattcctcagtccctgccgccgcggggcgccctgggatagcggcggggcctcctgaacagatctcggcccctttccaaacactcctgatgcctcatttgcctctcgcctcttttcgaccaccattttgggggctgaggcactcacggggcctccccaggtttcactccgtttctacacagtcggagccccatggatctcccatctcccggaggaaccgtgaagccaaacagaagcgcctgcgagagaagcaggcgactctggaggctgagatagcaggggagagcaagtcacctgcagaatccattaaggcctggaggcctaaggagttagtattgtatgaaatccctacgaaacccggtgaaaagaaagatgtctctgggcccctgcctcctgcatacagcccccgatatgttgaggctgcctggtacccgtggtgggtacgagagggcttcttcaaaccagaatatcaggcccggctgccccaagctacaggggagaccttttccatgtgtatcccacctcccaatgtcactggctccctgcacattggccacgcactcacggtggccatacaggatgccctcgtgcgctggcaccggatgcgtggggatcaagtgctgtgggtccctggttcagatcatgcaggaattgctacacaagctgtggtggagaaacaactgtggaaggaacggggagtgaggagacatgagctgagccgggaggccttccttagggaggtgtggcagtggaaggaggcgaaaggtggagagatctgtgagcagctgcgagctctgggtgcctccctggactgggatcgagtgttttaccatggatgttggctcctcagtggctgtgactgaagcttttgtgcggctctacaaggcggggttgctgtaccggaaccatcagcttgtcaactggtcatgtgctttaagatcagccatctcggacattgaggtggagaaccggcccctgcctggccacacacagcttcgactgcctggctg

SEQ ID NO: 65414 - DNA, 3377 bp, Artificial Sequence
  derived and/or modified sequence
gccagctgctgcgcatgcgccggccggggccccgcccccatgcgccgcgcggctccagggccacgttccagggtcgggtttggtggattcctcagtccctgccgccgcggggcgccctgggatagcggcggggcctcctgtcacctgcagaatccattaaggcctggaggcctaaggagttagtattgtatgaaatccctacgaaacccggtgaaaagaaagatgtctctgggcccctgcctcctgcatacagcccccgatatgttgaggctgcctggtacccgtggtgggtacgagagggcttcttcaaaccagaatatcaggcccggctgccccaagctacaggggagaccttttccatgtgtatcccacctcccaatgtcactggctccctgcacattggccacgcactcacggtggccatacaggatgccctcgtgcgctggcaccggatgcgtggggatcaagtgctgtgggtccctggttcagatcatgcaggaattgctacacaagctgtggtggagaaacaactgtggaaggaacggggagtgaggagacatgagctgagccgggaggccttccttagggaggtgtggcagtggaaggaggcgaaaggtggagagatctgtgagcagctgcgagctctgggtgcctccctggactgggatcgagagtgttttaccatggatgttggctcctcagtggctgtgactgaagcttttgtgcggctctacaaggcggggttgctgtaccggaaccatcagcttgtcaactggtcatgtgctttaagatcagccatctcggacattgaggtggagaaccggcccctgcctggccacacacagcttcgactgcctggctgccccacccccgtgtcttttggcctcctattttctgttgccttccccgtggatggagagcctgatgcagaggttgtggtaggaaccacaaggccagagacgctgcctggagatgtggctgtggccgttcatccagacgactcgcgatacacacatctacacgggcgacagcttcgtcaccccttgatggggcagcctcttcccctcatcacagactatgctgttcagccacatgtgggcacgggggcagtgaaggtgactccagctcacagtcctgccgatgctgagatgggggcccgacatggcttgagccccttgaatgtcattgcggaggatgggaccatgacctccctctgcggggactggctgcagggtcttcaccggtttgtggcccgggaaaagataatgtctgtgctgagtgaatggggcctgttccggggcctccagaaccaccccatggtactgcccatctgcagccgttctggggatgtgatagaatacctgctgaagaaccagtggtttgtccgctgccaggaaatgggggcccgagctgccaaggctgtggagtcgggggccctggagctcagtccctccttccaccagaagaactggcagcactggttttcccatattggggactggtgtgtctcccggcagctgtggtggggccatcagattccagcctacctggttgtagaggaccatgcgcagggagaagaggactgttgggtggttgggcggtcagaggctgaggccagagaggtagcagcggaactgacagggaggccaggggcagagctgaccctggagagggatcctgatgtcctagacacatggttttcttctgccctgttccccttttctgccctgggctggccccaagagaccccagaccttgctcgtttctaccccctgtcacttttggaaacgggcagcgaccttctgctgttctgggtgggccgcatggtcatgttggggacccagctcacagggcagctgcccttcagcaaggtgcttcttcatcccatggttcgggacaggcagggccggaagatgagcaagtccctggggaatgtgctggacccaagagacatcatcagtggggtggagatgcaggtgctgcaggaaaagctgagaagcggaaatttggaccctgcagagctggccattgtggctgcagcacagaaaaaggactttcctcacgggatccctgagtgtgggacagatgccctgagattcacactctgctcccatggagttcaggcgggcgacttgcacctgtcagtctctgaggtccagagctgccgacatttctgcaacaagatctggaatgctcttcgctttatcctcaatgctttaggggagaaatttgtgccacagcctgctgaggagctgtctccctcctccccgatggatgcctggatcctgagccgccttgccctggctgcccaggagtgtgagcggggcttcctcacccgagagctctcgctcgtcactcatgccctgcaccacttctggcttcacaacctctgtgacgtctacctggaggctgtgaagcccgtgctgtggcactcgccccgccccctggggccccctcaggtcctgttctcctgcgctgacctcggcctccgcctcctggccccactgatgcccttcctggctgaagagctctggcagaggctgccccccaggcctggttgcccccctgcccccagcatctcggttgccccctaccccagcgcctgcagcttggagcactggcgccagccagagctggagcggcgcttctcccgggtccaagaggtcgtgcaggtgctaagggctctccgagccacgtaccagctcaccaaagcccggccccgagtgctgctgcagagctcagagcctggggaccagggcctcttcgaggccttcttggagcccctgggcaccctgggctactgtggggctgtgggcctgttacccccaggcgcagcagctccctccggctgggcccaggctccactcagtgacacggctcaagtctacatggagctgcagggcctggtggacccgcagatccagctacctctgttagccgcccgaaggtacaagttgcagaagcagcttgatagcctcacagccaggaccccatcagaaggggaggcagggactcagaggcaacaaaagctttcttccctccagctggaattgtcaaaactggacaaggcagcctctcacctccagcagctgatggatgagcctccagccccagggagcccggagctctaactcatcatccccatcagttttcctccctctcagacctgtctttgaggacaaacagatttgtcagctgtcagggtgcagtgggacgtcagagactatgtggtccatcgccttcattgtgtaaatgaggacacagactggcttggtcgcagtgactgtggtgtccttgagatgctcacattactgcccggcctgcctcccacctggaagtctgggaatgaggagattgagataaacttttgaaatccc

SEQ ID NO: 65415 - DNA, 3609 bp, Artificial Sequence
  derived and/or modified sequence
ggcggggcctcctggtgagcgcgcgccggggcggcctccgggaagtgggagacgctgcgggtcctgggcccaggccttgggatgggcgggaaggcttggccgcgccgggctgtgggcactgcaggaggcccctgtgcagaacagatctcggcccctttccaaacactcctgatgcctcatttgcctctcgcctcttttcgaccaccattttgggggctgaggcactcacggggcctccccaggtttcactccgtttctacacagtcggagccccatggatctcccatctcccggaggaaccgtgaagccaaacagaagcgcctgcgagagaagcaggcgactctggaggctgagatagcaggggagagcaagtcacctgcagaatccattaaggcctggaggcctaaggagttagtattgtatgaaatccctacgaaacccggtgaaaagaaagatgtctctgggcccctgcctcctgcatacagcccccgatatgttgaggctgcctggtacccgtggtgggtacgagagggcttcttcaaaccagaatatcaggcccggctgccccaagctacaggggagaccttttccatgtgtatcccacctcccaatgtcactggctccctgcacattggccacgcactcacggtggccatacaggatgccctcgtgcgctggcaccggatgcgtggggatcaagtgctgtgggtccctggttcagatcatgcaggaattgctacacaagctgtggtggagaaacaactgtggaaggaacggggagtgaggagacatgagctgagccgggaggccttccttagggaggtgtggcagtggaaggaggcgaaaggtggagagatctgtgagcagctgcgagctctgggtgcctccctggactgggatcgagagtgttttaccatggatgttggctcctcagtggctgtgactgaagcttttgtgcggctctacaaggcggggttgctgtaccggaaccatcagcttgtcaactggtcatgtgctttaagatcagccatctcggacattgaggtggagaaccggcccctgcctggccacacacagcttcgactgcctggctgccccacccccgtgtcttttggcctcctattttctgttgccttccccgtggatggagagcctgatgcagaggttgtggtaggaaccacaaggccagagacgctgcctggagatgtggctgtggccgttcatccagacgactcgcgatacacacatctacacgggcgacagcttcgtcaccccttgatggggcagcctcttcccctcatcacagactatgctgttcagccacatgtgggcacgggggcagtgaaggtgactccagctcacagtcctgccgatgctgagatgggggcccgacatggcttgagccccttgaatgtcattgcggaggatgggaccatgacctccctctgcggggactggctgcagggtcttcaccggtttgtggcccgggaaaagataatgtctgtgctgagtgaatggggcctgttccggggcctccagaaccaccccatggtactgcccatctgcagccgttctggggatgtgatagaatacctgctgaagaaccagtggtttgtccgctgccaggaaatgggggcccgagctgccaaggctgtggagtcgggggccctggagctcagtccctccttccaccagaagaactggcagcactggttttcccatattggggactggtgtgtctcccggcagctgtggtggggccatcagattccagcctacctggttgtagaggaccatgcgcagggagaagaggactgttgggtggttgggcggtcagaggctgaggccagagaggtagcagcggaactgacagggaggccaggggcagagctgaccctggagagggatcctgatgtcctagacacatggttttcttctgccctgttccccttttctgccctgggctggccccaagagaccccagaccttgctcgtttctaccccctgtcacttttggaaacgggcagcgaccttctgctgttctgggtgggccgcatggtcatgttggggacccagctcacagggcagctgcccttcagcaaggtgcttcttcatcccatggttcgggacaggcagggccggaagatgagcaagtccctggggaatgtgctggacccaagagacatcatcagtggggtggagatgcaggtgctgcaggaaaagctgagaagcggaaatttggaccctgcagagctggccattgtggctgcagcacagaaaaaggactttcctcacgggatccctgagtgtgggacagatgccctgagattcacactctgctcccatggagttcaggcgggcgacttgcacctgtcagtctctgaggtccagagctgccgacatttctgcaacaagatctggaatgctcttcgctttatcctcaatgctttaggggagaaatttgtgccacagcctgctgaggagctgtctccctcctccccgatggatgcctggatcctgagccgccttgccctggctgcccaggagtgtgagcggggcttcctcacccgagagctctcgctcgtcactcatgccctgcaccacttctggcttcacaacctctgtgacgtctacctggaggctgtgaagcccgtgctgtggcactcgccccgccccctggggccccctcaggtcctgttctcctgcgctgacctcggcctccgcctcctggccccactgatgcccttcctggctgaagagctctggcagaggctgccccccaggcctggttgcccccctgcccccagcatctcggttgccccctaccccagcgcctgcagcttggagcactggcgccagccagagctggagcggcgcttctcccgggtccaagaggtcgtgcaggtgctaagggctctccgagccacgtaccagctcaccaaagcccggccccgagtgctgctgcagagctcagagcctggggaccagggcctcttcgaggccttcttggagcccctgggcaccctgggctactgtggggctgtgggcctgttacccccaggcgcagcagctccctccggctgggcccaggctccactcagtgacacggctcaagtctacatggagctgcagggcctggtggacccgcagatccagctacctctgttagccgcccgaaggtacaagttgcagaagcagcttgatagcctcacagccaggaccccatcagaaggggaggcagggactcagaggcaacaaaagctttcttccctccagctggaattgtcaaaactggacaaggcagcctctcacctccagcagctgatggatgagcctccagccccagggagcccggagctctaactcatcatccccatcagttttcctccctctcagacctgtctttgaggacaaacagatttgtcagctgtcagggtgcagtgggacgtcagagactatgtggtccatcgccttcattgtgtaaatgaggacacagactggcttggtcgcagtgactgtggtgtccttgagatgctcacattactgcccggcctgcctcccacctggaagtctgggaatgaggagattgagataaacttttgaaatccc

SEQ ID NO: 65416 - DNA, 3192 bp, Artificial Sequence
  derived and/or modified sequence
atgccccacctgcccctggccagcttcagaccccccttctggggcctgagacacagcagaggcctgcccagattccacagcgtgagcacccagagcgagccccacggcagccccatcagcagaagaaacagagaggccaagcagaagagactgagagagaagcaggccaccctggaggccgagatcgccggcgagagcaagagccccgccgagagcatcaaggcctggagacccaaggagctggtgctgtacgagatccccaccaagcccggcgagaagaaggacgtgagcggccccctgccccccgcctacagccccagatacgtggaggccgcctggtacccctggtgggtgagagagggcttcttcaagcccgagtaccaggccagactgccccaggccaccggcgagaccttcagcatgtgcatccccccccccaacgtgaccggcagcctgcacatcggccacgccctgaccgtggccatccaggacgccctggtgagatggcacagaatgagaggcgaccaggtgctgtgggtgcccggcagcgaccacgccggcatcgccacccaggccgtggtggagaagcagctgtggaaggagagaggcgtgagaagacacgagctgagcagagaggccttcctgagagaggtgtggcagtggaaggaggccaagggcggcgagatctgcgagcagctgagagccctgggcgccagcctggactgggacagagagtgcttcaccatggacgtgggcagcagcgtggccgtgaccgaggccttcgtgagactgtacaaggccggcctgctgtacagaaaccaccagctggtgaactggagctgcgccctgagaagcgccatcagcgacatcgaggtggagaacagacccctgcccggccacacccagctgagactgcccggctgccccacccccgtgagcttcggcctgctgttcagcgtggccttccccgtggacggcgagcccgacgccgaggtggtggtgggcaccaccagacccgagaccctgcccggcgacgtggccgtggccgtgcaccccgacgacagcagatacacccacctgcacggcagacagctgagacaccccctgatgggccagcccctgcccctgatcaccgactacgccgtgcagccccacgtgggcaccggcgccgtgaaggtgacccccgcccacagccccgccgacgccgagatgggcgccagacacggcctgagccccctgaacgtgatcgccgaggacggcaccatgaccagcctgtgcggcgactggctgcagggcctgcacagattcgtggccagagagaagatcatgagcgtgctgagcgagagaggcctgttcagaggcctgcagaaccaccccatggtgctgcccatctgcagcagaagcggcgacgtgatcgagtacctgctgaagaaccagtggttcgtgagatgccaggagatgggcgccagagccgccaaggccgtggagagcggcgccctggagctgagccccagcttccaccagaagaactggcagcactggttcagccacatcggcgactggtgcgtgagcagacagctgtggtggggccaccagatccccgcctacctggtggtggaggaccacgcccagggcgaggaggactgctgggtggtgggcagaagcgaggccgaggccagagaggtggccgccgagctgaccggcagacccggcgccgagctgaccctggagagagaccccgacgtgctggacacctggttcagcagcgccctgttccccttcagcgccctgggctggccccaggagacccccgacctggccagattctaccccctgagcctgctggagaccggcagcgacctgctgctgttctgggtgggcagaatggtgatgctgggcacccagctgaccggccagctgcccttcagcaaggtgctgctgcaccccatggtgagagacagacagggcagaaagatgagcaagagcctgggcaacgtgctggaccccagagacatcatcagcggcgtggagatgcagctgctgcaggagaagctgagaagcggcaacctggaccccgccgagctggccatcgtggccgccgcccagaagaaggacttcccccacggcatccccgagtgcggcaccgacgccctgagattcaccctgtgcagccacggcgtgcaggccggcgacctgcacctgagcgtgagcgaggtgcagagctgcagacacttctgcaacaagatctggaacgccctgagattcatcctgaacgccctgggcgagaagttcgtgccccagcccgccgaggagctgagccccagcagccccatggacgcctggatcctgagcagactggccctggccgcccaggagtgcgagagaggcttcctgaccagagagctgagcctggtgacccacgccctgcaccacttctggctgcacaacctgtgcgacgtgtacctggaggccgtgaagcccgtgctgtggcacagccccagacccctgggccccccccaggtgctgttcagctgcgccgacctgggcctgagactgctggcccccctgatgcccttcctggccgaggagctgtggcagagactgccccccagacccggctgcccccccgcccccagcatcagcgtggccccctaccccagcgcctgcagcctggagcactggagacagcccgagctggagagaagattcagcagagtgcaggaggtggtgcaggtgctgagagccctgagagccacctaccagctgaccaaggccagacccagagtgctgctgcagagcagcgagcccggcgaccagggcctgttcgaggccttcctggagcccctgggcaccctgggctactgcggcgccgtgggcctgctgccccccggcaccgccgcccccagcggctgggcccaggcccccctgagcgacaccgcccaggtgtacatggagctgcagggcctggtggacccccagatccagctgcccctgctggccgccagaagatacaagctgcagaagcagctggacagcctgaccgccagaacccccagcgagggcgaggccggcacccagagacagcagaagctgagcagcctgcagctggagctgagcaagctggacaaggccgccagccacctgagacagctgatggacgagccccccgcccccggcagccccgagctgtag

SEQ ID NO: 65417 - DNA, 3192 bp, Artificial Sequence
  derived and/or modified sequence
atgccccacctgcccctggccagcttcagaccccccttctggggcctgagacacagcagaggcctgcccagattccacagcgtgagcacccagagcgagccccacggcagccccatcagcagaagaaacagagaggccaagcagaagagactgagagagaagcaggccaccctggaggccgagatcgccggcgagagcaagagccccgccgagagcatcaaggcctggagacccaaggagctggtgctgtacgagatccccaccaagcccggcgagaagaaggacgtgagcggccccctgccccccgcctacagccccagatacgtggaggccgcctggtacccctggtgggtgagagagggcttcttcaagcccgagtaccaggccagactgccccaggccaccggcgagaccttcagcatgtgcatccccccccccaacgtgaccggcagcctgcacatcggccacgccctgaccgtggccatccaggacgccctggtgagatggcacagaatgagaggcgaccaggtgctgtgggtgcccggcagcgaccacgccggcatcgccacccaggccgtggtggagaagcagctgtggaaggagagaggcgtgagaagacacgagctgagcagagaggccttcctgagagaggtgtggcagtggaaggaggccaagggcggcgagatctgcgagcagctgagagccctgggcgccagcctggactgggacagagagtgcttcaccatggacgtgggcagcagcgtggccgtgaccgaggccttcgtgagactgtacaaggccggcctgctgtacagaaaccaccagctggtgaactggagctgcgccctgagaagcgccatcagcgacatcgaggtggagaacagacccctgcccggccacacccagctgagactgcccggctgccccacccccgtgagcttcggcctgctgttcagcgtggccttccccgtggacggcgagcccgacgccgaggtggtggtgggcaccaccagacccgagaccctgcccggcgacgtggccgtggccgtgcaccccgacgacagcagatacacccacctgcacggcagacagctgagacaccccctgatgggccagcccctgcccctgatcaccgactacgccgtgcagccccacgtgggcaccggcgccgtgaaggtgacccccgcccacagccccgccgacgccgagatgggcgccagacacggcctgagccccctgaacgtgatcgccgaggacggcaccatgaccagcctgtgcggcgactggctgcagggcctgcacagattcgtggccagagagaagatcatgagcgtgctgagcgagtggggcctgttcagaggcctgcagaaccaccccatggtgctgcccatctgcagcagaagcggcgacgtgatcgagtacctgctgaagaaccagtggttcgtgagatgccaggagatgggcgccagagccgccaaggccgtggagagcggcgccctggagctgagccccagcttccaccagaagaactggcagcactggttcagccacatcggcgactggtgcgtgagcagacagctgtggtggggccaccagatccccgcctacctggtggtggaggaccacgcccagggcgaggaggactgctgggtggtgggcagaagcgaggccgaggccagagaggtggccgccgagctgaccggcagacccggcgccgagctgaccctggagagagaccccgacgtgctggacacctggttcagcagcgccctgttccccttcagcgccctgggctggccccaggagacccccgacctggccagattctaccccctgagcctgctggagaccggcagcgacctgctgctgttctgggtgggcagaatggtgatgctgggcacccagctgaccggccagctgcccttcagcaaggtgctgctgcaccccatggtgagagacagacagggcagaaagatgagcaagagcctgggcaacgtgctggaccccagagacatcatcagcggcgtggagatgcaggtgctgcaggagaagctgagaagcggcaacctggaccccgccgagctggccatcgtggccgccgcccagaagaaggacttcccccacggcatccccgagtgcggcaccgacgccctgagattcaccctgtgcagccacggcgtgcaggccggcgacctgcacctgagcgtgagcgaggtgcagagctgcagacacttctgcaacaagatctggaacgccctgagattcatcctgaacgccctgggcgagaagttcgtgccccagcccgccgaggagctgagccccagcagccccatggacgcctggatcctgagcagactggccctggccgcccaggagtgcgagagaggcttcctgaccagagagctgagcctggtgacccacgccctgcaccacttctggctgcacaacctgtgcgacgtgtacctggaggccgtgaagcccgtgctgtggcacagccccagacccctgggccccccccaggtgctgttcagctgcgccgacctgggcctgagactgctggcccccctgatgcccttcctggccgaggagctgtggcagagactgccccccagacccggctgcccccccgcccccagcatcagcgtggccccctaccccagcgcctgcagcctggagcactggagacagcccgagctggagagaagattcagcagagtgcaggaggtggtgcaggtgctgagagccctgagagccacctaccagctgaccaaggccagacccagagtgctgctgcagagcagcgagcccggcgaccagggcctgttcgaggccttcctggagcccctgggcaccctgggctactgcggcgccgtgggcctgctgccccccggcgccgccgcccccagcggctgggcccaggcccccctgagcgacaccgcccaggtgtacatggagctgcagggcctggtggacccccagatccagctgcccctgctggccgccagaagatacaagctgcagaagcagctggacagcctgaccgccagaacccccagcgagggcgaggccggcacccagagacagcagaagctgagcagcctgcagctggagctgagcaagctggacaaggccgccagccacctgagacagctgatggacgagccccccgcccccggcagccccgagctgtag

SEQ ID NO: 65418 - DNA, 3282 bp, Artificial Sequence
  derived and/or modified sequence
atgggcggcaaggcctggcccagaagagccgtgggcaccgccggcggcccctgcgccgagcagatcagcgcccccttccagaccctgctgatgccccacctgcccctggccagcttcagaccccccttctggggcctgagacacagcagaggcctgcccagattccacagcgtgagcacccagagcgagccccacggcagccccatcagcagaagaaacagagaggccaagcagaagagactgagagagaagcaggccaccctggaggccgagatcgccggcgagagcaagagccccgccgagagcatcaaggcctggagacccaaggagctggtgctgtacgagatccccaccaagcccggcgagaagaaggacgtgagcggccccctgccccccgcctacagccccagatacgtggaggccgcctggtacccctggtgggtgagagagggcttcttcaagcccgagtaccaggccagactgccccaggccaccggcgagaccttcagcatgtgcatccccccccccaacgtgaccggcagcctgcacatcggccacgccctgaccgtggccatccaggacgccctggtgagatggcacagaatgagaggcgaccaggtgctgtgggtgcccggcagcgaccacgccggcatcgccacccaggccgtggtggagaagcagctgtggaaggagagaggcgtgagaagacacgagctgagcagagaggccttcctgagagaggtgtggcagtggaaggaggccaagggcggcgagatctgcgagcagctgagagccctgggcgccagcctggactgggacagagagtgcttcaccatggacgtgggcagcagcgtggccgtgaccgaggccttcgtgagactgtacaaggccggcctgctgtacagaaaccaccagctggtgaactggagctgcgccctgagaagcgccatcagcgacatcgaggtggagaacagacccctgcccggccacacccagctgagactgcccggctgccccacccccgtgagcttcggcctgctgttcagcgtggccttccccgtggacggcgagcccgacgccgaggtggtggtgggcaccaccagacccgagaccctgcccggcgacgtggccgtggccgtgcaccccgacgacagcagatacacccacctgcacggcagacagctgagacaccccctgatgggccagcccctgcccctgatcaccgactacgccgtgcagccccacgtgggcaccggcgccgtgaaggtgacccccgcccacagccccgccgacgccgagatgggcgccagacacggcctgagccccctgaacgtgatcgccgaggacggcaccatgaccagcctgtgcggcgactggctgcagggcctgcacagattcgtggccagagagaagatcatgagcgtgctgagcgagtggggcctgttcagaggcctgcagaaccaccccatggtgctgcccatctgcagcagaagcggcgacgtgatcgagtacctgctgaagaaccagtggttcgtgagatgccaggagatgggcgccagagccgccaaggccgtggagagcggcgccctggagctgagccccagcttccaccagaagaactggcagcactggttcagccacatcggcgactggtgcgtgagcagacagctgtggtggggccaccagatccccgcctacctggtggtggaggaccacgcccagggcgaggaggactgctgggtggtgggcagaagcgaggccgaggccagagaggtggccgccgagctgaccggcagacccggcgccgagctgaccctggagagagaccccgacgtgctggacacctggttcagcagcgccctgttccccttcagcgccctgggctggccccaggagacccccgacctggccagattctaccccctgagcctgctggagaccggcagcgacctgctgctgttctgggtgggcagaatggtgatgctgggcacccagctgaccggccagctgcccttcagcaaggtgctgctgcaccccatggtgagagacagacagggcagaaagatgagcaagagcctgggcaacgtgctggaccccagagacatcatcagcggcgtggagatgcaggtgctgcaggagaagctgagaagcggcaacctggaccccgccgagctggccatcgtggccgccgcccagaagaaggacttcccccacggcatccccgagtgcggcaccgacgccctgagattcaccctgtgcagccacggcgtgcaggccggcgacctgcacctgagcgtgagcgaggtgcagagctgcagacacttctgcaacaagatctggaacgccctgagattcatcctgaacgccctgggcgagaagttcgtgccccagcccgccgaggagctgagccccagcagccccatggacgcctggatcctgagcagactggccctggccgcccaggagtgcgagagaggcttcctgaccagagagctgagcctggtgacccacgccctgcaccacttctggctgcacaacctgtgcgacgtgtacctggaggccgtgaagcccgtgctgtggcacagccccagacccctgggccccccccaggtgctgttcagctgcgccgacctgggcctgagactgctggcccccctgatgcccttcctggccgaggagctgtggcagagactgccccccagacccggctgcccccccgcccccagcatcagcgtggccccctaccccagcgcctgcagcctggagcactggagacagcccgagctggagagaagattcagcagagtgcaggaggtggtgcaggtgctgagagccctgagagccacctaccagctgaccaaggccagacccagagtgctgctgcagagcagcgagcccggcgaccagggcctgttcgaggccttcctggagcccctgggcaccctgggctactgcggcgccgtgggcctgctgccccccggcgccgccgcccccagcggctgggcccaggcccccctgagcgacaccgcccaggtgtacatggagctgcagggcctggtggacccccagatccagctgcccctgctggccgccagaagatacaagctgcagaagcagctggacagcctgaccgccagaacccccagcgagggcgaggccggcacccagagacagcagaagctgagcagcctgcagctggagctgagcaagctggacaaggccgccagccacctgagacagctgatggacgagccccccgcccccggcagccccgagctgtag

SEQ ID NO: 65419 - DNA, 3282 bp, Artificial Sequence
  derived and/or modified sequence
atgggcggcaaggcctggcccagaagagccgtgggcaccgccggcggcccctgcgccgagcagatcagcgcccccttccagaccctgctgatgccccacctgcccctggccagcttcagaccccccttctggggcctgagacacagcagaggcctgcccagattccacagcgtgagcacccagagcgagccccacggcagccccatcagcagaagaaacagagaggccaagcagaagagactgagagagaagcaggccaccctggaggccgagatcgccggcgagagcaagagccccgccgagagcatcaaggcctggagacccaaggagctggtgctgtacgagatccccaccaagcccggcgagaagaaggacgtgagcggccccctgccccccgcctacagccccagatacgtggaggccgcctggtacccctggtgggtgagagagggcttcttcaagcccgagtaccaggccagactgccccaggccaccggcgagaccttcagcatgtgcatccccccccccaacgtgaccggcagcctgcacatcggccacgccctgaccgtggccatccaggacgccctggtgagatggcacagaatgagaggcgaccaggtgctgtgggtgcccggcagcgaccacgccggcatcgccacccaggccgtggtggagaagcagctgtggaaggagagaggcgtgagaagacacgagctgagcagagaggccttcctgagagaggtgtggcagtggaaggaggccaagggcggcgagatctgcgagcagctgagagccctgggcgccagcctggactgggacagagagtgcttcaccatggacgtgggcagcagcgtggccgtgaccgaggccttcgtgagactgtacaaggccggcctgctgtacagaaaccaccagctggtgaactggagctgcgccctgagaagcgccatcagcgacatcgaggtggagaacagacccctgcccggccacacccagctgagactgcccggctgccccacccccgtgagcttcggcctgctgttcagcgtggccttccccgtggacggcgagcccgacgccgaggtggtggtgggcaccaccagacccgagaccctgcccggcgacgtggccgtggccgtgcaccccgacgacagcagatacacccacctgcacggcagacagctgagacaccccctgatgggccagcccctgcccctgatcaccgactacgccgtgcagccccacgtgggcaccggcgccgtgaaggtgacccccgcccacagccccgccgacgccgagatgggcgccagacacggcctgagccccctgaacgtgatcgccgaggacggcaccatgaccagcctgtgcggcgactggctgcagggcctgcacagattcgtggccagagagaagatcatgagcgtgctgagcgagagaggcctgttcagaggcctgcagaaccaccccatggtgctgcccatctgcagcagaagcggcgacgtgatcgagtacctgctgaagaaccagtggttcgtgagatgccaggagatgggcgccagagccgccaaggccgtggagagcggcgccctggagctgagccccagcttccaccagaagaactggcagcactggttcagccacatcggcgactggtgcgtgagcagacagctgtggtggggccaccagatccccgcctacctggtggtggaggaccacgcccagggcgaggaggactgctgggtggtgggcagaagcgaggccgaggccagagaggtggccgccgagctgaccggcagacccggcgccgagctgaccctggagagagaccccgacgtgctggacacctggttcagcagcgccctgttccccttcagcgccctgggctggccccaggagacccccgacctggccagattctaccccctgagcctgctggagaccggcagcgacctgctgctgttctgggtgggcagaatggtgatgctgggcacccagctgaccggccagctgcccttcagcaaggtgctgctgcaccccatggtgagagacagacagggcagaaagatgagcaagagcctgggcaacgtgctggaccccagagacatcatcagcggcgtggagatgcagctgctgcaggagaagctgagaagcggcaacctggaccccgccgagctggccatcgtggccgccgcccagaagaaggacttcccccacggcatccccgagtgcggcaccgacgccctgagattcaccctgtgcagccacggcgtgcaggccggcgacctgcacctgagcgtgagcgaggtgcagagctgcagacacttctgcaacaagatctggaacgccctgagattcatcctgaacgccctgggcgagaagttcgtgccccagcccgccgaggagctgagccccagcagccccatggacgcctggatcctgagcagactggccctggccgcccaggagtgcgagagaggcttcctgaccagagagctgagcctggtgacccacgccctgcaccacttctggctgcacaacctgtgcgacgtgtacctggaggccgtgaagcccgtgctgtggcacagccccagacccctgggccccccccaggtgctgttcagctgcgccgacctgggcctgagactgctggcccccctgatgcccttcctggccgaggagctgtggcagagactgccccccagacccggctgcccccccgcccccagcatcagcgtggccccctaccccagcgcctgcagcctggagcactggagacagcccgagctggagagaagattcagcagagtgcaggaggtggtgcaggtgctgagagccctgagagccacctaccagctgaccaaggccagacccagagtgctgctgcagagcagcgagcccggcgaccagggcctgttcgaggccttcctggagcccctgggcaccctgggctactgcggcgccgtgggcctgctgccccccggcaccgccgcccccagcggctgggcccaggcccccctgagcgacaccgcccaggtgtacatggagctgcagggcctggtggacccccagatccagctgcccctgctggccgccagaagatacaagctgcagaagcagctggacagcctgaccgccagaacccccagcgagggcgaggccggcacccagagacagcagaagctgagcagcctgcagctggagctgagcaagctggacaaggccgccagccacctgagacagctgatggacgagccccccgcccccggcagccccgagctgtag

SEQ ID NO: 65420 - DNA, 2772 bp, Artificial Sequence
  derived and/or modified sequence
atgtgcatccccccccccaacgtgaccggcagcctgcacatcggccacgccctgaccgtggccatccaggacgccctggtgagatggcacagaatgagaggcgaccaggtgctgtgggtgcccggcagcgaccacgccggcatcgccacccaggccgtggtggagaagcagctgtggaaggagagaggcgtgagaagacacgagctgagcagagaggccttcctgagagaggtgtggcagtggaaggaggccaagggcggcgagatctgcgagcagctgagagccctgggcgccagcctggactgggacagagagtgcttcaccatggacgtgggcagcagcgtggccgtgaccgaggccttcgtgagactgtacaaggccggcctgctgtacagaaaccaccagctggtgaactggagctgcgccctgagaagcgccatcagcgacatcgaggtggagaacagacccctgcccggccacacccagctgagactgcccggctgccccacccccgtgagcttcggcctgctgttcagcgtggccttccccgtggacggcgagcccgacgccgaggtggtggtgggcaccaccagacccgagaccctgcccggcgacgtggccgtggccgtgcaccccgacgacagcagatacacccacctgcacggcagacagctgagacaccccctgatgggccagcccctgcccctgatcaccgactacgccgtgcagccccacgtgggcaccggcgccgtgaaggtgacccccgcccacagccccgccgacgccgagatgggcgccagacacggcctgagccccctgaacgtgatcgccgaggacggcaccatgaccagcctgtgcggcgactggctgcagggcctgcacagattcgtggccagagagaagatcatgagcgtgctgagcgagagaggcctgttcagaggcctgcagaaccaccccatggtgctgcccatctgcagcagaagcggcgacgtgatcgagtacctgctgaagaaccagtggttcgtgagatgccaggagatgggcgccagagccgccaaggccgtggagagcggcgccctggagctgagccccagcttccaccagaagaactggcagcactggttcagccacatcggcgactggtgcgtgagcagacagctgtggtggggccaccagatccccgcctacctggtggtggaggaccacgcccagggcgaggaggactgctgggtggtgggcagaagcgaggccgaggccagagaggtggccgccgagctgaccggcagacccggcgccgagctgaccctggagagagaccccgacgtgctggacacctggttcagcagcgccctgttccccttcagcgccctgggctggccccaggagacccccgacctggccagattctaccccctgagcctgctggagaccggcagcgacctgctgctgttctgggtgggcagaatggtgatgctgggcacccagctgaccggccagctgcccttcagcaaggtgctgctgcaccccatggtgagagacagacagggcagaaagatgagcaagagcctgggcaacgtgctggaccccagagacatcatcagcggcgtggagatgcagctgctgcaggagaagctgagaagcggcaacctggaccccgccgagctggccatcgtggccgccgcccagaagaaggacttcccccacggcatccccgagtgcggcaccgacgccctgagattcaccctgtgcagccacggcgtgcaggccggcgacctgcacctgagcgtgagcgaggtgcagagctgcagacacttctgcaacaagatctggaacgccctgagattcatcctgaacgccctgggcgagaagttcgtgccccagcccgccgaggagctgagccccagcagccccatggacgcctggatcctgagcagactggccctggccgcccaggagtgcgagagaggcttcctgaccagagagctgagcctggtgacccacgccctgcaccacttctggctgcacaacctgtgcgacgtgtacctggaggccgtgaagcccgtgctgtggcacagccccagacccctgggccccccccaggtgctgttcagctgcgccgacctgggcctgagactgctggcccccctgatgcccttcctggccgaggagctgtggcagagactgccccccagacccggctgcccccccgcccccagcatcagcgtggccccctaccccagcgcctgcagcctggagcactggagacagcccgagctggagagaagattcagcagagtgcaggaggtggtgcaggtgctgagagccctgagagccacctaccagctgaccaaggccagacccagagtgctgctgcagagcagcgagcccggcgaccagggcctgttcgaggccttcctggagcccctgggcaccctgggctactgcggcgccgtgggcctgctgccccccggcaccgccgcccccagcggctgggcccaggcccccctgagcgacaccgcccaggtgtacatggagctgcagggcctggtggacccccagatccagctgcccctgctggccgccagaagatacaagctgcagaagcagctggacagcctgaccgccagaacccccagcgagggcgaggccggcacccagagacagcagaagctgagcagcctgcagctggagctgagcaagctggacaaggccgccagccacctgagacagctgatggacgagccccccgcccccggcagccccgagctgtag

SEQ ID NO: 65421 - DNA, 2772 bp, Artificial Sequence
  derived and/or modified sequence
atgtgcatccccccccccaacgtgaccggcagcctgcacatcggccacgccctgaccgtggccatccaggacgccctggtgagatggcacagaatgagaggcgaccaggtgctgtgggtgcccggcagcgaccacgccggcatcgccacccaggccgtggtggagaagcagctgtggaaggagagaggcgtgagaagacacgagctgagcagagaggccttcctgagagaggtgtggcagtggaaggaggccaagggcggcgagatctgcgagcagctgagagccctgggcgccagcctggactgggacagagagtgcttcaccatggacgtgggcagcagcgtggccgtgaccgaggccttcgtgagactgtacaaggccggcctgctgtacagaaaccaccagctggtgaactggagctgcgccctgagaagcgccatcagcgacatcgaggtggagaacagacccctgcccggccacacccagctgagactgcccggctgccccacccccgtgagcttcggcctgctgttcagcgtggccttccccgtggacggcgagcccgacgccgaggtggtggtgggcaccaccagacccgagaccctgcccggcgacgtggccgtggccgtgcaccccgacgacagcagatacacccacctgcacggcagacagctgagacaccccctgatgggccagcccctgcccctgatcaccgactacgccgtgcagccccacgtgggcaccggcgccgtgaaggtgacccccgcccacagccccgccgacgccgagatgggcgccagacacggcctgagccccctgaacgtgatcgccgaggacggcaccatgaccagcctgtgcggcgactggctgcagggcctgcacagattcgtggccagagagaagatcatgagcgtgctgagcgagtggggcctgttcagaggcctgcagaaccaccccatggtgctgcccatctgcagcagaagcggcgacgtgatcgagtacctgctgaagaaccagtggttcgtgagatgccaggagatgggcgccagagccgccaaggccgtggagagcggcgccctggagctgagccccagcttccaccagaagaactggcagcactggttcagccacatcggcgactggtgcgtgagcagacagctgtggtggggccaccagatccccgcctacctggtggtggaggaccacgcccagggcgaggaggactgctgggtggtgggcagaagcgaggccgaggccagagaggtggccgccgagctgaccggcagacccggcgccgagctgaccctggagagagaccccgacgtgctggacacctggttcagcagcgccctgttccccttcagcgccctgggctggccccaggagacccccgacctggccagattctaccccctgagcctgctggagaccggcagcgacctgctgctgttctgggtgggcagaatggtgatgctgggcacccagctgaccggccagctgcccttcagcaaggtgctgctgcaccccatggtgagagacagacagggcagaaagatgagcaagagcctgggcaacgtgctggaccccagagacatcatcagcggcgtggagatgcaggtgctgcaggagaagctgagaagcggcaacctggaccccgccgagctggccatcgtggccgccgcccagaagaaggacttcccccacggcatccccgagtgcggcaccgacgccctgagattcaccctgtgcagccacggcgtgcaggccggcgacctgcacctgagcgtgagcgaggtgcagagctgcagacacttctgcaacaagatctggaacgccctgagattcatcctgaacgccctgggcgagaagttcgtgccccagcccgccgaggagctgagccccagcagccccatggacgcctggatcctgagcagactggccctggccgcccaggagtgcgagagaggcttcctgaccagagagctgagcctggtgacccacgccctgcaccacttctggctgcacaacctgtgcgacgtgtacctggaggccgtgaagcccgtgctgtggcacagccccagacccctgggccccccccaggtgctgttcagctgcgccgacctgggcctgagactgctggcccccctgatgcccttcctggccgaggagctgtggcagagactgccccccagacccggctgcccccccgcccccagcatcagcgtggccccctaccccagcgcctgcagcctggagcactggagacagcccgagctggagagaagattcagcagagtgcaggaggtggtgcaggtgctgagagccctgagagccacctaccagctgaccaaggccagacccagagtgctgctgcagagcagcgagcccggcgaccagggcctgttcgaggccttcctggagcccctgggcaccctgggctactgcggcgccgtgggcctgctgccccccggcgccgccgcccccagcggctgggcccaggcccccctgagcgacaccgcccaggtgtacatggagctgcagggcctggtggacccccagatccagctgcccctgctggccgccagaagatacaagctgcagaagcagctggacagcctgaccgccagaacccccagcgagggcgaggccggcacccagagacagcagaagctgagcagcctgcagctggagctgagcaagctggacaaggccgccagccacctgagacagctgatggacgagccccccgcccccggcagccccgagctgtag

SEQ ID NO: 65422 - DNA, 3192 bp, Artificial Sequence
  derived and/or modified sequence
atgccgcacctgccactcgcctcctttcggcctcccttttggggtttgcggcattccagaggtttgccccgatttcattccgtgtccacgcaatctgagccccacggatctcctattagtcggagaaaccgcgaggcaaaacaaaagcggttgagagaaaagcaggcaaccttggaagctgaaatagccggagagagcaagtctccagccgagtccattaaggcctggcggccaaaagaattggttctgtatgagatccccacaaagcctggcgagaaaaaggacgttagcggtcccctgcccccggcatattcaccaagatatgtggaggcggcttggtatccttggtgggtcagagagggcttcttcaagccagaatatcaggctcggttgccccaggctaccggtgagacctttagtatgtgtattcccccccccaatgtgacaggttccctgcatatcgggcacgctctgaccgttgccatccaggacgccctagtgaggtggcacagaatgaggggcgaccaggtgctttgggtgcctggttcagatcatgccggtatagccacacaggctgtagtggaaaagcagttgtggaaagagcggggcgtccggcgccatgaactgtctcgagaggcctttctgcgcgaagtgtggcagtggaaggaagctaaggggggcgaaatatgcgagcagctccgagcactgggggcctctttggactgggatcgcgagtgttttactatggatgtaggatcctccgtcgccgtgacagaagcattcgttagactgtacaaggcgggactcctgtatcggaaccatcagttggtcaattggtcttgtgcattgcgttctgcaatctccgacatcgaagttgagaatcgcccgctccctggtcacacccagctcaggctgcctggctgccctacgcctgtaagtttcggtttgctgttctctgtcgctttccctgtcgacggcgaaccagatgctgaagtggtggtggggactacacgaccagagaccctcccaggggacgttgccgttgcggtccaccctgacgacagccggtacacccacttgcatggccggcagctccgtcaccctttgatgggccagcctctgccactgataacggattatgccgttcaaccccacgtcgggaccggagccgtgaaggtgacaccagcgcactctcctgccgatgccgagatgggtgcccggcacgggctgagccccctgaacgtaattgccgaggatggtacgatgactagcctttgcggggactggcttcagggactgcacaggttcgtggctcgagaaaaaattatgtctgtgctgtcggagagagggctcttccgtggactccaaaatcatccaatggtgctgcccatatgtagccgttctggcgacgtgatcgagtatctcctgaagaaccagtggttcgtgaggtgtcaggaaatgggagcccgggcagccaaagcagtggaaagcggggccttggagttgagccccagcttccaccaaaagaactggcagcactggttctctcacataggtgactggtgtgtgtcccggcagctatggtgggggcatcagatccccgcttatctggtggttgaagaccacgcgcagggcgaggaggactgttgggtcgtgggtcggtctgaggctgaggccagggaagtcgccgcagagctcactggtagacccggagccgaactcacactcgagagggatcccgacgtactggacacttggtttagttctgccctgttccctttttcggcgcttgggtggccccaagaaacaccagatctggctcggttctaccctctttcgctgctcgaaacgggtagcgacctgcttctattctgggtaggtaggatggtcatgttgggcacccagctgaccggacagctgcctttttctaaggtgctgctgcatcccatggtgagagataggcaggggcggaagatgagtaagtccctcggaaatgttctcgacccccgggacatcatctctggggttgagatgcagctcctccaggaaaagctccggtccgggaatctggaccccgcagaactggccatcgttgccgcagcacagaaaaaagattttccccatggcatcccggagtgcggtacagatgccctgcgtttcaccttgtgctctcacggtgtccaagccggcgacctgcatctgagcgtcagcgaagtgcagtcctgcaggcacttctgcaacaaaatctggaatgcattgagatttatcctcaacgccctgggagaaaagttcgtaccgcagcccgctgaggagctgtctccctctagcccgatggacgcatggatcttgtccagattggccctggccgcacaagaatgcgaaagaggatttctgaccagagaactgagcctcgttacccacgctttgcaccacttttggctccacaatctctgtgatgtgtacctggaggcagttaagcctgtcctctggcacagccctaggcctctgggtcctcctcaagttctcttctcttgtgcagacctgggactccgtctcctggcgccattgatgccattcctggcagaggagctatggcaacgcctgcccccacgccccggctgcccaccagcaccctcaatctctgtggcgccttacccatcagcttgtagccttgagcactggcgccagccagagttagaacgccgattttctcgggtgcaggaggtggtgcaggttcttagagccctccgggccacctatcagttgaccaaggcccgcccaagagtgttacttcagagttctgagcctggggaccaggggctgttcgaggcgttcctggaaccccttggcacgttggggtattgcggggctgtgggtctgctgcctcccggcacagccgctcccagcgggtgggcccaggcgcccctgtctgataccgcgcaagtgtatatggaactgcaggggttggtcgaccctcagatacagctccctctcctggctgctcgccgctataaactccagaagcagctagattcattaaccgcccgaactccatctgaaggcgaagccgggacccagaggcagcaaaaactgtcaagcctgcaattggaattatcaaaacttgataaggcggcaagtcacttaagacagttgatggatgaacctcccgcaccggggagtcctgaactttag

SEQ ID NO: 65423 - DNA, 3192 bp, Artificial Sequence
  derived and/or modified sequence
atgccacatctgcctctagcatctttccgccccccattctggggcctgcgccacagtcgcgggctgccccggttccacagcgtgagcacccagagtgagccacacggctctcccatctcccggcgcaacagggaagccaagcagaaaagactccgcgaaaaacaggccactcttgaagctgagatcgccggtgagtctaaatcaccagccgaaagcatcaaagcttggaggccgaaagagctggttctctacgagattccaaccaaaccaggtgagaaaaaggacgttagcgggcctctacctccagcctattctccacgatacgtggaggcggcctggtatccctggtgggtgagagaggggtttttcaaacctgaatatcaggcccggctcccccaagcaactggggagacctttagtatgtgtatcccacctcctaacgtcaccggttccctccacattgggcacgcgctgacagtcgcgatccaggatgccttagtgcgatggcataggatgcggggcgatcaggttctatgggtgcctggtagcgaccacgcaggaattgccacacaagctgtcgtggaaaagcagctttggaaagagaggggagtgagacggcacgaactgtccagagaggccttcctgagagaggtgtggcagtggaaagaggctaagggaggggagatctgtgagcagctgagggccctaggggcttctcttgactgggacagagaatgttttactatggacgtgggcagttcagtcgccgtaactgaagcatttgttcgcctctacaaagcgggtcttctttatcgaaatcaccagctggtaaattggagctgcgctctgcgtagtgccatctccgatatcgaggtggagaataggcccctgcctggacacacccagctacgactgcccgggtgccccacacctgtctcttttggattactgttttcagtggcgtttcccgtcgatggggagcctgatgctgaggtcgtcgtgggtacaactcgccccgagaccctgcctggtgacgtggcagtggctgtccatccagatgattctagatacactcatctacacggccgacagcttcggcatcctcttatgggacaacccctacccctgattactgactacgcagtccagccccatgtgggtaccggcgcagtcaaagtgactcctgcccactccccagccgatgctgagatgggggctagacacgggctaagtcctcttaacgtgatcgccgaggacgggactatgactagtctctgtggcgactggcttcagggcctgcacagattcgtggccagggagaagattatgtctgtgctctctgagtggggactgttcagagggttacaaaatcatcccatggtactgcccatctgctccaggtcaggcgacgtgatcgaatatctactgaagaaccagtggtttgttcggtgtcaggagatgggtgcccgggccgctaaggctgtggagagcggagctttggaactgagtccctcattccaccagaagaactggcagcattggttcagtcatatcggagactggtgcgtatccaggcaactgtggtgggggcaccaaatcccagcatatctggtggtggaggaccatgctcaaggcgaggaagactgttgggtcgtgggacgttctgaagccgaggctagggaagtcgcggcggagctaaccggacgcccaggtgccgagctgacactggagcgggaccccgacgtgctggacacttggttctcatcggcactttttccattttccgcgttgggatggccccaggaaacaccagacctggcgaggttttacccgttgtccctcctcgagaccggatccgacctcctgctgttctgggtcggacgaatggtgatgttaggaacccagctgactggtcagcttccattctctaaagtgctgttacaccccatggtgcgcgaccggcaaggcagaaagatgagcaaatctttgggaaacgttctggacccccgcgatatcatctctggcgtggaaatgcaggtgctccaggaaaaattacgctccggcaatctggaccctgctgaactggccatcgtagccgcagcccaaaagaaggacttcccacacggcatccccgaatgcggcaccgacgcgttacgttttaccctctgttcccacggtgtgcaggcaggagatctgcacctttctgtgtctgaggttcagagctgccgccatttttgtaataagatctggaatgcccttcgattcatcctgaatgctcttggtgaaaagttcgtgccgcagcccgcagaagagttgtccccctcttcccctatggacgcttggattctctcgagactggcgttggccgcacaggagtgcgaacgcggtttcttaaccagggaattaagccttgtgacccatgccttgcaccacttctggctccataatctgtgcgatgtctatctggaagccgtcaaacccgtgctctggcattcccctcgccctctgggaccgccccaggtgttattctcgtgcgctgacctgggcctgaggctcctcgctccccttatgccatttctcgctgaggaattatggcaacgcctgccccctcgccctggctgtcctcccgccccctctatcagtgtcgcgccttaccctagtgcatgtagtctggaacactggcggcagccagagttggagcggaggttttcccgcgtgcaggaagtagttcaggtgcttcgggctttgagggccacgtatcaactgactaaggcccggccacgtgtcctgctgcagagcagcgaacctggtgaccagggtctttttgaagccttccttgagcctctaggaactctgggctattgcggagcagttggtctgctaccgccaggcgcagctgccccatccgggtgggcacaggcccccttgtctgacacggcccaggtttatatggagttgcagggtctggtagatccacaaatccagcttccactgctagcggctcgaaggtacaagttacagaaacaactggattccttgacggcccgtaccccctccgagggtgaagctggtactcagcgtcagcagaagttgtcctctctacagctggagctcagcaagctagacaaagctgcgagccaccttcgccagctcatggatgagccaccagccccaggatctccagaactctag

SEQ ID NO: 65424 - DNA, 3192 bp, Artificial Sequence
  derived and/or modified sequence
atgccccatctccctctggcgtcctttaggcctcctttttggggtttgcggcacagccgcggcctgcctcggttccatagcgtaagcacccagagcgagcctcacggttcccctatttctagacgtaacagggaagctaagcagaagcgcctgcgagagaaacaggccaccctggaagccgaaatagccggtgaatcaaaatcgccggcagagtccattaaagcgtggcgtccaaaagaactggttctgtacgaaatccccacgaagcccggcgagaaaaaagacgtttctgggccactgcctcccgcatattcacctcgttacgtggaagccgcttggtacccatggtgggtacgggagggatttttcaagccagaatatcaggctagacttccccaggctacaggggaaacattttccatgtgcattcccccccccaacgttaccggaagcctgcatattggtcacgctctgaccgttgcgattcaggacgcactggttaggtggcatcgaatgcgcggggaccaagtgctgtgggtccctggctccgaccatgctggaattgcgacgcaagctgtggtggaaaaacagttatggaaagaaaggggcgtgagaagacacgaattgagcagggaggcttttcttagggaggtctggcagtggaaggaggccaaggggggcgagatttgcgagcagttgagagcgctgggggcatccctagactgggacagagaatgttttactatggacgtgggatcaagtgttgctgtcactgaggcattcgtcaggttgtacaaggcaggattattgtacagaaatcatcagctcgtgaactggtcctgcgcgctgcgctcagcaatctccgacattgaggtcgagaatcgcccattgcctggccatacacagctgaggttgcccggctgccctacccctgtgagctttggcctgctgttttccgtggcgttccctgttgacggtgagccggacgctgaggtagtggtcgggacaacacgtcccgaaacgctgcctggtgatgtggcggtggcagtgcaccctgacgattctcggtacacccacttgcatggtcgtcagctgcgccacccgctgatgggccagccactccccctcatcacagactatgctgtacagcctcatgtgggaacgggagcggttaaggtcacacctgcgcacagcccggccgatgcagagatgggggctcgacacgggcttagtcctcttaatgtgatcgcagaggacggcacgatgacttctctgtgcggggactggctgcaggggctgcataggttcgtggcccgagagaaaattatgtccgttctgtcagagagaggtctcttcaggggactgcaaaatcatcctatggtcctaccaatctgtagcagaagtggcgacgtgattgaatatctgcttaagaaccagtggttcgtgaggtgccaggagatgggcgcaagggcagctaaagctgttgagagcggcgcccttgagctgagcccttcattccatcaaaagaattggcaacactggttttctcacataggagactggtgtgtctcacgacagctttggtggggccatcaaattccagcctatctagttgtcgaagaccatgcccagggagaggaggattgctgggtcgttggacgctccgaagcggaggctcgggaggttgcagccgaactcaccggtagacctggcgccgagttgacccttgagagagatccagacgtactcgatacgtggttcagctcagctcttttcccattttctgcgctgggatggcctcaggagacgcctgatttggcccgattctacccactgagtttgttggaaacaggctctgatctgctcttattctgggtgggtcgcatggtgatgctaggcacacagctgacaggccaactgccatttagcaaggtgctgctgcaccctatggtacgtgatcgtcaagggaggaagatgtctaaaagtctaggaaatgtgctcgatccgcgcgacataatctcaggcgtcgagatgcagttgctgcaggaaaagttacggtctggcaatctcgatcccgcagaattggctatagtcgccgccgcgcaaaagaaagacttcccacacggcattcccgaatgcggaactgacgccttgaggttcacactgtgctcccatggggtccaagccggcgatctccatctcagcgtgagcgaggtgcagtcctgtaggcacttctgcaataagatttggaatgccctgcggtttatactcaacgcactcggcgaaaaatttgtgcctcaaccagccgaagaattaagcccctcttcccctatggacgcatggatactcagtcgactcgctctggcagcccaggaatgtgaaaggggatttctgacccgcgagctaagcctagtgactcacgcattgcatcatttctggctacataatctatgcgacgtgtatttggaagccgtcaagcccgtcctctggcattctcctcgccctctgggacctccccaggtgctgttttcgtgtgccgatcttggactgaggttgctagcccctctgatgcctttcttagctgaggagctctggcagcggttgccgcctcgccctggctgtcccccggcacccagcatttcagtggccccttatccaagtgcctgtagcctggagcactggaggcagcccgagctcgaacgaagattctcaagggtccaagaggttgtgcaggtgctaagagcgcttcgcgctacttatcaactaaccaaagcgcgccctcgggttctgcttcagagttccgagcccggagaccagggcttgttcgaggcgttcctggaaccacttgggactctgggttattgcggcgccgtaggactcctgccacccgggactgccgcgccctctggatgggcccaggcacccctgagcgacacggctcaggtatacatggagttgcaggggcttgttgacccccagattcagctgcccctgctggctgcgagaaggtataagcttcagaagcagcttgactccctgacagcacggactccttctgaaggagaggccgggacacaaagacaacagaagctcagctccctacagttagaactgagcaagctggataaggctgcatctcacctcaggcaactcatggatgagccacctgctcccgggtctccagaactgtag

SEQ ID NO: 65425 - DNA, 3282 bp, Artificial Sequence
  derived and/or modified sequence
atgggcggcaaggcctggcccagacgcgctgtggggaccgccggtggtccctgtgccgaacagatcagtgcgccattccagactctgttaatgccacatctgcctttggcatcctttcgtcccccgttttggggcctcaggcattctagaggcctgcctcgattccacagcgtctccacccagtctgaaccacatggatcaccaatctcccgccggaatcgggaggctaaacagaagagactgcgagagaagcaggccacactggaggctgagattgccggcgaatctaaatctccagcagagtccatcaaggcctggcgtcctaaagagctagtgctttatgagattcccaccaaacctggagaaaagaaagacgtgtccgggcctctgccaccagcctacagtcctcgctacgtggaggctgcctggtacccatggtgggtgagagagggctttttcaagccagagtatcaggctcgccttccgcaggcaacaggggagaccttcagtatgtgtattccacctccaaacgttactggctcattgcacataggccacgctctcacagtggccatccaagatgcactggtccgttggcaccgcatgaggggagaccaggtcctgtgggtaccgggctctgaccacgccggtattgcaactcaggccgtggtcgagaagcaattgtggaaggagagaggggtccgccggcacgagcttagccgcgaggcgttcttgcgcgaggtatggcagtggaaggaagccaaaggaggcgaaatatgcgaacagctcagagccctaggcgcttcgttggattgggaccgggagtgcttcaccatggatgttggtagtagtgttgcagtgaccgaggcttttgtgcgcttgtataaggccggattactgtataggaaccaccaattggtgaattggtcctgtgccttgagaagcgctatttcagacatcgaagtcgagaacagaccactgccaggccatacccagttaaggctccctggatgccccacaccagtcagtttcggcctgctattcagcgtggcttttcctgtagacggggagccagacgccgaggtggtggtgggcaccacacgaccggaaactctcccaggcgatgtcgccgtggcagtgcatccagatgactcaaggtatacacacctacatggaagacaactgcgccatccccttatgggccaacccctgcctctgatcacggattatgccgtacagccgcacgtcggtacaggagcagtgaaggtgacacccgctcactcccccgctgatgctgagatgggcgcaaggcacggacttagccccctcaatgttatagctgaagatggcaccatgactagcctatgtggagattggctccagggcctgcaccgatttgtagcacgtgagaaaatcatgtctgtgctctctgagtggggactttttagaggcctgcaaaaccaccccatggtgctgcctatttgcagtagaagtggtgatgtgattgaatatctgcttaagaatcagtggttcgtcaggtgccaggagatgggcgccagggccgctaaggccgttgaatccggtgctctggaactttcaccatcatttcatcagaaaaattggcagcactggttcagtcatattggagattggtgcgtctcccgccagttgtggtggggccaccagatccccgcatatctagtcgtggaagaccatgcccaaggtgaagaagactgttgggtggttgggcgttctgaggccgaagctagggaagttgcagcggagcttaccggcaggccaggagccgagctgacactagagcgcgatccggacgtgctggacacatggtttagcagcgctctgtttcctttttctgccctcggttggccccaagagacaccagatctggcccgattttatccactgtcgcttctggaaaccgggtctgacctactgctgttctgggtagggcggatggtaatgctgggtacccagttaacgggacaactaccatttagtaaagtgctccttcacccaatggttagagatcgacagggcaggaagatgtctaagtctctcggcaacgtactggatcccagggacatcataagtggtgttgaaatgcaagtattgcaggagaaattaagaagtggcaacctcgaccccgccgagttagcaattgtggccgctgcccagaaaaaagatttcccccacggaatccccgaatgcggaacagacgccctgcgcttcacgttatgcagccacggggtgcaggctggcgatctccatctttcagtgagcgaagttcagagctgccgccacttttgcaataagatctggaatgcacttcgctttattcttaatgccttgggcgagaagtttgtgccccagcctgcagaggaactgagcccttcttctcctatggatgcgtggatactctcacggctagcattggccgctcaggagtgtgagcgaggcttcctaacaagagaactgagcctagtgacacatgcactgcatcatttttggcttcataacttgtgtgacgtctacctggaagccgtgaagccagttttgtggcacagcccgcgtccattgggtcccccacaggttctcttcagttgcgcagatctcggactgcgcctcctggcaccactgatgccgtttctggccgaggagctgtggcagcggttgccacccaggccaggctgcccaccagccccaagcatctctgtggcaccatacccatccgcctgttccctggagcattggaggcagccggaactggaaaggaggttcagccgtgtccaggaggtcgtacaggtgttgcgggccctgcgagccacttatcagctgactaaagcacgccccagggtcctgctgcagagcagcgagcctggagatcagggacttttcgaagcctttttggaacctctgggaacacttggttattgcggggctgtgggcctcctgcctccaggggcagcagctccatcagggtgggcccaagcacccctgagcgatacagctcaggtgtatatggaattgcagggtctcgtagacccccagatccagttaccacttctcgcggcgcggcgttataaattgcagaaacaacttgattccctgacagccaggactccatcagagggcgaggctggaactcagaggcaacagaaactttcaagcctgcagcttgagctctctaagttggacaaagcagccagccatttaagacaactcatggatgagccccctgcccccgggagccctgaactctag

SEQ ID NO: 65426 - DNA, 3282 bp, Artificial Sequence
  derived and/or modified sequence
atgggtggcaaggcgtggcctcgcagggcagtcggtactgcaggcgggccgtgcgccgaacagatttctgccccatttcagacccttttaatgcctcaccttcctctggctagttttaggcccccgttctggggtctgcgtcactcccgggggctgcctaggtttcatagtgtgtctacacaatcagagccccatggatctcccattagccgacgcaatagggaggcgaagcagaaacggcttagagaaaaacaggcaacactagaggctgaaattgccggcgagagcaagtccccagccgaaagcattaaagcctggcgcccaaaggagcttgtgctgtacgagatcccgactaagcccggcgaaaaaaaagacgtgagcgggccacttccacctgcatacagtccccgctatgtagaagccgcttggtacccctggtgggtcagagagggcttttttaagccagagtaccaagcgcgactcccacaagccaccggcgagaccttcagtatgtgtatccctcctccgaacgttactggttcgctccacataggccatgccctgaccgtggctatccaagacgcactggtgaggtggcacaggatgaggggcgatcaggtgctatgggttcccggctctgatcacgcgggtatcgcaactcaggcagtggttgaaaagcagttatggaaggagaggggggttcgcagacatgagttatccagggaagccttcctgcgtgaagtgtggcaatggaaggaggctaaaggcggggagatctgtgaacaactgcgagccctgggcgcaagcttagattgggatcgcgagtgtttcacgatggatgttggctcaagcgtggctgtcaccgaggcattcgtgcggctgtacaaggccggcctgctgtatcgaaaccaccagctggtcaattggtcatgtgctctgcgaagtgccatcagcgatattgaagttgagaaccgcccactgcccggacacactcaactgcgcctgcccgggtgtcccactccagttagttttggccttctgtttagtgttgcatttccggtggacggcgagccagatgcagaagtggtggtgggcacaacccggcccgaaaccttgccaggagacgttgctgttgccgtccacccagatgatagcagatatacccatttacacggcaggcaactgagacacccactgatggggcagcccttgccgctgataactgactatgccgtgcagcctcacgtcggaactggtgcagtcaaggtaactcccgcacacagcccggccgacgcagagatgggggccaggcacggcctttctccacttaacgtgattgccgaagatgggacgatgacaagcctttgcggtgactggctgcaaggattgcatcgcttcgtggctagagagaagataatgagcgtcctcagcgagcggggcctattcaggggactgcagaaccaccccatggtcctgcccatctgttccaggtcaggcgatgttatcgagtacctgttgaaaaatcagtggttcgtgcggtgtcaggagatgggggctagagccgctaaagccgtggagtcaggagccctggagctgtccccgtccttccaccagaagaattggcagcactggttctcccacatcggagattggtgcgtttcacgacaactgtggtggggacaccagatccctgcctatctagtggtggaagaccacgcccagggcgaggaggactgttgggtggtgggacgctctgaggcagaagcaagagaagtggccgctgagttaacagggcggccaggagccgagctgaccctcgagcgtgacccggacgtacttgacacatggtttagtagcgctctattcccattctccgccttaggctggccacaggagaccccggacctggcccgattctatcctctgagtctgcttgagaccggctcagacctgctgctgttctgggtcggacgcatggttatgctggggacccaattgactgggcagctgccattttctaaagtcttactgcatcccatggttagggatcgccagggccggaagatgagcaaaagtcttggaaacgtgctcgacccgcgggacattatcagcggcgtggaaatgcaactgctgcaagaaaagctgcgatctggcaatctggatcccgcagagctggccatcgtggcagccgcacagaaaaaagattttccacatggcatccctgagtgcggaacagacgccctgcgcttcacattgtgctcccatggcgttcaggcaggcgacttacacctgtccgtcagtgaagtccagtcgtgtaggcatttttgcaataaaatatggaatgccctgcgcttcatattgaatgcactgggcgaaaaatttgtccctcagcccgcagaagaattgtctccaagcagtccaatggatgcttggatcctgtctaggttggccttagctgcccaggaatgtgagaggggctttttaactagggaactctccttagtcactcacgcattacaccacttttggctccataacctatgtgatgtttatttagaggcagtcaagccggtgctatggcattcacctcgaccgcttggccccccccaggttctgttttcctgcgcagacttgggccttagactactcgcgccgctcatgcccttcctcgcagaggaattatggcaacggctgccgccccgccctggatgccctccagcacctagtatctccgtggccccttatccttctgcttgcagcctcgaacactggcgccaaccggagctagaacggcggttctccagggtgcaggaggtggtgcaggtgctccgcgcccttcgggccacataccagttgacgaaggcacggccgcgggttttgctacagtcatctgaaccaggagatcagggtctcttcgaggcttttctggagcctttggggacactcgggtattgcggggccgtcgggctgctgcccccgggaaccgccgctccatccggctgggctcaagccccacttagcgacactgctcaggtgtatatggaactgcagggtttggtcgacccacaaatccagcttccactgctggctgccagacgatataagctgcagaagcagcttgacagtctgactgccagaacgccttccgagggggaggccggcacccaacgtcaacagaagctaagctccctgcaactggagttatccaaattagataaggccgctagccatctccggcagctgatggacgaaccgcctgcacccggaagccccgaattgtag

SEQ ID NO: 65427 - DNA, 2772 bp, Artificial Sequence
  derived and/or modified sequence
atgtgcattccccccccaaacgtcaccggatctctgcacattgggcatgcccttaccgttgctattcaggacgccctggtgcggtggcaccggatgcggggtgaccaggtgttatgggtgcccgggtcagatcatgccggaatcgcaactcaagctgtcgttgagaaacagttatggaaggaaagaggcgtgagaaggcatgagctcagccgagaagcctttctccgcgaagtgtggcagtggaaggaggctaagggaggcgagatctgtgagcaactcagagccctgggcgcttcactcgactgggaccgagagtgctttactatggacgttggaagcagtgtggccgtgaccgaggccttcgtgcggctgtataaggcaggcttattgtatcgcaatcatcaactcgttaactggtcttgtgcactcagaagcgccatctccgatatcgaagtcgagaatagacccctccctgggcatacccaacttagacttccaggctgccccacaccggtgtccttcggattgctgttcagtgtggctttccccgttgacggcgaaccagacgctgaggtcgtggtgggaactacacgccccgagacactgcctggtgacgtcgccgttgctgttcaccctgacgattcacgctacacacatctgcacggaaggcaactgaggcacccactgatgggacagccattgcccctgatcaccgactacgccgttcagcctcatgttgggacaggcgccgtcaaagtgacccctgcgcacagtcccgcggacgctgaaatgggtgccagacacggactaagtcctttgaatgtgatagccgaggacggaacgatgacctccctgtgcggggattggcttcagggattacacaggtttgtggcacgagagaaaattatgagcgtgctgtctgagagagggttgtttaggggcctacaaaaccatcctatggtccttcctatctgcagccgcagcggagacgtcattgagtatcttctcaagaatcagtggtttgttaggtgccaggagatgggcgcacgcgccgctaaggccgttgaatctggtgcgctggagctatcgccatccttccaccagaagaattggcagcattggttttcacacattggcgactggtgcgtgtccaggcaactctggtgggggcaccaaattcccgcttacctggtagtcgaggaccacgcacagggagaagaagattgctgggtggtgggccggtctgaggccgaagccagagaggtggccgccgaactgactggtcgccctggagctgagttgactctcgagcgggaccccgacgtcctggatacatggttcagtagtgccctttttccttttagcgcattaggttggccccaagagacacctgacctggctagattctaccctctgtcccttcttgagaccgggtccgatttgctacttttctgggtaggtaggatggtgatgctggggactcagctgacaggccagctgcctttttccaaggtactcctgcatccaatggtgagggaccggcagggacggaaaatgtccaaatcattggggaatgtgctggacccccgagacatcataagcggagtagagatgcagctgctacaggagaaactgcgatcaggtaacctcgaccctgccgaacttgccatcgtggctgccgcgcagaagaaagattttccccacggcattcctgagtgcggcactgatgccttacgattcactctgtgttctcacggggtacaggccggagacctccatttgtctgtctccgaggtccagagctgtcgacacttctgcaataaaatttggaacgccctgcgatttatcttgaatgctttaggagagaaattcgtgccgcaacccgctgaagagctctccccttcatcccctatggacgcatggattctgtcccgactggcgctagcggcccaagaatgcgagaggggatttttaacccgagagctttccctggttacgcacgcccttcaccatttttggttgcataacctctgcgacgtgtacttggaagcagtaaagccagtcttatggcacagtccccgacctctgggtcctccacaagtactgttttcctgcgctgatctaggactgcggctgcttgccccactgatgccgttcctggccgaggaattgtggcaacggcttcccccccgccctggctgccctcctgctccatcaatttccgtggccccctacccatccgcttgctccctggagcactggcgtcagccagaactggaacgtcgcttttcgagggttcaggaggtggtgcaggttctccgggcgctgcgcgctacataccaactgaccaaggctcgcccccgagtccttttacagtcctctgagcccggtgatcagggactgtttgaagcctttctggagcctctcggcaccttgggatactgtggagcagttggcctcttgcccccgggaaccgcggcccccagtggctgggcacaggcaccactgtctgacactgcccaagtttatatggaactgcaggggctcgtggacccccagattcagttgcccctgctcgctgccagacggtacaaactgcagaaacagctggattcactgactgcaagaacgccatcagaaggagaggcaggcactcagcggcaacagaaactctcatcgctgcagttggagctgagcaagttagacaaagccgcttcccacctgcggcagctgatggatgagccccctgctcctggttcacccgagctgtag

SEQ ID NO: 65428 - DNA, 2772 bp, Artificial Sequence
  derived and/or modified sequence
atgtgcattccgccccccaatgtcaccggctcgctccacattggtcatgccctgacagtggccattcaagatgcgttggtgcggtggcaccgcatgcgcggcgaccaggttctgtgggtgccagggagcgatcacgccggtatagccacgcaggccgtggtcgagaagcagctttggaaggaacggggcgtaaggaggcacgaactgagtagggaagcttttctgagggaggtgtggcagtggaaggaggcaaagggaggagagatctgtgagcaactgagggccctgggcgcatcccttgattgggatcgagagtgctttacaatggacgtgggtagctccgtcgcagtgaccgaggctttcgtgagattgtacaaggctggtttgctgtatcgcaaccaccagctagtgaattggagttgtgccctgcgatctgctatctcagacatagaggtggagaatagacctctaccaggccacacacagctcagattgcccgggtgtcccacgcccgtctcctttggcctgctcttttccgttgcatttcctgtggacggagagcccgacgctgaagtggtcgtgggtaccacccggccggaaactctgccaggcgacgttgctgtagcagtgcatcctgacgacagtagatatacccatctgcacggccggcagctcaggcatccattaatggggcagccacttccacttatcactgactatgctgtgcagcctcatgttggtaccggcgcggtgaaggtgacgccggcacatagtccagcagacgcagagatgggagccaggcacggcctctccccgctgaacgtcatcgcagaagacgggaccatgacgagcctttgcggtgactggcttcagggcctgcacaggttcgtggctcgtgagaaaatcatgtcagtccttagtgagtggggcttgtttcgaggcctgcagaaccatcccatggtcctgcctatttgttctagatctggcgatgtgattgaatatctgctcaagaatcagtggtttgtaagatgccaggagatgggagcccgcgcagctaaagccgtggaaagcggcgctctggagctttctcccagcttccaccagaagaactggcagcactggttttcccacataggggattggtgcgtgtctaggcaactctggtggggacatcagattcccgcctatctcgtcgtggaggaccacgcccaaggggaggaagattgttgggttgtggggcgatccgaagcagaggctagggaagtggccgccgagctcacaggcaggcctggagccgaattaaccctggaacgtgaccccgatgtactggacacatggtttagtagtgcattattcccattcagcgccctcggctggccacaggaaacccctgatctcgccaggttctacccactgagcctgctggagacaggaagcgaccttttgctgttctgggtaggccggatggttatgctggggacccaactcacgggccagctgcccttttccaaagtgctcctgcatcctatggttagagacaggcagggaaggaagatgtctaaaagcctcggcaacgtattagatcctcgcgacatcataagtggcgtggagatgcaagtgctccaggagaaactcagatcggggaacctcgaccccgctgagttagcgatagtggccgcagcccagaagaaggacttcccccacggcattcctgagtgtggcacggacgccctgaggttcacattgtgcagccatggagtccaagctggagatctccatctctcagttagcgaagttcaatcatgccggcacttttgcaacaagatctggaacgcactgcgctttattctgaatgccctgggcgaaaaattcgtccctcagccagccgaggaactgtccccctccagccctatggatgcctggatcctgtccagactcgccctagctgcacaggaatgtgaacgcggcttcttaacccgggagctcagcctggtcacgcatgcgctccaccacttctggcttcacaacctgtgcgatgtgtaccttgaagctgtgaagcccgtcctttggcattcgccaaggccgctaggcccaccgcaagtgctcttttcttgtgcagacctcgggctgcgcctgctcgcccccctcatgccttttctggccgaagaactgtggcagcgccttccccctcggcccggatgccctcctgctccttctatatcagtggctccttacccaagcgcatgctctcttgagcactggcgacaacctgagcttgagcgccgattttctagggttcaggaggtcgttcaagtgcttcgcgctttaagggccacatatcagctgactaaggccagacctcgcgtccttctgcagagcagcgagcccggggaccagggtttgttcgaggcatttctcgagcctttgggcacacttggatactgtggagctgtcggccttctgccccctggcgccgctgctccatccggctgggcgcaggctcccttaagtgatactgctcaggtgtacatggaactgcagggattggtggacccccagattcagctgcctttgttagccgctcgccgctacaagttgcagaagcagctcgatagcctgaccgcacgcacgccatcagaaggcgaagcaggaacgcaacggcagcagaagctgagtagcctccagctcgaactgagcaaattagataaagctgcttcacacctgcggcagctgatggatgagcccccagcgccaggcagccccgagctttag

SEQ ID NO: 65429 - DNA, 3282 bp, Artificial Sequence
  derived and/or modified sequence
atgggagggaaagcctggccaagacgagcagtcggaaccgcaggaggcccgtgtgccgagcaaatcagtgcacctttccaaacgttattaatgccccacttgccactggcctcctttcggccacctttttgggggctgaggcacagtagaggtttgcctagattccattcggtttccacacagagcgaaccgcacggctcaccaatatccagacgcaatcgggaagcaaaacagaagcgcctcagagagaaacaagcaacactggaggctgagatcgcgggcgaatctaagtcacccgcggagtccatcaaggcttggaggccaaaggagctggtgctgtacgagattccaactaaacctggcgagaaaaaggatgtctctgggcctctgccgccagcctattctcccaggtacgtcgaagccgcctggtacccatggtgggttagagagggatttttcaagcctgagtatcaagcccgcctccctcaggctactggcgaaactttcagcatgtgtatacccccaccaaacgtgaccgggtctctccacatcggtcatgctctgaccgtcgccattcaagacgccttggtacgctggcatcggatgaggggggaccaggtcctgtgggtgcccggaagcgaccatgcagggattgcgactcaggctgttgttgaaaagcagctgtggaaggagaggggggtccggcgccatgagctttctagagaagcttttttgagggaagtgtggcagtggaaggaagcaaaggggggggagatctgtgagcaacttagagcactgggcgccagcctcgattgggaccgggagtgtttcaccatggacgtcggctcttcggttgctgtgacagaagccttcgtcaggctgtacaaagcaggtctcctgtaccgcaatcatcagctggtgaattggagttgcgctttgcgctctgctatctcggacattgaggtcgaaaacaggccactccctggccacactcaactgcggcttcctggctgccccacacccgtgagctttgggctcctgttctcagttgcattcccagtggatggagagcccgacgccgaggtcgtggtcggaacaactcgtccagaaactctgccaggggacgtggccgtggcggtacaccccgatgactcacggtatacccacctccatggtcgtcagctgcgacaccccctgatgggccaacctctgccactgatcaccgattatgccgtccagccccatgtgggaactggagccgtgaaggtgactcccgctcactctccggctgatgccgaaatgggcgcgcggcacggcttgtctccacttaacgtcatcgcagaagatggcactatgacgagcttatgcggagactggctccagggcctccatcgatttgtcgcgagagaaaaaatcatgagtgttctcagcgagagaggtctttttagagggctacaaaatcatcctatggtcctgccaatctgcagtaggagtggcgacgtgatcgaataccttcttaagaatcagtggtttgtcagatgtcaggagatgggagcccgagcagccaaggctgtcgaaagcggtgcactggagctgtcgccgtcctttcatcaaaagaattggcagcactggttctcacacatcggagattggtgtgttagtcgacagctgtggtgggggcatcaaattccagcctatctggttgttgaagaccatgcacaaggggaagaagattgctgggtggtgggaaggtcagaggctgaggcgcgcgaagtcgccgcggaattgactggaaggcccggcgcagaactcacgctggaacgcgacccagacgtcctcgacacatggttctcaagtgctctcttccccttttccgccctgggatggccacaggagactcctgacttggcgaggttttatcccttatctttgttggagactggaagcgatctgctgctgttttgggtcggccgcatggttatgctgggtactcagctgacaggacagttgccgttttcgaaggtcttactccatcccatggttcgggacagacaaggcaggaaaatgagcaagagtctgggaaatgtcttggaccccagggatatcatatcaggggtggagatgcagctgctgcaagagaaactgcggtccggaaacctggatcctgcagaactcgcgatagttgccgccgctcagaagaaagactttccacatgggattcccgaatgtggcactgacgcgttgcggttcaccctctgttcccatggggtgcaagccggggatttacatctgagtgtgtcagaggtgcagtcatgccgccatttttgtaacaagatctggaacgctcttagatttatcctcaacgcactgggcgaaaagttcgtacctcagccggcagaagagttgagtccatcgtccccaatggacgcctggatcctgtctaggttggccctagccgcccaggaatgtgagcgtggcttcctgacccgcgaactgtccttggtgacacacgccctgcatcatttttggttgcacaacctttgcgacgtgtatctggaggcagtcaaacccgtgctttggcattcaccaaggccactggggcccccccaagttcttttctcatgcgcggacctcggtcttcgcctattggcgcctttaatgccattcctggctgaagaactgtggcagcgattaccgccacgtccgggctgcccaccagcaccaagtatttcagtcgcaccgtacccttcagcttgtagtctcgagcattggaggcaaccagaattggaacgtagattttcgcgcgtccaggaagttgttcaggtcctcagggcactcagggccacttaccaactgacgaaagctcgcccgagagttttactacagagctctgagcccggcgatcaggggctgttcgaagcttttttagagcccctggggaccctcgggtattgtggagcggtagggctgttgcccccaggtacagccgctcctagtggatgggcccaggcccctttgagcgataccgcccaggtctatatggaactccagggccttgtcgacccccagattcagcttcctctgctagccgccagacggtacaagctacagaagcagctggactctctgacagctaggaccccaagtgaaggagaggccggcactcagagacaacagaagttaagctccctgcagctggaactgagcaagctcgacaaagcggcctctcatctacgtcaactcatggatgagccaccagcccctgggtcccctgagttgtag

SEQ ID NO: 65430 - DNA, 3192 bp, Artificial Sequence
  derived and/or modified sequence
atgccccacctgcccctggccagcttccggccccccttctggggcctgcggcacagccggggcctgccccgcttccacagcgtgtccacccagagcgagccccacggcagccccatcagcagaagaaaccgggaggccaagcagaagaggctgcgggagaagcaggccaccctggaggccgagattgctggggagagcaagagccctgctgagagcatcaaggcctggaggcccaaggagctggtgctgtatgagatccccaccaagccaggagagaagaaggatgtgtctggccccctgcccccagcctacagcccccgctacgtggaggccgcctggtacccctggtgggtgcgggagggcttcttcaagccagagtaccaggcccggctgccccaggccactggagagaccttctccatgtgcatccccccaccaaatgtgacaggcagcctgcacatcggccacgccctgactgtggccatccaggatgccctggtgcgctggcacaggatgagaggagaccaggtgctgtgggtgcccggcagtgaccacgccggcatcgccacccaggccgtggtggagaagcagctgtggaaggagcggggcgtgagaagacatgagctgagccgggaggccttcctgcgggaggtgtggcagtggaaggaggccaagggcggggagatctgtgagcagctgcgggccctgggcgccagcctggactgggaccgggagtgcttcaccatggatgtgggcagctctgtggccgtgacagaggcctttgtgcggctgtacaaggccggcctgctgtacagaaaccaccagctggtgaactggagctgtgccctgcggagcgccatcagtgacatcgaggtggagaaccggcccctgcccggccacacccagctgcggctgcccggctgccccacccctgtgtcctttggcctgctcttctctgtggccttccctgtggatggagagccagatgctgaggtggtggtgggcaccaccaggcctgagaccctgcctggagatgtggccgtggccgtgcacccagatgacagccgctacacccacctgcacggccggcagctgcggcaccccctgatgggccagcccctgcccctcatcacagattatgctgtgcagccccacgtgggcaccggggctgtgaaggtgaccccagcccacagccctgcagatgctgagatgggcgcccggcacggcctgagccccctgaatgtgattgctgaagatggcaccatgaccagcctgtgtggggactggctgcagggcctgcacagatttgtggcccgggagaagatcatgtctgtgctgtctgagcggggcctcttccggggcctgcagaaccaccccatggtgctgcccatctgcagccgctctggagatgtgattgagtacctgctgaagaaccagtggtttgtgcgctgccaggagatgggcgcccgggccgccaaggctgtggagagcggggccctggagctgagccccagcttccaccagaagaactggcagcactggttcagccacatcggggactggtgtgtgtcccggcagctgtggtggggccaccagatcccagcctacctggtggtggaggaccacgcccagggcgaggaggactgctgggtggtgggccgctctgaggccgaggcccgggaggtggccgctgagctgaccggccggcctggagctgagctgaccctggagcgggaccctgatgtgctggacacctggttcagcagcgccctcttccccttcagcgccctgggctggccccaggagaccccagacctggcccgcttctaccccctgagcctgctggagactggaagtgacctgctgctcttctgggtgggccgcatggtgatgctgggcacccagctgaccggccagctgcccttcagcaaggtgctgctgcaccccatggtgcgggaccggcagggcaggaagatgagcaagagcctgggcaatgtgctggacccccgggacatcatcagcggcgtggagatgcagctgctgcaggagaagctgcggagcggcaacctggaccctgctgagctggccatcgtggccgccgcccagaagaaggacttcccccacggcatcccagaatgtggcacagatgccctgcgcttcaccctgtgcagccatggagtgcaggccggggacctgcacctgtctgtgtctgaggtgcagagctgccgccacttctgcaacaagatctggaatgccctgcgcttcatcctgaatgccctgggggagaagtttgtgccccagcctgctgaggagctgagccccagcagccccatggatgcctggatcctgagccggctggccctggccgcccaggagtgtgagcggggcttcctgacccgggagctgagcctggtgacccacgccctgcaccacttctggctgcacaacctgtgtgatgtgtacctggaggccgtgaagcctgtgctgtggcacagcccccggcccctgggccccccccaggtgctcttcagctgtgccgacctgggcctgcggctgctggcccccctgatgcccttcctggccgaggagctgtggcagaggctgcccccccggcccggctgccccccagcccccagcatctctgtggccccctaccccagcgcctgcagcctggagcactggaggcagcctgagctggagcggcgcttcagccgggtgcaggaggtggtgcaggtgctgcgggccctgcgggccacctaccagctgaccaaggcccggccccgggtgctgctgcagagcagcgagcccggggaccagggcctgtttgaggccttcctggagcccctgggcaccctgggctactgtggggctgtgggcctgctgcccccaggcacagctgcccccagcggctgggcccaggcccccctgagtgacacagcccaggtgtacatggagctgcagggcctggtggacccccagatccagctgcccctgctggccgcccggcgctacaagctgcagaagcagctggacagcctgacagcccggaccccatctgagggggaggccggcacccagaggcagcagaagctgagcagcctgcagctggagctgagcaagctggacaaggccgccagccacctgcggcagctgatggatgagcccccagcccctggcagccctgagctgtag

SEQ ID NO: 65431 - DNA, 3192 bp, Artificial Sequence
  derived and/or modified sequence
atgccccacctgcccctggccagcttccggccccccttctggggcctgcggcacagccggggcctgccccgcttccacagcgtgtccacccagagcgagccccacggcagccccatcagcagaagaaaccgggaggccaagcagaagaggctgcgggagaagcaggccaccctggaggccgagattgctggggagagcaagagccctgctgagagcatcaaggcctggaggcccaaggagctggtgctgtatgagatccccaccaagccaggagagaagaaggatgtgtctggccccctgcccccagcctacagcccccgctacgtggaggccgcctggtacccctggtgggtgcgggagggcttcttcaagccagagtaccaggcccggctgccccaggccactggagagaccttctccatgtgcatccccccaccaaatgtgacaggcagcctgcacatcggccacgccctgactgtggccatccaggatgccctggtgcgctggcacaggatgagaggagaccaggtgctgtgggtgcccggcagtgaccacgccggcatcgccacccaggccgtggtggagaagcagctgtggaaggagcggggcgtgagaagacatgagctgagccgggaggccttcctgcgggaggtgtggcagtggaaggaggccaagggcggggagatctgtgagcagctgcgggccctgggcgccagcctggactgggaccgggagtgcttcaccatggatgtgggcagctctgtggccgtgacagaggcctttgtgcggctgtacaaggccggcctgctgtacagaaaccaccagctggtgaactggagctgtgccctgcggagcgccatcagtgacatcgaggtggagaaccggcccctgcccggccacacccagctgcggctgcccggctgccccacccctgtgtcctttggcctgctcttctctgtggccttccctgtggatggagagccagatgctgaggtggtggtgggcaccaccaggcctgagaccctgcctggagatgtggccgtggccgtgcacccagatgacagccgctacacccacctgcacggccggcagctgcggcaccccctgatgggccagcccctgcccctcatcacagattatgctgtgcagccccacgtgggcaccggggctgtgaaggtgaccccagcccacagccctgcagatgctgagatgggcgcccggcacggcctgagccccctgaatgtgattgctgaagatggcaccatgaccagcctgtgtggggactggctgcagggcctgcacagatttgtggcccgggagaagatcatgtctgtgctgtctgagtggggcctcttccggggcctgcagaaccaccccatggtgctgcccatctgcagccgctctggagatgtgattgagtacctgctgaagaaccagtggtttgtgcgctgccaggagatgggcgcccgggccgccaaggctgtggagagcggggccctggagctgagccccagcttccaccagaagaactggcagcactggttcagccacatcggggactggtgtgtgtcccggcagctgtggtggggccaccagatcccagcctacctggtggtggaggaccacgcccagggcgaggaggactgctgggtggtgggccgctctgaggccgaggcccgggaggtggccgctgagctgaccggccggcctggagctgagctgaccctggagcgggaccctgatgtgctggacacctggttcagcagcgccctcttccccttcagcgccctgggctggccccaggagaccccagacctggcccgcttctaccccctgagcctgctggagactggaagtgacctgctgctcttctgggtgggccgcatggtgatgctgggcacccagctgaccggccagctgcccttcagcaaggtgctgctgcaccccatggtgcgggaccggcagggcaggaagatgagcaagagcctgggcaatgtgctggacccccgggacatcatcagcggcgtggagatgcaggtgctgcaggagaagctgcggagcggcaacctggaccctgctgagctggccatcgtggccgccgcccagaagaaggacttcccccacggcatcccagaatgtggcacagatgccctgcgcttcaccctgtgcagccatggagtgcaggccggggacctgcacctgtctgtgtctgaggtgcagagctgccgccacttctgcaacaagatctggaatgccctgcgcttcatcctgaatgccctgggggagaagtttgtgccccagcctgctgaggagctgagccccagcagccccatggatgcctggatcctgagccggctggccctggccgcccaggagtgtgagcggggcttcctgacccgggagctgagcctggtgacccacgccctgcaccacttctggctgcacaacctgtgtgatgtgtacctggaggccgtgaagcctgtgctgtggcacagcccccggcccctgggccccccccaggtgctcttcagctgtgccgacctgggcctgcggctgctggcccccctgatgcccttcctggccgaggagctgtggcagaggctgcccccccggcccggctgccccccagcccccagcatctctgtggccccctaccccagcgcctgcagcctggagcactggaggcagcctgagctggagcggcgcttcagccgggtgcaggaggtggtgcaggtgctgcgggccctgcgggccacctaccagctgaccaaggcccggccccgggtgctgctgcagagcagcgagcccggggaccagggcctgtttgaggccttcctggagcccctgggcaccctgggctactgtggggctgtgggcctgctgcccccaggagctgctgcccccagcggctgggcccaggcccccctgagtgacacagcccaggtgtacatggagctgcagggcctggtggacccccagatccagctgcccctgctggccgcccggcgctacaagctgcagaagcagctggacagcctgacagcccggaccccatctgagggggaggccggcacccagaggcagcagaagctgagcagcctgcagctggagctgagcaagctggacaaggccgccagccacctgcggcagctgatggatgagcccccagcccctggcagccctgagctgtag

SEQ ID NO: 65432 - DNA, 4073 bp, Artificial Sequence
  derived and/or modified sequence
gccagctgctgcgcatgcgccggccggggccccgcccccatgcgccgcgcggctccagggccacgttccagggtcgggtttggtggattcctcagtccctgccgccgcggggcgccctgggatagcggcggggcctcctggtgagcgcgcgccggggcggcctccgggaagtgggagacgctgcgggtcctgggcccaggccttgggatgggcgggaaggcctggccgcgccgggctgtgggcactgcaggaggcccctgtgcaggtggagatcgccgcggccctggcgggactctttgctggctcttgggcgcgctgatgcccatcatctccctgagtttctgagccctatctctcatgtgtcagtggtcaccgccgaatccagacactccggccctgttccggaagagccctgatatccgtggctccatggcgctgtctgtcgataccatgcactctagctctcaaggaggaaaggttttgtggaagggaatagagacttggaataacagacctgtgctaattagagacgggaaagatggaacaaggggagtgacccttctccacccccatatcctaatgtgctctctctctatccagaacagatctcggcccctttccaaacactcctgatgcctcatttgcctctcgcttcttttcgaccaccattttgggggctgaggcactcacggggcctccccaggtttcactccgtttctacacagtcggagccccatggatctcccatctcccggaggaaccgtgaagccaaacagaagcgcctgcgagagaagcaggctactctggaggctgagatagcaggggagagcaagtcacctgcagaatccattaaggcctggaggcctaaggagttagtattgtatgaaatccctacgaaacccggtgaaaagaaagatgtctctgggcccctgcctcctgcatacagcccccgatatgttgaggctgcctggtacccgtggtgggtacgagagggcttcttcaaaccagaatatcaggcccggctgccccaagctacaggggagaccttttccatgtgtatcccacctcccaatgtcactggctccctgcacattggccacgcactcacggtggccatacaggatgccctcgtgcgctggcaccggatgcgtggggatcaagtgctgtgggtccctggttcagatcatgcaggaattgctacacaagctgtggtggagaaacaactgtggaaggaacggggagtgaggagacatgagctgagccgggaggccttccttagggaggtgtggcagtggaaggaggcgaaaggtggagagatctgtgagcagctgcgagctctgggtgcctccctggactgggatcgagagtgttttaccatggatgttggctcctcagtggctgtgactgaagcttttgtgcggctctacaaggcggggttgctgtaccggaaccatcagcttgtcaactggtcatgtgctttaagatcagccatctcggacattgaggtggagaaccggcccctgcctggccacacacagcttcgactgcctggctgccccacccccgtgtcttttggcctcctattttctgttgccttccccgtggatggagagcctgatgcagaggttgtggtaggaaccacaaggccagagacgctgcctggagatgtggctgtggccgttcatccagacgactcgcgatacacacatctacacgggcgacagcttcgtcaccccttgatggggcagcctcttcccctcatcacagactatgctgttcagccacatgtgggcacgggggcagtgaaggtgactccagctcacagtcctgccgatgctgagatgggggcccgacatggcttgagccccttgaatgtcattgcggaggatgggaccatgacctccctctgcggggactggttgcagggtcttcaccggtttgtggcccgggaaaagataatgtctgtgctgagtgaacggggcctattccggggcctccagaaccaccccatggtactgcccatctgcagccgttctggggatgtgatagaatacctgctgaagaaccagtggtttgtccgctgccaggaaatgggggcccgagctgccaaggctgtggagtcgggggccctggagctcagtccctccttccaccagaagaactggcagcactggttttcccatattggggactggtgtgtctcccggcagctgtggtggggccatcagattccagcctacctggttgtagaggaccatgcgcagggagaagaggactgttgggtggttgggcggtcagaggctgaggccagagaggtagcagcggaactgacagggaggccaggggcagagctgaccctggagagggatcctgatgtcctagacacatggttttcttctgccctgttccccttttctgccctgggctggccccaagagaccccagaccttgctcgtttctaccccctgtcacttttggaaacgggcagcgaccttctgctgttctgggtgggccgcatggtcatgttggggacccagctcacagggcagctgcccttcagcaaggtgcttcttcatcccatggttcgggacaggcagggccggaagatgagcaagtccctggggaatgtgctggacccaagagacatcatcagtggggtggagatgcagttgctgcaggaaaagctgagaagcggaaatttggaccctgcagagctggccattgtggctgcagcacagaaaaaggactttcctcacgggatccctgagtgtgggacagatgccctgagattcacactctgctcccatggagttcaggcgggcgacttgcacctgtcagtctctgaggtccagagctgccgacatttctgcaacaagatctggaatgctcttcgctttatcctcaatgctttaggggagaaatttgtgccacagcctgctgaggagctgtctccctcctccccgatggatgcctggatcctgagccgccttgccctggctgcccaggagtgtgagcggggcttcctcacccgagagctctcgctcgtcactcatgccctgcaccacttctggcttcacaacctctgtgacgtctacctggaggctgtgaagcccgtgctgtggcactcgccccgccccctggggccccctcaggtcctgttctcctgcgctgacctcggcctccgcctcctggccccactgatgcccttcctggctgaagagctctggcagaggctgccccccaggcctggttgcccccctgcccccagcatctcggttgccccctaccctagcgcctgcagcttggagcactggcgccagccagagctggagcggcgcttctcccgggtccaagaggtcgtgcaggtgctaagggctctccgagccacgtaccagctcaccaaagcccggccccgagtgctgctgcagagctcagagcctggggaccagggcctcttcgaggccttcttggagcccctgggcaccctgggctactgtggggctgtgggcctgttacccccaggcacagcagctccctccggctgggcccaggctccactcagtgacacggctcaagtctacatggagctgcagggcctggtggacccgcagatccagctacctctgttagccgcccgaaggtacaagttgcagaagcagcttgatagcctcacagccaggaccccatcagaaggggaggcagggactcagaggcaacaaaagctttcttccctccagctggaattgtcaaaactggacaaggcagcctctcacctccggcagctgatggatgagcctccagccccagggagcccggagctctaactcatcatccccatcagttttcctccctctcagacctgtctttgaggacaaacagatttgtcagctgtcagggtgcagtgggacgtcagagactatgtggtccatcgccttcattgtgtaaatgaggacacagactggcttggtcgcagtgactgtggtgtccttgagatgctcacattactgcccggcctgcctcccacctggaagtctgggaatgaggagattgagataaacttttgaaatcccaaa

SEQ ID NO: 65433 - DNA, 3282 bp, Artificial Sequence
  derived and/or modified sequence
atgggcggcaaggcctggccccggcgggctgtgggcacagctgggggcccctgtgccgagcagatcagcgcccccttccagaccctgctgatgccccacctgcccctggccagcttccggccccccttctggggcctgcggcacagccggggcctgccccgcttccacagcgtgtccacccagagcgagccccacggcagccccatcagcagaagaaaccgggaggccaagcagaagaggctgcgggagaagcaggccaccctggaggccgagattgctggggagagcaagagccctgctgagagcatcaaggcctggaggcccaaggagctggtgctgtatgagatccccaccaagccaggagagaagaaggatgtgtctggccccctgcccccagcctacagcccccgctacgtggaggccgcctggtacccctggtgggtgcgggagggcttcttcaagccagagtaccaggcccggctgccccaggccactggagagaccttctccatgtgcatccccccaccaaatgtgacaggcagcctgcacatcggccacgccctgactgtggccatccaggatgccctggtgcgctggcacaggatgagaggagaccaggtgctgtgggtgcccggcagtgaccacgccggcatcgccacccaggccgtggtggagaagcagctgtggaaggagcggggcgtgagaagacatgagctgagccgggaggccttcctgcgggaggtgtggcagtggaaggaggccaagggcggggagatctgtgagcagctgcgggccctgggcgccagcctggactgggaccgggagtgcttcaccatggatgtgggcagctctgtggccgtgacagaggcctttgtgcggctgtacaaggccggcctgctgtacagaaaccaccagctggtgaactggagctgtgccctgcggagcgccatcagtgacatcgaggtggagaaccggcccctgcccggccacacccagctgcggctgcccggctgccccacccctgtgtcctttggcctgctcttctctgtggccttccctgtggatggagagccagatgctgaggtggtggtgggcaccaccaggcctgagaccctgcctggagatgtggccgtggccgtgcacccagatgacagccgctacacccacctgcacggccggcagctgcggcaccccctgatgggccagcccctgcccctcatcacagattatgctgtgcagccccacgtgggcaccggggctgtgaaggtgaccccagcccacagccctgcagatgctgagatgggcgcccggcacggcctgagccccctgaatgtgattgctgaagatggcaccatgaccagcctgtgtggggactggctgcagggcctgcacagatttgtggcccgggagaagatcatgtctgtgctgtctgagtggggcctcttccggggcctgcagaaccaccccatggtgctgcccatctgcagccgctctggagatgtgattgagtacctgctgaagaaccagtggtttgtgcgctgccaggagatgggcgcccgggccgccaaggctgtggagagcggggccctggagctgagccccagcttccaccagaagaactggcagcactggttcagccacatcggggactggtgtgtgtcccggcagctgtggtggggccaccagatcccagcctacctggtggtggaggaccacgcccagggcgaggaggactgctgggtggtgggccgctctgaggccgaggcccgggaggtggccgctgagctgaccggccggcctggagctgagctgaccctggagcgggaccctgatgtgctggacacctggttcagcagcgccctcttccccttcagcgccctgggctggccccaggagaccccagacctggcccgcttctaccccctgagcctgctggagactggaagtgacctgctgctcttctgggtgggccgcatggtgatgctgggcacccagctgaccggccagctgcccttcagcaaggtgctgctgcaccccatggtgcgggaccggcagggcaggaagatgagcaagagcctgggcaatgtgctggacccccgggacatcatcagcggcgtggagatgcaggtgctgcaggagaagctgcggagcggcaacctggaccctgctgagctggccatcgtggccgccgcccagaagaaggacttcccccacggcatcccagaatgtggcacagatgccctgcgcttcaccctgtgcagccatggagtgcaggccggggacctgcacctgtctgtgtctgaggtgcagagctgccgccacttctgcaacaagatctggaatgccctgcgcttcatcctgaatgccctgggggagaagtttgtgccccagcctgctgaggagctgagccccagcagccccatggatgcctggatcctgagccggctggccctggccgcccaggagtgtgagcggggcttcctgacccgggagctgagcctggtgacccacgccctgcaccacttctggctgcacaacctgtgtgatgtgtacctggaggccgtgaagcctgtgctgtggcacagcccccggcccctgggccccccccaggtgctcttcagctgtgccgacctgggcctgcggctgctggcccccctgatgcccttcctggccgaggagctgtggcagaggctgcccccccggcccggctgccccccagcccccagcatctctgtggccccctaccccagcgcctgcagcctggagcactggaggcagcctgagctggagcggcgcttcagccgggtgcaggaggtggtgcaggtgctgcgggccctgcgggccacctaccagctgaccaaggcccggccccgggtgctgctgcagagcagcgagcccggggaccagggcctgtttgaggccttcctggagcccctgggcaccctgggctactgtggggctgtgggcctgctgcccccaggagctgctgcccccagcggctgggcccaggcccccctgagtgacacagcccaggtgtacatggagctgcagggcctggtggacccccagatccagctgcccctgctggccgcccggcgctacaagctgcagaagcagctggacagcctgacagcccggaccccatctgagggggaggccggcacccagaggcagcagaagctgagcagcctgcagctggagctgagcaagctggacaaggccgccagccacctgcggcagctgatggatgagcccccagcccctggcagccctgagctgtag

SEQ ID NO: 65434 - DNA, 3282 bp, Artificial Sequence
  derived and/or modified sequence
atgggcggcaaggcctggccccggcgggctgtgggcacagctgggggcccctgtgccgagcagatcagcgcccccttccagaccctgctgatgccccacctgcccctggccagcttccggccccccttctggggcctgcggcacagccggggcctgccccgcttccacagcgtgtccacccagagcgagccccacggcagccccatcagcagaagaaaccgggaggccaagcagaagaggctgcgggagaagcaggccaccctggaggccgagattgctggggagagcaagagccctgctgagagcatcaaggcctggaggcccaaggagctggtgctgtatgagatccccaccaagccaggagagaagaaggatgtgtctggccccctgcccccagcctacagcccccgctacgtggaggccgcctggtacccctggtgggtgcgggagggcttcttcaagccagagtaccaggcccggctgccccaggccactggagagaccttctccatgtgcatccccccaccaaatgtgacaggcagcctgcacatcggccacgccctgactgtggccatccaggatgccctggtgcgctggcacaggatgagaggagaccaggtgctgtgggtgcccggcagtgaccacgccggcatcgccacccaggccgtggtggagaagcagctgtggaaggagcggggcgtgagaagacatgagctgagccgggaggccttcctgcgggaggtgtggcagtggaaggaggccaagggcggggagatctgtgagcagctgcgggccctgggcgccagcctggactgggaccgggagtgcttcaccatggatgtgggcagctctgtggccgtgacagaggcctttgtgcggctgtacaaggccggcctgctgtacagaaaccaccagctggtgaactggagctgtgccctgcggagcgccatcagtgacatcgaggtggagaaccggcccctgcccggccacacccagctgcggctgcccggctgccccacccctgtgtcctttggcctgctcttctctgtggccttccctgtggatggagagccagatgctgaggtggtggtgggcaccaccaggcctgagaccctgcctggagatgtggccgtggccgtgcacccagatgacagccgctacacccacctgcacggccggcagctgcggcaccccctgatgggccagcccctgcccctcatcacagattatgctgtgcagccccacgtgggcaccggggctgtgaaggtgaccccagcccacagccctgcagatgctgagatgggcgcccggcacggcctgagccccctgaatgtgattgctgaagatggcaccatgaccagcctgtgtggggactggctgcagggcctgcacagatttgtggcccgggagaagatcatgtctgtgctgtctgagcggggcctcttccggggcctgcagaaccaccccatggtgctgcccatctgcagccgctctggagatgtgattgagtacctgctgaagaaccagtggtttgtgcgctgccaggagatgggcgcccgggccgccaaggctgtggagagcggggccctggagctgagccccagcttccaccagaagaactggcagcactggttcagccacatcggggactggtgtgtgtcccggcagctgtggtggggccaccagatcccagcctacctggtggtggaggaccacgcccagggcgaggaggactgctgggtggtgggccgctctgaggccgaggcccgggaggtggccgctgagctgaccggccggcctggagctgagctgaccctggagcgggaccctgatgtgctggacacctggttcagcagcgccctcttccccttcagcgccctgggctggccccaggagaccccagacctggcccgcttctaccccctgagcctgctggagactggaagtgacctgctgctcttctgggtgggccgcatggtgatgctgggcacccagctgaccggccagctgcccttcagcaaggtgctgctgcaccccatggtgcgggaccggcagggcaggaagatgagcaagagcctgggcaatgtgctggacccccgggacatcatcagcggcgtggagatgcagctgctgcaggagaagctgcggagcggcaacctggaccctgctgagctggccatcgtggccgccgcccagaagaaggacttcccccacggcatcccagaatgtggcacagatgccctgcgcttcaccctgtgcagccatggagtgcaggccggggacctgcacctgtctgtgtctgaggtgcagagctgccgccacttctgcaacaagatctggaatgccctgcgcttcatcctgaatgccctgggggagaagtttgtgccccagcctgctgaggagctgagccccagcagccccatggatgcctggatcctgagccggctggccctggccgcccaggagtgtgagcggggcttcctgacccgggagctgagcctggtgacccacgccctgcaccacttctggctgcacaacctgtgtgatgtgtacctggaggccgtgaagcctgtgctgtggcacagcccccggcccctgggccccccccaggtgctcttcagctgtgccgacctgggcctgcggctgctggcccccctgatgcccttcctggccgaggagctgtggcagaggctgcccccccggcccggctgccccccagcccccagcatctctgtggccccctaccccagcgcctgcagcctggagcactggaggcagcctgagctggagcggcgcttcagccgggtgcaggaggtggtgcaggtgctgcgggccctgcgggccacctaccagctgaccaaggcccggccccgggtgctgctgcagagcagcgagcccggggaccagggcctgtttgaggccttcctggagcccctgggcaccctgggctactgtggggctgtgggcctgctgcccccaggcacagctgcccccagcggctgggcccaggcccccctgagtgacacagcccaggtgtacatggagctgcagggcctggtggacccccagatccagctgcccctgctggccgcccggcgctacaagctgcagaagcagctggacagcctgacagcccggaccccatctgagggggaggccggcacccagaggcagcagaagctgagcagcctgcagctggagctgagcaagctggacaaggccgccagccacctgcggcagctgatggatgagcccccagcccctggcagccctgagctgtag

SEQ ID NO: 65435 - DNA, 2772 bp, Artificial Sequence
  derived and/or modified sequence
atgtgcatccccccaccaaatgtgacaggcagcctgcacatcggccacgccctgactgtggccatccaggatgccctggtgcgctggcacaggatgagaggagaccaggtgctgtgggtgcccggcagtgaccacgccggcatcgccacccaggccgtggtggagaagcagctgtggaaggagcggggcgtgagaagacatgagctgagccgggaggccttcctgcgggaggtgtggcagtggaaggaggccaagggcggggagatctgtgagcagctgcgggccctgggcgccagcctggactgggaccgggagtgcttcaccatggatgtgggcagctctgtggccgtgacagaggcctttgtgcggctgtacaaggccggcctgctgtacagaaaccaccagctggtgaactggagctgtgccctgcggagcgccatcagtgacatcgaggtggagaaccggcccctgcccggccacacccagctgcggctgcccggctgccccacccctgtgtcctttggcctgctcttctctgtggccttccctgtggatggagagccagatgctgaggtggtggtgggcaccaccaggcctgagaccctgcctggagatgtggccgtggccgtgcacccagatgacagccgctacacccacctgcacggccggcagctgcggcaccccctgatgggccagcccctgcccctcatcacagattatgctgtgcagccccacgtgggcaccggggctgtgaaggtgaccccagcccacagccctgcagatgctgagatgggcgcccggcacggcctgagccccctgaatgtgattgctgaagatggcaccatgaccagcctgtgtggggactggctgcagggcctgcacagatttgtggcccgggagaagatcatgtctgtgctgtctgagcggggcctcttccggggcctgcagaaccaccccatggtgctgcccatctgcagccgctctggagatgtgattgagtacctgctgaagaaccagtggtttgtgcgctgccaggagatgggcgcccgggccgccaaggctgtggagagcggggccctggagctgagccccagcttccaccagaagaactggcagcactggttcagccacatcggggactggtgtgtgtcccggcagctgtggtggggccaccagatcccagcctacctggtggtggaggaccacgcccagggcgaggaggactgctgggtggtgggccgctctgaggccgaggcccgggaggtggccgctgagctgaccggccggcctggagctgagctgaccctggagcgggaccctgatgtgctggacacctggttcagcagcgccctcttccccttcagcgccctgggctggccccaggagaccccagacctggcccgcttctaccccctgagcctgctggagactggaagtgacctgctgctcttctgggtgggccgcatggtgatgctgggcacccagctgaccggccagctgcccttcagcaaggtgctgctgcaccccatggtgcgggaccggcagggcaggaagatgagcaagagcctgggcaatgtgctggacccccgggacatcatcagcggcgtggagatgcagctgctgcaggagaagctgcggagcggcaacctggaccctgctgagctggccatcgtggccgccgcccagaagaaggacttcccccacggcatcccagaatgtggcacagatgccctgcgcttcaccctgtgcagccatggagtgcaggccggggacctgcacctgtctgtgtctgaggtgcagagctgccgccacttctgcaacaagatctggaatgccctgcgcttcatcctgaatgccctgggggagaagtttgtgccccagcctgctgaggagctgagccccagcagccccatggatgcctggatcctgagccggctggccctggccgcccaggagtgtgagcggggcttcctgacccgggagctgagcctggtgacccacgccctgcaccacttctggctgcacaacctgtgtgatgtgtacctggaggccgtgaagcctgtgctgtggcacagcccccggcccctgggccccccccaggtgctcttcagctgtgccgacctgggcctgcggctgctggcccccctgatgcccttcctggccgaggagctgtggcagaggctgcccccccggcccggctgccccccagcccccagcatctctgtggccccctaccccagcgcctgcagcctggagcactggaggcagcctgagctggagcggcgcttcagccgggtgcaggaggtggtgcaggtgctgcgggccctgcgggccacctaccagctgaccaaggcccggccccgggtgctgctgcagagcagcgagcccggggaccagggcctgtttgaggccttcctggagcccctgggcaccctgggctactgtggggctgtgggcctgctgcccccaggcacagctgcccccagcggctgggcccaggcccccctgagtgacacagcccaggtgtacatggagctgcagggcctggtggacccccagatccagctgcccctgctggccgcccggcgctacaagctgcagaagcagctggacagcctgacagcccggaccccatctgagggggaggccggcacccagaggcagcagaagctgagcagcctgcagctggagctgagcaagctggacaaggccgccagccacctgcggcagctgatggatgagcccccagcccctggcagccctgagctgtag

SEQ ID NO: 65436 - DNA, 2772 bp, Artificial Sequence
  derived and/or modified sequence
atgtgcatccccccaccaaatgtgacaggcagcctgcacatcggccacgccctgactgtggccatccaggatgccctggtgcgctggcacaggatgagaggagaccaggtgctgtgggtgcccggcagtgaccacgccggcatcgccacccaggccgtggtggagaagcagctgtggaaggagcggggcgtgagaagacatgagctgagccgggaggccttcctgcgggaggtgtggcagtggaaggaggccaagggcggggagatctgtgagcagctgcgggccctgggcgccagcctggactgggaccgggagtgcttcaccatggatgtgggcagctctgtggccgtgacagaggcctttgtgcggctgtacaaggccggcctgctgtacagaaaccaccagctggtgaactggagctgtgccctgcggagcgccatcagtgacatcgaggtggagaaccggcccctgcccggccacacccagctgcggctgcccggctgccccacccctgtgtcctttggcctgctcttctctgtggccttccctgtggatggagagccagatgctgaggtggtggtgggcaccaccaggcctgagaccctgcctggagatgtggccgtggccgtgcacccagatgacagccgctacacccacctgcacggccggcagctgcggcaccccctgatgggccagcccctgcccctcatcacagattatgctgtgcagccccacgtgggcaccggggctgtgaaggtgaccccagcccacagccctgcagatgctgagatgggcgcccggcacggcctgagccccctgaatgtgattgctgaagatggcaccatgaccagcctgtgtggggactggctgcagggcctgcacagatttgtggcccgggagaagatcatgtctgtgctgtctgagtggggcctcttccggggcctgcagaaccaccccatggtgctgcccatctgcagccgctctggagatgtgattgagtacctgctgaagaaccagtggtttgtgcgctgccaggagatgggcgcccgggccgccaaggctgtggagagcggggccctggagctgagccccagcttccaccagaagaactggcagcactggttcagccacatcggggactggtgtgtgtcccggcagctgtggtggggccaccagatcccagcctacctggtggtggaggaccacgcccagggcgaggaggactgctgggtggtgggccgctctgaggccgaggcccgggaggtggccgctgagctgaccggccggcctggagctgagctgaccctggagcgggaccctgatgtgctggacacctggttcagcagcgccctcttccccttcagcgccctgggctggccccaggagaccccagacctggcccgcttctaccccctgagcctgctggagactggaagtgacctgctgctcttctgggtgggccgcatggtgatgctgggcacccagctgaccggccagctgcccttcagcaaggtgctgctgcaccccatggtgcgggaccggcagggcaggaagatgagcaagagcctgggcaatgtgctggacccccgggacatcatcagcggcgtggagatgcaggtgctgcaggagaagctgcggagcggcaacctggaccctgctgagctggccatcgtggccgccgcccagaagaaggacttcccccacggcatcccagaatgtggcacagatgccctgcgcttcaccctgtgcagccatggagtgcaggccggggacctgcacctgtctgtgtctgaggtgcagagctgccgccacttctgcaacaagatctggaatgccctgcgcttcatcctgaatgccctgggggagaagtttgtgccccagcctgctgaggagctgagccccagcagccccatggatgcctggatcctgagccggctggccctggccgcccaggagtgtgagcggggcttcctgacccgggagctgagcctggtgacccacgccctgcaccacttctggctgcacaacctgtgtgatgtgtacctggaggccgtgaagcctgtgctgtggcacagcccccggcccctgggccccccccaggtgctcttcagctgtgccgacctgggcctgcggctgctggcccccctgatgcccttcctggccgaggagctgtggcagaggctgcccccccggcccggctgccccccagcccccagcatctctgtggccccctaccccagcgcctgcagcctggagcactggaggcagcctgagctggagcggcgcttcagccgggtgcaggaggtggtgcaggtgctgcgggccctgcgggccacctaccagctgaccaaggcccggccccgggtgctgctgcagagcagcgagcccggggaccagggcctgtttgaggccttcctggagcccctgggcaccctgggctactgtggggctgtgggcctgctgcccccaggagctgctgcccccagcggctgggcccaggcccccctgagtgacacagcccaggtgtacatggagctgcagggcctggtggacccccagatccagctgcccctgctggccgcccggcgctacaagctgcagaagcagctggacagcctgacagcccggaccccatctgagggggaggccggcacccagaggcagcagaagctgagcagcctgcagctggagctgagcaagctggacaaggccgccagccacctgcggcagctgatggatgagcccccagcccctggcagccctgagctgtag

SEQ ID NO: 65437 - DNA, 3192 bp, Artificial Sequence
  derived and/or modified sequence
atgccccacctgcccctggccagcttccggccccccttctggggcctccgtcactccagaggcctgcccagattccattcagtgtcaactcagtctgaaccccatggctccccaatcagccgacgtaatcgcgaagctaagcagaaaaggcttcgggaaaaacaggcaacacttgaggcggaaattgctggtgagtctaagtccccagcagagagcatcaaggcctggaggcctaaagagctcgtactctacgagataccaacaaaacccggagagaagaaagatgtgtctgggcccttaccgccggcctatagtcccaggtacgtggaggccgcttggtatccctggtgggtgcgagaaggattctttaaaccagagtaccaggcacgtctgccgcaggcaaccggggagacatttagcatgtgtatccctccccccaatgtgacagggtctctgcacattgggcatgccctgaccgtggctatacaggacgccctggtcaggtggcataggatgcggggggaccaggtactgtgggtgccaggtagtgatcacgccggaattgccacgcaagcggtggtcgagaaacagctgtggaaagaacgaggggtccgcagacacgaactgagccgggaagcttttttacgcgaggtgtggcagtggaaagaagcaaagggtggtgagatctgtgagcagctcagagctctgggggcaagccttgattgggaccgcgagtgttttacgatggacgtcggcagctctgtggctgtcaccgaggcattcgtgagactgtacaaagccggtcttctgtaccgaaaccaccagctagtcaattggtcgtgtgcgttgaggtcagctatcagcgacatcgaagtcgaaaaccgacccctgccaggtcatactcaactgcgcctgcctgggtgtcccacgccagtcagtttcggtctgctgttctctgtcgccttccccgttgatggggagcctgatgcagaggtggtcgtgggaaccaccagacctgaaactctacccggagacgtcgctgttgccgtgcatccagacgactctagatacacgcacctgcacggaaggcaactcagacatcccctcatgggccagcccctgcctttaatcactgactacgccgtgcagccccacgtgggtacaggagccgttaaagttacacccgcccactcaccagcagacgccgaaatgggggcaaggcacgggcttagccccctgaatgtgattgctgaagatggcaccatgacctccctctgtggcgattggctgcagggtctgcatagatttgtcgccagggaaaaaattatgagcgttctgtccgaaagaggattatttagaggcctccagaatcaccccatggtactgcctatttgctcgcggtccggcgacgttatcgaatacctgttaaaaaaccagtggtttgtgcgatgtcaagagatgggagcccgggcagccaaggcagtcgagtctggcgcattagaactgagtcccagtttccaccagaaaaactggcagcattggttttcacacattggcgattggtgtgtatcccggcagctttggtgggggcatcagatccctgcctatctggtagtggaggatcatgcacagggtgaagaggactgttgggtggtggggagatcagaggcagaagcgagggaagtggccgcagaactgacagggcgcccaggggctgagctaacgctcgagcgagaccccgacgtgctcgatacctggttttcatccgctttattccccttcagcgctttggggtggccacaggagaccccagacctcgccaggttctaccccctttccctgctggagaccggcagtgatttactgctcttttgggttggccgcatggttatgcttggaacacagttaactggccagctgccttttagcaaggttctccttcatcccatggttagagatcgtcaaggccgtaagatgtccaaaagtttgggcaatgtactggaccccagagatataataagcggcgtcgaaatgcagctgctgcaggaaaaactcagatctggaaatctggacccagctgagcttgccattgtagccgctgcgcagaagaaggactttccacacggcattcctgagtgcggaacggatgcgctgaggtttacgctttgcagtcatggcgttcaggccggcgatctccacctctcagtgtccgaagtgcagtcctgcagacacttttgtaacaaaatctggaacgctctgagatttatcttaaatgctcttggcgaaaagttcgtgccccagccggctgaggagctcagcccatcaagccctatggacgcatggatcctctcccggcttgctctggccgcacaagagtgtgagcgtggattccttacaagggagctgtcattagtgacccatgcactgcatcatttctggctacataatctgtgtgacgtgtatttagaagccgtgaagccagttctctggcattcccctcgacccttgggcccccctcaggtccttttctcctgtgctgacctcggacttaggttgctggctcctctcatgcctttccttgctgaagaattgtggcagaggctgcctcctcggcctggctgtccccctgcaccatccatcagcgtcgccccatacccttccgcctgtagcctggaacattggaggcagccagagctggaacgccgatttagcagggtccaggaagttgtgcaggtgcttagggcattgagagcgacttaccagctcactaaggccagacctcgcgtgctgctacagtcaagtgagcctggggaccaggggttgttcgaagcctttctggagcccctcggcactctcggatactgtggcgctgtcggtttgctcccgcctggcacagccgccccatcagggtgggcccaagcacctttatccgataccgcgcaagtgtacatggagctacaggggctcgtcgacccacaaatccagctgcccttacttgctgccaggcggtataagcttcagaaacagctggacagcctaaccgcacgcacaccatccgagggcgaagcgggtacacagagacagcagaaactgagtagcttacaactggaactgtccaagctggacaaagccgcgagccacctgagacaactcatggatgagccccccgcccccggctccccggaactgtag

SEQ ID NO: 65438 - DNA, 3192 bp, Artificial Sequence
  derived and/or modified sequence
atgccccacctgcccctggccagcttccggccccccttctggggcttacgacattctagaggattgccccgatttcactcggtttcaacgcagtctgagccgcatgggtctcctatctccaggaggaacagggaggccaaacaaaagagactgcgcgagaagcaggcaacattagaagctgagatcgcgggcgagtccaagtccccggccgaaagcattaaagcttggcggcccaaggagctcgtactgtacgagattcctaccaaaccaggcgaaaaaaaagatgtctccggtcctttacccccggcctacagtcctcggtacgtagaggccgcctggtacccatggtgggtcagggaagggttttttaagccagaataccaagctcgactaccccaagcgacaggggaaacatttagtatgtgcatccctccaccaaatgtcacaggtagcctgcatatcggccacgctctgacagttgcaatccaggacgcacttgtgcgctggcatcgaatgagaggggaccaagtattgtgggtaccgggctcagaccacgcaggtattgcaacccaggctgtggtcgaaaaacagctatggaaggaaagaggagtgcgccggcatgaactgtcaagggaggctttcctccgggaggtatggcagtggaaggaggcaaaggggggagaaatttgcgagcagttgcgggccttaggtgctagtctagattgggaccgagaatgcttcaccatggacgtggggtccagcgtcgctgtgaccgaggctttcgtgcggctttacaaagctggtttattgtaccgcaatcaccagcttgtaaattggtcttgtgctttgcgaagtgcaatatcggacattgaggtagagaatagacccctccccggacatacccaattacgcttaccaggctgtcccaccccggtaagcttcggcctgctgttctccgtcgcgtttccggtagatggcgaacctgacgccgaagttgtggtgggaaccacaaggcctgagaccctccctggagatgtggccgttgctgttcacccggacgattctagatacactcatctccacggcagacaactgagacatcccctgatgggccagcccctgcctctcatcacagattatgctgtgcagccgcacgtcggcactggggctgtgaaggttactcccgcacattcgccagccgacgctgagatgggagctaggcacggattgtctcccctcaacgtcatcgcagaggatggcacaatgaccagtctctgtggagactggctccaaggattgcaccggtttgtggctagagagaaaatcatgtccgtcctctctgagtggggcctcttcaggggacttcagaaccaccccatggtcctgcctatatgttcccggagcggagacgtcatagaatatctgttgaaaaaccagtggttcgtgaggtgtcaagaaatgggggctagagctgccaaagccgtggagtctggcgctctcgagctatctccttcattccaccagaaaaactggcagcactggttcagtcacattggagattggtgtgtttcgagacagctatggtggggtcatcagatacccgcctatctggttgttgaggatcacgcccagggagaggaagattgctgggtggttggccgcagtgaggccgaggcacgggaggtcgcagctgaactgactggtcgccctggggccgagcttactctagaacgagatcctgatgtgctagatacatggttctcttccgcactcttcccattcagcgctctcggatggccccaggagactcccgacctcgctcgtttctatcccctgagcttattagaaacaggcagtgatctcctcttgttctgggtaggacgcatggtaatgcttggaacacagctgacaggtcaactgccttttagcaaagtcctgctgcatcccatggttagggaccggcaggggagaaagatgtccaagagtctgggcaatgtgctggatccccgggatataatctcaggtgtggagatgcaagtgctgcaggagaagctgcgttcgggaaatcttgaccccgccgaactcgcaatcgtagctgccgcacaaaagaaagacttcccacacggcatccccgagtgcggcaccgatgcccttcggtttacactgtgttcccacggcgtacaagctggcgacctgcacctatctgtgagcgaggtacaatcttgccgacacttctgcaacaaaatctggaacgccctgcgtttcatcctcaacgctttgggagaaaagttcgtgccccagcctgcagaggagctgtcccccagctcacctatggacgcctggatcttgtcccgattagccctcgccgcccaggagtgcgagagaggattcttgactagggaactttctctggtgacgcacgcacttcaccatttttggctgcataatctgtgcgacgtgtatcttgaggccgtgaagcctgtgttgtggcattccccacggccactggggcctcctcaggtgcttttttcttgtgccgatcttggtctcaggcttttagccccgttgatgccattcttggctgaagaactgtggcagcgcctgcctcctcgtcctggatgcccacccgctcccagcatttctgtcgcaccatatcctagtgcttgttcactggaacattggaggcagcccgaactcgaacggaggttttcgagggttcaggaggttgttcaggttctgcgtgccttaagggccacctaccagcttactaaagcgcggccccgcgtactcctgcagtcttcggaacctggtgatcaagggctgttcgaggccttcttggaacccctgggcactctgggatactgtggtgcggtcggactactgcctcctggcgcagccgcaccgagtggctgggcacaagccccactgagcgataccgcacaagtgtacatggagctccaagggctcgtcgacccgcagatccaattgcccctgctggccgcacggaggtataagctgcagaaacagctcgatagcctcacggcccgtacccccagcgagggagaggctggaactcagaggcagcagaagctgagtagccttcagttggagcttagcaagctcgacaaagccgcttctcatttgaggcaacttatggacgagcctcctgcacctggctcccccgagttgtag

SEQ ID NO: 65439 - DNA, 3192 bp, Artificial Sequence
  derived and/or modified sequence
atgccccacctgcccctggccagcttccggccccccttctggggccttcgccactcccggggcctgccccggtttcactcagtctctactcagtccgaacctcacggatctcctatttccaggaggaatcgagaggctaagcagaaaagactgcgcgagaaacaggcaactctggaagcagaaatcgcaggagaatcaaaaagtcctgcagaatcaatcaaagcctggagaccaaaagagctcgtgttgtacgagatcccgacaaagcctggcgagaagaaggacgtttccgggccgttacctccagcctactcccctaggtacgtggaggctgcgtggtacccgtggtgggtgcgagaaggtttcttcaagcctgagtaccaggcccgccttccgcaggccaccggagagaccttctctatgtgcattccccctccaaacgtgacagggtccctgcatatcggccatgccctcacagtcgcgatacaggatgcgcttgtgcgttggcaccgaatgcgaggcgatcaggtgctgtgggtcccgggaagtgatcacgcaggcatcgcgacccaggccgtggtagagaaacagctctggaaggagagaggagtgcggagacacgagctgtcaagagaagcattcctgcgcgaggtgtggcagtggaaggaagccaagggtggggagatctgtgagcagctgcgggccttgggcgcctccctggactgggacagagagtgttttactatggatgtgggttcatcagtggcggtaactgaagcatttgtccggctgtataaagccggcctcctgtaccggaatcatcaactggtcaattggtcatgcgccttaagatcggctattagcgacatcgaggtcgaaaatcggcccctgccaggccatacccagctgcggctccctgggtgtcccaccccagtgagctttggactactcttttccgttgccttccccgtggacggcgagcccgacgccgaggttgtggtgggcactacccgccccgaaaccttgcccggcgacgtggccgtcgctgtgcaccctgatgattccaggtatacgcatttacacggtcgccagttgcgccacccactgatgggtcagcctctacctctcattaccgattacgcggtgcagcctcacgtgggtaccggcgctgtcaaagtgacccctgcgcactcacctgccgatgccgagatgggcgctagacatggactgagtcctctgaatgtgattgccgaggacggaaccatgacctccttatgcggcgattggctgcagggtctccaccgctttgtggcacgtgagaaaatcatgtctgtgctgagcgaacgagggctgtttcgtggtctgcagaaccatccaatggtcctgccaatttgctctcgatccggcgatgtgattgagtaccttctaaagaatcagtggtttgttagatgtcaggaaatgggcgcacgagccgctaaggccgttgaatctggagctctggaattgtccccatccttccaccagaagaactggcaacattggttcagtcacatcggcgactggtgcgtctctcggcagttgtggtggggccaccaaatccctgcatacctggtggtcgaggaccacgctcaaggcgaagaggactgctgggtggtgggcaggtctgaggctgaagctcgtgaagttgcagccgaactcactggccgccccggggcggaattgacacttgagagagacccggacgtcctggacacctggttctcttctgcactgtttcctttcagtgcgctgggttggcctcaggaaacgcctgacctagcacggttctacccattgagcctattggagaccggctccgatctgctgctcttttgggtggggcggatggtgatgctaggaacacagcttacaggccagctgcctttcagcaaagttctgctgcacccaatggtacgagacaggcaggggcgaaagatgagtaagagcttagggaacgtgcttgacccaagagatatcatcagcggggtcgaaatgcagttgctgcaggaaaagctgcggtctggcaatctagaccctgccgaactggcgatcgtggctgccgcacagaaaaaagatttccctcatggcatccctgagtgtgggacggatgctcttcggtttaccctctgtagccacggtgtccaggctggagatcttcatctatcagtgagcgaggtccagagctgccgccacttctgtaacaagatttggaacgcccttcgcttcatcctaaatgccctgggtgaaaaattcgtgccacagccagctgaggagctgagtcctagttccccaatggacgcatggatactctcccgcttggctctggccgcccaggagtgcgaaagaggcttcctgacaagggagttgagcttggtgacccatgctttgcaccacttctggcttcataatctgtgcgacgtctacctcgaggctgtgaaaccagtgttatggcactctcccaggcctctgggcccccctcaagtcctgttctcgtgcgctgacttgggccttcggctgctggctcctcttatgccttttttggctgaggaactctggcagcgactgccccctcgccccgggtgtcctccagccccaagcatctcagtggccccttacccgtctgcctgttccctggagcattggcgccaacctgagctcgaacggaggttttctagggttcaggaagtggtgcaggtgctaagagccctgcgcgcaacatatcagcttactaaggcgcgtccacgggtgctcttgcaatcatctgaaccgggcgatcaggggctcttcgaagcctttctggaaccattaggtacactcgggtactgcggcgccgtcgggcttctgccaccagggacggcggctccctcaggatgggcccaagcgcccctttcagatacagcccaagtctacatggaactgcaggggcttgtcgacccccaaatccagctgcctcttctagccgctaggcgatataagctccaaaaacagctggatagtctgacagctagaaccccctctgaaggtgaggcaggaactcaacgacagcagaaactgtcctctctgcaacttgaattgagcaagctggacaaggcggctagccatctgagacagttgatggatgaaccccccgcccccggatcccccgaactttag

SEQ ID NO: 65440 - DNA, 3282 bp, Artificial Sequence
  derived and/or modified sequence
atgggcggcaaggcctggccccggcgggccgtgggcaccgccggcggcccctgcgcagagcagattagcgctccgtttcagacactgctcatgcctcatctgcccctggcctcattccgaccaccgttctggggtctgcgccacagtcgcggcctgcccagatttcacagcgtgagtacccagtcagagccccatgggtcccccattagccgaagaaaccgagaggccaagcagaagcggttgagagagaagcaagcaacgctcgaggccgaaatcgctggagaatcaaagagcccggcagagtcaatcaaggcctggcggcccaaagaactggtgctttacgagattccaaccaaacccggggagaaaaaggacgtctcaggccccctacctcccgcatattcacctagatatgttgaagccgcgtggtacccttggtgggtgagagaaggttttttcaagcccgagtatcaggccaggctcccccaggctacaggtgaaactttttcgatgtgcatccccccaccaaatgtgacgggatctctccacataggacacgctctgactgtggctattcaggacgcccttgtccggtggcaccggatgaggggggaccaagtcctgtgggtgccggggtcagaccatgccggcatcgccacccaggccgtggtcgaaaagcagctctggaaggagaggggagttagacggcacgagctgagcagagaagccttcctgagagaggtctggcagtggaaggaggctaagggaggagagatttgtgaacagctcagagccctgggggcatctctggattgggacagggaatgcttcaccatggacgtgggtagctcagtcgccgtaactgaagcctttgtccggctatataaagcaggacttctgtaccgcaaccaccaactcgtaaattggtcctgtgctttacgctcagctatctccgatatcgaagtggagaaccgtccgctccctgggcatacccagcttcgcttgcctggatgcccgacacccgtgagctttggactattgttctcagttgccttcccagttgatggcgagccagacgccgaagtcgtagtgggtaccacacgccctgagaccttacctggagacgtcgcagtcgccgtccacccagacgactcccgctatactcacctccacggacgacagctcaggcatccactcatgggccagcccttgcccctcataacagattacgcggtacagccacatgtgggaaccggggcggtgaaggtgactccggcccactctccagcagatgctgaaatgggggctcgtcatggcctctcaccactgaacgtgatcgcagaagatggaaccatgacaagcctgtgcggagactggctgcagggcctacatagattcgtggcccgggagaagataatgtccgtgttatcggagtggggcttgttccgaggcctccagaaccaccctatggtgctgcctatttgttcaaggtccggcgacgtgatcgagtacttgctcaagaaccagtggtttgtaagatgtcaggagatgggtgccagagctgcaaaagccgtcgagtctggagccctcgagttaagcccgtcattccatcaaaagaactggcagcattggttcagtcatattggggattggtgtgtcagccggcagctgtggtggggccatcagattcccgcgtatctagtggtggaagatcacgcacagggggaggaagactgctgggtagttggaagaagcgaagccgaggcccgggaagtggcagctgagctgaccggaaggccgggggcagagttgactctagaaagggatccggacgtcctcgacacctggtttagttcagctctctttccattctctgcactcgggtggccccaggagactccagacctggcgcgcttttaccctctaagccttctcgagacgggctccgatctgctgctgttctgggtcggacgcatggtaatgctgggcacacaacttaccggccagctgccatttagcaaggtcctgttgcaccctatggtgagagatagacagggacggaaaatgtcaaaatcattgggcaacgtgctggaccctcgcgatatcatcagcggggtggaaatgcaagtactgcaggaaaagttgcggagcggcaatcttgacccagccgaactggctatcgtggccgccgcacagaagaaggatttcccccatgggattccggaatgtgggaccgatgccctgagattcactctatgttcacatggggtgcaggccggcgacttacatctttcagtatcagaggttcagagctgccgacatttctgtaacaagatttggaacgctctcaggttcattctgaatgcacttggagaaaaattcgtccctcagccagccgaagaattaagtccttcatctcccatggacgcctggatcctgagtaggctggctctggccgcacaggaatgtgagcgggggttcctgaccagagagctatctttggtgactcacgccctccaccatttctggctgcacaacctttgcgacgtgtacctcgaggccgtcaaaccagtgctttggcactcgccacgccctcttggtccaccccaggtccttttctcctgtgccgacctcgggctgcgattgctcgcaccgctgatgccattcttggccgaagagctatggcagcgcctgccaccgcgtcccggctgcccccctgctccttccatcagcgtggccccctatccctccgcgtgcagcctggagcactggcggcagcccgaactggaaagaaggttctctcgcgttcaggaagtagttcaagtacttagggccctccgagcaacttatcagttgacaaaagcccggccacgcgtcctccttcaaagctctgaacctggtgatcagggcctgttcgaagccttcttggaaccattgggcacactgggttattgtggtgccgtggggctgctgccccccggggccgctgctccctcggggtgggctcaggccccattgtccgataccgcccaggtctatatggagctgcaaggtcttgtggatccacaaatacagctgccacttcttgccgctcgaagatacaaactccagaagcagctggactctctgaccgcccggacccccagtgaaggtgaggctggaacgcagcgccagcagaaactgtctagtctgcagttggagctgtccaaactggataaggccgcttctcacctccggcagcttatggacgagccgccagctcctggatctcccgagctgtag

SEQ ID NO: 65441 - DNA, 3282 bp, Artificial Sequence
  derived and/or modified sequence
atgggcggcaaggcctggccccggcgggccgtgggcaccgccggcggcccgtgtgcggaacagatctcagccccctttcaaactctgcttatgccgcaccttcccctcgcctcgttcagacccccattctgggggttgaggcattctaggggactaccacggttccattccgtaagtacccagtctgaaccccatggatctcctatttctagaaggaacagagaagccaagcagaagaggctgagagagaagcaggcaactttggaagccgaaatcgccggagagagcaagagccccgccgaatccattaaggcatggaggcctaaggagctcgtgttatacgaaatcccaacaaagcccggtgagaaaaaagacgtatccggcccacttcctcccgcttacagtcctcgatatgtggaagccgcttggtatccatggtgggttcgcgagggcttcttcaaacctgaatatcaggcaagattacctcaggccaccggcgaaaccttctccatgtgtatccccccaccgaacgtcacaggaagtttgcacatcggccacgcattaacagtggcaattcaggatgccctggtacggtggcacagaatgcgcggcgatcaagtgctctgggtaccaggttccgatcacgcagggattgcgacccaggccgtcgtggagaagcagctgtggaaagaacggggcgttcgcagacatgagttgtcacgggaggctttcctaagagaagtttggcagtggaaagaggcaaaggggggtgagatctgtgagcagctgagggccttaggtgcctcattagactgggatcgggagtgcttcaccatggatgtgggttcctcggtggcggtcaccgaggcctttgttcgcctgtacaaggcagggctgctgtaccgcaaccaccagctagtgaattggtcttgcgctctgcggtctgctatctcggacatcgaggttgagaatcgaccccttccggggcacactcagctcaggcttcccggctgtcctactccggtctcgttcggcctgctcttctcagtggctttcccagtcgacggcgagcccgatgcagaggttgtcgtagggacaacacggcctgaaactctcccaggcgatgtggccgtggcggtccaccctgacgattcccggtatacccacctgcatggaaggcagcttcgccacccactaatggggcagcctctgccactcatcaccgattacgccgtccagccccatgtgggaactggagctgtcaaggttacccctgctcactccccagcagatgcagagatgggcgcccgtcatggcctttctcctttgaacgtaatcgccgaggacggcaccatgacgagcttgtgcggggactggctgcagggtcttcataggtttgtcgcaagggagaagatcatgtctgtcctgtctgaacgcgggctttttcggggccttcagaaccaccccatggtgctccccatttgctcccgctccggcgacgtcatagagtacctactgaaaaaccaatggtttgtaagatgccaggagatgggcgcccgtgccgcgaaagcggtagagagcggtgcgttggagctgtccccttcatttcaccagaagaactggcagcattggttttctcatatcggggactggtgtgtatctcgacagctgtggtggggccaccagatcccagcatacctggtggtggaagaccacgcacagggcgaagaggattgctgggtcgtgggtcgaagcgaggctgaggcgcgagaagtagcagccgaactgacaggtcgacccggtgccgaactcaccctcgaacgagaccctgacgttctggatacctggttttcctcagctctgtttcccttttcagcattaggatggcctcaggagactccagatctcgcacggttctacccactcagccttctggaaaccgggagcgatctcttgctcttctgggtgggcagaatggtcatgctgggaactcagctgactgggcagttacccttttcaaaagtgctgcttcacccaatggttagggacagacagggcaggaagatgtcaaagtcccttggaaacgtccttgacccccgcgatataatctctggtgtggagatgcagctactgcaggaaaaactccggagcggtaatttggaccctgccgagctcgccatcgtggctgcagcccagaagaaggactttcctcatgggatccccgaatgcggtacggatgccctgcgctttacactgtgctcccacggagttcaggccggcgacttacacctatccgtgtccgaggtgcagagctgtcggcacttttgcaacaaaatttggaatgctctcagattcatcctcaatgcactgggggaaaaatttgtacctcagcctgcagaagaactttccccctcatccccaatggatgcctggattctctcgcgtctggctctggcagcccaggagtgtgaacggggatttttgaccagggagttgagtctggtgacacacgctctgcaccatttttggctccacaatctgtgcgatgtttacctggaggcggtaaaaccagtgctttggcacagtccgagacccctcggaccaccacaggtgctgttctcctgcgcagatcttggactgcgattactggcgcctctcatgccctttctcgccgaggaactctggcaaagactgccacctaggccaggctgccccccggccccctctatctccgtggccccctacccatctgcttgctctcttgagcactggcgtcaacctgaattggagcgcaggttttctcgagtgcaggaggtggttcaggttctgcgggcactgcgcgcaacataccagttgacgaaagcccggccacgtgtcctactgcagagttccgagcccggtgatcaggggttgtttgaggcctttctcgagcccctcggcaccctagggtactgcggcgccgttgggcttctgccacccggtaccgctgctccatccgggtgggcccaggctcccttgtcagataccgcccaagtgtatatggagctgcaaggtctcgttgatccacagatccaacttcccttacttgctgctcgccggtataagctccagaaacaactggatagtctgacagctagaacacccagtgaaggagaggctggcacgcagcgccagcaaaaactctccagcctccagctcgagttatcaaaattggataaggccgcatcccacctgagacaactgatggacgagccacccgctcctgggagtcccgaattgtag

SEQ ID NO: 65442 - DNA, 2772 bp, Artificial Sequence
  derived and/or modified sequence
atgtgcatccccccccccaacgtgaccggcagcctgcacatcggccatgccctaactgttgcaatacaagacgcgctcgtacgttggcacaggatgcggggggaccaggtgttgtgggtccccgggagtgaccacgccggcattgccacccaggctgtggttgaaaagcagctctggaaggaacggggcgtgcggagacacgagctgagccgcgaggccttcctgcgggaggtgtggcagtggaaggaagctaaggggggagaaatctgcgaacagctgcgcgctctgggggcctctctggattgggaccgggagtgctttacgatggatgtcggttcctccgtagccgtcaccgaagccttcgttcgcttatataaggcgggcctgctttatcggaatcatcaactcgtgaactggtcctgcgccctccgcagcgccattagtgacattgaggtggagaacagacctttgccaggccacacccagctccggctccccggctgccccacaccagtgagttttgggttgctcttctcagtcgcctttccagttgacggggaaccagacgccgaagtcgtggtaggtactactcggccggaaactctccccggggatgtggcggttgccgtgcacccagatgactccagatacactcatctccacggaagacaactgcggcatccgctaatggggcagcccttgcctctgatcaccgattacgctgtacagcctcatgttggtaccggggccgtcaaggtcacgccggctcactcccccgcagacgcagaaatgggcgcaagacacggcttgagtcccctaaacgtaatcgctgaggatggcacaatgaccagcttatgcggcgattggctgcagggcctgcatcggttcgtggctagggaaaaaattatgtctgttctgagtgaaaggggcctgtttcgaggattacaaaatcacccaatggtgcttcccatctgtagcagaagcggcgatgttatcgagtacctgctaaagaatcagtggttcgttcgatgccaagaaatgggagccagggcagccaaagctgttgagtctggcgcattggagcttagcccaagctttcaccagaaaaactggcagcactggttctctcacatcggcgactggtgcgttagcagacaactgtggtggggccaccagatccctgcttacctagttgtggaggaccatgcgcagggagaggaagattgttgggtggtgggtagatcagaggcggaggcgcgtgaagtggctgccgagctgactggcaggcctggtgctgagctcaccttggagcgcgatcccgatgtccttgatacttggttctcatccgctctgtttcccttctccgctctcggatggcctcaagaaactcctgacttggcccggttctatccactgtccctgctggaaaccggttctgacctcttattgttttgggtcggtagaatggttatgcttggtacccagctcacaggccaactgccattctcaaaagtgttgctgcatccgatggtgagggaccggcaaggccgcaagatgtccaaatctctggggaatgtactggaccctcgggacatcattagcggggtagagatgcagttgctgcaggagaaactgcgttccggcaacctcgatcccgcagagttggcgattgtcgctgctgcccaaaagaaggacttcccacacggaatccccgaatgtggcacagatgctttgcgttttactctgtgttcccatggcgtgcaggcaggggatctgcacctgtctgtatctgaggttcagtcatgccgccatttttgcaataagatttggaacgctcttcgatttatcttaaacgcactcggggagaagttcgttcctcagccagcagaagaactgtccccttccagcccaatggacgcttggattcttagtcgcttagcactggcggctcaggagtgtgaacggggattcctgacacgtgagctgtcccttgtcactcacgccctacaccacttttggctccataatctgtgtgacgtttatctcgaggccgtgaagccagtcttgtggcattccccaagacctctgggaccaccccaggtgctcttcagttgtgccgacctcggcctgaggctgctcgctcctcttatgccatttctggcagaggagctgtggcaacgactgccaccccggcctggttgcccccccgctccttccataagcgtggcgccctaccctagtgcgtgctctctcgagcattggcggcagccagaactagagcgcagattcagtagggtccaagaggtggttcaagttctccgtgctttgcgcgcgacgtaccaactaaccaaggccaggccacgggtgctcctgcagtcaagcgagcctggagaccaaggcttgtttgaggcattccttgagccattagggacactgggttactgtggtgccgtagggttgctaccacctggcacagcggctccaagcggctgggcccaggcccctttatccgacactgctcaggtgtacatggagttacagggattggtggatccacagatccaactgcccttactggctgcgaggaggtacaagctgcagaaacagctggattctctgacagccagaactcccagcgagggagaggctgggacacagcgacaacagaaattgtcctccctgcaattggaattaagcaagctggacaaggcggcctcacacctgagacagctcatggatgagcctcccgcccccggctcacctgagctctag

SEQ ID NO: 65443 - DNA, 2772 bp, Artificial Sequence
  derived and/or modified sequence
atgtgcatccccccccccaacgtgaccggcagcctgcacatcggccacgccttgactgtcgccattcaggacgccttggtgagatggcaccgcatgcgtggcgatcaggtgctgtgggtgcccgggtcagatcacgccggaatagccacacaagctgtggttgaaaaacagctgtggaaagagaggggggtgaggaggcatgaattgagccgagaggctttcttacgtgaggtgtggcaatggaaagaggccaagggcggcgaaatctgtgagcagttgagagctctgggggctagcctggactgggatagagaatgttttaccatggatgtgggcagcagcgttgctgtgaccgaagcgtttgtgagattgtacaaggccggtcttctttatcggaaccaccaacttgtgaattggtcgtgtgccctgagatctgctatctctgatatagaagtggagaatcgacctctacctggacacacacagctcaggctgcccggctgccctacacctgtttcttttggattacttttttctgtagcattcccggtggatggcgagcccgacgcagaagtggtcgtgggcacgacccgaccagaaacactacctggagatgtcgcagttgctgtgcatccggacgactcaaggtacacgcacttacacgggaggcaacttaggcacccactgatgggacaacctctgcccctgatcactgactatgctgtgcagccccacgtggggacaggggccgtgaaggtaactcccgcgcatagtcccgctgatgccgaaatgggggccagacacgggctaagtcctctgaatgtgattgccgaggatggaacaatgaccagtctgtgtggcgattggctgcaggggctccacagatttgtggcccgcgagaagattatgtcagtgctctccgaatggggactctttagaggcctgcagaaccatcctatggtgctgcccatctgttcacggtcgggcgacgtgattgagtatctactgaagaatcagtggtttgtgaggtgccaggagatgggagctcgtgccgcgaaagctgtggaaagtggagctttggaattgtctccaagcttccaccaaaaaaactggcagcactggttcagccacattggcgactggtgcgtgtcccgtcagctctggtggggacatcagataccagcctacttagtcgtggaggaccatgctcaaggcgaagaggattgctgggttgtgggccgctccgaagccgaggcacgcgaggtagcagccgagctgaccggccgaccaggcgctgagttaaccctggaacgagaccctgacgtgttggacacttggttcagctcggccctgtttcccttcagtgcactcggctggccgcaggagacacccgacctggctagattctacccactgagcctgctggagaccgggtccgacctgctcctcttctgggtgggacgaatggtcatgctgggcacacaactgaccgggcagctcccattctctaaggtgttactgcacccaatggtgcgcgacagacaagggaggaagatgagcaagtccctaggaaatgtgctcgacccacgtgatattatctcaggggttgagatgcaagtgctgcaagaaaagctccgaagtgggaatctggatccggctgaattggctatcgttgccgccgcccagaagaaagactttccccatggcattccagagtgtggaacggacgccttgcgctttaccctgtgctctcatggagtgcaagccggagacctccatttatcggtaagtgaagtacagtcctgccggcacttttgcaataaaatctggaatgcactgcgctttatactgaacgcgctcggagaaaaattcgttccacagcctgctgaagaactcagcccttcctcccctatggatgcttggatactatctaggctcgcattggctgcgcaggagtgcgaaagggggtttttgacccgggaactgtcactggtgacacacgccttacatcatttttggctgcataacctgtgcgatgtctaccttgaggcagttaagcccgtgctgtggcactcaccgcgtcctttagggccaccacaggttctgttctcctgtgctgatcttggattacgactgctggctcctctgatgccttttttagcagaagaactgtggcagagactgcctccaaggcccggttgccctcccgcaccttcaatatcagttgccccctatcccagtgcctgcagcctggagcactggaggcaaccggagctggagagaagattttctagggtgcaggaagtggtccaggtactgcgggcactgagggccacgtaccagcttacaaaagcccggcccagggtgctcttacaatcctcggagcccggcgaccagggcctctttgaagcgttcctggagcccctgggcactcttggctattgtggcgccgtgggcctcctcccaccgggtgcggctgcaccaagtggctgggcacaagccccattgagtgacacagcccaggtatatatggagctgcaagggctcgtcgacccacaaatacagctgcccctgttggcggctagacggtacaaactccagaaacagctggattctttgaccgcaaggacacccagtgaaggcgaggcggggacacagcgccagcagaaactatcgagcctgcagttagagctttccaagttagacaaagctgcctcccacctgaggcagcttatggacgagcctcccgcacctggttctcccgagctctag

SEQ ID NO: 65444 - DNA, 3282 bp, Artificial Sequence
  derived and/or modified sequence
atgggcggcaaggcctggccccggcgggccgtgggcaccgccggcggtccttgcgccgagcagatttcagcgcccttccaaaccctcctgatgccccatctgccattagcgtccttccgacctcctttctggggactgaggcactctaggggactgccaagatttcattctgtatcgacacagtctgagcctcacggtagtccaattagcagacggaaccgtgaagccaaacagaaaaggcttcgcgagaaacaggccaccctggaggcagaaatcgctggagagagcaagagcccagccgaatccatcaaagcctggcgaccaaaagaacttgtactctacgagataccaacaaagcccggggaaaaaaaggatgtctctggacccctacccccagcttattcaccacgctacgtcgaagctgcatggtacccttggtgggttcgtgaaggattcttcaagccagagtaccaagcccgtctgccacaggccaccggcgagaccttttcgatgtgcatccctccgcccaacgtgaccggatcattgcatatcggtcacgccctgactgtggctattcaggacgctcttgttcggtggcaccggatgagaggggatcaggtcctgtgggttccaggttcagatcacgcaggaatcgccacccaagccgtggttgagaagcagctgtggaaggaaagaggagtcaggcggcacgagttgagcagagaggcttttttgcgggaggtatggcagtggaaagaagcgaagggcggcgagatttgcgaacagctgcgagctctgggtgcttccttggattgggacagagagtgcttcacaatggatgtgggatccagcgtggcagtgacagaggcttttgtcagactgtacaaggcagggttactgtatcgcaaccatcagctggttaactggtcttgtgcccttagaagtgccattagcgatattgaagtggaaaaccgtcccctgcctggccacactcagctacgactccctggctgtccaacgccagtgtcattcggactcctgtttagcgtcgcctttcccgttgatggcgagcccgacgcagaggtcgtggtgggtacaacccgccccgagaccttaccaggtgacgtcgcagtcgcggtgcaccctgacgactcgcggtacactcacctacatggccgacagctcaggcaccccctcatgggacaaccgcttcccctgatcaccgattacgcggtgcagcctcacgtcggtacaggcgcagtcaaggttacgccagctcattctcctgccgacgcagagatgggggccaggcatggtctatcaccgctaaacgtgattgcagaggacggcacaatgaccagcttatgcggcgactggttacaggggcttcatagattcgttgcacgggagaagataatgtccgtgctctccgagaggggtttgttcagagggctgcagaatcacccaatggtgttacccatatgtagcaggtctggagacgtaatcgaatacctgcttaaaaaccagtggttcgtccgttgccaggagatgggcgcccgagccgcgaaggcggtagagtccggagccttggagctttcccctagcttccaccagaagaactggcagcactggttcagccatatcggggactggtgcgtgtcccgccagctctggtggggccatcagatccccgcctacctggtagtcgaggaccacgcccagggggaggaggattgttgggttgtcggtcgttcagaggccgaagcgagggaagtcgctgcagagctgactggtagacccggcgccgaacttactctggaacgagacccagatgtgttagatacatggtttagtagcgccctgtttccgtttagtgcacttggttggccccaagaaacgccggatctggcccggttctaccctttgagtctgctcgagaccggaagtgatctgctgctgttctgggttgggagaatggttatgctcggcactcagcttaccggccagctgccattttctaaagtgctcttgcatcccatggtgagagaccgccagggcagaaagatgagcaagtccctgggtaatgtgctcgaccctagggatatcatcagtggggtcgaaatgcagcttctccaagagaagttgaggtccggaaatctggaccccgcggaactggcaatagtcgcggccgcgcagaaaaaggatttcccacacgggatccctgagtgtgggacagacgccctgaggtttaccctatgcagtcatggagtgcaggctggtgatctccacctttctgtatcggaggttcagagctgtaggcacttttgcaataagatctggaacgctttacgttttattttaaatgcgctaggcgaaaagtttgttccacagcctgccgaggagctgtctcccagctctccgatggacgcttggatcctcagccgccttgccttggcggcccaagagtgcgaacgtggcttcttgacacgggaattgagccttgtcacacacgccctgcaccatttctggttacacaacctctgcgatgtgtacttggaagccgtcaagccagtcctgtggcactcaccacgaccgcttggacctcctcaggttctcttcagctgcgcagatctcggtcttagactccttgcgcctctgatgccttttctggctgaagagctttggcagagattgcctccacgtccaggatgcccacccgcacccagcatttcagtagccccctacccatcggcctgttctctcgaacactggcgtcagccggaactggagaggcggttctcaagagtccaggaagtggttcaggtgctgcgggctctcagagccacctatcagttgaccaaagctcggcccagagttctgttacagagtagcgagcccggggatcagggcctgttcgaggcctttttggaaccacttgggacacttggatactgcggcgctgtggggttgctacctcctgggaccgccgccccctccggctgggcccaagctccactgtccgatacagcgcaggtctatatggagttacaaggcttggtggatccacagatccagcttcccctgctcgctgcaagacggtacaaactccagaaacagttggacagtctgacagctcggactcccagcgagggggaagcaggaacccagaggcagcaaaagctgtctagcctacaactcgagctctccaaactggataaggctgcgtctcatctgcgccagctcatggatgagcctccagctcctggctcccccgagttatag

SEQ ID NO: 65445 - DNA, 460 bp, Artificial Sequence
  derived and/or modified sequence
acgctgcgggtcctgggcccaggccttgggatgggcgggaaggcctggccgcgccgggctgtgggcactgcaggaggcccctgtgcagatctcggcccctttccaaacactcctgatgcctcatttgcctctcgcttcttttcgaccaccattttgggggctgaggcactcacggggcctccccaggtttcactccgtttctacacagtcggagccccatggatctcccatctcccggaggaaccgtgaagccaaacagaagcgcctgcgagagaagcaggctactctggaggctgagatagcaggggagagcaagtcacctgcagaatccattaaggcctggaggcctaaggagttagtattgtatgaaatccctacgaaacccggtgaaaagaaagatgtctctgggcccctgcctcctgcatacagcccccgatatgttgaggctgcctggtacccg

SEQ ID NO: 65446 - DNA, 4073 bp, Artificial Sequence
  derived and/or modified sequence
gccagctgctgcgcatgcgccggccggggccccgcccccatgcgccgcgcggctccagggccacgttccagggtcgggtttggtggattcctcagtccctgccgccgcggggcgccctgggatagcggcggggcctcctggtgagcgcgcgccggggcggcctccgggaagtgggagacgctgcgggtcctgggcccaggccttgggatgggcgggaaggcttggccgcgccgggctgtgggcactgcaggaggcccctgtgcaggtggagatcgccgcggccctggcgggactccttgctggctcttgggcgcgctgatgcccatcatctccctgagtttctgagccctatctctcatgtgtcagtggtcaccgccgaatccagacactccggccctgttccggaagagccctgatatccgtggctccatggcgctgtctgtcgataccatgcactctagctctcaaggaggaaaggttttgtggaagggaatagagacttggaataacagacctgtgctaattagagacaggaaagatggaacaaggggagtgacccttctccacccccatatcctaatgtgctctctctctatccagaacagatctcggcccctttccaaacactcctgatgcctcatttgcctctcgcctcttttcgaccaccattttgggggctgaggcactcacggggcctccccaggtttcactccgtttctacacagtcggagccccatggatctcccatctcccggaggaaccgtgaagccaaacagaagcgcctgcgagagaagcaggcgactctggaggctgagatagcaggggagagcaagtcacctgcagaatccattaaggcctggaggcctaaggagttagtattgtatgaaatccctacgaaacccggtgaaaagaaagatgtctctgggcccctgcctcctgcatacagcccccgatatgttgaggctgcctggtacccgtggtgggtacgagagggcttcttcaaaccagaatatcaggcccggctgccccaagctacaggggagaccttttccatgtgtatcccacctcccaatgtcactggctccctgcacattggccacgcactcacggtggccatacaggatgccctcgtgcgctggcaccggatgcgtggggatcaagtgctgtgggtccctggttcagatcatgcaggaattgctacacaagctgtggtggagaaacaactgtggaaggaacggggagtgaggagacatgagctgagccgggaggccttccttagggaggtgtggcagtggaaggaggcgaaaggtggagagatctgtgagcagctgcgagctctgggtgcctccctggactgggatcgagagtgttttaccatggatgttggctcctcagtggctgtgactgaagcttttgtgcggctctacaaggcggggttgctgtaccggaaccatcagcttgtcaactggtcatgtgctttaagatcagccatctcggacattgaggtggagaaccggcccctgcctggccacacacagcttcgactgcctggctgccccacccccgtgtcttttggcctcctattttctgttgccttccccgtggatggagagcctgatgcagaggttgtggtaggaaccacaaggccagagacgctgcctggagatgtggctgtggccgttcatccagacgactcgcgatacacacatctacacgggcgacagcttcgtcaccccttgatggggcagcctcttcccctcatcacagactatgctgttcagccacatgtgggcacgggggcagtgaaggtgactccagctcacagtcctgccgatgctgagatgggggcccgacatggcttgagccccttgaatgtcattgcggaggatgggaccatgacctccctctgcggggactggctgcagggtcttcaccggtttgtggcccgggaaaagataatgtctgtgctgagtgaatggggcctgttccggggcctccagaaccaccccatggtactgcccatctgcagccgttctggggatgtgatagaatacctgctgaagaaccagtggtttgtccgctgccaggaaatgggggcccgagctgccaaggctgtggagtcgggggccctggagctcagtccctccttccaccagaagaactggcagcactggttttcccatattggggactggtgtgtctcccggcagctgtggtggggccatcagattccagcctacctggttgtagaggaccatgcgcagggagaagaggactgttgggtggttgggcggtcagaggctgaggccagagaggtagcagcggaactgacagggaggccaggggcagagctgaccctggagagggatcctgatgtcctagacacatggttttcttctgccctgttccccttttctgccctgggctggccccaagagaccccagaccttgctcgtttctaccccctgtcacttttggaaacgggcagcgaccttctgctgttctgggtgggccgcatggtcatgttggggacccagctcacagggcagctgcccttcagcaaggtgcttcttcatcccatggttcgggacaggcagggccggaagatgagcaagtccctggggaatgtgctggacccaagagacatcatcagtggggtggagatgcaggtgctgcaggaaaagctgagaagcggaaatttggaccctgcagagctggccattgtggctgcagcacagaaaaaggactttcctcacgggatccctgagtgtgggacagatgccctgagattcacactctgctcccatggagttcaggcgggcgacttgcacctgtcagtctctgaggtccagagctgccgacatttctgcaacaagatctggaatgctcttcgctttatcctcaatgctttaggggagaaatttgtgccacagcctgctgaggagctgtctccctcctccccgatggatgcctggatcctgagccgccttgccctggctgcccaggagtgtgagcggggcttcctcacccgagagctctcgctcgtcactcatgccctgcaccacttctggcttcacaacctctgtgacgtctacctggaggctgtgaagcccgtgctgtggcactcgccccgccccctggggccccctcaggtcctgttctcctgcgctgacctcggcctccgcctcctggccccactgatgcccttcctggctgaagagctctggcagaggctgccccccaggcctggttgcccccctgcccccagcatctcggttgccccctaccccagcgcctgcagcttggagcactggcgccagccagagctggagcggcgcttctcccgggtccaagaggtcgtgcaggtgctaagggctctccgagccacgtaccagctcaccaaagcccggccccgagtgctgctgcagagctcagagcctggggaccagggcctcttcgaggccttcttggagcccctgggcaccctgggctactgtggggctgtgggcctgttacccccaggcgcagcagctccctccggctgggcccaggctccactcagtgacacggctcaagtctacatggagctgcagggcctggtggacccgcagatccagctacctctgttagccgcccgaaggtacaagttgcagaagcagcttgacagcctcacagccaggaccccatcagaaggggaggcagggactcagaggcaacaaaagctttcttccctccagctggaattgtcaaaactggacaaggcagcctctcacctccggcagctgatggatgagcctccagccccagggagcccggagctctaactcatcatccccatcagttttcctccctctcagacctgtctttgaggacaaacagatttgtcagctgtcagggtgcagtgggacgtcagagactatgtggtccatcgccttcattgtgtaaatgaggacacagactggcttggtcgcagtgactgtggtgtccttgagatgctcacattactgcccggcctgcctcccacctggaagtctgggaatgaggagattgagataaacttttgaaatcccaaa

SEQ ID NO: 65447 - DNA, 3192 bp, Artificial Sequence
  derived and/or modified sequence
atgcctcatttacctctcgcttcattccggcctccattttggggactgcgacacagtcgtggtttacctcggttccattctgtaagcacacagagcgagcctcacggatctcctatttctcggcgaaacagggaagccaaacaaaagagactccgcgaaaagcaggctactctggaggccgagatagcgggagaaagtaaaagcccagcagagtctatcaaggcatggaggcccaaggaactggtcttgtatgagattccgaccaaacctggggagaagaaggatgtgagtgggccactacccccagcctacagcccccgatacgtggaggcagcttggtatccatggtgggtgcgagagggattttttaagccagaatatcaggcacgcttgccccaggctaccggcgaaacattttctatgtgtatccccccaccaaacgttacaggaagtcttcacataggccacgccctcaccgttgccatccaggacgctctcgttagatggcatagaatgcgtggtgaccaggtcctgtgggtgcccggatctgaccacgctggtatcgcaacccaagccgtggtcgagaaacagttatggaaggagagaggagtccgcagacatgaactgtccagagaggcttttctgagagaagtctggcaatggaaagaagcaaaaggcggtgagatttgcgaacagctgcgcgcactgggggcatctctcgattgggatagggagtgtttcaccatggatgtgggaagtagcgtggccgtgacagaagcatttgtgaggctctacaaagcaggactgctctaccgtaaccaccagttggtgaactggagctgcgcgctccggtctgctatcagcgatatagaagtcgaaaatcggccacttcccggtcatactcagctgcgcctacctgggtgcccgacccctgtaagcttcggccttctgttcagtgttgctttcccagttgatggggagcccgacgctgaggttgtcgtgggaactacgaggcccgaaactctccctggtgatgtagcagtcgccgtgcaccctgacgattcacggtacacccaccttcatggccgacagctgagacatcctctgatgggacagcctctgcctctgattaccgactacgcggtgcagcctcatgttggcacaggcgctgtcaaagtaaccccagcacacagcccggcagacgcggaaatgggcgctcgacatggcttgtcaccactgaacgtcatagccgaggacggaaccatgaccagcctctgtggagactggctgcagggtctgcatcgctttgttgcgagggagaaaattatgtccgtgctttctgaaaggggcctgtttagaggcctgcagaatcacccgatggtgctcccaatttgctcccggtctggcgatgttatagaatacttgctcaaaaatcagtggtttgtccgttgccaggaaatgggcgcacgcgctgctaaggctgtggaaagtggggctctggagctttcgccgtcattccaccagaagaattggcagcactggttttcacatatcggggattggtgtgtctcgcggcagttgtggtggggtcatcagatccctgcttaccttgtggtggaagaccatgcccaaggcgaggaggattgctgggtggtcgggagatcggaggccgaagctcgagaggtagcagctgaactgaccggcagaccaggcgctgagctcacccttgaaagggatcccgatgtgctggacacatggttttctagcgccttgtttcccttcagcgcactaggttggccacaagagacacctgacctggcgaggttttatcccctctccttgttggagaccggcagtgacctcttacttttctgggtggggaggatggtaatgctgggtactcagctaactggccagctgccctttagtaaagtccttctccaccccatggttagggatagacagggccgaaagatgagcaagtcactgggcaatgtcttggacccacgggacattatatccggcgtggagatgcaattactgcaggagaaactaaggtctggcaacttggatcccgcagagctcgcaattgtagcagccgcacaaaagaaggatttcccccatggaattcccgaatgcggaaccgacgcacttcggtttactctgtgttcacacggggtacaggcaggcgaccttcacctgtccgtttcagaagtgcaaagttgcaggcatttctgcaacaagatttggaacgccttaagatttatattgaacgcactcggcgaaaagtttgtgccacagccggcagaggagctttcaccatcctctcccatggacgcctggatacttagcagactggccctggcagcccaggagtgcgagcggggatttctgaccagggaattgagccttgtgacacacgctctgcaccatttttggttgcacaacttgtgtgatgtgtatctggaggccgtgaagcccgtgctctggcacagtcctcggcctctgggacctccacaagttctcttctcttgcgctgatttgggtctgagacttttggctccactcatgccattcctggctgaggaactttggcagcgcctacctccacgacctggctgcccgccagcaccctctatttctgtcgccccttacccctcagcatgctccctcgaacactggcgccagccagagctggagcgcaggttctcacgcgtccaggaggtcgtgcaagtcctgcgtgcgctgcgagccacatatcagctgactaaggctcgccctcgagtgttgctgcagtcatctgagcctggagatcaaggcctcttcgaggctttcctggagccactcgggaccctgggatactgtggtgccgtgggcctgctaccccctggcactgccgctccatccggctgggcgcaggcacccctatcagataccgctcaggtttacatggaacttcagggcctggtagacccccagatccaactccctcttttagcggctagacgttacaagctgcagaaacagcttgactccctgacagcgaggactccttcagaaggggaagccggaacccagaggcagcaaaaactcagctctttgcagcttgagctatctaaacttgataaggccgcatcacatttgcgccagctgatggatgaacctcctgcgcctggaagtccagagctctag

SEQ ID NO: 65448 - DNA, 3192 bp, Artificial Sequence
  derived and/or modified sequence
atgcctcacctgccgttagcgtcctttcggcctcccttttgggggctacgacactctagaggacttccccgatttcatagcgtgtccacacaatcagaaccacacgggagtcctataagcagaaggaatcgtgaagctaaacaaaagcgcctcagagaaaagcaagccacccttgaagcagagatagcaggagaaagcaagagcccagctgaatctatcaaagcctggagaccaaaggagctggttctttacgaaatcccaaccaagcctggagaaaagaaagacgtgtctggacctctgccaccagcctatagccctcgatacgtcgaggccgcttggtacccctggtgggtccgcgaaggcttcttcaaaccggagtaccaggccagacttccacaggcgactggggagacgttcagtatgtgcatccctcctcccaacgtgacgggctctctgcacattgggcatgcactgacggtcgcaattcaggacgccctggttcgctggcaccggatgcggggagaccaagttctgtgggttcccggaagcgatcacgctggtattgctacgcaggccgtcgttgaaaaacaactgtggaaggagcggggtgtccgcagacacgagttatctcgggaggcctttctccgggaggtctggcagtggaaggaagcaaaagggggagagatttgtgaacagttgcgcgctctcggtgcctctctggattgggatcgcgaatgcttcaccatggatgtcgggagctccgtggcagtcactgaagcgtttgtgcgcctatataaagccggactcctgtacaggaatcaccagctcgtgaattggtcatgtgctcttcgctctgcaatctccgatattgaagtcgagaatcggcctctccccggacacacccagctgcgcctgcctgggtgtcccacaccggtgagcttcggtctgctgtttagcgtggcctttccggtcgatggcgagcccgacgctgaagtcgtggtcggaacaacaaggccagaaaccctacccggtgatgttgcggtcgctgttcatcctgacgacagccggtacacccacctgcacggcaggcagctgcgacacccactcatgggccagcctctccccctgataacagactatgctgtccagccccatgttggcacgggcgcagtcaaggtaacacctgcacatagtcccgcagacgcagaaatgggagcccgtcatggcctctcccctttgaatgtcatcgctgaggatggtacgatgacgtccttgtgtggtgattggctccagggtctgcaccgttttgttgcccgagagaaaatcatgtccgtcctgagtgagtggggcttgttcagaggcttgcagaaccatccgatggttcttccgatatgtagccggagcggcgacgtcattgagtacctcttgaaaaatcagtggttcgtgcggtgccaagaaatgggagcgagagctgcaaaagccgttgaatctggcgctctcgagctgtccccaagttttcatcagaagaattggcagcactggttttcccacatcggcgattggtgcgtgtccagacagctgtggtggggccaccagatccccgcttacctagtagtggaagatcatgcccagggggaagaggactgctgggttgtgggtcgctccgaggctgaggcccgagaggtggcggctgaactgacagggaggccaggggctgagctgacccttgaaagagatcccgacgttctggacacctggttttcctccgccctctttccgttttccgcactgggatggccgcaggagacgcctgacctagcccgattctaccctctcagtttgctagagacaggtagtgatctcctcctattctgggtcggtagaatggttatgttaggcacacaacttacaggacagctgcctttttctaaggttctgctccacccaatggtacgcgatagacaggggcgtaaaatgtcaaaatccctcggcaatgtgcttgaccccagagatattatttccggagtggaaatgcaggtcctgcaggagaaacttcggtcgggcaacctggacccagcagaattggcaatcgtggccgctgcacaaaagaaagatttccctcacggtatacccgagtgcggcactgatgctctgcgctttaccctgtgttctcatggcgtacaggccggtgacctgcatctgagcgtatccgaggtacaatcatgtcgacacttttgtaataagatctggaacgcgctgcgtttcattcttaatgccttgggtgaaaagtttgtccctcagcccgctgaggagctgagcccctcgtctcctatggacgcctggattctcagtaggttggccctggccgcacaggagtgtgagcggggattcctcactcgggaattgtcgcttgtcacccacgcgctccatcacttttggctgcataacctctgcgacgtatacctcgaggccgtgaagcctgtgttgtggcactctcccagacccctgggtcccccacaagtgctattcagttgtgcggatctgggcctgcgtcttctcgcacctttgatgccatttttggctgaagagctatggcaacggctgccacctcggccagggtgcccaccggcaccaagtatctctgtggcaccctacccctcagcctgttcgctggaacactggcgccagccagagctcgaaagaagattcagccgggtgcaggaagtggtccaagtgctgcgggctttgcgcgcaacatatcagctcacaaaagctcgccctcgagttcttctccaaagctcagagccaggcgaccaggggcttttcgaagcgtttctggaacctcttggcacactgggttattgcggcgcagttgggctgctccctcccggagcggcagctcctagcggatgggcccaggcccctttatctgacactgcccaggtctacatggaactgcaaggattggtggatccccagatccagctcccacttctggcagccaggcggtacaagctgcagaagcaactcgacagtctgacagccagaaccccctctgagggggaggcgggaacccaacggcagcagaaattgagttcactgcaactggagttaagtaagctggataaggccgctagccacttgagacagttaatggacgaaccaccggctcccggttccccggaactctag

SEQ ID NO: 65449 - DNA, 3192 bp, Artificial Sequence
  derived and/or modified sequence
atgccacatctgccactggcttcttttcgaccccctttctggggcctcagacatagccggggtctgcctcgcttccactcagtctcaacccaatctgagcctcacgggtctcccatttcccgacggaacagggaagccaagcagaagagacttagagaaaagcaggccacgttggaggccgagattgctggcgagtcgaaaagcccggcagaatccatcaaagcatggagaccgaaggaactcgtcttgtacgaaatccctactaagccgggtgaaaagaaggatgtgtcaggcccacttccacctgcctattcacctcggtatgtggaagccgcttggtacccttggtgggtcagggagggtttcttcaagccagaatatcaagcacgccttccacaggccaccggggaaacattctccatgtgtattccaccgccaaatgtgactggcagtttgcacattggccacgccctgacggtcgctatccaagacgcactggtccgttggcacaggatgaggggcgatcaagttctctgggtgcccggtagtgaccacgccggaattgccacgcaggctgtggtggaaaagcaattgtggaaggaacgcggagtaagaagacatgagctgtcacgcgaggcctttctgagggaggtctggcagtggaaagaagcgaaagggggagagatttgcgagcagctgcgtgccctaggcgcttccctcgactgggaccgtgaatgcttcaccatggacgtgggaagctccgtagccgtgacagaagcttttgttaggctctataaggcgggactgttatatcgcaaccaccagctggtgaattggagttgtgcgctgagaagtgcaataagtgatattgaagtggagaaccgcccactgcctggccacacacagcttcggctccctggttgtcctacacccgtgagctttgggctgctgttcagcgtggcgtttcctgtggacggagagccggacgctgaagtagtggtgggtacaaccagacctgaaactctacccggagacgtggcggtggcagtgcatccagatgacagccgttacactcacctccacggacgtcagctgaggcatcccctcatgggccagccattgccattaattacagattatgctgtgcagccgcacgtggggacgggggctgttaaggtgactcctgcacactctcccgcagatgcggagatgggtgctaggcacggattgtctcctctgaacgtaattgctgaagacggaactatgacttctctttgtggagactggttacagggactgcacagatttgtggctcgcgagaaaatcatgtctgtgctgtcagagagaggtctgtttagaggcttgcagaaccatcccatggtgctgccaatatgctctaggtcaggtgatgtgatcgaatacctgctcaagaatcaatggttcgtacgctgccaggaaatgggtgctcgggcagcaaaagccgtggagtctggcgctttagaactcagcccctcctttcaccagaagaactggcagcactggttttcacacattggtgattggtgtgtgtctcggcagttgtggtggggccaccagatcccagcctacctagtcgtcgaggaccacgctcagggagaagaagactgctgggtcgtcggaaggagcgaggccgaagcacgggaggtagcggcagaactcacaggacgacccggagcagaactgacacttgagcgtgatccagacgtgctggatacatggttcagctccgctctctttcctttttccgcattaggatggcctcaggaaaccccagaccttgcgcgattctatccactgagtctcctcgagacaggatctgacctgctcctgttctgggtgggccgaatggttatgctggggacccagcttactggacagctgcccttttctaaagttttgctccacccaatggtgcgggataggcagggcagaaagatgtcgaagagtttgggcaatgttcttgaccctagggacatcatatccggagtggaaatgcagttactgcaggaaaaactgcgcagcgggaacttggacccggcagaattagccattgtggcagctgcacaaaagaaagattttccacacgggatccccgaatgcggcactgatgctctccggttcacattatgtagccacggtgttcaggctggcgacctgcacctgtccgtcagtgaggtccagagctgtagacacttctgcaacaaaatctggaacgcactgcgatttattttgaatgccttgggcgagaagtttgttccccagcctgctgaggagctctctcctagcagcccaatggatgcctggatccttagcaggttggctctggccgcacaagagtgtgagcgaggcttcctgactagggagctcagtctggtcactcatgccctgcatcacttttggctgcacaacttgtgtgacgtttaccttgaggcagtcaaaccggtgttgtggcacagtcctaggccccttggccctccccaggtcctgtttagctgcgcagacttggggctcaggctgctcgcaccccttatgccattccttgccgaagaactctggcaacgactgcctcccaggccgggatgcccacctgcacccagcatttctgtcgccccatatccatccgcgtgctcgctagagcactggaggcagcccgaactggagagaagattctcgcgggtgcaggaagtggttcaggtcctgcgagctctccgcgctacttatcagttaactaaggccaggccgagggtgttgctgcaatcgtcagaaccaggcgaccagggcctgtttgaagcctttctagagcctctcggcaccttaggttactgcggagccgtaggcctgttgcctcctggaaccgcagcaccgtccggttgggcgcaggccccattgtccgacaccgcgcaggtgtatatggagttgcaaggtctggtcgatccccaaatacagttgcctctgttagcagcaagaagatataagcttcaaaaacagttagactcccttaccgctaggacacccagcgaaggagaggccggaacccaacgccaacagaagctttccagcttacagctcgagttaagcaaacttgacaaggccgcaagtcacttacggcagctgatggacgaacctcccgcacccggatcgcctgaactctag

SEQ ID NO: 65450 - DNA, 3282 bp, Artificial Sequence
  derived and/or modified sequence
atgggagggaaagcctggcccagacgcgcagtaggaaccgccggtgggccttgcgccgagcaaatcagcgctcctttccagaccctactcatgccccatttgccactcgcatcatttagacctcccttctggggcttgagacactccagaggccttccaaggttccacagcgtgtctacccagtctgagccacacggaagtccaatcagtcgacgcaatcgtgaggcgaaacagaaacgcttgagggagaagcaagccacgctggaagccgaaatcgcaggtgagtcaaagtcgcctgcggaatcaatcaaggcttggcgtcccaaagaattagttctgtatgagattccgaccaaacccggtgaaaagaaggatgtatctgggccactccccccagcctacagtcctagatatgtcgaagcagcatggtatccgtggtgggtcagggagggtttttttaaaccagagtatcaggccagactgccacaggcaacgggcgagacattcagtatgtgcatccctcccccaaacgttactgggagtctgcacatcggacacgcactcacagtggctatccaggatgctctcgtgagatggcatcgtatgcgcggagatcaggttctctgggtccctgggtccgaccacgctggcatagctacacaagcagtagtggaaaaacagctgtggaaagagcggggagtaagacggcatgagttatctagagaggcttttctccgcgaggtttggcaatggaaagaggcgaagggaggtgaaatctgcgaacaattgcgcgctctgggggcttctttagactgggaccgagagtgctttaccatggatgtgggatcttccgtggcagttacagaagcattcgttagactctacaaagccggtctgttgtatcgcaatcaccagctggtgaattggtcttgtgccctcagaagtgccatctcggacatcgaagtcgagaacaggccactgccaggacatacacagctccggctcccgggatgcccaacgcctgtttccttcggactgctattttcagttgcatttcccgtggacggggagccagatgcggaggtagtcgtcggaacaacacggccagaaaccctgccaggggacgtggcggtggccgtgcatccggacgacagccgctacactcacttacatggacggcaattgcgccacccactcatgggacagcccttgcccctgatcactgactatgctgtgcagccgcacgtggggacaggtgctgtgaaggtcactccggctcacagccctgctgatgcagagatgggagcgagacacggcttgtcccctctcaatgtgattgcggaggacggcacaatgacgtcattgtgtggcgactggttacaaggacttcataggttcgtggctcgtgaaaaaattatgagcgtgctctctgagtggggtctgttcaggggcctacagaaccatcctatggttctgcccatttgttcaagatccggcgatgtgatcgagtatttgctaaaaaatcagtggttcgtacgatgtcaggagatgggcgctcgcgctgcaaaagcagtggaaagcggagccttggaattgtccccctcattccatcagaagaactggcaacattggtttagccacatcggggattggtgcgtatcacgccagctgtggtgggggcaccaaatccccgcttacttggtggtggaggaccacgcccagggagaggaagattgctgggtggtggggcgatccgaggctgaggccagagaggtggctgctgagcttacagggagacccggagccgagctgaccttggaaagggatccagatgtcctcgacacgtggttcagctccgccttattcccattctctgcattgggctggccccaggagaccccagacctagcaagattctaccctttatcactgctggagacaggctctgacctcctcctgttttgggtcgggaggatggtgatgctcggaacccagttaacaggccagctccccttctctaaagtgttgttgcaccctatggtgagggaccggcaagggaggaaaatgtccaaatcgttaggaaacgtgctagatccaagagatatcatctctggggtcgaaatgcaagtgttgcaggaaaagttgaggagtggaaacctggacccagccgagctggcgattgtggccgcagcccaaaaaaaagacttcccacacggaatccccgagtgtggaaccgacgcacttcgcttcacgttgtgctcgcacggcgtccaggccggagatctccacttgtctgtatccgaggttcagtcctgtcgacacttctgcaacaaaatctggaacgcccttagatttatcttaaatgctcttggggaaaaatttgtgccccaacccgctgaggagctgagcccaagttcgccaatggatgcatggatcttgtctagactggccctagccgcacaggaatgcgagcgaggcttcttgactcgagaactctctctggtgacgcacgcactccaccacttctggctccataacttatgtgatgtctacctggaagcggttaagcccgtgctctggcactcaccccgaccccttgggcctcctcaagtcctctttagttgtgctgaccttggcctgcggctgctggcgcctttaatgccattcctggcagaggaactgtggcaacggctgccccctaggccgggatgcccccctgctccaagcatcagcgtcgccccatacccgagcgcatgcagccttgagcactggaggcagcctgaactggaaagaaggttctccagagtgcaagaggtcgtgcaggtgctccgagctctccgcgcaacgtaccagcttacaaaggctaggccacgtgtccttctgcaatcatcagagccaggggaccagggcttgtttgaagcgttcctcgagcccctcgggacattggggtactgtggcgctgtggggctactccctcctggtgcggctgctccttctggatgggcccaggcccctctcagcgatacagcccaggtgtatatggagctgcagggactagttgatccacagatccaattacctttactggccgctcggcgatacaagttacagaaacagctggatagtttgaccgccaggacaccatcggaaggggaggcgggtacgcagcgtcaacagaaattatcatcacttcaacttgagctctccaaacttgacaaggcagccagccacctcaggcaactgatggatgaaccccctgcccctggaagtcccgaattgtag

SEQ ID NO: 65451 - DNA, 3282 bp, Artificial Sequence
  derived and/or modified sequence
atgggaggcaaggcttggcccaggcgtgcagtgggcaccgctggcggtccatgcgctgagcagataagcgcaccctttcaaacgttgctcatgccccacctgcctctcgcttcttttagaccacccttctgggggttgagacacagccggggtctgcctcgttttcactctgtgtccactcagagtgagccacacggaagccccatttcgagaagaaaccgagaagccaagcaaaaacgtctgcgtgagaaacaggctaccttggaagccgagatcgcaggagagtcaaaaagccccgctgagagtattaaggcttggaggcctaaagaattggtactttatgagattcctacgaagcctggggagaaaaaggacgtgtctggccctctgccacctgcctacagccctcgatacgttgaggccgcatggtacccatggtgggtgcgtgaaggattttttaagccggagtaccaggccaggctgccccaagctacgggcgaaacattttccatgtgcattcccccacccaatgtgacaggaagtctgcacataggccacgctcttaccgtggccattcaagacgctctcgtaaggtggcataggatgagaggggaccaagtgttgtgggttccagggtccgatcacgctggtatcgccacacaagcggtggtagaaaagcagttgtggaaggaacgcggagtgcggagacacgaactgagccgggaggcttttcttcgcgaagtctggcagtggaaggaagctaaagggggagaaatctgcgagcaactcagagctcttggagcctctctggactgggatcgcgagtgcttcaccatggatgttggatcttcagtggcagttacagaggctttcgtgcgcctctataaggccggacttctgtaccggaaccaccagctggtgaactggtcatgcgctctgcggtccgccatctccgacatcgaggtggaaaatcgaccgctccctggccacacacagcttcgtctccctggttgtcccacgcccgtctcatttggtcttctctttagcgtggcttttccggtcgacggcgaacctgatgctgaggtagtcgtcgggaccacccgacccgagaccttgcctggagatgtggcagtcgccgtgcatccagatgactcacgctatactcatctccacggccgtcagctgcggcatcctctgatgggtcagcctcttccactgattactgactacgctgtgcagccacacgtgggcacgggcgctgtgaaagtgactcctgctcacagtcctgcagatgccgaaatgggcgcaaggcacggactaagtcccctcaacgtgattgcagaagacggcacaatgacctctctgtgcggcgattggctgcagggccttcaccgattcgtcgccagggaaaaaattatgtccgttcttagcgagcggggtcttttccgcggtctgcagaaccatccaatggtgctgcctatctgtagtcggtcaggggacgtgatagaatatcttctaaaaaaccaatggttcgtgagatgccaagaaatgggcgctagagcagccaaggctgttgagagcggcgctctggagttatcccccagctttcaccaaaaaaactggcagcattggttctcccacattggcgactggtgcgtttctcgccagctgtggtggggacaccagattccggcatacctagtggttgaggatcacgctcaaggtgaggaggattgttgggtggtgggcagatccgaggctgaggcccgagaagtggcagctgagcttaccggacggcctggagccgagctcaccctggaacgtgacccagacgtgcttgatacatggttctcttcagccctcttccctttctccgccctgggctggccacaggaaactccagacctcgcacgtttctacccattatccctactggaaactggctccgacctgttgcttttttgggtaggcaggatggtcatgcttgggacacagctgactggacagcttccttttagcaaggtgttattacaccctatggttagggaccgccagggacggaaaatgagcaaatcacttggaaacgtcctcgatccgcgagacataatcagcggggtcgaaatgcagctactccaggaaaagctcagatcgggtaatctggatccagcagaacttgccatagttgccgcagctcaaaaaaaggacttccctcatgggattcctgaatgcggaactgacgcattgaggttcaccttgtgctcccacggagtgcaggcaggcgacctgcacctgtccgtgtccgaagtgcagagctgcaggcatttttgtaacaaaatatggaatgcgctccgcttcatcttaaatgcactgggggagaagttcgtgccgcagcctgccgaagagctgtcgcccagttctcctatggacgcgtggattctgtcccgcctggccctcgcagcccaagaatgcgagagggggttcctcaccagggagctgtctctggtgacgcacgcattacatcatttctggctgcacaacctgtgtgacgtgtacttggaggctgttaaacctgtcctgtggcattccccaagaccactgggcccaccccaggtgctctttagctgcgcggacctgggcctgcgactccttgcccctctcatgccgtttctcgccgaagagttatggcaaagactccctcctcgacccggttgtcccccagctcctagtatctccgttgctccatatccttctgcctgttccctagagcattggcggcagcccgaacttgagaggaggtttagtcgggtgcaggaggttgttcaggtgttgagggcactccgggctacctaccagcttaccaaggctcgaccccgtgtcctgttacagagctcagagccgggagaccaggggctgttcgaagcctttctggagccactagggacccttggttattgcggcgctgtgggattactgccacccggaaccgccgctccaagcgggtgggctcaggctcccctgagtgatactgcccaagtgtacatggagctgcagggactggtggatccccagatccaacttcccctcctcgctgcccgtcgatacaagttgcagaaacaactcgacagcctaacagctagaactccctccgaaggcgaggctgggacccaaagacaacagaagctgagttctcttcagcttgagctttcgaaactcgacaaggccgcaagtcatctccgacagctgatggacgaaccccctgctcccggttcaccggaattatag

SEQ ID NO: 65452 - DNA, 2772 bp, Artificial Sequence
  derived and/or modified sequence
atgtgcatcccccctccaaacgtgactggctctcttcatattggtcatgccttgaccgtggctattcaagatgccctggtgcgctggcataggatgcgaggcgaccaagtattatgggtcccaggaagcgaccacgccggtatcgccactcaggcagtcgtggaaaaacaactgtggaaagagagaggagtgcgccgacatgagctaagccgggaggcttttctgagagaagtgtggcaatggaaggaagccaagggtggggagatctgcgagcaactgcgagccctgggggcatctctggattgggatcgcgagtgcttcaccatggatgtgggctcgagcgttgctgtgaccgaggccttcgtgcgtctgtataaagcaggcctgttgtatcggaaccatcaacttgttaattggtcctgcgcacttcggtcagcaatctccgacatagaagtcgaaaatcgcccacttcctggccacacccaattgcgactcccagggtgccccacacctgtgtcctttggtctgttattctcggtcgcattccccgtggatggtgaaccagatgctgaggtcgtggtagggactactcgtcccgagactctacctggcgatgtggccgttgccgtccaccctgatgacagtcgctacacgcacctgcacgggcgtcaactccgccacccattgatggggcaaccgctcccattgattacagactacgcggtccagccccacgtgggaactggggctgtgaaagtgacgccagcgcactcccccgcagatgcagaaatgggagctcgccacggattaagccctctgaatgtcatcgcagaagacggaacaatgacatcactttgcggggactggctgcagggacttcacagatttgtggcccgagagaaaatcatgtctgtattatctgagcgaggtctgttccgcggactgcagaatcatccgatggtgctgcctatctgttctcgcagcggcgacgtgatcgaatatttgcttaaaaatcagtggttcgtgaggtgccaggaaatgggggcaagggcggcaaaagccgtagagagcggtgccttggagctgagcccttcctttcaccagaaaaattggcagcactggttctctcacattggagattggtgtgtgtctcgtcagctgtggtggggtcaccagattcccgcttatctagttgttgaagaccacgcccagggggaggaggactgttgggtggtgggcaggtctgaggccgaggcccgagaggtggccgctgaactgaccggcaggccgggagcagaacttaccctggagagggatccggatgtcctggatacgtggttcagcagtgcgctgttcccgttcagtgccctaggctggccacaggaaacacctgaccttgcgagattttatccacttagcctcctggagacagggagcgatctgctactgttttgggtggggaggatggtgatgctggggacacagctgacaggccaattaccatttagcaaagtgcttctacatccaatggtgcgagacagacagggtagaaagatgtcaaagtcgctgggcaacgttttggatcctagggacatcattagtggcgtcgagatgcagctgttacaggaaaaacttaggagtgggaacctagatcccgctgagttggccatcgtcgcagccgcacagaagaaggacttcccacacggaatcccagagtgcgggacagatgcgttaagatttacactgtgttcccacggcgtgcaggctggtgacctgcacctttcagtgtccgaggtccaatcttgccgccacttctgtaataagatctggaacgccctgagattcattctgaacgccctgggcgaaaaattcgtgccacaacctgccgaagaactttccccatcaagtcccatggacgcttggatacttagtaggcttgccctcgcagctcaggaatgcgagaggggcttcctgaccagagaattatcactggtcacacatgcactccatcacttctggctccataatctgtgcgacgtctacctcgaagctgtgaagcctgtgctttggcattcgcctaggcctctcgggcctcctcaggtgctgttcagctgcgccgatctaggtctccgactcctagctccactgatgccattcctggccgaagaattgtggcagcgcttgccacctcgacctggctgcccccctgccccttcaatctccgtggcaccatatccgagtgcctgttcactagagcattggagacagcccgagctcgagagacgctttagcagggtgcaggaggtggtgcaggtgctaagagccttacgtgcgacctaccagttaacaaaagcacgcccacgggtactgctgcaaagctccgaaccaggagaccagggcctgtttgaggctttcttggaacccctgggaacccttggatattgcggcgcagtaggactcctgcctcccggtacagcagccccaagcggctgggcacaggcaccacttagcgatacagcacaagtgtacatggaactgcaagggctcgttgatccgcagatacaactgccactcttggccgcacgaagatacaagctgcagaaacagctggatagcttgactgcccgtacaccaagcgagggggaagcgggaacacagagacagcagaagctgtccagcctccagctggagctgagcaaactcgacaaagcggcatctcatctgaggcagctcatggacgagcccccagctcctggatcacccgaattatag

SEQ ID NO: 65453 - DNA, 2772 bp, Artificial Sequence
  derived and/or modified sequence
atgtgtataccaccgcctaatgtcaccggtagcctccatataggccacgctctgaccgtggccatccaggatgcactcgtgagatggcacagaatgaggggcgatcaggtgctgtgggtcccgggtagtgatcatgctgggatcgccacccaggccgtggtggagaagcaactctggaaggagagaggcgtccgaaggcatgagctttctagagaggccttcctgcgagaagtatggcagtggaaagaagctaaaggcggtgagatctgtgagcagcttcgcgctctgggcgcaagcctggactgggatcgagagtgcttcactatggacgtggggtcaagtgtggcagtgaccgaagcgttcgtgcgcttgtacaaggcaggcctactctacagaaatcatcagttggtgaattggagctgcgcactgagatcagcaatctcggacatcgaggtggagaatcgccctctgccaggacatacacagttaagactgcctggttgtccgactcctgtctcattcggtttgctgttctccgtggccttcccggtggatggcgagccagatgccgaggtggtggtgggcacaactaggccagagaccttgcctggcgatgtggcagtagccgtccatcccgacgacagcaggtacactcacctccacggcaggcagctgagacacccactcatgggtcagccactgcctcttataactgactacgccgttcaaccccacgtgggcacaggtgctgttaaggtgacacctgcacactctcccgctgatgccgaaatgggagctagacacggactatcgccgctaaatgtaattgccgaagatgggacaatgacatctctttgcggcgattggctacaggggttgcatcgatttgtggccagagaaaagataatgtctgtactatctgagtgggggctgttccgcggactgcaaaaccaccccatggttctccccatttgttcaagaagtggcgatgttatcgagtatctactcaagaatcagtggtttgttaggtgtcaggagatgggcgcaagagccgctaaggctgtggagtcaggggctctggaactctctccctccttccatcagaagaattggcagcattggttctcccatattggggactggtgcgtgagcaggcagttatggtggggtcaccagatccctgcttatctggtggtggaagaccacgcccagggcgaggaggattgttgggttgtgggacgctcagaagctgaagctcgagaagtggccgctgagctcaccgggagaccaggagctgaattgacattagagagggaccccgatgtcctcgatacctggttctcttcagcattgttccctttctccgccctgggttggccacaagagacccccgatctggcacgtttctaccctctgagtctcttagagacaggctctgacctccttctattctgggttggaagaatggtgatgctagggacgcagctcacaggccagctgcccttctcgaaagtcttactgcatccgatggtgcgcgatagacaggggagaaaaatgagtaagtcgctgggaaatgtgcttgaccctagggatattatctcaggcgtcgagatgcaggtgctccaggagaaactgcgcagtgggaacctggacccggctgagctggccattgtggctgccgcacagaagaaagatttccctcatgggatccctgagtgcggtactgatgcccttcgcttcacgctgtgttcccatggggtgcaggcaggtgatcttcatctgagcgtatctgaggtgcagagctgtcgtcacttctgtaataaaatatggaatgcattgcgattcatcctgaacgctctgggggagaagttcgtgccacagccagcagaggagctgtcaccttctagtcccatggatgcttggatactgagcagactggccctcgccgctcaggagtgcgagaggggttttctcacacgcgagctgtccctcgtgacacacgctctgcaccacttttggctacataatctatgtgatgtatacctggaggcagtgaaacctgtactctggcatagcccgcgtcctctgggcccaccccaagtgctcttctcctgcgccgacctcggtctcaggttactggcccctctaatgcctttcttagccgaagagctgtggcagagactgccccctagaccgggatgtccaccggcaccatcaatttcagtggccccttacccaagtgcctgttctcttgagcactggcggcagccagagctggaaaggagatttagcagggtgcaagaggtcgtccaggtgctacgtgctctgagagctacgtatcagcttacaaaggcaagaccaagagtgttgcttcagtcctccgaaccaggcgaccagggcctattcgaggctttcctcgaacccctggggaccctggggtattgtggagccgtaggtctgctgcctcctggagccgcagccccatccggctgggcccaggctcccctttcagatacagcgcaagtttacatggagctgcaagggcttgtggacccccaaatccagctcccccttcttgctgcacgcaggtataaactccagaagcagctggacagtctgacagctaggaccccctccgagggagaggcgggtacacagcgacaacagaaactatcaagcctccagttggagctgagcaaattggacaaagccgctagccacttgagacaacttatggacgagccaccggctcccggaagccctgaactttag

SEQ ID NO: 65454 - DNA, 3282 bp, Artificial Sequence
  derived and/or modified sequence
atgggtggcaaagcttggccacggagagccgtgggaaccgcgggaggcccatgtgccgagcaaatcagcgcaccatttcagacactactgatgccacacttgcccctggcgtcattccggccaccgttctgggggctccggcactcaaggggcctacctcgcttccattcggtttccacccaatctgagcctcacggcagccccataagccgtagaaacagggaagctaagcagaaacgtctcagagaaaagcaggcaaccctcgaagccgagatcgcaggcgagagcaagtctcccgcagaaagtattaaggcctggcggcctaaagaactagtcctatacgagatccctaccaagcccggagagaaaaaggacgtatctggaccgctccctcctgcctattcccccagatacgtcgaggccgcatggtacccatggtgggtaagagaaggttttttcaagcccgaatatcaggcccgtctgcctcaggccacgggggagaccttttccatgtgcatccccccacctaatgtcactggttccctgcacattggccacgccctcacagtcgccatccaggacgcgctggttcgctggcaccgaatgcggggtgatcaggtcctgtgggtgccagggtccgaccatgctggcattgctacccaggctgtcgtggaaaagcagctgtggaaggagcgtggtgtccggagacacgagctgtcccgggaggcatttcttcgtgaggtgtggcagtggaaagaggctaaaggcggagaaatttgcgagcagctgcgcgctttgggcgcatctctggactgggaccgggaatgtttcaccatggatgtggggtctagcgtcgccgtcactgaagcgttcgtgcgcttgtacaaggccggactgttgtatagaaatcatcaacttgtcaactggagctgtgcactaaggagtgcaatcagtgatatcgaagtcgaaaatcgcccactcccaggccatactcaactacgcctgcctgggtgtcccacccccgtgagctttggtctgctgttctcggttgcgttccctgtggacggagaacccgatgccgaagttgtagtgggcactacaagaccagaaaccttgcctggggacgttgctgtggctgttcaccctgacgattccaggtacacccacctgcacggaaggcagctgagacacccactgatgggtcagcctctgcccctaataacagactacgcagtacagccccacgtagggacaggcgcagtcaaggtgactcctgctcattctcccgcagatgctgaaatgggggctcggcatggcttgagccctcttaatgtgatcgccgaggacggtacaatgactagcttgtgtggtgattggttgcagggccttcaccgtttcgtggctcgggaaaagattatgtctgtgctctctgaacgtgggctattccgaggattacaaaatcatcctatggtgctccctatctgctctcgttctggcgacgtaatcgagtatttgctgaagaatcagtggttcgtcaggtgtcaggaaatgggcgcaagagcagcaaaagcagtggagagcggcgctctagaactctcaccctctttccaccaaaaaaactggcaacactggtttagtcacatcggggattggtgcgtctcccgccaattgtggtgggggcaccagatcccagcttacctcgtggtggaggaccatgctcagggcgaagaagattgttgggtggtaggacgcagcgaagccgaggccagagaggtcgctgccgagttgaccggcagaccaggagcggagctgacactcgagcgcgaccccgacgtgctggatacctggttttctagcgcgctctttcctttttcggctcttgggtggccccaggagacccctgacttagcgcgattttaccccttaagcctgctggaaaccggctctgatctgctgctgttttgggtcgggaggatggtgatgctgggtacacagctgacaggacagctgcctttcagcaaggtcctcttgcatcccatggttagagatagacagggtcgcaaaatgtctaaatctctcgggaacgtcctagaccccagagatatcatctcaggagtggaaatgcaattactacaagaaaaactacgttctggcaacctcgaccccgcagagctcgccatcgtggccgctgctcaaaagaaagattttccacacggaatacccgagtgcggtaccgacgcactgcggttcacgctgtgttcccacggggtgcaggccggtgacctgcatctttctgtgagcgaggttcaaagctgtcggcacttttgtaacaagatctggaatgctctgagattcatcctgaatgcccttggggagaagttcgttccgcagcccgcagaggagctctccccatcatccccaatggacgcttggatcctatctcggctggctctggctgcccaagagtgcgagcgagggtttctgacccgtgaactatccctggttactcatgccctgcatcacttctggctgcacaacctctgcgatgtatatttggaagcagttaagcccgttctgtggcatagccctaggccactcggaccaccccaggtccttttcagctgcgccgatctgggcctccgtctattggccccactgatgccctttctggccgaagagctttggcagagactgcctcctcggccaggctgtccgcctgctccgtctatctccgtagcaccttacccctcagcttgctcattagaacattggcgtcaacccgagctggagcgccgattttcaagggtgcaggaggtggtgcaggtgctccgcgctttgagagcaacttaccagcttacaaaggcaagaccacgtgttttactgcagtcttctgaacctggcgatcagggtcttttcgaggcgttcctggagccacttggaaccttgggctattgtggcgcagtcggtttgttgccaccaggcactgcggctccgtcaggctgggctcaggccccactgtccgataccgcccaggtgtacatggaactgcagggcctcgtggatccccagattcaattgccactgctggcggctcgaaggtataaactgcagaagcaattggacagcctaacagctcggactccaagcgaaggcgaagcaggtacgcaaagacaacagaaactctcctcactccagctggagctaagcaagttggataaagcagccagtcatttgaggcagctgatggacgagccccctgccccaggctccccggagctttag

SEQ ID NO: 65455 - DNA, 1103 bp, Artificial Sequence
  derived and/or modified sequence
cgcggctccagggccacgttccagggtcgggtttggtggattcctcagtccctgccgccgcggggcgccctgggatagcggcggggcctcctgaacagatctcggcccctttccaaacactcctgatgcctcatttgcctctcgcttcttttcgaccaccattttgggggctgaggcactcacggggcctccccaggtttcactccgtttctacacagtcggagccccatggatctcccatctcccggaggaaccgtgaagccaaacagaagcgcctgcgagagaagcaggctactctggaggctgagatagcaggggagagcaagtcacctgcagaatccattaaggcctggaggcctaaggagttagtattgtatgaaatccctacgaaacccggtgaaaagaaagatgtctctgggcccctgcctcctgcatacagcccccgatatgttgaggctgcctggtacccgtggtgggtacgagagggcttcttcaaaccagaatatcaggcccggctgccccaagctacaggggagaccttttccatgtgtatcccacctcccaatgtcactggctccctgcacattggccacgcactcacggtggccatacaggatgccctcgtgcgctggcaccggatgcgtggggatcaagtgctgtgggtccctggttcagatcatgcaggaattgctacacaagctgtggtggagaaacaactgtggaaggaacggggagtgaggagacatgagctgagccgggaggccttccttagggaggtgtggcagtggaaggaggcgaaaggtggagagatctgtgagcagctgcgagctctgggtgcctccctggactgggatcgagagtgttttaccatggatgttggctcctcagtggctgtgactgaagcttttgtgcggctctacaaggcggggttgctgtaccggaaccatcagcttgtcaactggtcatgtgctttaagatcagccatctcggacattgaggtggagaaccggcccctgcctggccacacacagcttcgactgcctggctgccccacccccgtgtcttttggcctcctattttctgttgccttccccgtggatgga

SEQ ID NO: 65456 - DNA, 3609 bp, Artificial Sequence
  derived and/or modified sequence
ggcggggcctcctggtgagcgcgcgccggggcggcctccgggaagtgggagacgctgcgggtcctgggcccaggccttgggatgggcgggaaggcttggccgcgccgggctgtgggcactgcaggaggcccctgtgcagaacagatctcggcccctttccaaacactcctgatgcctcatttgcctctcgcctcttttcgaccaccattttgggggctgaggcactcacggggcctccccaggtttcactccgtttctacacagtcggagccccatggatctcccatctcccggaggaaccgtgaagccaaacagaagcgcctgcgagagaagcaggcgactctggaggctgagatagcaggggagagcaagtcacctgcagaatccattaaggcctggaggcctaaggagttagtattgtatgaaatccctacgaaacccggtgaaaagaaagatgtctctgggcccctgcctcctgcatacagcccccgatatgttgaggctgcctggtacccgtggtgggtacgagagggcttcttcaaaccagaatatcaggcccggctgccccaagctacaggggagaccttttccatgtgtatcccacctcccaatgtcactggctccctgcacattggccacgcactcacggtggccatacaggatgccctcgtgcgctggcaccggatgcgtggggatcaagtgctgtgggtccctggttcagatcatgcaggaattgctacacaagctgtggtggagaaacaactgtggaaggaacggggagtgaggagacatgagctgagccgggaggccttccttagggaggtgtggcagtggaaggaggcgaaaggtggagagatctgtgagcagctgcgagctctgggtgcctccctggactgggatcgagagtgttttaccatggatgttggctcctcagtggctgtgactgaagcttttgtgcggctctacaaggcggggttgctgtaccggaaccatcagcttgtcaactggtcatgtgctttaagatcagccatctcggacattgaggtggagaaccggcccctgcctggccacacacagcttcgactgcctggctgccccacccccgtgtcttttggcctcctattttctgttgccttccccgtggatggagagcctgatgcagaggttgtggtaggaaccacaaggccagagacgctgcctggagatgtggctgtggccgttcatccagacgactcgcgatacacacatctacacgggcgacagcttcgtcaccccttgatggggcagcctcttcccctcatcacagactatgctgttcagccacatgtgggcacgggggcagtgaaggtgactccagctcacagtcctgccgatgctgagatgggggcccgacatggcttgagccccttgaatgtcattgcggaggatgggaccatgacctccctctgcggggactggctgcagggtcttcaccggtttgtggcccgggaaaagataatgtctgtgctgagtgaatggggcctgttccggggcctccagaaccaccccatggtactgcccatctgcagccgttctggggatgtgatagaatacctgctgaagaaccagtggtttgtccgctgccaggaaatgggggcccgagctgccaaggctgtggagtcgggggccctggagctcagtccctccttccaccagaagaactggcagcactggttttcccatattggggactggtgtgtctcccggcagctgtggtggggccatcagattccagcctacctggttgtagaggaccatgcgcagggagaagaggactgttgggtggttgggcggtcagaggctgaggccagagaggtagcagcggaactgacagggaggccaggggcagagctgaccctggagagggatcctgatgtcctagacacatggttttcttctgccctgttccccttttctgccctgggctggccccaagagaccccagaccttgctcgtttctaccccctgtcacttttggaaacgggcagcgaccttctgctgttctgggtgggccgcatggtcatgttggggacccagctcacagggcagctgcccttcagcaaggtgcttcttcatcccatggttcgggacaggcagggccggaagatgagcaagtccctggggaatgtgctggacccaagagacatcatcagtggggtggagatgcaggtgctgcaggaaaagctgagaagcggaaatttggaccctgcagagctggccattgtggctgcagcacagaaaaaggactttcctcacgggatccctgagtgtgggacagatgccctgagattcacactctgctcccatggagttcaggcgggcgacttgcacctgtcagtctctgaggtccagagctgccgacatttctgcaacaagatctggaatgctcttcgctttatcctcaatgctttaggggagaaatttgtgccacagcctgctgaggagctgtctccctcctccccgatggatgcctggatcctgagccgccttgccctggctgcccaggagtgtgagcggggcttcctcacccgagagctctcgctcgtcactcatgccctgcaccacttctggcttcacaacctctgtgacgtctacctggaggctgtgaagcccgtgctgtggcactcgccccgccccctggggccccctcaggtcctgttctcctgcgctgacctcggcctccgcctcctggccccactgatgcccttcctggctgaagagctctggcagaggctgccccccaggcctggttgcccccctgcccccagcatctcggttgccccctaccccagcgcctgcagcttggagcactggcgccagccagagctggagcggcgcttctcccgggtccaagaggtcgtgcaggtgctaagggctctccgagccacgtaccagctcaccaaagcccggccccgagtgctgctgcagagctcagagcctggggaccagggcctcttcgaggccttcttggagcccctgggcaccctgggctactgtggggctgtgggcctgttacccccaggcgcagcagctccctccggctgggcccaggctccactcagtgacacggctcaagtctacatggagctgcagggcctggtggacccgcagatccagctacctctgttagccgcccgaaggtacaagttgcagaagcagcttgacagcctcacagccaggaccccatcagaaggggaggcagggactcagaggcaacaaaagctttcttccctccagctggaattgtcaaaactggacaaggcagcctctcacctccggcagctgatggatgagcctccagccccagggagcccggagctctaactcatcatccccatcagttttcctccctctcagacctgtctttgaggacaaacagatttgtcagctgtcagggtgcagtgggacgtcagagactatgtggtccatcgccttcattgtgtaaatgaggacacagactggcttggtcgcagtgactgtggtgtccttgagatgctcacattactgcccggcctgcctcccacctggaagtctgggaatgaggagattgagataaacttttgaaatccc

SEQ ID NO: 65457 - DNA, 1029 bp, Artificial Sequence
  derived and/or modified sequence
gttccagggtcgggtttggtggattcctcagtccctgccgccgcggggcgccctgggatagcggcggggcctcctgaacagatctcggcccctttccaaacactcctgatgcctcatttgcctctcgcttcttttcgaccaccattttgggggctgaggcactcacggggcctccccaggtttcactccgtttctacacagtcggagccccatggatctcccatctcccggaggaaccgtgaagccaaacagaagcgcctgcgagagaagcaggctactctggaggctgagatagcaggggagagcaagtcacctgcagaatccattaaggcctggaggcctaaggagttagtattgtatgaaatccctacgaaacccggtgaaaagaaagatgtctctgggcccctgcctcctgcatacagcccccgatatgttgaggctgcctggtacccgtggtgggtacgagagggcttcttcaaaccagaatatcaggcccggctgccccaagctacaggggagaccttttccatgtgtatcccacctcccaatgtcactggctccctgcacattggccacgcactcacggtggccatacaggatgccctcgtgcgctggcaccggatgcgtggggatcaagtgctgtgggtccctggttcagatcatgcaggaattgctacacaagctgtggtggagaaacaactgtggaaggaacggggagtgaggagacatgagctgagccgggaggccttccttagggaggtgtggcagtggaaggaggcgaaaggtggagagatctgtgagcagctgcgagctctgggtgcctccctggactgggatcgagtgttttaccatggatgttggctcctcagtggctgtgactgaagcttttgtgcggctctacaaggcggggttgctgtaccggaaccatcagcttgtcaactggtcatgtgctttaagatcagccatctcggacattgaggtggagaaccggcccctgcctggccacacacagcttcgactgcctggctg

SEQ ID NO: 65458 - DNA, 3609 bp, Artificial Sequence
  derived and/or modified sequence
ggcggggcctcctggtgagcgcgcgccggggcggcctccgggaagtgggagacgctgcgggtcctgggcccaggccttgggatgggcgggaaggcctggccgcgccgggctgtgggcactgcaggaggcccctgtgcagaacagatctcggcccctttccaaacactcctgatgcctcatttgcctctcgcttcttttcgaccaccattttgggggctgaggcactcacggggcctccccaggtttcactccgtttctacacagtcggagccccatggatctcccatctcccggaggaaccgtgaagccaaacagaagcgcctgcgagagaagcaggctactctggaggctgagatagcaggggagagcaagtcacctgcagaatccattaaggcctggaggcctaaggagttagtattgtatgaaatccctacgaaacccggtgaaaagaaagatgtctctgggcccctgcctcctgcatacagcccccgatatgttgaggctgcctggtacccgtggtgggtacgagagggcttcttcaaaccagaatatcaggcccggctgccccaagctacaggggagaccttttccatgtgtatcccacctcccaatgtcactggctccctgcacattggccacgcactcacggtggccatacaggatgccctcgtgcgctggcaccggatgcgtggggatcaagtgctgtgggtccctggttcagatcatgcaggaattgctacacaagctgtggtggagaaacaactgtggaaggaacggggagtgaggagacatgagctgagccgggaggccttccttagggaggtgtggcagtggaaggaggcgaaaggtggagagatctgtgagcagctgcgagctctgggtgcctccctggactgggatcgagagtgttttaccatggatgttggctcctcagtggctgtgactgaagcttttgtgcggctctacaaggcggggttgctgtaccggaaccatcagcttgtcaactggtcatgtgctttaagatcagccatctcggacattgaggtggagaaccggcccctgcctggccacacacagcttcgactgcctggctgccccacccccgtgtcttttggcctcctattttctgttgccttccccgtggatggagagcctgatgcagaggttgtggtaggaaccacaaggccagagacgctgcctggagatgtggctgtggccgttcatccagacgactcgcgatacacacatctacacgggcgacagcttcgtcaccccttgatggggcagcctcttcccctcatcacagactatgctgttcagccacatgtgggcacgggggcagtgaaggtgactccagctcacagtcctgccgatgctgagatgggggcccgacatggcttgagccccttgaatgtcattgcggaggatgggaccatgacctccctctgcggggactggttgcagggtcttcaccggtttgtggcccgggaaaagataatgtctgtgctgagtgaacggggcctattccggggcctccagaaccaccccatggtactgcccatctgcagccgttctggggatgtgatagaatacctgctgaagaaccagtggtttgtccgctgccaggaaatgggggcccgagctgccaaggctgtggagtcgggggccctggagctcagtccctccttccaccagaagaactggcagcactggttttcccatattggggactggtgtgtctcccggcagctgtggtggggccatcagattccagcctacctggttgtagaggaccatgcgcagggagaagaggactgttgggtggttgggcggtcagaggctgaggccagagaggtagcagcggaactgacagggaggccaggggcagagctgaccctggagagggatcctgatgtcctagacacatggttttcttctgccctgttccccttttctgccctgggctggccccaagagaccccagaccttgctcgtttctaccccctgtcacttttggaaacgggcagcgaccttctgctgttctgggtgggccgcatggtcatgttggggacccagctcacagggcagctgcccttcagcaaggtgcttcttcatcccatggttcgggacaggcagggccggaagatgagcaagtccctggggaatgtgctggacccaagagacatcatcagtggggtggagatgcagttgctgcaggaaaagctgagaagcggaaatttggaccctgcagagctggccattgtggctgcagcacagaaaaaggactttcctcacgggatccctgagtgtgggacagatgccctgagattcacactctgctcccatggagttcaggcgggcgacttgcacctgtcagtctctgaggtccagagctgccgacatttctgcaacaagatctggaatgctcttcgctttatcctcaatgctttaggggagaaatttgtgccacagcctgctgaggagctgtctccctcctccccgatggatgcctggatcctgagccgccttgccctggctgcccaggagtgtgagcggggcttcctcacccgagagctctcgctcgtcactcatgccctgcaccacttctggcttcacaacctctgtgacgtctacctggaggctgtgaagcccgtgctgtggcactcgccccgccccctggggccccctcaggtcctgttctcctgcgctgacctcggcctccgcctcctggccccactgatgcccttcctggctgaagagctctggcagaggctgccccccaggcctggttgcccccctgcccccagcatctcggttgccccctaccctagcgcctgcagcttggagcactggcgccagccagagctggagcggcgcttctcccgggtccaagaggtcgtgcaggtgctaagggctctccgagccacgtaccagctcaccaaagcccggccccgagtgctgctgcagagctcagagcctggggaccagggcctcttcgaggccttcttggagcccctgggcaccctgggctactgtggggctgtgggcctgttacccccaggcacagcagctccctccggctgggcccaggctccactcagtgacacggctcaagtctacatggagctgcagggcctggtggacccgcagatccagctacctctgttagccgcccgaaggtacaagttgcagaagcagcttgatagcctcacagccaggaccccatcagaaggggaggcagggactcagaggcaacaaaagctttcttccctccagctggaattgtcaaaactggacaaggcagcctctcacctccggcagctgatggatgagcctccagccccagggagcccggagctctaactcatcatccccatcagttttcctccctctcagacctgtctttgaggacaaacagatttgtcagctgtcagggtgcagtgggacgtcagagactatgtggtccatcgccttcattgtgtaaatgaggacacagactggcttggtcgcagtgactgtggtgtccttgagatgctcacattactgcccggcctgcctcccacctggaagtctgggaatgaggagattgagataaacttttgaaatccc

SEQ ID NO: 65459 - DNA, 3377 bp, Artificial Sequence
  derived and/or modified sequence
gccagctgctgcgcatgcgccggccggggccccgcccccatgcgccgcgcggctccagggccacgttccagggtcgggtttggtggattcctcagtccctgccgccgcggggcgccctgggatagcggcggggcctcctgtcacctgcagaatccattaaggcctggaggcctaaggagttagtattgtatgaaatccctacgaaacccggtgaaaagaaagatgtctctgggcccctgcctcctgcatacagcccccgatatgttgaggctgcctggtacccgtggtgggtacgagagggcttcttcaaaccagaatatcaggcccggctgccccaagctacaggggagaccttttccatgtgtatcccacctcccaatgtcactggctccctgcacattggccacgcactcacggtggccatacaggatgccctcgtgcgctggcaccggatgcgtggggatcaagtgctgtgggtccctggttcagatcatgcaggaattgctacacaagctgtggtggagaaacaactgtggaaggaacggggagtgaggagacatgagctgagccgggaggccttccttagggaggtgtggcagtggaaggaggcgaaaggtggagagatctgtgagcagctgcgagctctgggtgcctccctggactgggatcgagagtgttttaccatggatgttggctcctcagtggctgtgactgaagcttttgtgcggctctacaaggcggggttgctgtaccggaaccatcagcttgtcaactggtcatgtgctttaagatcagccatctcggacattgaggtggagaaccggcccctgcctggccacacacagcttcgactgcctggctgccccacccccgtgtcttttggcctcctattttctgttgccttccccgtggatggagagcctgatgcagaggttgtggtaggaaccacaaggccagagacgctgcctggagatgtggctgtggccgttcatccagacgactcgcgatacacacatctacacgggcgacagcttcgtcaccccttgatggggcagcctcttcccctcatcacagactatgctgttcagccacatgtgggcacgggggcagtgaaggtgactccagctcacagtcctgccgatgctgagatgggggcccgacatggcttgagccccttgaatgtcattgcggaggatgggaccatgacctccctctgcggggactggttgcagggtcttcaccggtttgtggcccgggaaaagataatgtctgtgctgagtgaacggggcctattccggggcctccagaaccaccccatggtactgcccatctgcagccgttctggggatgtgatagaatacctgctgaagaaccagtggtttgtccgctgccaggaaatgggggcccgagctgccaaggctgtggagtcgggggccctggagctcagtccctccttccaccagaagaactggcagcactggttttcccatattggggactggtgtgtctcccggcagctgtggtggggccatcagattccagcctacctggttgtagaggaccatgcgcagggagaagaggactgttgggtggttgggcggtcagaggctgaggccagagaggtagcagcggaactgacagggaggccaggggcagagctgaccctggagagggatcctgatgtcctagacacatggttttcttctgccctgttccccttttctgccctgggctggccccaagagaccccagaccttgctcgtttctaccccctgtcacttttggaaacgggcagcgaccttctgctgttctgggtgggccgcatggtcatgttggggacccagctcacagggcagctgcccttcagcaaggtgcttcttcatcccatggttcgggacaggcagggccggaagatgagcaagtccctggggaatgtgctggacccaagagacatcatcagtggggtggagatgcagttgctgcaggaaaagctgagaagcggaaatttggaccctgcagagctggccattgtggctgcagcacagaaaaaggactttcctcacgggatccctgagtgtgggacagatgccctgagattcacactctgctcccatggagttcaggcgggcgacttgcacctgtcagtctctgaggtccagagctgccgacatttctgcaacaagatctggaatgctcttcgctttatcctcaatgctttaggggagaaatttgtgccacagcctgctgaggagctgtctccctcctccccgatggatgcctggatcctgagccgccttgccctggctgcccaggagtgtgagcggggcttcctcacccgagagctctcgctcgtcactcatgccctgcaccacttctggcttcacaacctctgtgacgtctacctggaggctgtgaagcccgtgctgtggcactcgccccgccccctggggccccctcaggtcctgttctcctgcgctgacctcggcctccgcctcctggccccactgatgcccttcctggctgaagagctctggcagaggctgccccccaggcctggttgcccccctgcccccagcatctcggttgccccctaccctagcgcctgcagcttggagcactggcgccagccagagctggagcggcgcttctcccgggtccaagaggtcgtgcaggtgctaagggctctccgagccacgtaccagctcaccaaagcccggccccgagtgctgctgcagagctcagagcctggggaccagggcctcttcgaggccttcttggagcccctgggcaccctgggctactgtggggctgtgggcctgttacccccaggcacagcagctccctccggctgggcccaggctccactcagtgacacggctcaagtctacatggagctgcagggcctggtggacccgcagatccagctacctctgttagccgcccgaaggtacaagttgcagaagcagcttgatagcctcacagccaggaccccatcagaaggggaggcagggactcagaggcaacaaaagctttcttccctccagctggaattgtcaaaactggacaaggcagcctctcacctccggcagctgatggatgagcctccagccccagggagcccggagctctaactcatcatccccatcagttttcctccctctcagacctgtctttgaggacaaacagatttgtcagctgtcagggtgcagtgggacgtcagagactatgtggtccatcgccttcattgtgtaaatgaggacacagactggcttggtcgcagtgactgtggtgtccttgagatgctcacattactgcccggcctgcctcccacctggaagtctgggaatgaggagattgagataaacttttgaaatccc

SEQ ID NO: 65460 - DNA, 3377 bp, Artificial Sequence
  derived and/or modified sequence
gccagctgctgcgcatgcgccggccggggccccgcccccatgcgccgcgcggctccagggccacgttccagggtcgggtttggtggattcctcagtccctgccgccgcggggcgccctgggatagcggcggggcctcctgtcacctgcagaatccattaaggcctggaggcctaaggagttagtattgtatgaaatccctacgaaacccggtgaaaagaaagatgtctctgggcccctgcctcctgcatacagcccccgatatgttgaggctgcctggtacccgtggtgggtacgagagggcttcttcaaaccagaatatcaggcccggctgccccaagctacaggggagaccttttccatgtgtatcccacctcccaatgtcactggctccctgcacattggccacgcactcacggtggccatacaggatgccctcgtgcgctggcaccggatgcgtggggatcaagtgctgtgggtccctggttcagatcatgcaggaattgctacacaagctgtggtggagaaacaactgtggaaggaacggggagtgaggagacatgagctgagccgggaggccttccttagggaggtgtggcagtggaaggaggcgaaaggtggagagatctgtgagcagctgcgagctctgggtgcctccctggactgggatcgagagtgttttaccatggatgttggctcctcagtggctgtgactgaagcttttgtgcggctctacaaggcggggttgctgtaccggaaccatcagcttgtcaactggtcatgtgctttaagatcagccatctcggacattgaggtggagaaccggcccctgcctggccacacacagcttcgactgcctggctgccccacccccgtgtcttttggcctcctattttctgttgccttccccgtggatggagagcctgatgcagaggttgtggtaggaaccacaaggccagagacgctgcctggagatgtggctgtggccgttcatccagacgactcgcgatacacacatctacacgggcgacagcttcgtcaccccttgatggggcagcctcttcccctcatcacagactatgctgttcagccacatgtgggcacgggggcagtgaaggtgactccagctcacagtcctgccgatgctgagatgggggcccgacatggcttgagccccttgaatgtcattgcggaggatgggaccatgacctccctctgcggggactggctgcagggtcttcaccggtttgtggcccgggaaaagataatgtctgtgctgagtgaatggggcctgttccggggcctccagaaccaccccatggtactgcccatctgcagccgttctggggatgtgatagaatacctgctgaagaaccagtggtttgtccgctgccaggaaatgggggcccgagctgccaaggctgtggagtcgggggccctggagctcagtccctccttccaccagaagaactggcagcactggttttcccatattggggactggtgtgtctcccggcagctgtggtggggccatcagattccagcctacctggttgtagaggaccatgcgcagggagaagaggactgttgggtggttgggcggtcagaggctgaggccagagaggtagcagcggaactgacagggaggccaggggcagagctgaccctggagagggatcctgatgtcctagacacatggttttcttctgccctgttccccttttctgccctgggctggccccaagagaccccagaccttgctcgtttctaccccctgtcacttttggaaacgggcagcgaccttctgctgttctgggtgggccgcatggtcatgttggggacccagctcacagggcagctgcccttcagcaaggtgcttcttcatcccatggttcgggacaggcagggccggaagatgagcaagtccctggggaatgtgctggacccaagagacatcatcagtggggtggagatgcaggtgctgcaggaaaagctgagaagcggaaatttggaccctgcagagctggccattgtggctgcagcacagaaaaaggactttcctcacgggatccctgagtgtgggacagatgccctgagattcacactctgctcccatggagttcaggcgggcgacttgcacctgtcagtctctgaggtccagagctgccgacatttctgcaacaagatctggaatgctcttcgctttatcctcaatgctttaggggagaaatttgtgccacagcctgctgaggagctgtctccctcctccccgatggatgcctggatcctgagccgccttgccctggctgcccaggagtgtgagcggggcttcctcacccgagagctctcgctcgtcactcatgccctgcaccacttctggcttcacaacctctgtgacgtctacctggaggctgtgaagcccgtgctgtggcactcgccccgccccctggggccccctcaggtcctgttctcctgcgctgacctcggcctccgcctcctggccccactgatgcccttcctggctgaagagctctggcagaggctgccccccaggcctggttgcccccctgcccccagcatctcggttgccccctaccccagcgcctgcagcttggagcactggcgccagccagagctggagcggcgcttctcccgggtccaagaggtcgtgcaggtgctaagggctctccgagccacgtaccagctcaccaaagcccggccccgagtgctgctgcagagctcagagcctggggaccagggcctcttcgaggccttcttggagcccctgggcaccctgggctactgtggggctgtgggcctgttacccccaggcgcagcagctccctccggctgggcccaggctccactcagtgacacggctcaagtctacatggagctgcagggcctggtggacccgcagatccagctacctctgttagccgcccgaaggtacaagttgcagaagcagcttgacagcctcacagccaggaccccatcagaaggggaggcagggactcagaggcaacaaaagctttcttccctccagctggaattgtcaaaactggacaaggcagcctctcacctccggcagctgatggatgagcctccagccccagggagcccggagctctaactcatcatccccatcagttttcctccctctcagacctgtctttgaggacaaacagatttgtcagctgtcagggtgcagtgggacgtcagagactatgtggtccatcgccttcattgtgtaaatgaggacacagactggcttggtcgcagtgactgtggtgtccttgagatgctcacattactgcccggcctgcctcccacctggaagtctgggaatgaggagattgagataaacttttgaaatccc

SEQ ID NO: 65461 - DNA, 3192 bp, Artificial Sequence
  derived and/or modified sequence
atgccccacctgcccctggccagcttcagaccccccttctggggcctgagacacagcagaggcctgcccagattccacagcgtgagcacccagagcgagccccacggcagccccatcagcagaagaaacagagaggccaagcagaagagactgagagagaagcaggccaccctggaggccgagatcgccggcgagagcaagagccccgccgagagcatcaaggcctggagacccaaggagctggtgctgtacgagatccccaccaagcccggcgagaagaaggacgtgagcggccccctgccccccgcctacagccccagatacgtggaggccgcctggtacccctggtgggtgagagagggcttcttcaagcccgagtaccaggccagactgccccaggccaccggcgagaccttcagcatgtgcatccccccccccaacgtgaccggcagcctgcacatcggccacgccctgaccgtggccatccaggacgccctggtgagatggcacagaatgagaggcgaccaggtgctgtgggtgcccggcagcgaccacgccggcatcgccacccaggccgtggtggagaagcagctgtggaaggagagaggcgtgagaagacacgagctgagcagagaggccttcctgagagaggtgtggcagtggaaggaggccaagggcggcgagatctgcgagcagctgagagccctgggcgccagcctggactgggacagagagtgcttcaccatggacgtgggcagcagcgtggccgtgaccgaggccttcgtgagactgtacaaggccggcctgctgtacagaaaccaccagctggtgaactggagctgcgccctgagaagcgccatcagcgacatcgaggtggagaacagacccctgcccggccacacccagctgagactgcccggctgccccacccccgtgagcttcggcctgctgttcagcgtggccttccccgtggacggcgagcccgacgccgaggtggtggtgggcaccaccagacccgagaccctgcccggcgacgtggccgtggccgtgcaccccgacgacagcagatacacccacctgcacggcagacagctgagacaccccctgatgggccagcccctgcccctgatcaccgactacgccgtgcagccccacgtgggcaccggcgccgtgaaggtgacccccgcccacagccccgccgacgccgagatgggcgccagacacggcctgagccccctgaacgtgatcgccgaggacggcaccatgaccagcctgtgcggcgactggctgcagggcctgcacagattcgtggccagagagaagatcatgagcgtgctgagcgagagaggcctgttcagaggcctgcagaaccaccccatggtgctgcccatctgcagcagaagcggcgacgtgatcgagtacctgctgaagaaccagtggttcgtgagatgccaggagatgggcgccagagccgccaaggccgtggagagcggcgccctggagctgagccccagcttccaccagaagaactggcagcactggttcagccacatcggcgactggtgcgtgagcagacagctgtggtggggccaccagatccccgcctacctggtggtggaggaccacgcccagggcgaggaggactgctgggtggtgggcagaagcgaggccgaggccagagaggtggccgccgagctgaccggcagacccggcgccgagctgaccctggagagagaccccgacgtgctggacacctggttcagcagcgccctgttccccttcagcgccctgggctggccccaggagacccccgacctggccagattctaccccctgagcctgctggagaccggcagcgacctgctgctgttctgggtgggcagaatggtgatgctgggcacccagctgaccggccagctgcccttcagcaaggtgctgctgcaccccatggtgagagacagacagggcagaaagatgagcaagagcctgggcaacgtgctggaccccagagacatcatcagcggcgtggagatgcaggtgctgcaggagaagctgagaagcggcaacctggaccccgccgagctggccatcgtggccgccgcccagaagaaggacttcccccacggcatccccgagtgcggcaccgacgccctgagattcaccctgtgcagccacggcgtgcaggccggcgacctgcacctgagcgtgagcgaggtgcagagctgcagacacttctgcaacaagatctggaacgccctgagattcatcctgaacgccctgggcgagaagttcgtgccccagcccgccgaggagctgagccccagcagccccatggacgcctggatcctgagcagactggccctggccgcccaggagtgcgagagaggcttcctgaccagagagctgagcctggtgacccacgccctgcaccacttctggctgcacaacctgtgcgacgtgtacctggaggccgtgaagcccgtgctgtggcacagccccagacccctgggccccccccaggtgctgttcagctgcgccgacctgggcctgagactgctggcccccctgatgcccttcctggccgaggagctgtggcagagactgccccccagacccggctgcccccccgcccccagcatcagcgtggccccctaccccagcgcctgcagcctggagcactggagacagcccgagctggagagaagattcagcagagtgcaggaggtggtgcaggtgctgagagccctgcaggccacctaccagctgaccaaggccagacccagagtgctgctgcagagcagcgagcccggcgaccagggcctgttcgaggccttcctggagcccctgggcaccctgggctactgcggcgccgtgggcctgctgccccccggcgccgccgcccccagcggctgggcccaggcccccctgagcgacaccgcccaggtgtacatggagctgcagggcctggtggacccccagatccagctgcccctgctggccgccagaagatacaagctgcagaagcagctggacagcctgaccgccagaacccccagcgagggcgaggccggcacccagagacagcagaagctgagcagcctgcagctggagctgagcaagctggacaaggccgccagccacctgagacagctgatggacgagccccccgcccccggcagccccgagctgtag

SEQ ID NO: 65462 - DNA, 3282 bp, Artificial Sequence
  derived and/or modified sequence
atgggcggcaaggcctggcccagaagagccgtgggcaccgccggcggcccctgcgccgagcagatcagcgcccccttccagaccctgctgatgccccacctgcccctggccagcttcagaccccccttctggggcctgagacacagcagaggcctgcccagattccacagcgtgagcacccagagcgagccccacggcagccccatcagcagaagaaacagagaggccaagcagaagagactgagagagaagcaggccaccctggaggccgagatcgccggcgagagcaagagccccgccgagagcatcaaggcctggagacccaaggagctggtgctgtacgagatccccaccaagcccggcgagaagaaggacgtgagcggccccctgccccccgcctacagccccagatacgtggaggccgcctggtacccctggtgggtgagagagggcttcttcaagcccgagtaccaggccagactgccccaggccaccggcgagaccttcagcatgtgcatccccccccccaacgtgaccggcagcctgcacatcggccacgccctgaccgtggccatccaggacgccctggtgagatggcacagaatgagaggcgaccaggtgctgtgggtgcccggcagcgaccacgccggcatcgccacccaggccgtggtggagaagcagctgtggaaggagagaggcgtgagaagacacgagctgagcagagaggccttcctgagagaggtgtggcagtggaaggaggccaagggcggcgagatctgcgagcagctgagagccctgggcgccagcctggactgggacagagagtgcttcaccatggacgtgggcagcagcgtggccgtgaccgaggccttcgtgagactgtacaaggccggcctgctgtacagaaaccaccagctggtgaactggagctgcgccctgagaagcgccatcagcgacatcgaggtggagaacagacccctgcccggccacacccagctgagactgcccggctgccccacccccgtgagcttcggcctgctgttcagcgtggccttccccgtggacggcgagcccgacgccgaggtggtggtgggcaccaccagacccgagaccctgcccggcgacgtggccgtggccgtgcaccccgacgacagcagatacacccacctgcacggcagacagctgagacaccccctgatgggccagcccctgcccctgatcaccgactacgccgtgcagccccacgtgggcaccggcgccgtgaaggtgacccccgcccacagccccgccgacgccgagatgggcgccagacacggcctgagccccctgaacgtgatcgccgaggacggcaccatgaccagcctgtgcggcgactggctgcagggcctgcacagattcgtggccagagagaagatcatgagcgtgctgagcgagagaggcctgttcagaggcctgcagaaccaccccatggtgctgcccatctgcagcagaagcggcgacgtgatcgagtacctgctgaagaaccagtggttcgtgagatgccaggagatgggcgccagagccgccaaggccgtggagagcggcgccctggagctgagccccagcttccaccagaagaactggcagcactggttcagccacatcggcgactggtgcgtgagcagacagctgtggtggggccaccagatccccgcctacctggtggtggaggaccacgcccagggcgaggaggactgctgggtggtgggcagaagcgaggccgaggccagagaggtggccgccgagctgaccggcagacccggcgccgagctgaccctggagagagaccccgacgtgctggacacctggttcagcagcgccctgttccccttcagcgccctgggctggccccaggagacccccgacctggccagattctaccccctgagcctgctggagaccggcagcgacctgctgctgttctgggtgggcagaatggtgatgctgggcacccagctgaccggccagctgcccttcagcaaggtgctgctgcaccccatggtgagagacagacagggcagaaagatgagcaagagcctgggcaacgtgctggaccccagagacatcatcagcggcgtggagatgcaggtgctgcaggagaagctgagaagcggcaacctggaccccgccgagctggccatcgtggccgccgcccagaagaaggacttcccccacggcatccccgagtgcggcaccgacgccctgagattcaccctgtgcagccacggcgtgcaggccggcgacctgcacctgagcgtgagcgaggtgcagagctgcagacacttctgcaacaagatctggaacgccctgagattcatcctgaacgccctgggcgagaagttcgtgccccagcccgccgaggagctgagccccagcagccccatggacgcctggatcctgagcagactggccctggccgcccaggagtgcgagagaggcttcctgaccagagagctgagcctggtgacccacgccctgcaccacttctggctgcacaacctgtgcgacgtgtacctggaggccgtgaagcccgtgctgtggcacagccccagacccctgggccccccccaggtgctgttcagctgcgccgacctgggcctgagactgctggcccccctgatgcccttcctggccgaggagctgtggcagagactgccccccagacccggctgcccccccgcccccagcatcagcgtggccccctaccccagcgcctgcagcctggagcactggagacagcccgagctggagagaagattcagcagagtgcaggaggtggtgcaggtgctgagagccctgcaggccacctaccagctgaccaaggccagacccagagtgctgctgcagagcagcgagcccggcgaccagggcctgttcgaggccttcctggagcccctgggcaccctgggctactgcggcgccgtgggcctgctgccccccggcgccgccgcccccagcggctgggcccaggcccccctgagcgacaccgcccaggtgtacatggagctgcagggcctggtggacccccagatccagctgcccctgctggccgccagaagatacaagctgcagaagcagctggacagcctgaccgccagaacccccagcgagggcgaggccggcacccagagacagcagaagctgagcagcctgcagctggagctgagcaagctggacaaggccgccagccacctgagacagctgatggacgagccccccgcccccggcagccccgagctgtag

SEQ ID NO: 65463 - DNA, 2772 bp, Artificial Sequence
  derived and/or modified sequence
atgtgcatccccccccccaacgtgaccggcagcctgcacatcggccacgccctgaccgtggccatccaggacgccctggtgagatggcacagaatgagaggcgaccaggtgctgtgggtgcccggcagcgaccacgccggcatcgccacccaggccgtggtggagaagcagctgtggaaggagagaggcgtgagaagacacgagctgagcagagaggccttcctgagagaggtgtggcagtggaaggaggccaagggcggcgagatctgcgagcagctgagagccctgggcgccagcctggactgggacagagagtgcttcaccatggacgtgggcagcagcgtggccgtgaccgaggccttcgtgagactgtacaaggccggcctgctgtacagaaaccaccagctggtgaactggagctgcgccctgagaagcgccatcagcgacatcgaggtggagaacagacccctgcccggccacacccagctgagactgcccggctgccccacccccgtgagcttcggcctgctgttcagcgtggccttccccgtggacggcgagcccgacgccgaggtggtggtgggcaccaccagacccgagaccctgcccggcgacgtggccgtggccgtgcaccccgacgacagcagatacacccacctgcacggcagacagctgagacaccccctgatgggccagcccctgcccctgatcaccgactacgccgtgcagccccacgtgggcaccggcgccgtgaaggtgacccccgcccacagccccgccgacgccgagatgggcgccagacacggcctgagccccctgaacgtgatcgccgaggacggcaccatgaccagcctgtgcggcgactggctgcagggcctgcacagattcgtggccagagagaagatcatgagcgtgctgagcgagagaggcctgttcagaggcctgcagaaccaccccatggtgctgcccatctgcagcagaagcggcgacgtgatcgagtacctgctgaagaaccagtggttcgtgagatgccaggagatgggcgccagagccgccaaggccgtggagagcggcgccctggagctgagccccagcttccaccagaagaactggcagcactggttcagccacatcggcgactggtgcgtgagcagacagctgtggtggggccaccagatccccgcctacctggtggtggaggaccacgcccagggcgaggaggactgctgggtggtgggcagaagcgaggccgaggccagagaggtggccgccgagctgaccggcagacccggcgccgagctgaccctggagagagaccccgacgtgctggacacctggttcagcagcgccctgttccccttcagcgccctgggctggccccaggagacccccgacctggccagattctaccccctgagcctgctggagaccggcagcgacctgctgctgttctgggtgggcagaatggtgatgctgggcacccagctgaccggccagctgcccttcagcaaggtgctgctgcaccccatggtgagagacagacagggcagaaagatgagcaagagcctgggcaacgtgctggaccccagagacatcatcagcggcgtggagatgcaggtgctgcaggagaagctgagaagcggcaacctggaccccgccgagctggccatcgtggccgccgcccagaagaaggacttcccccacggcatccccgagtgcggcaccgacgccctgagattcaccctgtgcagccacggcgtgcaggccggcgacctgcacctgagcgtgagcgaggtgcagagctgcagacacttctgcaacaagatctggaacgccctgagattcatcctgaacgccctgggcgagaagttcgtgccccagcccgccgaggagctgagccccagcagccccatggacgcctggatcctgagcagactggccctggccgcccaggagtgcgagagaggcttcctgaccagagagctgagcctggtgacccacgccctgcaccacttctggctgcacaacctgtgcgacgtgtacctggaggccgtgaagcccgtgctgtggcacagccccagacccctgggccccccccaggtgctgttcagctgcgccgacctgggcctgagactgctggcccccctgatgcccttcctggccgaggagctgtggcagagactgccccccagacccggctgcccccccgcccccagcatcagcgtggccccctaccccagcgcctgcagcctggagcactggagacagcccgagctggagagaagattcagcagagtgcaggaggtggtgcaggtgctgagagccctgcaggccacctaccagctgaccaaggccagacccagagtgctgctgcagagcagcgagcccggcgaccagggcctgttcgaggccttcctggagcccctgggcaccctgggctactgcggcgccgtgggcctgctgccccccggcgccgccgcccccagcggctgggcccaggcccccctgagcgacaccgcccaggtgtacatggagctgcagggcctggtggacccccagatccagctgcccctgctggccgccagaagatacaagctgcagaagcagctggacagcctgaccgccagaacccccagcgagggcgaggccggcacccagagacagcagaagctgagcagcctgcagctggagctgagcaagctggacaaggccgccagccacctgagacagctgatggacgagccccccgcccccggcagccccgagctgtag

SEQ ID NO: 65464 - DNA, 3192 bp, Artificial Sequence
  derived and/or modified sequence
atgccacatctacccctggcctcattcagaccacccttttggggcctgaggcactctagaggactcccaagatttcacagtgttagtacgcagtccgaacctcacggctcccctatctcccgcaggaacagggaggcaaagcagaaaagactacgggagaagcaagcgaccctcgaagcagagattgccggagaaagtaaatctcccgcagaatctatcaaggcctggcgcccaaaagaactcgtgctgtatgaaatccctaccaagccaggcgagaaaaaggacgtgagtggacctcttccgcccgcttacagccctcggtacgtcgaggcagcgtggtacccatggtgggtgagagaaggcttctttaagcccgaataccaagccagactgccccaagccacaggcgaaactttctcgatgtgcattccccccccaaacgtgactgggagcctccacatcggtcatgcccttaccgttgctatacaggacgcgctggtgagatggcaccgaatgcgaggtgaccaggttctgtgggtgccagggagcgaccacgcaggcatcgctacccaggcagtggtggagaagcagctgtggaaagagcggggagtacggcggcacgaattaagtagagaggctttcctgcgcgaggtctggcagtggaaagaggcgaaaggcggggaaatctgtgagcagctgagagccttgggtgctagtctggactgggatcgggagtgctttacaatggacgtaggctcctccgtcgccgtaaccgaagcctttgttcgactgtacaaagccggcctcctttaccggaaccatcagttggtcaattggtcatgcgcactcaggtccgccatttctgacattgaagtggagaaccgcccactgccaggccatacacagctgaggcttcctggttgcccgactcccgttagcttcggactgttgttctcagtagctttcccagtggatggtgaaccagatgccgaggtagtcgttgggacgacgagaccagagacactccccggagacgtggcagtggccgtccatccagatgacagccgctacactcatctgcatgggcggcagctgaggcatcctctaatgggtcagccccttccacttatcaccgactacgcggtacagcctcatgtcggtacaggggccgtgaaggtgacccctgcacactccccagccgacgccgagatgggcgcacggcatgggctgtcacctttaaacgtaatcgccgaagacggtactatgacttctctttgcggggattggctgcaggggttgcacaggttcgtggccagggagaagataatgtccgtgctgtcagagagagggctcttccgcggcttgcagaatcacccaatggtcttacctatatgtagccgatctggcgacgttatcgagtacctcctcaaaaaccagtggtttgtacggtgccaggaaatgggagcgcgcgcggcaaaagcagtggagagcggtgctctggagctcagcccatcttttcaccagaagaactggcagcattggttctcccatattggtgattggtgcgtcagccgccagctgtggtggggacatcagatcccagcttaccttgtcgtcgaggatcatgcgcagggggaagaagattgctgggttgtgggcaggtcagaggcagaagcacgagaggtggcagctgaactgactgggcgtcccggagcagaactcactcttgagcgagatcctgacgtcttagacacttggttctctagcgcactgtttccttttagcgcattaggatggccgcaggagacaccagatctagcccggttctatcctctgtcactgctcgagaccggctcagatctcttgctcttctgggttggcaggatggtgatgctggggacacagcttacagggcagctgcccttttccaaggtgctcctgcacccaatggtaagagaccggcaggggaggaagatgtcaaagagtctggggaacgtgctggatcctagggatatcatttcaggggtggaaatgcaggtactgcaggagaaattaaggtctggcaaccttgatccagcagaactggccattgtggccgcagcccaaaaaaaagattttccgcatggcatccctgaatgcggtacagatgcgttgagattcacgctctgcagccatggggtccaggctggggatctccacctgtccgtctccgaggtgcagtcctgcaggcacttctgcaacaaaatctggaacgcattgcggtttattctgaatgctttgggtgaaaagtttgtgccacagcctgcagaggaactcagtccatcctccccaatggatgcctggatcctcagtcgcctggctctcgccgcccaggagtgtgagcgcggattcttgactagggagctgtccctggtgactcacgccctccaccacttttggctacataatctttgcgacgtgtacctcgaagcagtgaagcccgtactctggcactctcctagacctctcgggccgccccaggtgctgttttcctgtgcggatctcgggctgaggttgctcgcacctctgatgcctttcctcgcggaggaactctggcagcggcttccgccccgtcccggctgccccccagctccttcaatctccgtcgcaccatatccctccgcttgctctttggaacattggaggcagcctgagttagagcggcgcttcagcagagttcaggaagtcgtgcaggtgctgagagccctgcaggcaacataccaactcactaaggctcgcccccgtgtactactgcaatcaagtgagccaggggatcagggcctctttgaagcctttctcgagcctctcggcactctgggatattgtggggctgttgggctgcttcctcccggtgctgctgcgcctagcggatgggcgcaagctcccctgagcgataccgcccaggtttacatggaacttcagggcctggtagatccccagattcagcttcccctacttgcagcaaggagatataaactgcagaaacagttggactctctgaccgccagaaccccatcggaaggagaggccgggacccagagacagcaaaaactatcgtccctccaattagaactcagcaagctcgataaggctgcaagccatcttcggcaattgatggacgaaccacctgcccctgggtcaccggagctctag

SEQ ID NO: 65465 - DNA, 2772 bp, Artificial Sequence
  derived and/or modified sequence
atgtgtattcctcctcccaatgttactgggtcactacacatcggccacgcactgaccgttgctattcaggacgccctcgtgagatggcaccggatgagaggcgatcaggtgctgtgggtgcccggatctgaccacgccggaattgcaacccaggctgtcgtggagaaacaactgtggaaagagcggggcgtgcgccggcatgagctctctagagaagcattccttcgcgaagtctggcaatggaaagaagctaagggaggcgagatttgtgaacagctgcgtgctctgggcgcgagccttgattgggacagggagtgtttcacaatggacgtggggagttcagtggctgtgactgaggcattcgtgaggctctataaagctgggctgttataccgcaaccaccaactagtgaactggtcttgtgccctccgcagcgccatcagtgatatagaggtcgaaaacagaccccttccaggccacacacagttacgcctgccaggctgccccacacccgtctcattcgggttgcttttcagcgtggcctttcccgttgatggtgagcctgatgcagaggtggtagtgggcactactcgccctgaaacattgccaggcgatgttgctgtggctgttcaccccgacgattctagatatacccacctgcatggacggcagctgcgccatccgctgatggggcaaccgctccctttaataactgattacgcggtgcagccccatgtggggacaggagctgtgaaagtgacccctgctcacagtccagccgacgctgagatgggagctcgacatggcttatctccgcttaacgtgattgcggaagacggcaccatgactagtctgtgtggtgactggttacagggcctccaccggttcgttgcacgtgaaaagattatgtccgtcctgtccgagagggggttattcaggggcctgcagaaccatcccatggtcctccccatctgtagcagatctggagacgtcattgagtacctcctcaagaaccagtggttcgtgagatgtcaggagatgggggcccgggccgcgaaagccgtcgagagtggtgccctggaactttcaccctcctttcaccagaagaactggcagcattggttctcacatatcggggattggtgcgtctctcggcagctatggtggggtcaccaaatccctgcttatctggtcgtggaggaccacgcccaaggcgaagaggattgttgggttgtcggaaggtccgaggctgaagctcgggaggtagccgctgagctgaccgggagacctggtgccgagctgaccctggaaagagatcccgatgtcctggatacatggttttcaagcgccctatttcctttctcagccctaggctggcctcaagagactccagacttagcaagattttatccgctgagcctgctggaaaccggctccgatttacttctgttttgggtggggaggatggtgatgctgggcacccagctaaccggtcagctgccgttctcgaaagttctgctgcatcctatggtgagagaccgccagggccgaaaaatgtcgaaaagtcttgggaatgttctggatccacgggatatcatatctggggttgagatgcagctgctccaggagaaactcaggagtgggaatttagacccggctgagctcgctatagtcgccgccgctcagaaaaaggatttcccccacgggatcccggagtgcggcacagacgcactcaggttcaccctctgctcacatggggtgcaggcaggggacctgcacctgagcgtcagtgaagtgcagtcgtgtcgccatttttgcaacaagatttggaatgcactgagatttatcctgaacgcactcggtgaaaagtttgtcccacagcccgctgaggaattaagccccagtagccctatggacgcttggattttgtcccgattagccttagcagcccaggagtgcgaaaggggcttcctgacaagggaactctcactggtaacacacgcactacaccatttttggttacataatctctgtgatgtttaccttgaagctgtgaagcccgtactgtggcactcaccgcgccccctcggtccaccccaggtgttgttcagctgcgccgacttgggcttacgtctactggccccactgatgccctttctcgcagaggaactctggcagcgcctaccaccccgcccagggtgcccacctgcccctagcatctctgtcgcaccctatccatcagcttgcagtctcgagcattggcggcagcccgagctcgaaaggcgattctctcgtgtgcaggaggtggtacaggtgctgcgcgcactcagagccacataccagctgaccaaagctaggccccgagttctgcttcaatcaagtgagcctggagatcaaggtctgtttgaggcctttcttgaaccacttggtacattaggatactgcggcgcggtggggctgttgccaccagggactgctgcaccgtctggctgggctcaggcccccctcagcgatacagctcaggtgtacatggagctgcagggactggtcgatcctcagattcagctgcccttgttggcagctcgccggtacaagctccagaaacagctcgattccttgactgccagaactccttcggaaggtgaggccgggacccagcgacagcaaaaactcagcagtctgcaacttgaattatccaagctggacaaagccgcctctcacttgcgacagctcatggacgagccgcctgccccagggagtcctgagctctag

SEQ ID NO: 65466 - DNA, 3282 bp, Artificial Sequence
  derived and/or modified sequence
atgggcggaaaggcctggccacgccgagccgtggggactgccggaggaccctgtgctgagcaaatctctgccccattccagaccctccttatgccccacctgcctctggcatcctttcggccaccattctgggggcttcgacactcccgggggctgccccggttccactcagtgtccacacagtccgagcctcacggctctccaataagtaggcgcaatcgcgaagcaaagcagaaaaggctgcgggaaaaacaggctacactggaggctgagattgccggcgagtccaagagccctgccgagagcatcaaagcatggcgccctaaggagttagtgctgtatgaaataccaacaaagcctggagagaaaaaagacgtgtcaggccctctgccaccagcttacagccctagatacgtcgaggctgcttggtacccctggtgggtccgcgaaggcttttttaaacccgaataccaggcaagactgccccaagcaacaggagagacattcagtatgtgtatacccccaccgaatgtgaccggctcactacatatcggacatgcactgaccgtggcaattcaagatgcactggtccgatggcaccggatgcgaggcgaccaagtcctgtgggtgccaggcagcgatcacgcaggtatcgcaacacaggccgtggttgagaaacagctgtggaaggaaagaggagtacgaaggcatgaactcagccgagaggcatttttacgagaggtatggcagtggaaagaggctaaaggcggggaaatttgcgagcaactccgggctctgggcgcgtctctcgactgggaccgggagtgttttaccatggacgtgggcagctcagtggccgttactgaagcctttgtgcgcttgtacaaagccggacttttgtatagaaaccaccaactggtaaactggagctgtgctctccgtagtgccatctccgacatagaggtggagaaccgccccttgccagggcatacacagcttcgcctaccgggttgtccaacacccgtcagctttgggctcctcttcagcgtggcctttcccgtggacggcgaacctgacgctgaagttgtggttgggacaacacggccagaaactctgcccggtgacgttgcagtggcagtccatcctgatgattcccgctatacccacctccatggccgtcaactgcggcatcctctaatgggtcagccgctgcccttgatcaccgactatgccgtacagccccacgtgggaactggggctgtgaaagtcacccctgcccactctccggctgacgccgagatgggagctagacacgggctgtctcctttaaatgttatagccgaagatggtacaatgactagcttatgtggggattggctacaaggacttcaccgatttgttgccagagagaagattatgtccgtcctgagcgagaggggactctttaggggtttgcagaatcaccccatggtgctgcccatttgcagccgtagtggcgacgtcatagagtacctccttaagaaccagtggtttgtgaggtgccaggaaatgggtgcccgagctgccaaagcggttgagtctggagctctagaactatccccttctttccaccagaagaactggcaacattggttttcccatatcggggactggtgtgttagcagacagctctggtgggggcaccagatccccgcatacctcgtggtagaggatcatgcacagggcgaagaagactgctgggtcgtggggcggtcagaagcggaagccagggaagtcgctgcggaattgactggacgacctggggctgaattgacgctggagcgggatcccgacgtgctggatacctggttttcttccgcactgttcccttttagcgccttaggttggccacaggagaccccagatctggcgagattctaccccctgtcactactagagaccggatctgaccttctcctattttgggtcggtcggatggtaatgttagggacgcagcttactgggcagctgccattctccaaggtgctgctacatcccatggtgcgagacaggcagggtcgcaagatgtccaaaagcctgggtaatgtccttgatccaagagatataataagcggggtggagatgcaggtgctgcaagagaagttacgcagcggcaacctggatccagccgagctggccatagtggctgctgcccaaaaaaaggatttcccacacgggatcccggagtgtgggacagacgcgctcaggtttacactctgtagtcacggtgtgcaggctggggatctgcatctgagcgttagcgaggtgcagagttgtaggcacttctgcaataaaatctggaacgcacttaggttcatcctcaatgctctgggagaaaagtttgtcccccagcctgcagaagaacttagtccatctagccccatggatgcttggattctcagcagactagcgctggccgcccaggagtgtgagagaggttttctcacacgcgagctttccctggtgactcacgcccttcatcatttttggctacacaatctctgcgacgtttatcttgaggcagtgaagccagttctctggcacagcccgagaccactcgggccaccccaagtcctcttcagttgtgctgacttgggactgcggttgctggcccccttaatgccttttctggccgaggaactctggcaaagattgccacctaggccaggatgtccccccgccccgtcaatttctgtggccccttatccaagcgcgtgtagcctggagcattggcgccagcctgaacttgagcgcagatttagcagagtgcaggaggttgttcaggttttgcgtgccctgcaagctacctatcagctgaccaaggcacgcccaagagtgctccttcagtcttccgaaccaggtgatcagggcctgtttgaggccttcttggaacccctcggcacactggggtactgcggcgcagtagggctgcttcctcctggagcggctgcgcctagcggttgggcgcaagccccactgtcggacacagcccaggtctatatggagctgcaagggcttgtcgatcctcagatccagttgcctcttcttgctgcgcgaaggtacaaactgcagaagcagctggactcactaaccgcccggaccccttctgagggagaagctggaactcaaagacagcagaaactatcttcactgcagctggaattgtcgaagctggataaggcggcctcccatttgcgacagctgatggacgaacctcctgctcctggatcaccagaactgtag

SEQ ID NO: 65467 - DNA, 2772 bp, Artificial Sequence
  derived and/or modified sequence
atgtgcatccccccaccaaacgtgactggcagcctccacattgggcacgcactgacggttgctatccaagacgctcttgtgcggtggcaccgaatgcgcggagaccaggtgctgtgggtccctggctcagaccatgccgggatcgcgacacaggcggtggtggagaagcagttgtggaaggagagaggggtaaggcggcatgaactctcacgggaggcttttctgagggaggtctggcagtggaaagaggccaaagggggcgagatctgcgaacagctacgggccttgggggcctcgctcgattgggatagggaatgctttacaatggatgtgggatcttccgtggccgtcaccgaagcttttgtcagattgtacaaggcaggcttgctctatcggaaccatcagctcgtcaactggagctgcgctctcagatctgccatcagtgatatcgaggttgaaaacagaccactgccggggcacacacagcttcgcctgcctggatgccctacacccgtgagctttggtctgttgttctctgtggcttttccggtcgatggagagccagacgccgaggtcgtggtcgggacaaccagaccagaaaccttgccaggagatgtcgccgtcgcggtccatcctgatgattctcgttatacccatttgcacggccgacagctgcggcaccccttaatgggccagcctttgcctcttattacagactatgcagtacaaccccacgtggggaccggggcagtgaaagtgacccccgctcattcacctgctgacgccgaaatgggcgccaggcacggtctgagccccctcaacgtgatcgctgaagacgggactatgacctcactgtgtggggactggctgcagggattgcatcgcttcgtggccagggagaagataatgagtgttctgtcagaacggggcttatttagaggactccagaaccaccctatggtgctccctatctgcagcagaagtggggacgtcattgagtatctgctgaaaaatcagtggtttgtgagatgtcaggagatgggcgctagggcagctaaggcggtcgaaagcggcgcgctggaactgtctccctccttccatcaaaagaattggcagcattggtttagtcacatcggggactggtgcgtctcccggcagctatggtgggggcatcagatcccagcgtacctggtggttgaggaccacgcccagggtgaggaggattgctgggtcgttggacgatccgaagcagaggcaagagaagtggctgccgagcttaccggccggcctggggcagaactcacactcgagagagaccctgatgtcctggatacctggtttagctcagcactgttccccttctctgccctcggctggcctcaggaaacccctgacctcgcaaggttttatcccttgtcattgcttgagacaggttcggacctgctgctgttctgggtgggtaggatggtgatgctgggcacccaactcacaggccagctgcccttcagtaaagtgctgctgcaccccatggtaagggatcggcagggcaggaaaatgagtaagtccttaggtaacgtgttagatccaagagacattatcagcggggttgaaatgcaggtgctgcaagagaagctcaggagcggcaaccttgacccagcggaactggcaatcgtagccgccgcgcagaagaaagactttccacatggtatcccggaatgcgggacagacgcactgaggtttaccctgtgcagtcacggtgtacaggcgggcgatctccatctttcggtgagtgaggtgcagagctgccggcacttctgcaacaaaatctggaatgcgttaagatttatcctgaatgccctgggagagaagtttgttccgcaaccagctgaagagctcagcccgagttcacccatggatgcctggatactatccagactggccctggcggcgcaggagtgcgaaagaggctttctgacacgcgagttgtctttagtcactcatgcactgcatcatttttggctccataacctgtgtgatgtctatctcgaggcagttaagccggtactttggcacagtcctagacctctgggtccaccccaggtgctattcagctgcgcagaccttgggttgcgactgcttgcaccacttatgcctttcctggctgaggagctttggcagcggctgccgcctcgtccaggttgtccgcccgcaccatccatatccgtagccccctacccttccgcctgttctctggagcactggcggcaacctgagctggaacggcggttttcgcgcgtgcaagaggtggtgcaggtgctcagggctctgcaggcaacttatcagttgacaaaggccagacctcgtgtgctgttacagtcttcagaacccggcgaccaggggctgtttgaagcctttcttgaaccattgggaactctcggctattgcggggccgtgggcctgctccccccaggagctgctgctcccagtggatgggctcaggctcctctgtccgatactgcacaagtgtatatggaactacagggactggttgacccacaaatccagttaccactgctcgccgcaaggagatacaaattgcaaaaacagctggatagtcttactgcaaggactccaagtgagggtgaagccggcacccagcggcagcagaagctctcaagcctgcaactggaactctccaaattagacaaagcagcctctcacctccggcagctgatggatgagcctcctgctcctggttcccccgagctgtag

SEQ ID NO: 65468 - DNA, 3192 bp, Artificial Sequence
  derived and/or modified sequence
atgccccacctgcccctggccagcttccggccccccttctggggcctgcggcacagccggggcctgccccgcttccacagcgtgtccacccagagcgagccccacggcagccccatcagcagaagaaaccgggaggccaagcagaagaggctgcgggagaagcaggccaccctggaggccgagattgctggggagagcaagagccctgctgagagcatcaaggcctggaggcccaaggagctggtgctgtatgagatccccaccaagccaggagagaagaaggatgtgtctggccccctgcccccagcctacagcccccgctacgtggaggccgcctggtacccctggtgggtgcgggagggcttcttcaagccagagtaccaggcccggctgccccaggccactggagagaccttctccatgtgcatccccccaccaaatgtgacaggcagcctgcacatcggccacgccctgactgtggccatccaggatgccctggtgcgctggcacaggatgagaggagaccaggtgctgtgggtgcccggcagtgaccacgccggcatcgccacccaggccgtggtggagaagcagctgtggaaggagcggggcgtgagaagacatgagctgagccgggaggccttcctgcgggaggtgtggcagtggaaggaggccaagggcggggagatctgtgagcagctgcgggccctgggcgccagcctggactgggaccgggagtgcttcaccatggatgtgggcagctctgtggccgtgacagaggcctttgtgcggctgtacaaggccggcctgctgtacagaaaccaccagctggtgaactggagctgtgccctgcggagcgccatcagtgacatcgaggtggagaaccggcccctgcccggccacacccagctgcggctgcccggctgccccacccctgtgtcctttggcctgctcttctctgtggccttccctgtggatggagagccagatgctgaggtggtggtgggcaccaccaggcctgagaccctgcctggagatgtggccgtggccgtgcacccagatgacagccgctacacccacctgcacggccggcagctgcggcaccccctgatgggccagcccctgcccctcatcacagattatgctgtgcagccccacgtgggcaccggggctgtgaaggtgaccccagcccacagccctgcagatgctgagatgggcgcccggcacggcctgagccccctgaatgtgattgctgaagatggcaccatgaccagcctgtgtggggactggctgcagggcctgcacagatttgtggcccgggagaagatcatgtctgtgctgtctgagcggggcctcttccggggcctgcagaaccaccccatggtgctgcccatctgcagccgctctggagatgtgattgagtacctgctgaagaaccagtggtttgtgcgctgccaggagatgggcgcccgggccgccaaggctgtggagagcggggccctggagctgagccccagcttccaccagaagaactggcagcactggttcagccacatcggggactggtgtgtgtcccggcagctgtggtggggccaccagatcccagcctacctggtggtggaggaccacgcccagggcgaggaggactgctgggtggtgggccgctctgaggccgaggcccgggaggtggccgctgagctgaccggccggcctggagctgagctgaccctggagcgggaccctgatgtgctggacacctggttcagcagcgccctcttccccttcagcgccctgggctggccccaggagaccccagacctggcccgcttctaccccctgagcctgctggagactggaagtgacctgctgctcttctgggtgggccgcatggtgatgctgggcacccagctgaccggccagctgcccttcagcaaggtgctgctgcaccccatggtgcgggaccggcagggcaggaagatgagcaagagcctgggcaatgtgctggacccccgggacatcatcagcggcgtggagatgcaggtgctgcaggagaagctgcggagcggcaacctggaccctgctgagctggccatcgtggccgccgcccagaagaaggacttcccccacggcatcccagaatgtggcacagatgccctgcgcttcaccctgtgcagccatggagtgcaggccggggacctgcacctgtctgtgtctgaggtgcagagctgccgccacttctgcaacaagatctggaatgccctgcgcttcatcctgaatgccctgggggagaagtttgtgccccagcctgctgaggagctgagccccagcagccccatggatgcctggatcctgagccggctggccctggccgcccaggagtgtgagcggggcttcctgacccgggagctgagcctggtgacccacgccctgcaccacttctggctgcacaacctgtgtgatgtgtacctggaggccgtgaagcctgtgctgtggcacagcccccggcccctgggccccccccaggtgctcttcagctgtgccgacctgggcctgcggctgctggcccccctgatgcccttcctggccgaggagctgtggcagaggctgcccccccggcccggctgccccccagcccccagcatctctgtggccccctaccccagcgcctgcagcctggagcactggaggcagcctgagctggagcggcgcttcagccgggtgcaggaggtggtgcaggtgctgcgggccctgcaggccacctaccagctgaccaaggcccggccccgggtgctgctgcagagcagcgagcccggggaccagggcctgtttgaggccttcctggagcccctgggcaccctgggctactgtggggctgtgggcctgctgcccccaggagctgctgcccccagcggctgggcccaggcccccctgagtgacacagcccaggtgtacatggagctgcagggcctggtggacccccagatccagctgcccctgctggccgcccggcgctacaagctgcagaagcagctggacagcctgacagcccggaccccatctgagggggaggccggcacccagaggcagcagaagctgagcagcctgcagctggagctgagcaagctggacaaggccgccagccacctgcggcagctgatggatgagcccccagcccctggcagccctgagctgtag

SEQ ID NO: 65469 - DNA, 3282 bp, Artificial Sequence
  derived and/or modified sequence
atgggcggcaaggcctggccccggcgggctgtgggcacagctgggggcccctgtgccgagcagatcagcgcccccttccagaccctgctgatgccccacctgcccctggccagcttccggccccccttctggggcctgcggcacagccggggcctgccccgcttccacagcgtgtccacccagagcgagccccacggcagccccatcagcagaagaaaccgggaggccaagcagaagaggctgcgggagaagcaggccaccctggaggccgagattgctggggagagcaagagccctgctgagagcatcaaggcctggaggcccaaggagctggtgctgtatgagatccccaccaagccaggagagaagaaggatgtgtctggccccctgcccccagcctacagcccccgctacgtggaggccgcctggtacccctggtgggtgcgggagggcttcttcaagccagagtaccaggcccggctgccccaggccactggagagaccttctccatgtgcatccccccaccaaatgtgacaggcagcctgcacatcggccacgccctgactgtggccatccaggatgccctggtgcgctggcacaggatgagaggagaccaggtgctgtgggtgcccggcagtgaccacgccggcatcgccacccaggccgtggtggagaagcagctgtggaaggagcggggcgtgagaagacatgagctgagccgggaggccttcctgcgggaggtgtggcagtggaaggaggccaagggcggggagatctgtgagcagctgcgggccctgggcgccagcctggactgggaccgggagtgcttcaccatggatgtgggcagctctgtggccgtgacagaggcctttgtgcggctgtacaaggccggcctgctgtacagaaaccaccagctggtgaactggagctgtgccctgcggagcgccatcagtgacatcgaggtggagaaccggcccctgcccggccacacccagctgcggctgcccggctgccccacccctgtgtcctttggcctgctcttctctgtggccttccctgtggatggagagccagatgctgaggtggtggtgggcaccaccaggcctgagaccctgcctggagatgtggccgtggccgtgcacccagatgacagccgctacacccacctgcacggccggcagctgcggcaccccctgatgggccagcccctgcccctcatcacagattatgctgtgcagccccacgtgggcaccggggctgtgaaggtgaccccagcccacagccctgcagatgctgagatgggcgcccggcacggcctgagccccctgaatgtgattgctgaagatggcaccatgaccagcctgtgtggggactggctgcagggcctgcacagatttgtggcccgggagaagatcatgtctgtgctgtctgagcggggcctcttccggggcctgcagaaccaccccatggtgctgcccatctgcagccgctctggagatgtgattgagtacctgctgaagaaccagtggtttgtgcgctgccaggagatgggcgcccgggccgccaaggctgtggagagcggggccctggagctgagccccagcttccaccagaagaactggcagcactggttcagccacatcggggactggtgtgtgtcccggcagctgtggtggggccaccagatcccagcctacctggtggtggaggaccacgcccagggcgaggaggactgctgggtggtgggccgctctgaggccgaggcccgggaggtggccgctgagctgaccggccggcctggagctgagctgaccctggagcgggaccctgatgtgctggacacctggttcagcagcgccctcttccccttcagcgccctgggctggccccaggagaccccagacctggcccgcttctaccccctgagcctgctggagactggaagtgacctgctgctcttctgggtgggccgcatggtgatgctgggcacccagctgaccggccagctgcccttcagcaaggtgctgctgcaccccatggtgcgggaccggcagggcaggaagatgagcaagagcctgggcaatgtgctggacccccgggacatcatcagcggcgtggagatgcaggtgctgcaggagaagctgcggagcggcaacctggaccctgctgagctggccatcgtggccgccgcccagaagaaggacttcccccacggcatcccagaatgtggcacagatgccctgcgcttcaccctgtgcagccatggagtgcaggccggggacctgcacctgtctgtgtctgaggtgcagagctgccgccacttctgcaacaagatctggaatgccctgcgcttcatcctgaatgccctgggggagaagtttgtgccccagcctgctgaggagctgagccccagcagccccatggatgcctggatcctgagccggctggccctggccgcccaggagtgtgagcggggcttcctgacccgggagctgagcctggtgacccacgccctgcaccacttctggctgcacaacctgtgtgatgtgtacctggaggccgtgaagcctgtgctgtggcacagcccccggcccctgggccccccccaggtgctcttcagctgtgccgacctgggcctgcggctgctggcccccctgatgcccttcctggccgaggagctgtggcagaggctgcccccccggcccggctgccccccagcccccagcatctctgtggccccctaccccagcgcctgcagcctggagcactggaggcagcctgagctggagcggcgcttcagccgggtgcaggaggtggtgcaggtgctgcgggccctgcaggccacctaccagctgaccaaggcccggccccgggtgctgctgcagagcagcgagcccggggaccagggcctgtttgaggccttcctggagcccctgggcaccctgggctactgtggggctgtgggcctgctgcccccaggagctgctgcccccagcggctgggcccaggcccccctgagtgacacagcccaggtgtacatggagctgcagggcctggtggacccccagatccagctgcccctgctggccgcccggcgctacaagctgcagaagcagctggacagcctgacagcccggaccccatctgagggggaggccggcacccagaggcagcagaagctgagcagcctgcagctggagctgagcaagctggacaaggccgccagccacctgcggcagctgatggatgagcccccagcccctggcagccctgagctgtag

SEQ ID NO: 65470 - DNA, 2772 bp, Artificial Sequence
  derived and/or modified sequence
atgtgcatccccccaccaaatgtgacaggcagcctgcacatcggccacgccctgactgtggccatccaggatgccctggtgcgctggcacaggatgagaggagaccaggtgctgtgggtgcccggcagtgaccacgccggcatcgccacccaggccgtggtggagaagcagctgtggaaggagcggggcgtgagaagacatgagctgagccgggaggccttcctgcgggaggtgtggcagtggaaggaggccaagggcggggagatctgtgagcagctgcgggccctgggcgccagcctggactgggaccgggagtgcttcaccatggatgtgggcagctctgtggccgtgacagaggcctttgtgcggctgtacaaggccggcctgctgtacagaaaccaccagctggtgaactggagctgtgccctgcggagcgccatcagtgacatcgaggtggagaaccggcccctgcccggccacacccagctgcggctgcccggctgccccacccctgtgtcctttggcctgctcttctctgtggccttccctgtggatggagagccagatgctgaggtggtggtgggcaccaccaggcctgagaccctgcctggagatgtggccgtggccgtgcacccagatgacagccgctacacccacctgcacggccggcagctgcggcaccccctgatgggccagcccctgcccctcatcacagattatgctgtgcagccccacgtgggcaccggggctgtgaaggtgaccccagcccacagccctgcagatgctgagatgggcgcccggcacggcctgagccccctgaatgtgattgctgaagatggcaccatgaccagcctgtgtggggactggctgcagggcctgcacagatttgtggcccgggagaagatcatgtctgtgctgtctgagcggggcctcttccggggcctgcagaaccaccccatggtgctgcccatctgcagccgctctggagatgtgattgagtacctgctgaagaaccagtggtttgtgcgctgccaggagatgggcgcccgggccgccaaggctgtggagagcggggccctggagctgagccccagcttccaccagaagaactggcagcactggttcagccacatcggggactggtgtgtgtcccggcagctgtggtggggccaccagatcccagcctacctggtggtggaggaccacgcccagggcgaggaggactgctgggtggtgggccgctctgaggccgaggcccgggaggtggccgctgagctgaccggccggcctggagctgagctgaccctggagcgggaccctgatgtgctggacacctggttcagcagcgccctcttccccttcagcgccctgggctggccccaggagaccccagacctggcccgcttctaccccctgagcctgctggagactggaagtgacctgctgctcttctgggtgggccgcatggtgatgctgggcacccagctgaccggccagctgcccttcagcaaggtgctgctgcaccccatggtgcgggaccggcagggcaggaagatgagcaagagcctgggcaatgtgctggacccccgggacatcatcagcggcgtggagatgcaggtgctgcaggagaagctgcggagcggcaacctggaccctgctgagctggccatcgtggccgccgcccagaagaaggacttcccccacggcatcccagaatgtggcacagatgccctgcgcttcaccctgtgcagccatggagtgcaggccggggacctgcacctgtctgtgtctgaggtgcagagctgccgccacttctgcaacaagatctggaatgccctgcgcttcatcctgaatgccctgggggagaagtttgtgccccagcctgctgaggagctgagccccagcagccccatggatgcctggatcctgagccggctggccctggccgcccaggagtgtgagcggggcttcctgacccgggagctgagcctggtgacccacgccctgcaccacttctggctgcacaacctgtgtgatgtgtacctggaggccgtgaagcctgtgctgtggcacagcccccggcccctgggccccccccaggtgctcttcagctgtgccgacctgggcctgcggctgctggcccccctgatgcccttcctggccgaggagctgtggcagaggctgcccccccggcccggctgccccccagcccccagcatctctgtggccccctaccccagcgcctgcagcctggagcactggaggcagcctgagctggagcggcgcttcagccgggtgcaggaggtggtgcaggtgctgcgggccctgcaggccacctaccagctgaccaaggcccggccccgggtgctgctgcagagcagcgagcccggggaccagggcctgtttgaggccttcctggagcccctgggcaccctgggctactgtggggctgtgggcctgctgcccccaggagctgctgcccccagcggctgggcccaggcccccctgagtgacacagcccaggtgtacatggagctgcagggcctggtggacccccagatccagctgcccctgctggccgcccggcgctacaagctgcagaagcagctggacagcctgacagcccggaccccatctgagggggaggccggcacccagaggcagcagaagctgagcagcctgcagctggagctgagcaagctggacaaggccgccagccacctgcggcagctgatggatgagcccccagcccctggcagccctgagctgtag

SEQ ID NO: 65471 - DNA, 3192 bp, Artificial Sequence
  derived and/or modified sequence
atgccccacctgcccctggccagcttccggccccccttctggggcctgaggcacagcaggggcctaccccgctttcatagcgtgtctacccagtctgaaccgcacggcagccccatctcaaggcgaaatagggaggccaagcagaaacggctcagagagaaacaagcaactctcgaggctgaaattgcaggtgagtccaagtcccccgcggaatctattaaagcctggcggcccaaggagctcgtgctgtacgagatccctacaaagccgggggagaagaaagacgtgtccggtcctctcccccctgcttactccccacgctatgtcgaggctgcctggtacccctggtgggtcagggagggctttttcaagccagagtaccaggcccggttaccccaggccactggagagaccttttccatgtgcattccgcctccgaacgtgactggctcccttcacataggccacgccctgacggtggctattcaggatgcgcttgtcaggtggcatcgcatgcgtggggaccaggtgctgtgggtcccagggtccgaccacgctggcattgctactcaggcggtggtcgagaaacaactgtggaaggaacgcggtgtccgtaggcatgagctgagcagagaggccttcctcagagaggtttggcagtggaaggaggctaagggtggcgaaatctgcgaacagcttcgagcgctgggtgcatctctggactgggatcgtgagtgtttcaccatggacgtgggaagctccgttgctgtgaccgaggcctttgttagactttataaggccgggctattgtatagaaaccaccagctcgtaaactggtcctgtgccttaagatctgctataagcgacattgaggtggagaatcgacccctacctggccatacccagctgcggcttccgggttgtccaactcctgtcagctttgggctgctgttctcggtggccttcccagtggatggggaacccgatgccgaagtggtggttggaacaacgagacccgaaacgctgccaggggacgtggctgtcgcagtccatccagatgattcgagatacactcatctgcatgggaggcagctgagacaccccttgatgggccaaccgctacctctgataactgactatgctgtgcagccccacgttggcaccggggcagtaaaggttactcccgcacactctcctgctgacgcagagatgggagcgcgccacggtctgagccccctaaacgtgatcgccgaggatgggactatgacatcactctgtggtgattggctccagggactccatcgtttcgtcgcgcgggagaaaatcatgtctgttttatctgagcgcggactctttagagggctgcaaaaccatcccatggtgctgcccatctgttccaggtctggggatgtaattgaatacctattaaaaaaccagtggttcgtgaggtgtcaggagatgggagctagggccgcaaaagcagtagagtcgggcgccctggaattgagtccttcattccaccagaagaattggcagcactggttttcccatatcggcgactggtgcgtctcgcgccagctctggtggggccatcagataccggcatacctggtggttgaagaccacgcccaaggtgaagaggattgctgggtggtgggaagaagcgaggcggaggcacgggaggttgctgctgagttgaccggtcggcccggcgccgaactgacgttggaacgagatccagacgtgctggatacatggttttcaagcgctctgttccctttttccgcactgggctggccccaggagactcccgacctggcccgcttctaccccttatcactgttggagactggttctgatttattgctcttctgggtggggcgtatggtgatgcttggcactcagctcaccggtcagctccctttttccaaagtattacttcatcctatggttcgcgatcggcaagggcgcaagatgtcgaaatcacttgggaacgtcctggatccaagagacatcatttctggagttgaaatgcaggtgctacaggaaaagttgagatctgggaacctagatccggccgaattggctattgtggctgcagcccagaagaaggactttccccacggcatcccagaatgtggcaccgatgccctgagattcactttgtgctcccatggggtgcaagctggggatttacacttgtccgttagcgaagtacagtcatgccggcacttctgcaacaagatttggaacgctttgcgttttattctcaacgctctgggggagaagttcgttccccagccagcagaagagctctcgcccagctcccctatggacgcctggatcctatcccgcctggcgctcgccgcccaggagtgcgaaaggggattcctcacaagggaactcagcttggtcactcacgccttacaccatttctggctgcacaacctctgcgacgtttacctggaagcagtgaaaccagtgctgtggcattcacctaggccactcgggccgcctcaggtcctcttcagttgtgccgatttgggcctgagacttctcgctcctctgatgccatttttggctgaggagctgtggcaacgccttccgccaagacccggatgtccacccgctccctcaatttccgtggctccttacccttcagcctgttccttggagcactggcggcagcccgagttagagcgccgtttctcaagggttcaggaggtggttcaggtcttacgggcattacaggccacctaccagctaacaaaagccaggccacgagttttactgcagagctcagaaccaggggaccaaggtctgttcgaagccttcctggaacccttggggaccttagggtactgtggggccgtgggcctgttacccccaggggctgctgcaccttccggttgggctcaggcacccctatccgatacagctcaagtgtatatggaactccagggactggtagacccacagattcagctgcctttgctcgcggcaagacggtacaagctgcaaaaacaactcgattctcttactgctagaaccccatccgagggcgaggctgggacacagagacagcagaaattgagcagtttacagctcgagctaagcaaactcgataaggctgcctcccatctgcgccagcttatggatgaaccccccgccccagggtctccagaattatag

SEQ ID NO: 65472 - DNA, 2772 bp, Artificial Sequence
  derived and/or modified sequence
atgtgcatccccccccccaacgtgaccggcagcctgcacatcggccacgcactcaccgttgccatccaggacgcactggtgcggtggcataggatgagaggcgaccaggtactgtgggtgcctggatcagaccatgcaggcatagctacacaggccgtggtggagaagcagctgtggaaggaacggggcgtcaggcgacatgagcttagcagggaggcgtttctccgtgaggtttggcagtggaaagaagcgaaaggcggtgagatttgcgagcaacttcgcgctctgggagcgtctcttgactgggacagggaatgttttaccatggacgtgggctcctctgtggcagtcaccgaggccttcgtgagactgtacaaagccggcctcctatatagaaaccatcagctagtgaattggtcttgtgcattgaggtcagcgatcagcgatatcgaagtggagaatagaccattaccaggccacactcagctgaggcttcccggctgcccgactcccgtatcatttggcctgcttttctcagtcgcctttcctgtggatggagagcctgacgcagaggtcgtggtcggcactacacggccagagactctgcccggggatgtcgccgtcgccgttcatcctgacgatagcagatacacccatctccatggccgtcagttgaggcacccactgatgggccaaccattgccacttatcaccgactatgccgtgcagccacatgttggaacaggggcagtcaaagtgactcccgcacactctcccgctgacgccgaaatgggagcccgacatgggctgagccccctgaacgtcattgccgaggatggcactatgacaagcttgtgtggcgactggctgcagggattgcacaggttcgtcgcaagagaaaaaattatgtcagttttaagtgaacgggggttattccgcgggctgcagaatcatcccatggtgctccctatttgttcacggtccggcgacgtgatcgaatacctgctgaaaaatcaatggttcgtccggtgtcaggaaatgggggcacgtgccgcaaaggctgtggaatcaggagcactggagctttctcctagctttcatcagaagaattggcagcactggttctcccatatcggcgactggtgcgtctcgcggcaactgtggtggggacaccagattccagcatatctggtcgtagaggaccatgcgcaaggtgaagaggattgttgggtggttggccgatccgaagctgaggcacgggaagtggccgccgagttgaccgggaggcccggggcagagcttacactcgaacgggatcccgacgtcctggacacctggttctcatccgctctcttcccgttcagcgccctcggatggccacaggaaacccccgacctggccagattttatcctctttcgctgctcgagaccggtagtgatctattgcttttctgggtcggccgcatggtgatgctgggaacccagttaactgggcaactgccgttctcaaaagttttgctgcaccccatggtccgcgaccgccagggtaggaaaatgagcaaatccctaggcaatgtgctggacccaagagatattatatcgggtgtcgagatgcagctcctacaagagaaactgcggtctggtaatctcgatcccgccgaacttgccatagtggccgctgcccaaaaaaaggactttccgcacggcattcctgagtgcgggactgatgctctgagattcacactgtgcagccatggcgtacaggccggcgatctccacctaagtgtgagcgaagttcagtcctgcaggcatttctgcaataaaatctggaatgctctgaggtttatattgaatgccttgggggaaaaatttgtaccgcaacccgctgaggagctctctcctagctcccctatggacgcctggattctgtcgcgcctagctttggctgcccaggagtgcgagagaggcttcctgactcgtgagctgtcccttgtcacacatgcactgcatcatttttggcttcataatctgtgcgatgtgtatttagaagctgtgaaacccgtgctgtggcattcgccccgtccgctagggccaccacaagttctgttttcttgcgctgacctgggtcttaggctgctcgcaccacttatgcccttcttagcggaagagctgtggcaacgcctgcccccccgaccgggttgccccccggcgccttcaatcagcgtggctccgtatccatcagcctgtagcttggagcattggcgccagcccgaactggaacgccgattttccagggtccaagaagtggtacaggtgctgagagccctgcgcgctacctaccagttgacaaaggcaaggccccgggttttgctgcagagttcggaacctggggatcagggcctttttgaagcgtttctcgagcctctcggtacattgggctattgcggggctgttggactgctaccacctgggactgctgccccctcaggatgggctcaggccccattgtcagatactgcgcaggtctacatggaattacagggcctcgtcgacccccagattcagctccccctgctagccgccaggagatataaattgcagaagcagttggacagtctgaccgcaagaactccatcagaaggggaggcagggacccagaggcagcaaaagctaagtagcctacaactggagctgtcaaaacttgacaaggccgcttcccacctcaggcagctgatggatgagcctccggctccgggaagccctgagctttag

SEQ ID NO: 65473 - DNA, 3282 bp, Artificial Sequence
  derived and/or modified sequence
atgggcggcaaggcctggccccggcgggccgtgggcaccgccggcgggccctgcgccgaacagatcagcgccccttttcagaccctgctaatgccacatctgcctctcgcttcatttaggccccccttctggggcctgcgccacagccggggtctgccgcgcttccactctgtgagcacacaaagcgaaccccacgggtccccaatttcccggagaaacagggaagctaagcaaaagagactgcgagaaaaacaggctacccttgaggctgagatcgcaggtgaatcaaagagccccgccgagagtataaaagcatggcgacctaaagagctggttctgtacgaaatcccgacaaaacctggcgaaaagaaggacgtgagcggaccattgccacccgcatattctcctcgatacgtggaggcggcttggtacccgtggtgggtgcgtgagggtttctttaagccggagtaccaggcacgccttcctcaggctactggcgaaacattttctatgtgtatcccaccgccgaacgtcactggcagcctgcatattggtcacgctttgacggttgccattcaggacgcattagtgcgttggcaccgaatgcgtggcgatcaggtactttgggtaccaggttccgaccatgcaggcatcgccactcaggcagtggtagagaaacagctgtggaaggagcggggagttcgccgacatgagctgtcacgcgaggctttcctgagagaagtatggcagtggaaagaagcgaaaggcggggaaatatgtgaacagctgcgcgccctgggagcttcgctcgactgggacagggaatgtttcaccatggacgttgggtcaagcgttgctgtcactgaagcattcgtccgactgtacaaggcaggtttgctataccgcaaccaccagctcgtcaattggagctgtgctcttcgttccgcgatctccgacattgaggtagagaataggcccctgccgggtcacacccagctcaggctgcctggatgtcccacaccagtatcttttggtctgttgttttccgtggcattcccggtggatggtgaaccagacgccgaggtggtcgtgggtaccaccagaccagaaactctgccaggtgacgtagccgtggccgtgcaccccgatgatagtcggtatacccacctccatggacgccagctgcgccatccgcttatgggccaacccctgccccttatcactgattacgccgtgcagccccatgttggcaccggcgcggtgaaagtgactccagctcactcgccagctgatgctgaaatgggtgctaggcacggcctctccccactgaacgtgatcgcagaggacgggaccatgactagcctgtgtggcgattggctgcaaggtttgcaccgattcgttgcaagggaaaaaatcatgtccgtgttgtctgagagaggtctcttcaggggactccaaaatcaccccatggtgctgcctatctgctcccggagcggtgatgtgatcgaatacctactgaagaatcagtggttcgtgcgctgtcaggaaatgggggcaagggcagccaaagccgtggaatccggagcactggagctgtctccttcgttccaccaaaagaattggcagcactggttctctcatatcggcgattggtgtgtgtctagacagctctggtgggggcatcaaatacctgcctacctggtggtggaggaccatgcacaaggtgaagaagattgctgggttgtagggagatccgaggcagaggcccgcgaggtagccgctgagctaactgggaggcctggcgcagaactgaccctagagagggaccccgacgtgctggatacttggttctcctcggccttattccccttttctgccctggggtggcctcaggaaacccccgacctggcccgcttctatcccctttcacttctcgaaacgggctctgatcttttgcttttttgggttggaaggatggtgatgctcggtacacaactcaccggccagctgcctttttctaaggtgctgctgcatccaatggtgcgggacagacaaggaagaaaaatgtctaaatctctgggcaatgtcttagatcctcgcgatattatatctggcgtcgagatgcaggtcctccaggagaagctgcgcagcgggaatcttgaccccgctgagcttgccatcgtggctgcagcccaaaagaaggacttcccccacggcatacccgagtgtggcacagatgccttgaggttcaccctatgtagtcacggcgtacaggccggcgatcttcatttatctgtcagcgaggtccaatcatgtagacatttctgcaataaaatctggaatgcgctgcggtttatcttgaatgcacttggggaaaagttcgtgccacaacccgcggaggagctctcacctagttcccctatggacgcttggatcttgagccgactcgctctggccgcacaagagtgcgagaggggcttcctgactagggaactgagcctagtgacgcacgccctgcaccatttttggctgcacaacttatgtgatgtgtatctcgaggcagtaaaacccgtgctatggcactccccgaggccacttgggccccctcaggttctgttcagctgtgcagatctagggcttagactgctggcgcctcttatgcccttcttagccgaagaactgtggcaaagacttcccccccgtcccggctgccccccagcaccctccatctctgtggccccatacccttccgcctgcagccttgagcactggcgccagccagagctcgagcgtagattttccagagtgcaggaggtggtccaggtcctgagagctctgcaagccacctaccaacttacaaaggccaggccaagggtcttgctgcaatcttcggagccaggcgaccagggcctgtttgaagcttttctagaaccgctcggcacgctggggtattgtggcgctgtgggcttacttccccccggggctgccgctccttctggttgggcacaggccccactatccgatacagcgcaggtctatatggaattgcaaggtctggttgaccctcagatccaactcccactgctcgccgcacggcgttacaaattgcagaagcagttagactcactcacggccaggacccccagtgagggggaagctggcacacaaaggcagcaaaaactgtcgtcccttcaacttgagctgagcaaactcgataaagctgcaagtcatctgagacagctgatggatgaaccccccgccccgggcagccctgagctgtag

SEQ ID NO: 65474 - DNA, 2772 bp, Artificial Sequence
  derived and/or modified sequence
atgtgcatccccccccccaacgtgaccggcagcctgcacatcggccacgctctgacagtggcaattcaggatgctctggtcagatggcacaggatgaggggagatcaggttctttgggtgcccggaagcgaccatgcaggaattgctacacaggccgttgtggagaagcagctgtggaaggagcggggggtacgcagacatgagctgtctcgcgaagcattcctgcgggaagtatggcagtggaaggaagccaagggaggtgaaatctgcgaacaactgagagcgctcggcgcatcacttgactgggatagagagtgtttcacaatggatgttggatcgtcagtggcagtgactgaggctttcgtccggctttacaaggctggcttgctgtatagaaatcaccagttggtgaattggtcctgcgccctgcgctctgctattagcgatatcgaagtggaaaaccgccccctgccaggacacacgcagctgagattacctggctgccccacacctgtgtctttcggtctgcttttctcagtcgcattccctgtcgacggggagcctgacgcagaggtggtcgtcgggaccaccagacccgagacattgcctggggacgtggctgtggctgtccatcctgacgactctcggtatacccatctccatggtcgccaattgaggcaccctcttatggggcagcccctgcctttaatcaccgactacgccgtccaaccccacgttggaactggcgccgtaaaagtgacaccagcacattcaccagcagacgcagaaatgggggcacggcatgggctctcccccctgaatgtcatcgccgaagacggtaccatgactagcctgtgcggggactggctgcaaggtttacatcggtttgtcgcaagagagaagattatgagcgtgctgagcgagagaggcttatttcgcggactccaaaaccaccccatggtgctgcccatctgcagccgctccggagatgtgatcgagtatttgttgaagaaccagtggtttgtgagatgccaagagatgggggcccgggctgctaaagctgtcgagagcggggcccttgagctgtcccccagctttcaccagaagaattggcagcactggttctctcatatcggcgattggtgtgtctctaggcagctgtggtggggtcaccagattcctgcttacctggtggttgaagaccatgctcagggggaagaagactgttgggtagtcggccgctccgaggcagaggccagggaggttgctgcagaattaaccggccgacccggtgcagaactgaccctcgagagagaccctgatgttctagacacgtggttttcttccgctctttttccattttctgcattgggatggccccaggagactcctgacttggctaggttctaccccttaagtttgctggagaccggttctgacctcctactgttctgggtgggcagaatggtaatgctcgggacgcagctcacgggtcagctgcccttttcgaaggtcctgcttcatcctatggtcagagatcggcaaggccgaaaaatgagcaaaagcctggggaacgtgctggacccccgggacatcattagcggggtggaaatgcaggtgctgcaagaaaagttgcgcagcgggaacctggatcccgcggagctcgcgatcgtcgccgccgctcagaagaaggactttccgcacggaatcccagaatgtggcacagacgccttaagatttactctctgtagccacggagtccaggctggggacctgcacctttccgtatccgaggtccagtcttgccgtcacttctgtaataagatttggaacgcactgaggttcattttaaacgccttgggggaaaaatttgttccccaaccggccgaggaactgtcgccatcttcccctatggatgcttggatcttatctcgtctggcattagccgcccaagaatgcgaacgagggttcctgaccagagagctgagcttggtgactcacgccctgcatcacttttggctgcacaacttgtgcgacgtgtacctggaagctgtaaaacccgttctttggcactctcctcgccctctgggaccacctcaggtgttattctcctgcgccgaccttggacttcggctgttggcgccactcatgccgtttctggccgaagagctgtggcaacgtctgccccctaggcccggatgccccccagcaccctccatcagcgtggcaccttatccatccgcatgctcactggaacactggaggcaacccgagctggagcggaggttttcacgggtgcaagaagtcgtgcaggtgctccgagcactccaggccacataccaactgacaaaggcccgccccagagtactgctacagtctagcgagcccggagatcaggggttgtttgaggccttccttgaaccactgggaacactgggctattgcggggccgtggggcttctgcctcccggcgccgctgcccctagtggctgggcccaggcccccctttcagatacagcccaggtctatatggagctacaaggcctggtggacccacaaatacaattacccctactagctgccagacgttacaagctccagaagcagctggattccctaacggctcgaaccccttccgaaggggaggcagggacacagagacaacagaaattatctagcctgcagctagagttgtccaagctggataaggccgcaagtcacctcagacagctgatggatgaaccgccagcccccggctctcccgaactgtag

SEQ ID NO: 65475 - DNA, 3192 bp, Artificial Sequence
  derived and/or modified sequence
atgccacacttacctcttgcctcattcagacctcccttctggggtctcaggcacagccgcggactccctagatttcatagcgtgtcaactcagagcgagccccatggctccccaatttcccgacggaacagagaagccaaacagaaacgactgagggagaagcaagcaacgttggaggccgaaatcgcaggagaatctaaatccccagccgagagcattaaggcctggcgacccaaagaactggtgctatacgagatccccaccaaaccgggagaaaaaaaggacgtttccggacccctcccacctgcatacagcccgcgttatgttgaggccgcttggtatccctggtgggtaagagaggggttctttaagccggagtaccaggccaggctaccccaggctacaggcgagaccttttcaatgtgtattccccctcctaatgtgacagggtcactgcacattgggcacgcactgactgtggcaattcaagacgccctggtcagatggcaccggatgcggggagatcaggtcctttgggtcccaggaagtgaccacgctggaatcgcaacccaggccgtggtggagaagcagctgtggaaagaaagaggagtgaggcggcacgaactgtctcgagaggctttcctgagggaagtgtggcaatggaaagaagccaaagggggagagatatgcgaacaactgcgggcactgggcgcatccttggactgggatagggagtgcttcaccatggacgtgggttcttctgtcgccgtgactgaagctttcgtgcgcctttacaaagctgggctgctgtaccgcaaccatcagttggtgaactggtcttgtgccctgcgttccgctatcagcgatatcgaagtggagaacagacctctgcccggtcacacacagctcaggctccctgggtgccctaccccggtgagcttcggtctcctattttctgtcgcattccctgtcgacggcgagccagacgcagaggtggtagtgggcaccactcggccagagactttacctggcgatgtggctgttgcagtccacccagacgattcccggtacacacacctgcacggcagacagctaagacatcctttgatgggccagcccctgcccctaattactgactatgccgtgcagccccatgttgggactggagccgtcaaagtgacgcctgctcactctcccgctgacgccgagatgggggctcgccacggcctgagtccactgaacgttatcgccgaggatggaaccatgacaagcctgtgtggtgattggctgcagggcttgcacaggtttgtggcacgcgagaaaattatgagcgttctgtcggagcgtggcctctttcggggtcttcagaatcatcctatggttctcccaatttgctcccgttcaggtgacgtgatcgaatacctgcttaaaaatcaatggtttgtaaggtgtcaagagatgggggctcgggctgccaaggccgtcgaatcgggagccttggagctgtcacctagcttccaccaaaagaattggcagcattggttttcccacatcggagactggtgcgtttctagacagctgtggtggggccaccaaatccctgcatacctggttgtggaggatcatgcgcagggagaagaagattgttgggtcgtgggaaggagtgaggctgaggcgagagaggtggccgctgagcttacaggacgacctggtgcagagttaactctggaacgcgatccggacgtccttgacacctggtttagctctgcactgttccccttctccgcactcggctggccgcaggaaactccagacctggcgaggttttacccattgagtttactggagaccggatcggaccttttgctgttttgggtaggtaggatggtcatgctgggtactcagctaacaggccaacttccgttttccaaagtgcttttgcaccctatggtgcgtgatagacaaggcagaaagatgtcaaagagtctcggaaatgtcctcgatccacgcgatatcatctccggggtggagatgcaggtcctgcaagagaagcttcgctccggtaacttggaccctgcggaactggccattgtggccgctgcacaaaagaaggacttccctcacggaatccctgagtgtgggacagacgccctcagattcactctatgttcacacggtgtgcaagccggagatcttcacctgtccgtaagcgaggtgcagtcgtgcaggcatttctgtaacaaaatctggaacgcactgcgatttatactgaacgcccttggcgagaaatttgtgccccagcctgcagaggagctgagcccctcttcaccgatggatgcctggatactttctcgcctcgcattagcagcccaggagtgcgagagaggcttcttaactagggagctcagcttagtaacacatgcactccatcacttctggctgcataacctgtgtgacgtgtaccttgaggcagttaagcccgtcctttggcattcacctaggcccctgggccctcctcaagtcttgttcagctgcgctgatcttggactgaggttgctggcaccactcatgccgttcctcgccgaagagctgtggcaaagacttcctccccgacccggatgcccccctgctccctcaatttctgtagctccatacccaagcgcgtgttctctggaacattggcgtcagccagagcttgagcgcaggttctccagagtccaggaagtcgtgcaggtattgcgcgctctccaagctacctaccagcttacaaaggcccgacccagggttttactgcagtcgagcgagccgggagatcaggggcttttcgaagccttcctggaaccactgggcaccctgggctactgtggtgctgtggggcttcttccacctggcgctgcggctccatctgggtgggctcaggctcccttgtccgataccgctcaagtgtacatggagctacaaggcttagtggatccacagatccagttgccccttttagctgccagacggtacaagctccagaagcaactggactccctgacagctcgaactccaagcgaaggagaagccggtacgcagaggcaacagaagctaagcagccttcagttagagctctctaaattagataaggctgcgtctcatctgcgtcagttaatggacgaaccccctgcacctggtagccccgagctgtag

SEQ ID NO: 65476 - DNA, 2772 bp, Artificial Sequence
  derived and/or modified sequence
atgtgcattcccccaccaaatgttactggctccctccatatagggcacgccttaactgttgcaatccaggacgctttagtccggtggcataggatgagaggcgatcaggtcttatgggtgccaggctctgaccacgccggtattgccactcaggccgtcgtggaaaagcagctgtggaaggaaagaggagtccgaagacacgagttgtcccgggaagctttcctgcgcgaggtctggcaatggaaggaggccaaagggggagagatctgcgaacagttgagggccttaggagcctcactggactgggaccgagaatgctttacaatggacgttggctcctctgtagccgttacagaagcattcgtgagactttacaaagcaggactgctgtatcgtaatcatcagttagtaaactggtcctgcgcccttcggtcagccattagtgatatcgaggttgaaaatcggccacttcccggtcatactcagctcaggctgcctggctgtccaacacccgtttcatttgggctactgttttcagtcgcgttccctgtggacggcgaaccagacgcagaggtggttgtcggaactacacgacccgagacccttccaggtgatgtggccgtcgctgtgcatccagatgactcccgatatacccaccttcacggcaggcagctgcgccatcccctgatgggccagcctctgcccctaatcaccgattacgccgtccagccccatgtgggtacaggcgcagtaaaggtgacccctgcccatagcccagctgatgccgaaatgggggcacgccacggcctttcaccactcaacgtgatcgctgaagacggtacgatgacgtcactttgcggtgactggctgcagggactacatcgctttgtggcccgtgaaaagatcatgtcggtgctttctgaacgcggactctttagaggactgcaaaatcatcctatggtattaccgatctgttctcggagcggggatgttattgaatacttgttaaaaaatcagtggttcgtgagatgccaggagatgggagctcgggctgcgaaagctgtagagtcaggagccttggaactgtcaccttcatttcaccagaaaaattggcagcattggttctcacatattggcgactggtgcgtttcccggcagctttggtgggggcaccagattcctgcgtatcttgtggttgaagaccacgcgcagggtgaagaagactgctgggtggtggggagaagcgaagctgaggccagagaggtcgcagccgaattgacaggtcgcccaggtgcggagttgacactcgaacgagatcccgacgttctggacacatggttctcatccgccctctttccatttagcgctttaggatggccccaggagacccccgatttggcacggttttatccactgagcctgcttgagaccggcagcgatctgctacttttttgggtaggtcgaatggtcatgctcggcactcagctgaccgggcagctgcccttttcaaaggttctgctgcaccctatggtgagagacaggcaagggagaaaaatgagcaagagcctcggcaacgtgcttgatcccagggacatcatttctggtgtggaaatgcaattattacaggagaagttgaggtcaggcaacctggatcctgcagagctggcaattgttgcagctgctcagaagaaggactttccacacggaattcccgaatgtggtaccgatgccctgcgctttacgttgtgctctcacggggtgcaggccggtgatctccatctgagcgtctctgaggttcagagctgtcgccacttttgtaataaaatttggaacgcgttgaggtttatcctcaatgctctgggcgaaaaattcgtcccgcaaccagccgaagaattaagtccatcgtccccgatggatgcatggattctctctcgcctcgctttggcggctcaagagtgtgaacggggttttctgactcgggagctgtctcttgtaactcacgcactacaccacttttggcttcacaacctgtgcgacgtgtacctggaagcggtgaagcccgtactttggcactcccccagacctctaggtcccccacaagtgctattttcttgtgcggacctgggcctgcggctgctcgcccctctgatgccgtttttagctgaagagctctggcagagattaccccctcgccctggatgtcctcctgcccctagcattagtgtggcaccttacccttctgcctgttctctggaacactggaggcagcccgagctagagcgtcgcttcagccgagtccaggaggtggtgcaggtgcttcgcgcactgcgtgccacttaccaactcacaaaggcccgaccaagagtgctcctgcaatcttccgaaccaggcgatcaggggctgttcgaagcgttcctggaaccccttggcaccttggggtattgtggtgcagttggactgctcccacccggaaccgcagccccttccggctgggcccaggcccctctgagcgatactgctcaggtctatatggagctgcagggacttgtggatccacaaattcaattaccacttctggccgctaggcggtacaaactgcaaaagcagctcgactccctcacggcacgcacaccatccgaaggggaggctggtacccagcgccagcaaaaactgtcaagcctgcagttagaactgagcaaactggataaagctgctagccacttaagacagctgatggacgagccacccgctccaggctcccccgaactgtag

SEQ ID NO: 65477 - DNA, 3282 bp, Artificial Sequence
  derived and/or modified sequence
atgggtggaaaggcatggccgagacgggctgtagggacagctgggggaccttgcgcagaacagatttcagcaccatttcagacactcctgatgccccatctgccactggcttcctttcgacccccattttgggggctccgacacagcagaggcctccccagattccattctgtgagtactcagagcgaacctcatgggtctcccatctctcggagaaatagagaggctaaacaaaaacggctgcgggaaaagcaggcaacccttgaggccgagatcgctggggaatccaagtctccagcggaatccatcaaggcctggagaccgaaggaactggtgctgtacgaaatccctaccaagccaggggagaagaaggacgtgagcggccctcttcctcctgcttattcccctcgctacgttgaggccgcttggtatccctggtgggtccgggaaggctttttcaagccggagtaccaggcgagactcccccaggccactggagagaccttctccatgtgtatccccccacctaatgtgaccgggtctctgcatattggtcacgctcttaccgtggcaattcaggatgccttagtgaggtggcacaggatgaggggtgatcaggttctttgggttcccggatctgatcatgccggtatagccacccaagccgttgtcgaaaaacagctttggaaggagcgcggagttaggcggcacgaactttctcgagaagcttttttacgagaggtatggcagtggaaggaggccaagggcggagaaatatgcgagcagctcagagctctgggggctagtttagactgggaccgagagtgtttcacaatggatgtcggctcttccgtcgccgtgactgaggctttcgtgagactgtataaagctgggctgctgtacaggaatcaccaactggtaaactggtcatgtgcattgcggtcggcaatcagtgatattgaggtggaaaaccgccctctaccgggtcacacccaactccgcttgccaggctgtcctacgcctgtgagttttgggcttcttttctctgtggcctttccggtggacggcgaaccagatgctgaagttgtcgtgggcaccactcgacctgaaacactgcccggagacgttgccgtcgcagtgcaccccgatgacagccggtatacccacctgcacgggaggcagctgaggcaccctctgatgggacagcctcttccgctcattaccgactacgcagtgcagccccatgtaggcactggcgctgtcaaagttaccccagcccattctcctgccgacgcagaaatgggggctcggcatggcctttcccccttgaacgtaattgccgaggacgggaccatgactagtttatgtggcgattggcttcagggtctgcatcgcttcgtggctagggagaagatcatgagtgtgctctcagagagagggctgtttaggggcctgcagaatcatccaatggttcttcccatttgcagtcgatccggagatgtgattgaatatctcctcaaaaaccaatggtttgtcagatgccaggagatgggagcgcgagctgccaaagccgtcgagtccggggctctcgaattatcccctagttttcaccaaaagaactggcagcactggtttagtcacattggcgactggtgcgttagtcgccaattatggtggggacatcagattccggcataccttgttgtggaggaccacgcccagggcgaggaggattgctgggtggtcggtaggtctgaggcagaggcaagagaagtggccgcagagttgactggtagacctggtgccgagttgacgttagagcgcgaccctgatgttctcgacacttggttcagttcagccctgttccctttctcagcattgggttggcctcaagaaacgccagatttagctcgattctacccattgagtctcctcgaaacaggttctgacctcctgttattctgggtcgggcgaatggtaatgctcgggacacagctgaccggtcaattacctttttcaaaggtgctgctacatcccatggtcagagataggcaggggaggaagatgtcaaaatcactgggcaacgtgcttgaccctagagatatcatatccggggtggagatgcaagttctgcaggaaaagttaaggagcggtaatcttgatccagctgagctagccatcgtggccgctgctcaaaaaaaggactttcctcacggcatcccggagtgcggcacggatgcgctgcgctttacgctttgctcacacggcgttcaagccggagatctgcatctgagcgtttcagaggtgcagtcttgtcgccacttttgtaataaaatctggaacgccctaaggttcattctcaatgctttaggggaaaagtttgtgcctcagcccgcagaagagctgtcgccatcatccccaatggatgcatggattttgtcccgcctggcactggccgctcaagagtgtgagaggggcttcctgactcgagagctcagccttgtaacccatgctctgcaccatttttggttacacaacctttgtgacgtgtatctcgaggccgtgaagcctgttctgtggcactcaccacggccactcggccctccgcaggtgctgttcagctgcgccgacctagggcttcgccttcttgcacctctgatgccctttctggcagaagaactgtggcaaagacttccacctaggcccggatgtcccccagctcctagcatatccgtagctccctatccctccgcttgttctctcgagcattggcgccaaccagaactggaacgccgtttctccagggtgcaggaagtggtccaggtccttcgggcactgcaggctacgtatcagttgaccaaggcgaggcccagggtcctgctccagagctccgagcctggagaccaaggacttttcgaagcattcctcgaacctctgggcactctcggatactgtggggcagttggtctcctgcccccaggcgctgcagccccttctggctgggcccaggcaccactgtccgataccgcccaggtgtacatggaactccaaggactggtggatccccaaattcaactgccacttctggcagcccgtcggtataagttgcagaagcaactagacagcctcacagcgagaaccccttcagagggcgaggccggaactcagcggcagcagaagcttagctcacttcagttggaactgtccaaactggataaggccgctagccacctgaggcagctcatggacgaacccccagctccaggatcgcccgaactttag

SEQ ID NO: 65478 - DNA, 2772 bp, Artificial Sequence
  derived and/or modified sequence
atgtgtatcccacccccaaatgtcaccggcagccttcacataggacatgctttaacagttgcaatccaggatgccctggtccggtggcatcggatgcgcggagatcaagtattgtgggtcccgggatccgaccacgctggaatcgccacgcaggccgtcgtagaaaagcaactgtggaaagagagaggtgtcaggcgtcatgagctttcgcgcgaagctttcctgagggaagtatggcagtggaaggaggctaagggtggcgaaatctgcgagcagctacgtgcgctaggtgcgagcctggactgggatagagagtgttttacaatggacgtggggagctccgtcgccgtgaccgaagccttcgtgagattatataaggccggacttctctacaggaaccatcagcttgttaactggagttgcgccttgagaagcgccatcagcgatattgaagttgaaaatagacccctccccggtcacacgcaactacggctgccgggatgccccacccctgtgagcttcggactgttgttcagtgtcgcctttccagtcgatggggagcccgatgccgaagtagttgtaggaaccacaaggcctgaaactttacctggcgacgtagcagtcgccgtgcacccagatgactctcgatatacccaccttcacgggcgacaacttaggcaccccctcatgggacagccgcttccgctaattacggactatgctgtccagccccacgtggggacaggtgcagtaaaggtgaccccagcccactctcctgccgacgctgaaatgggcgcaaggcacggcctcagccccctaaacgtgattgcagaggatggaaccatgacttctctatgcggcgactggttacaggggctgcatcggtttgtggccagggaaaaaatcatgagcgtcttatctgaacggggtctgttcaggggtttacaaaatcaccctatggttctgccgatctgttcccgaagtggcgatgtcatagagtatctgctgaaaaaccagtggttcgttcgctgtcaagaaatgggtgctcgagctgctaaggctgttgaatcaggcgcactggaactgagtccttcatttcaccagaaaaactggcagcattggttttctcacataggagattggtgcgtgagcaggcagctgtggtggggccatcagatcccagcgtatctggttgtagaggatcacgctcagggggaagaagattgttgggtggttggtcgaagcgaagccgaagccagagaggtagctgcagagctcaccggacgcccaggcgcagaactgacactggagagggatcccgacgtcttggacacttggttttcctccgcactctttcccttctcagcactcggctggccgcaggaaacccctgaccttgcccgtttctaccccctgtctctactggaaaccggaagcgaccttttgctgttttgggtcgggcgtatggtcatgctgggcacccagctgaccggccagctcccctttagcaaggttctcttgcaccccatggtgcgcgatcgccagggacgcaagatgtcaaaaagtttgggtaatgtgctcgatccgagagacattatttctggcgtggagatgcaggttctccaggaaaagctgcggagcggaaaccttgatcccgctgagcttgccatcgtggcagcggcacagaagaaagattttcctcatggcatcccagaatgcgggaccgacgcactgaggttcacactctgcagccacggagtgcaggccggtgacctgcatctttcagtaagcgaggtgcaaagttgccgacacttttgcaacaaaatttggaacgcgctccgctttattctgaacgccctgggcgagaagttcgtcccccagcccgcagaggagctatcaccttcctcgccaatggacgcttggatactctcacggttggccttagccgctcaggagtgtgaacgcggtttcctcacccgcgagctgtctctggttacacacgcgctccaccatttctggcttcacaacctctgcgacgtgtacctagaagcagtcaagcctgtgctgtggcactctcctaggcccctgggtcccccacaggtgctcttctcttgtgcggatctcgggcttcggctcctggcccctctgatgccattcctcgccgaggaactgtggcaaaggctccctcctcggcctgggtgtccgcctgccccaagcatctctgtagccccatatcccagcgcttgctccctggagcactggcggcagcctgaactcgaacggcgattcagtagagtgcaggaggtagtccaggtacttcgcgcattacaggccacctaccaactcacgaaggctagaccccgtgtgctgttgcagtcttcggagcctggtgaccagggtctctttgaagccttcctagagcctctcggcacactaggctactgtggagctgtcgggctgctgccgcctggtgctgcagcgccatccggatgggcccaagctccactgtcagacactgctcaggtctacatggagctccaggggcttgttgacccgcagattcagcttccccttttagctgctcggaggtataaactccagaaacagcttgactcactcactgcgagaactcctagtgagggcgaggccggaacacagcgacaacaaaagctgagcagtcttcaactggagctgagcaaactggacaaggccgcttcccatcttagacagctgatggatgaaccacctgcaccgggatcacccgaattatag

SEQ ID NO: 65479 - DNA, 4073 bp, Artificial Sequence
  derived and/or modified sequence
gccagctgctgcgcatgcgccggccggggccccgcccccatgcgccgcgcggctccagggccacgttccagggtcgggtttggtggattcctcagtccctgccgccgcggggcgccctgggatagcggcggggcctcctggtgagcgcgcgccggggcggcctccgggaagtgggagacgctgcgggtcctgggcccaggccttgggatgggcgggaaggcctggccgcgccgggctgtgggcactgcaggaggcccctgtgcaggtggagatcgccgcggccctggcgggactccttgctggctcttgggcgcgctgatgcccatcatctccctgagtttctgagccctatctctcatgtgtcagtggtcaccgccgaatccagacactccggccctgttccggaagagccctgatatccgtggctccatggcgctgtctgtcgataccatgcactctagctctcaaggaggaaaggttttgtggaagggaatagagacttggaataacagacctgtgctaattagagacaggaaagatggaacaaggggagtgacccttctccacccccatatcctaatgtgctctctctctatccagaacagatctcggcccctttccaaacactcctgatgcctcatttgcctctcgcctcttttcgaccaccattttgggggctgaggcactcacggggcctccccaggtttcactccgtttctacacagtcggagccccatggatctcccatctcccggaggaaccgtgaagccaaacagaagcgcctgcgagagaagcaggcgactctggaggctgagatagcaggggagagcaagtcacctgcagaatccattaaggcctggaggcctaaggagttagtattgtatgaaatccctacgaaacccggtgaaaagaaagatgtctctgggcccctgcctcctgcatacagcccccgatatgttgaggctgcctggtacccgtggtgggtacgagagggcttcttcaaaccagaatatcaggcccggctgccccaagctacaggggagaccttttccatgtgtatcccacctcccaatgtcactggctccctgcacattggccacgcactcacggtggccatacaggatgccctcgtgcgctggcaccggatgcgtggggatcaagtgctgtgggtccctggttcagatcatgcaggaattgctacacaagctgtggtggagaaacaactgtggaaggaacggggagtgaggagacatgagctgagccgggaggccttccttagggaggtgtggcagtggaaggaggcgaaaggtggagagatctgtgagcagctgcgagctctgggtgcctccctggactgggatcgagagtgttttaccatggatgttggctcctcagtggctgtgactgaagcttttgtgcggctctacaaggcggggttgctgtaccggaaccatcagcttgtcaactggtcatgtgctttaagatcagccatctcggacattgaggtggagaaccggcccctgcctggccacacacagcttcgactgcctggctgccccacccccgtgtcttttggcctcctattttctgttgccttccccgtggatggagagcctgatgcagaggttgtggtaggaaccacaaggccagagacgctgcctggagatgtggctgtggccgttcatccagacgactcgcgatacacacatctacacgggcgacagcttcgtcaccccttgatggggcagcctcttcccctcatcacagactatgctgttcagccacatgtgggcacgggggcagtgaaggtgactccagctcacagtcctgccgatgctgagatgggggcccgacatggcttgagccccttgaatgtcattgcggaggatgggaccatgacctctctctgcggggactggctgcagggtcttcaccggtttgtggcccgggaaaagataatgtctgtgctgagtgaacggggcctgttccggggcctccagaaccaccccatggtactgcccatctgcagccgttctggggatgtgatagaatacctgctgaagaaccagtggtttgtccgctgccaggaaatgggggcccgagctgccaaggctgtggagtcgggggccctggagctcagtccctccttccaccagaagaactggcagcactggttttcccatattggggactggtgtgtctcccggcagctgtggtggggccatcagattccagcctacctggttgtagaggaccatgcgcagggagaagaggactgttgggtggtcgggcggtcagaggctgaggccagagaggtagcagcggaactgacagggaggccaggggcagagctgaccctggagagggatcctgatgtcctagacacatggttttcttctgccctgttccccttttctgccctgggctggccccaagagaccccagaccttgctcgtttctaccccctgtcacttttggaaacgggcagcgaccttctgctgttctgggtgggccgcatggtcatgttggggacccagctcacagggcagctgcccttcagcaaggtgcttcttcatcccatggttcgggacaggcagggccggaagatgagcaagtccctggggaatgtgctggacccaagagacatcatcagtggggtggagatgcaggtgctgcaggaaaagctgagaagcggaaatttggaccctgcagagctggccattgtggctgcagcacagaaaaaggactttcctcacgggatccctgagtgtgggacagatgccctgagattcacactctgctcccatggagttcaggcgggcgacttgcacctgtcagtctctgaggtccagagctgccgacatttctgcaacaagatctggaatgctcttcgctttatcctcaatgctttaggggagaaatttgtgccacagcctgctgaggagctgtctccctcctccccgatggatgcctggatcctgagccgccttgccctggctgcccaggagtgtgagcggggcttcctcacccgagagctctcgctcgtcactcatgccctgcaccacttctggcttcacaacctctgtgacgtctacctggaggctgtgaagcccgtgctgtggcactcgccccgccccctggggccccctcaggtcctgttctcctgcgctgacctcggcctccgcctcctggccccactgatgcccttcctggctgaagagctctggcagaggctgccccccaggcctggttgcccccctgcccccagcatctcggttgccccctaccccagcgcctgcagcttggagcactggcgccagccagagctggagcggcgcttctcccgggtccaagaggtcgtgcaggtgctaagggctctccaagccacgtaccagctcaccaaagcccggccccgagtgctgctgcagagctcagagcctggggaccagggcctcttcgaggccttcttggagcccctgggcaccctgggctactgtggggctgtgggcctgttacccccaggcgcagcagctccctccggctgggcccaggctccactcagtgacacggctcaagtctacatggagctgcagggcctggtggacccgcagatccagctacctctgttagccgcccgaaggtacaagttgcagaagcagcttgatagcctcacagccaggaccccatcagaaggggaggcagggactcagaggcaacaaaagctttcttccctccagctggaattgtcaaaactggacaaggcagcctctcacctccggcagctgatggatgagcctccagccccagggagcccggagctctaactcatcatccccatcagttttcctccctctcagacctgtctttgaggacaaacagatttgtcagctgtcagggtgcagtgggacgtcagagactatgtggtccatcgccttcattgtgtaaatgaggacacagactggcttggtcgcagtgactgtggtgtccttgagatgctcacattactgcccggcctgcctcccacctggaagtctgggaatgaggagattgagataaacttttgaaatcccaaa

SEQ ID NO: 65480 - DNA, 460 bp, Artificial Sequence
  derived and/or modified sequence
acgctgcgggtcctgggcccaggccttgggatgggcgggaaggcctggccgcgccgggctgtgggcactgcaggaggcccctgtgcagatctcggcccctttccaaacactcctgatgcctcatttgcctctcgcctcttttcgaccaccattttgggggctgaggcactcacggggcctccccaggtttcactccgtttctacacagtcggagccccatggatctcccatctcccggaggaaccgtgaagccaaacagaagcgcctgcgagagaagcaggcgactctggaggctgagatagcaggggagagcaagtcacctgcagaatccattaaggcctggaggcctaaggagttagtattgtatgaaatccctacgaaacccggtgaaaagaaagatgtctctgggcccctgcctcctgcatacagcccccgatatgttgaggctgcctggtacccg

SEQ ID NO: 65481 - DNA, 3609 bp, Artificial Sequence
  derived and/or modified sequence
ggcggggcctcctggtgagcgcgcgccggggcggcctccgggaagtgggagacgctgcgggtcctgggcccaggccttgggatgggcgggaaggcctggccgcgccgggctgtgggcactgcaggaggcccctgtgcagaacagatctcggcccctttccaaacactcctgatgcctcatttgcctctcgcctcttttcgaccaccattttgggggctgaggcactcacggggcctccccaggtttcactccgtttctacacagtcggagccccatggatctcccatctcccggaggaaccgtgaagccaaacagaagcgcctgcgagagaagcaggcgactctggaggctgagatagcaggggagagcaagtcacctgcagaatccattaaggcctggaggcctaaggagttagtattgtatgaaatccctacgaaacccggtgaaaagaaagatgtctctgggcccctgcctcctgcatacagcccccgatatgttgaggctgcctggtacccgtggtgggtacgagagggcttcttcaaaccagaatatcaggcccggctgccccaagctacaggggagaccttttccatgtgtatcccacctcccaatgtcactggctccctgcacattggccacgcactcacggtggccatacaggatgccctcgtgcgctggcaccggatgcgtggggatcaagtgctgtgggtccctggttcagatcatgcaggaattgctacacaagctgtggtggagaaacaactgtggaaggaacggggagtgaggagacatgagctgagccgggaggccttccttagggaggtgtggcagtggaaggaggcgaaaggtggagagatctgtgagcagctgcgagctctgggtgcctccctggactgggatcgagagtgttttaccatggatgttggctcctcagtggctgtgactgaagcttttgtgcggctctacaaggcggggttgctgtaccggaaccatcagcttgtcaactggtcatgtgctttaagatcagccatctcggacattgaggtggagaaccggcccctgcctggccacacacagcttcgactgcctggctgccccacccccgtgtcttttggcctcctattttctgttgccttccccgtggatggagagcctgatgcagaggttgtggtaggaaccacaaggccagagacgctgcctggagatgtggctgtggccgttcatccagacgactcgcgatacacacatctacacgggcgacagcttcgtcaccccttgatggggcagcctcttcccctcatcacagactatgctgttcagccacatgtgggcacgggggcagtgaaggtgactccagctcacagtcctgccgatgctgagatgggggcccgacatggcttgagccccttgaatgtcattgcggaggatgggaccatgacctctctctgcggggactggctgcagggtcttcaccggtttgtggcccgggaaaagataatgtctgtgctgagtgaacggggcctgttccggggcctccagaaccaccccatggtactgcccatctgcagccgttctggggatgtgatagaatacctgctgaagaaccagtggtttgtccgctgccaggaaatgggggcccgagctgccaaggctgtggagtcgggggccctggagctcagtccctccttccaccagaagaactggcagcactggttttcccatattggggactggtgtgtctcccggcagctgtggtggggccatcagattccagcctacctggttgtagaggaccatgcgcagggagaagaggactgttgggtggtcgggcggtcagaggctgaggccagagaggtagcagcggaactgacagggaggccaggggcagagctgaccctggagagggatcctgatgtcctagacacatggttttcttctgccctgttccccttttctgccctgggctggccccaagagaccccagaccttgctcgtttctaccccctgtcacttttggaaacgggcagcgaccttctgctgttctgggtgggccgcatggtcatgttggggacccagctcacagggcagctgcccttcagcaaggtgcttcttcatcccatggttcgggacaggcagggccggaagatgagcaagtccctggggaatgtgctggacccaagagacatcatcagtggggtggagatgcaggtgctgcaggaaaagctgagaagcggaaatttggaccctgcagagctggccattgtggctgcagcacagaaaaaggactttcctcacgggatccctgagtgtgggacagatgccctgagattcacactctgctcccatggagttcaggcgggcgacttgcacctgtcagtctctgaggtccagagctgccgacatttctgcaacaagatctggaatgctcttcgctttatcctcaatgctttaggggagaaatttgtgccacagcctgctgaggagctgtctccctcctccccgatggatgcctggatcctgagccgccttgccctggctgcccaggagtgtgagcggggcttcctcacccgagagctctcgctcgtcactcatgccctgcaccacttctggcttcacaacctctgtgacgtctacctggaggctgtgaagcccgtgctgtggcactcgccccgccccctggggccccctcaggtcctgttctcctgcgctgacctcggcctccgcctcctggccccactgatgcccttcctggctgaagagctctggcagaggctgccccccaggcctggttgcccccctgcccccagcatctcggttgccccctaccccagcgcctgcagcttggagcactggcgccagccagagctggagcggcgcttctcccgggtccaagaggtcgtgcaggtgctaagggctctccaagccacgtaccagctcaccaaagcccggccccgagtgctgctgcagagctcagagcctggggaccagggcctcttcgaggccttcttggagcccctgggcaccctgggctactgtggggctgtgggcctgttacccccaggcgcagcagctccctccggctgggcccaggctccactcagtgacacggctcaagtctacatggagctgcagggcctggtggacccgcagatccagctacctctgttagccgcccgaaggtacaagttgcagaagcagcttgatagcctcacagccaggaccccatcagaaggggaggcagggactcagaggcaacaaaagctttcttccctccagctggaattgtcaaaactggacaaggcagcctctcacctccggcagctgatggatgagcctccagccccagggagcccggagctctaactcatcatccccatcagttttcctccctctcagacctgtctttgaggacaaacagatttgtcagctgtcagggtgcagtgggacgtcagagactatgtggtccatcgccttcattgtgtaaatgaggacacagactggcttggtcgcagtgactgtggtgtccttgagatgctcacattactgcccggcctgcctcccacctggaagtctgggaatgaggagattgagataaacttttgaaatccc

SEQ ID NO: 65482 - DNA, 3377 bp, Artificial Sequence
  derived and/or modified sequence
gccagctgctgcgcatgcgccggccggggccccgcccccatgcgccgcgcggctccagggccacgttccagggtcgggtttggtggattcctcagtccctgccgccgcggggcgccctgggatagcggcggggcctcctgtcacctgcagaatccattaaggcctggaggcctaaggagttagtattgtatgaaatccctacgaaacccggtgaaaagaaagatgtctctgggcccctgcctcctgcatacagcccccgatatgttgaggctgcctggtacccgtggtgggtacgagagggcttcttcaaaccagaatatcaggcccggctgccccaagctacaggggagaccttttccatgtgtatcccacctcccaatgtcactggctccctgcacattggccacgcactcacggtggccatacaggatgccctcgtgcgctggcaccggatgcgtggggatcaagtgctgtgggtccctggttcagatcatgcaggaattgctacacaagctgtggtggagaaacaactgtggaaggaacggggagtgaggagacatgagctgagccgggaggccttccttagggaggtgtggcagtggaaggaggcgaaaggtggagagatctgtgagcagctgcgagctctgggtgcctccctggactgggatcgagagtgttttaccatggatgttggctcctcagtggctgtgactgaagcttttgtgcggctctacaaggcggggttgctgtaccggaaccatcagcttgtcaactggtcatgtgctttaagatcagccatctcggacattgaggtggagaaccggcccctgcctggccacacacagcttcgactgcctggctgccccacccccgtgtcttttggcctcctattttctgttgccttccccgtggatggagagcctgatgcagaggttgtggtaggaaccacaaggccagagacgctgcctggagatgtggctgtggccgttcatccagacgactcgcgatacacacatctacacgggcgacagcttcgtcaccccttgatggggcagcctcttcccctcatcacagactatgctgttcagccacatgtgggcacgggggcagtgaaggtgactccagctcacagtcctgccgatgctgagatgggggcccgacatggcttgagccccttgaatgtcattgcggaggatgggaccatgacctctctctgcggggactggctgcagggtcttcaccggtttgtggcccgggaaaagataatgtctgtgctgagtgaacggggcctgttccggggcctccagaaccaccccatggtactgcccatctgcagccgttctggggatgtgatagaatacctgctgaagaaccagtggtttgtccgctgccaggaaatgggggcccgagctgccaaggctgtggagtcgggggccctggagctcagtccctccttccaccagaagaactggcagcactggttttcccatattggggactggtgtgtctcccggcagctgtggtggggccatcagattccagcctacctggttgtagaggaccatgcgcagggagaagaggactgttgggtggtcgggcggtcagaggctgaggccagagaggtagcagcggaactgacagggaggccaggggcagagctgaccctggagagggatcctgatgtcctagacacatggttttcttctgccctgttccccttttctgccctgggctggccccaagagaccccagaccttgctcgtttctaccccctgtcacttttggaaacgggcagcgaccttctgctgttctgggtgggccgcatggtcatgttggggacccagctcacagggcagctgcccttcagcaaggtgcttcttcatcccatggttcgggacaggcagggccggaagatgagcaagtccctggggaatgtgctggacccaagagacatcatcagtggggtggagatgcaggtgctgcaggaaaagctgagaagcggaaatttggaccctgcagagctggccattgtggctgcagcacagaaaaaggactttcctcacgggatccctgagtgtgggacagatgccctgagattcacactctgctcccatggagttcaggcgggcgacttgcacctgtcagtctctgaggtccagagctgccgacatttctgcaacaagatctggaatgctcttcgctttatcctcaatgctttaggggagaaatttgtgccacagcctgctgaggagctgtctccctcctccccgatggatgcctggatcctgagccgccttgccctggctgcccaggagtgtgagcggggcttcctcacccgagagctctcgctcgtcactcatgccctgcaccacttctggcttcacaacctctgtgacgtctacctggaggctgtgaagcccgtgctgtggcactcgccccgccccctggggccccctcaggtcctgttctcctgcgctgacctcggcctccgcctcctggccccactgatgcccttcctggctgaagagctctggcagaggctgccccccaggcctggttgcccccctgcccccagcatctcggttgccccctaccccagcgcctgcagcttggagcactggcgccagccagagctggagcggcgcttctcccgggtccaagaggtcgtgcaggtgctaagggctctccaagccacgtaccagctcaccaaagcccggccccgagtgctgctgcagagctcagagcctggggaccagggcctcttcgaggccttcttggagcccctgggcaccctgggctactgtggggctgtgggcctgttacccccaggcgcagcagctccctccggctgggcccaggctccactcagtgacacggctcaagtctacatggagctgcagggcctggtggacccgcagatccagctacctctgttagccgcccgaaggtacaagttgcagaagcagcttgatagcctcacagccaggaccccatcagaaggggaggcagggactcagaggcaacaaaagctttcttccctccagctggaattgtcaaaactggacaaggcagcctctcacctccggcagctgatggatgagcctccagccccagggagcccggagctctaactcatcatccccatcagttttcctccctctcagacctgtctttgaggacaaacagatttgtcagctgtcagggtgcagtgggacgtcagagactatgtggtccatcgccttcattgtgtaaatgaggacacagactggcttggtcgcagtgactgtggtgtccttgagatgctcacattactgcccggcctgcctcccacctggaagtctgggaatgaggagattgagataaacttttgaaatccc

SEQ ID NO: 65483 - DNA, 3192 bp, Artificial Sequence
  derived and/or modified sequence
atgccgcatcttcctttagccagcttcagaccccctttttggggattaaggcactctcgcgggttaccacgcttccatagtgtgtccacgcagtcagaaccccatggcagccctatcagtagacggaaccgtgaggccaaacaaaaacggcttagagaaaagcaggcaaccctcgaggccgaaatcgccggggagagcaagtctcccgcagaaagcatcaaagcgtggcgtccaaaggagttagtcttatatgagattcctacaaagccaggagagaagaaagacgtctccggacctctccctcccgcctatagtcccagatatgtggaagccgcgtggtatccttggtgggtgcgcgagggtttttttaagcctgaatatcaggcccgactgccacaggccactggagaaaccttttccatgtgtatccccccaccgaatgtgacaggttcactgcacattgggcacgcactgactgtggcgatccaagacgccctagtgcggtggcatcgaatgcggggtgaccaggtgctctgggtgcctggatctgaccacgctggaatagcaactcaagccgtcgtggagaagcaactctggaaggaaagaggagtgagacgtcacgagttgtcccgggaggcctttctgcgagaagtatggcagtggaaggaggctaaggggggcgagatctgtgagcaactccgcgcgctgggagcttccctggactgggatagagaatgtttcaccatggatgtggggagctctgtggcagtgacagaggccttcgtgcggctatacaaagctgggctcctgtacagaaaccatcaactcgtaaactggtcctgcgctctccgctcagccatctcggatatcgaagtcgaaaacaggcccctgccgggccatactcagttaagactgcccggctgtccgactccggtgtcattcgggttactgttttcagtggcctttcctgtggacggagagcccgatgccgaggtagttgtgggaactactcgacctgaaacactccccggtgacgtggccgtcgccgtccaccccgatgacagtcgctacacgcatttgcatggcagacagttgaggcaccctttgatgggccagcctctccccctgattacagactacgctgtccagccccatgtgggtacaggggccgtgaaggtgaccccagcgcactcccctgcagatgccgagatgggagccagacacggattatccccgcttaatgtgatagcagaggacggaactatgaccagcctctgcggggattggctgcaaggcctgcaccggttcgttgctcgcgaaaaaatcatgtcggtgctgagcgagtggggtctgttccgtggtcttcaaaatcatcccatggttctacctatatgttccaggtctggggacgtgatagagtatctattaaaaaaccagtggttcgtgcgctgtcaggagatgggagcccgtgccgctaaggccgttgaatctggggccctagagttgagtccctcgtttcatcagaaaaactggcaacactggttctctcacattggtgattggtgtgtgagcaggcaactgtggtggggccaccagatccccgcgtatctggtggtggaagatcatgcacagggtgaggaggactgttgggtggtgggcagatcggaagccgaggccagagaagtcgcggccgagctgactgggagaccaggggctgagctgacactggaaagagaccccgacgtacttgacacttggttttcttccgccttgtttcctttcagcgccctaggatggccccaggagacaccagaccttgcaagattctatccgctttccctcctggaaacaggaagcgatctgctactgttttgggtcggacgcatggtcatgttgggcacccagttaaccgggcaactgccgttctctaaggtgctgctgcaccccatggttcgggacaggcagggcaggaagatgtcaaaaagtctgggcaacgtgctggacccgagggacattatcagtggcgtagagatgcaggttctgcaggagaaactgaggagcggcaacttggatcccgcagaactggctatcgtggccgccgctcaaaaaaaggacttcccccacggcattccggaatgcggaaccgacgcccttaggtttactctttgcagccacggggttcaggccggcgacctccacctttctgtcagcgaagtgcagtcctgtcgccacttctgcaataagatttggaatgctcttagattcatcttaaacgcattgggagaaaagttcgttcctcaaccagctgaggagctctccccatctagccccatggacgcatggattttatcacgtctcgcactggccgcccaagagtgcgaacggggattcctcacgagagaactcagcttggtgacgcatgcactgcaccacttctggctccacaacctgtgtgatgtgtatctggaggccgtcaagccagtgctgtggcatagccccaggcctctggggcccccacaggtccttttcagttgcgccgatctgggattgcgactccttgcaccattgatgccctttttggccgaggaactatggcagcgacttccaccccggcccggatgccctccagctcccagtatctccgttgccccatatccctccgcctgttcactcgaacactggcggcagccagagcttgagagacgctttagcagggttcaggaggtggtacaggtgctgcgggcactacgtgctacatatcagttaaccaaggcccgccccagggtccttcttcagtcatccgaacccggggaccagggactgttcgaggcattcctcgaacctctcggaaccttgggttactgcggagctgttggactgttgccgcctggagctgcagcccctagtgggtgggcccaagcacctctcagcgatacagcccaggtgtatatggagctgcaaggactggtcgatccacagattcagttgccccttctggcagcacgacgctataagcttcagaaacagctagactctctcacagcccgaacgccgtctgagggcgaagcgggcacacagaggcagcagaaattgtcctccctccaactagaactgagtaagcttgacaaagccgcgtcacacctgaggcagctgatggacgagccgccagcccccggatctccagaactgtag

SEQ ID NO: 65484 - DNA, 3192 bp, Artificial Sequence
  derived and/or modified sequence
atgccacacctgcccctggcatctttcagacctccattctggggactgagacatagtcgcgggctgccaaggtttcatagcgttagcacacaaagcgagccccacggcagtcccatttctaggaggaacagagaggctaaacagaagcgactcagagagaagcaagcgacgctggaagctgaaattgctggggagtccaaatcacctgctgaatctattaaggcctggcgaccgaaagaattggtcttgtacgaaattcccaccaagcccggcgaaaaaaaggacgtgtcgggtcccctgccccctgcttattctccccgatacgtagaggctgcgtggtacccttggtgggtgcgggagggattctttaaaccggagtaccaggcccgcctgccacaggctacaggcgagaccttttccatgtgcattcccccaccgaacgttaccggctccttacacattggccatgccctcacagtggccatccaagatgctcttgttagatggcatagaatgcgaggggatcaagtgctatgggtgcctggtagcgaccatgccggcattgccacccaggctgttgtggaaaaacaactctggaaagaaaggggagttagacgtcatgaactgtcaagagaggcatttctgagggaggtgtggcagtggaaggaagctaagggaggggaaatttgtgagcagctgagggctctgggagcctccctggattgggatagggagtgttttaccatggatgtcggtagtagcgtggccgtaactgaagccttcgtgagactgtacaaggcgggcctcctgtacaggaatcaccaactggtaaattggtcctgcgccctgcgctctgccattagtgacatcgaagtggagaaccggcccctccccgggcacacacagctccgccttcctgggtgccccacaccggtgagctttggcctcctcttctccgtcgccttccccgttgacggggaaccggatgcagaagtagttgttgggaccacaaggcctgagaccctgcctggtgatgttgccgtggcggttcaccccgacgattctcgatatactcacctgcacggcagacagctacgccatccattaatggggcaacccctcccattgattacagattacgcagttcaaccccacgtcgggaccggtgcagtaaaagtcacccccgcccacagtcccgctgacgctgaaatgggcgctagacacggcctgtccccgttgaatgttattgccgaggacgggactatgactagtttgtgtggggactggttgcaggggctgcacagattcgtggcacgagaaaagatcatgtctgtcttgagcgaatggggcttattcaggggcctccaaaatcaccccatggtattgcctatatgctccagatcaggcgacgtgatcgaatatttgcttaaaaatcaatggttcgttaggtgccaggagatgggagccagggctgcaaaagccgtcgaatctggcgcactggagttgtcaccttcctttcatcaaaagaattggcagcactggttcagtcacattggtgactggtgcgtgtctcgccagctctggtggggccatcagatccccgcttatctggtggtggaggaccatgcccagggggaagaggactgctgggtcgtgggaaggtctgaagccgaggcccgggaggttgcagccgagctcactggccgaccgggtgcagaacttacgctcgagcgggacccagacgtcttagatacatggttttcatctgccctgtttccattttcagcgctgggctggccccaggagaccccagatctcgcacgtttttaccctctgtctcttttagaaacggggtcagacctgctgctgttctgggtggggcggatggttatgttgggtactcagctgactggccagctccctttctccaaggtcctcctccatcccatggtccgagataggcagggacggaagatgagtaaatcactgggcaacgtgctggatccccgggatatcatcagcggagtggagatgcaggtgctgcaggagaagttaagatcaggcaacttagatcctgcggaactcgcaatcgtcgcagccgcccaaaaaaaggatttcccacatggcatacctgagtgtggaacagacgccttgcgattcaccctgtgctcacacggcgtccaggcgggagatctccacctaagcgtgtctgaagtgcagtcctgtaggcatttttgtaacaagatctggaatgcactccggttcattctcaacgccttgggtgagaaatttgtgcctcagccggcagaggaattgagtccaagttcgccaatggatgcatggattctctccaggctcgcactggccgcccaggagtgtgagcgtggctttcttacccgtgagcttagcttggtgactcacgccctgcaccacttctggctgcacaatttatgtgatgtgtacctggaagccgtgaagccggttctgtggcactctccgcgtcccctcggtcctcctcaagttctctttagttgcgcggacctgggtctcagactgctggcccccctcatgccatttcttgccgaagagttatggcagagacttcccccccgaccaggatgccccccagccccctcaatcagtgttgctccataccctagcgcctgtagcctcgaacactggagacaacccgaactagagcgaaggttctcaagagtgcaggaagtagtgcaagtgttacgagctctgcgagctacctaccagctgactaaggcccgcccccgtgtcctgctccagagtagtgaacctggggaccaggggctctttgaggccttcttggagccgctaggcacattaggatactgtggcgccgtggggctgctccctcccggtgccgccgcaccaagcggatgggcccaggctcctttgtccgacactgctcaggtgtatatggaattgcaaggacttgtcgacccccagatacagctccctctgttagccgcccgcagatataagctacaaaagcagctcgacagcctcaccgccagaacgcccagtgaaggggaagccggtacccagagacagcagaagctgtcctcacttcagctggagctttctaaactggataaggccgcttcccatctgagacaacttatggatgaacctccagccccagggagccctgaactctag

SEQ ID NO: 65485 - DNA, 3282 bp, Artificial Sequence
  derived and/or modified sequence
atgggcgggaaagcttggccaaggcgcgctgtaggcacagctgggggcccgtgtgcagagcagatatcagctccattccagactctgctgatgcctcatctgcccctcgcgagtttccggccccctttttggggcctgcgccactcaagaggtctccctcgttttcatagtgtaagtacccagtccgagcctcacgggtcacctatctctcgccgcaaccgagaggccaagcagaagcggctgcgcgagaaacaggccactctcgaagctgagatcgccggggaatcaaaatcccccgcggagtctattaaggcttggaggccaaaggaactagtgctgtacgaaattcccactaagcccggcgaaaagaaggacgtttcgggcccgctacctcccgcctatagccctagatacgttgaagccgcatggtacccctggtgggtgcgcgagggctttttcaaacccgaataccaggcaagattgccgcaagctactggtgaaacctttagcatgtgtatccctccccccaacgtcacgggaagcctgcatatcggccatgctttgacggttgcgattcaagacgccctggtgaggtggcatcgaatgcggggggatcaggttctttgggtaccaggcagcgatcacgctgggattgcgacccaggctgtggtcgagaagcaactttggaaggaacgcggggtcagacgccacgaactgagtcgcgaagcctttctccgcgaggtgtggcagtggaaggaggccaaaggcggcgagatctgcgaacagcttagagccctgggggcttccctggactgggatagagaatgctttacaatggacgtggggtcctccgtggccgtcaccgaagcttttgtcaggctgtacaaggctgggctgctttacaggaatcatcagttagtcaactggtcctgtgccctgcgcagcgccatttccgacatcgaagtggagaaccgccctcttcccggccacacccagctccgattaccaggatgcccaactccggtttcttttggtctcctgttttcagtggcatttcctgtagacggagagcccgacgctgaggtggtagtgggaactacacggccagagacattgcccggagatgtggctgtggccgtccaccccgacgatagtcggtatacccacttacacggtcgtcaactgcgccaccctttaatgggacagccactgccattgatcacggactacgccgtgcagccacacgtcggaacgggggccgtcaaagtgacgccagcccactctccagcagatgcggaaatgggtgccagacatggcttaagcccactgaatgtgatcgcagaggatggcaccatgaccagcttgtgtggcgattggctgcagggcctccacaggtttgtcgccagagagaagatcatgtcagtgctgtccgaatgggggttgttcaggggcctgcagaatcatcctatggtgctgcccatatgctccaggtctggcgacgttatcgaatacctgctgaaaaaccagtggtttgtacgttgccaggagatgggtgccagagctgctaaggctgtggaaagcggcgctttagagctaagcccctccttccaccagaagaattggcagcactggttctcccatatcggagactggtgcgttagccggcagctttggtggggccaccagattcctgcctatctggtagtcgaagaccacgcacagggggaagaagactgctgggttgtgggtagaagcgaagctgaggcgagagaagttgccgccgagctaaccggccgccccggggccgaactgaccctcgagagggatcccgatgttctcgatacttggttcagtagcgccttgttccccttcagtgcgctggggtggcctcaggagacgccagatcttgcccgcttttatcccctgtctctcttggagactggctccgacttgttacttttctgggtgggaagaatggttatgctcggaacccaactgaccggtcagttaccatttagtaaggtgctgcttcatccaatggttcgcgataggcaagggagaaaaatgtctaagagcctgggaaacgtgctcgatccacgcgacatcatttccggagtggaaatgcaggtgctgcaggagaaactccgatcaggcaacctcgatcccgctgagttggcaatcgttgccgccgcccagaaaaaggactttccccatggcattcctgaatgtggaacagacgccctccggttcaccctctgcagccacggtgtacaggcaggggatcttcatctgtcagtctcagaagtgcaatcttgcaggcatttctgcaataaaatttggaacgctttgcgatttattctgaacgccctaggtgagaaatttgttccccagcccgccgaagaactgtccccctcatctcccatggatgcttggatcctgtcacgccttgctctggcggcacaggaatgtgagcggggctttctcactagggaactgagtctggtgactcatgctctacaccacttctggctgcacaatctctgtgatgtgtatttggaggctgtaaaaccagtcctttggcacagtccgagacccttaggaccaccccaagtactgttctcctgcgcagacctgggtttgcgactcttagcacccctcatgccctttttggctgaagagctgtggcaacggctgccccctaggcccggatgcccacctgccccttctatctccgtggctccataccccagcgcatgcagcctcgagcactggagacagccagagcttgaaaggagatttagccgcgtacaagaagtcgtgcaggtccttcgcgcattacgcgccacctatcagctgacgaaagctcgaccgagggtgcttttacagtcctcagaacccggcgaccagggactgttcgaggcattcctcgaacccttgggaacactggggtactgcggagccgtgggcctcctcccaccgggtgccgcggccccttcaggctgggctcaggcccctctgtctgacacagctcaagtgtacatggagctgcagggactggtcgatccacagatccagctacctctgcttgccgctaggagatataaactacaaaagcaactggatagcttaacagcgcgaactccgtccgagggcgaagctggcacgcagcgtcaacagaaactttcgagcttacaacttgagttatcaaaactcgacaaagccgcctctcacttaagacagctgatggatgagccgccagcacccggcagtcctgagctctag

SEQ ID NO: 65486 - DNA, 2772 bp, Artificial Sequence
  derived and/or modified sequence
atgtgcattccgcctccaaatgttacaggttcacttcacatcggccacgccctaacagtggcgattcaggacgcccttgtccgctggcatcgtatgagaggtgatcaggtgctctgggtgccgggaagcgatcacgcagggatcgccacccaggccgttgtcgaaaaacagctgtggaaagaacgcggtgtccgtcgccatgaactctccagggaagcgtttctgagggaagtgtggcaatggaaagaggccaagggcggggagatctgtgagcaattaagagcactcggtgcgagcttggactgggacagagaatgtttcacaatggatgtcgggagctccgttgctgtcactgaggccttcgttcgtttgtataaagcaggactgctctatcgaaatcaccagctggtaaattggtcttgcgcccttcggtctgcgatatcagatatagaggtagagaaccggccacttcccggccacacacagctgcggctgccaggctgccctactccagtgagcttcggccttctgttctcagtagcctttcctgtagacggggagcccgacgccgaagtcgtggtaggaacgacacggcccgaaacattgcccggagatgtggctgtggctgtccatcccgacgactcaagatacacccacctccatgggaggcagctcagacacccacttatggggcaacctttgcccctgattacggactacgccgtccaaccccacgtcggaactggagccgtgaaagttacaccagcacacagtccggccgatgctgagatgggcgccaggcatggcttaagtccactgaacgtaatcgcggaagacgggaccatgacatcactctgtggggactggctgcagggactccaccgatttgtcgcgcgtgaaaaaatcatgtctgtgttaagtgagtggggactcttccgcgggttgcaaaaccatcctatggtgctccccatatgctctaggtcgggggatgtgattgaatatcttctgaagaatcagtggttcgtgcggtgccaggagatgggtgctcgggccgctaaagctgtcgaatccggagccctggagctgtcacccagctttcatcagaaaaactggcaacattggttttcgcacatcggtgattggtgcgtgtctaggcagttgtggtggggccatcagatcccagcctacctggtggtagaggatcacgctcagggggaggaggactgttgggttgtcggaagatctgaggcagaagccagagaagtcgctgccgagctaacgggtcgacccggagcagaattgacccttgaaagagaccccgacgtgttggatacctggttctcctccgcgctgttccccttctctgccctgggatggccgcaggaaaccccggacctggcccggttttatcctctgtcgcttcttgaaacaggttcagatctgcttttattttgggttggtcgcatggtgatgttgggcacacagctaacggggcagctgccttttagtaaggtactgctgcatccaatggtcagagaccggcaaggccgcaagatgagcaagtcattgggcaatgtcttggatccccgcgatatcatcagcggcgtagagatgcaagtgctgcaggaaaagctaaggagcggaaacctcgatcccgccgaacttgccatcgtcgctgccgcccaaaaaaaggacttcccgcatgggattcccgaatgcggcactgatgccctcagatttaccctgtgttcacatggtgttcaggccggagacctgcacctcagtgtcagcgaggtacagagctgccgacatttctgtaacaaaatatggaatgcattacgatttatactgaatgcactgggtgagaagttcgtgccacaaccagctgaggagctaagtccctcctcacctatggacgcatggatcctgtcccgcctcgctcttgctgcgcaggaatgcgaaagaggattcctgacaagagagctctctctggtcacacatgctctgcatcacttctggctgcacaatctgtgcgacgtgtaccttgaagcagtaaagccagtgctctggcatagcccaagacccctcggtcccccgcaggttcttttttcatgtgccgatctcggcctccgtctgctggccccattgatgcctttcctggcagaggaactgtggcaacgcctgccacctaggccagggtgcccaccagctcctagcatctccgtagccccgtatccctccgcttgttcgctggagcattggagacaacccgaacttgagaggagattctctcgtgtccaggaagttgtgcaagtgctccgcgcactcagggccacttaccagctcaccaaagctcgaccaagagtcctgctgcaatcatccgagccgggtgaccaggggctattcgaagcttttttagaaccactgggtaccctgggatactgtggcgccgtgggactcctcccacccggagcagctgcgcctagcggatgggcccaggcccccctgagcgatactgcgcaggtatacatggagctgcaggggttagttgatccccagatccagcttccacttctggccgcccggcgctacaaacttcagaagcagctggatagccttaccgcccggactcctagcgaaggcgaggctggaacacagcggcagcagaagctgagttctttacagctggagctgtcgaagctggataaggctgcttcccacttacggcagctgatggatgagcctcccgcacctggcagccccgagctgtag

SEQ ID NO: 65487 - DNA, 3192 bp, Artificial Sequence
  derived and/or modified sequence
atgccccacctgcccctggccagcttccggccccccttctggggcctacgccactctcgcgggcttccacgatttcatagtgtgtcaacacagagcgaacctcacggaagtcctatcagtagaaggaaccgtgaggctaaacagaagagactgagggaaaagcaagctaccttggaagctgagatcgccggcgagtctaaatctcccgctgaaagcatcaaggcctggcgccccaaggagcttgtgttatacgaaattccgacgaaaccaggagagaaaaaggatgtcagcggccctttacccccagcgtattcccctcgctatgttgaagcagcctggtatccatggtgggttcgagaagggttcttcaagcctgagtaccaggccaggctacctcaggcaacaggggagaccttctccatgtgcatcccacctcccaatgtaacaggcagtctgcacattggccacgcacttaccgtcgccatccaggatgccctggtgcgatggcaccgaatgcgtggggatcaggtactctgggtacccggtagcgaccacgctgggatcgccacacaggctgtggtagagaagcaactgtggaaggaacggggcgtgagaaggcatgagctgagcagggaggcttttcttagagaggtctggcagtggaaggaggccaaggggggggagatttgcgagcagctgcgcgccctaggagccagtctcgattgggatagagagtgttttaccatggacgttggatccagcgtcgcggttacagaagccttcgtgcgcttgtataaggccggtttattatatcggaatcaccagcttgtgaactggtcatgtgccctgcgctctgctatctccgacatcgaggtggaaaacaggccgctgccaggccatacccagcttagacttcctgggtgcccaacacctgtgtccttcgggctcctgttttccgtggcatttcctgtggatggagaacccgacgctgaagtagtcgtgggtactacacggccagaaaccttgccgggcgacgtggcagtcgccgtccacccggacgactcgcgatacacccacctccatggacggcaactgcggcatcccctgatgggccagcctctgcctctgatcacagactatgctgtacagccccacgtgggcaccggtgccgtgaaggtcacccctgcacatagcccagccgatgcggagatgggtgctcggcacggtttgtcacctctcaacgtgattgcagaggacgggactatgactagcctgtgcggcgactggctgcaggggctgcatcgtttcgtcgcccgagaaaagatcatgtcagtgcttagtgaatggggtctgttcagaggacttcagaatcatcctatggtactgcccatctgtagtcgcagtggagatgttattgaatatcttttaaagaatcagtggttcgtccgctgccaggaaatgggtgctagggccgctaaggcggtagaaagcggggctcttgagctgagtccaagcttccaccagaagaactggcagcattggttctctcacattggggactggtgcgtgtctcgccagctgtggtggggacaccaaattccagcctaccttgtggtcgaagatcacgcccagggcgaagaggattgctgggtcgttgggagatccgaggcagaggcccgcgaagtggctgcagaactcacagggaggcccggcgcggagttgaccctggaaagagatcccgacgtcctcgatacctggttctcatcagccctgtttcctttctctgcactgggctggcctcaagaaactcccgaccttgccagattttatccgctgagcttgctcgagaccggctctgatctcctgctcttctgggttggaaggatggtgatgctgggaacgcaattgactgggcaattaccattttcaaaggtgttgctgcaccctatggtgcgggaccggcagggacggaaaatgtcaaagtcattggggaacgtcctggatccccgtgatataatcagcggtgtggaaatgcaggtgttgcaagagaaattgcggtcagggaatcttgatcctgctgaactggccatcgttgccgcagcccagaaaaaggattttccccacggcatcccagagtgcgggaccgacgccctccggtttactctgtgctctcacggagtgcaggcaggcgaccttcacctgagcgtgtctgaggttcagtcctgccgacatttctgtaataagatttggaacgctctgcgctttattctgaatgctctaggagagaagttcgtaccccagccagccgaggaacttagcccaagctcccctatggatgcttggattctgtctcggctcgccctggctgctcaggagtgtgagaggggcttcctgactagggaattatctcttgtcacacatgctctgcatcacttttggctccataacttgtgtgacgtctatctggaagccgtgaagcccgtgctgtggcattccccacgccctcttggaccccctcaagtcctgttctcttgcgccgatcttgggctgcgactactagcacctttaatgccatttcttgccgaagaattatggcaaaggctgcctccccgcccgggctgtccacctgcccccagtatctccgtggcaccttatcccagcgcatgctccctagagcactggagacagccagaactcgagcggcgttttagccgggtgcaggaagtggtacaggtacttcgcgcactacgagctacctatcagctgactaaggcacggccacgcgtactgctccaatccagtgaacccggtgatcagggattattcgaagcttttcttgagcctctggggaccctggggtactgcggagccgtgggcctgctacctccgggcgcagctgcacctagcggatgggctcaggctcctttaagcgacacagcccaagtgtacatggagctacaaggcctggtggatccacagattcagctgcctctacttgcagccagacgctataagctccagaagcagctggacagtctgacagcccggaccccaagcgagggagaagcagggacccagcggcagcagaagctgagctccctgcaacttgagctgtcaaagttggacaaagccgcctcccatctgagacaactcatggatgagccccctgccccgggatcccccgagctctag

SEQ ID NO: 65488 - DNA, 3192 bp, Artificial Sequence
  derived and/or modified sequence
atgccccacctgcccctggccagcttccggccccccttctggggccttaggcactccagagggttgccgcgtttccacagcgtgtccactcagtctgagcctcatggtagcccaattagtcgccggaatcgagaggctaaacaaaaaagactgcgagagaaacaggccacccttgaggccgaaattgctggcgaatccaagagccccgcagagtccatcaaagcgtggcgtccaaaggagctggttctatacgaaatccctactaaaccaggtgagaaaaaggacgtgtcgggtccccttccacccgcttatagtccaaggtatgtagaagcagcttggtatccatggtgggtcagagagggtttcttcaaaccagagtaccaggcgcgtctgcctcaggccacgggcgagaccttcagcatgtgcatcccaccacccaatgtgacgggatcactgcacatcgggcacgcccttaccgtggctatccaggatgcattagtccgctggcataggatgcgaggcgaccaggtgctctgggtgccaggctctgatcatgccggcattgcaacccaagccgtcgtggagaagcagctgtggaaagagaggggagtcaggcgacacgagctgagtcgggaggcttttcttagagaggtgtggcagtggaaggaggccaagggcggtgagatctgcgagcagcttcgcgccctgggggcttccctagattgggaccgtgaatgtttcaccatggacgtgggctcctccgtggctgttacagaggcattcgttcggctatacaaggccggcttgttgtacaggaatcaccagctggtcaattggagttgcgctcttagaagtgccatctcagatatcgaggtggagaaccgcccattgcctggccacactcagctccgccttcccggatgtcctactcccgtgtcgtttggcctcctgttctcagtggcatttccagttgacggcgaacccgacgcagaagtcgtcgttggcaccactaggccagagacacttcctggcgacgttgccgtggccgttcaccccgatgactccagatacacgcatctacacgggcggcagttgagacacccactgatggggcaacctctccccctcattacagattatgctgtgcagccgcacgtcggtaccggagcagtgaaggtgaccccagcgcatagtccagctgatgccgagatgggggcccgccatggacttagccccctaaacgtcatcgcagaagacgggaccatgaccagcctgtgcggggactggctgcagggtctgcacaggttcgtggcccgggaaaagattatgtccgttctttcggaatggggactctttcggggtctgcagaaccatcccatggtactccccatctgctctcgctcaggagacgtgatagaatacctcctgaaaaaccagtggttcgtgcgttgccaggaaatgggcgccagggccgccaaggcagtcgaatcaggtgccttagaattgtcaccttcatttcatcagaaaaactggcagcactggtttagtcacatcggggattggtgcgtgagtcgccaactctggtggggacaccaaatcccagcttatctggtagtagaggatcatgctcagggcgaggaggattgttgggtggtgggccggtctgaggccgaggctcgggaagtggccgccgaattaacgggccggcccggggccgagctcactcttgagcgtgaccccgatgttctcgacacctggttttcctctgcgctatttccattttctgcactcgggtggccacaggagactccagacctggccaggttttaccccctgtcactgctggagacaggttccgacctcttattattttgggtgggccgcatggtgatgctaggtactcaactgacgggacagctccctttctccaaagtgttattgcatcccatggtgagggatcgccagggccgaaagatgagtaaaagcctgggaaacgttctcgatccaagagatatcatctccggagtagaaatgcaagtgctacaggagaaactgaggtccgggaatcttgatccggctgagctggcaatcgttgccgccgcccagaaaaaggatttccctcatggcatcccagaatgtggtactgatgcactcaggttcacgctatgctcccacggagttcaagctggggatttgcatctttcagttagcgaagtccaatcttgtcggcatttttgtaacaaaatttggaacgctttacgattcattctgaatgcactcggagagaagtttgtgccacagccagctgaggaactctctccatcttccccgatggacgcctggatactgagtcggctggctctagccgcccaggagtgcgaacgcggattcctgacacgggagctctcactggttactcatgccctacaccacttttggctgcataatctttgcgacgtctaccttgaggctgtgaagcctgtcttatggcactctcctagacccctcggacctccccaagtcctattctcatgcgcggaccttggcctacgcctgctggctccgctgatgccatttctggccgaagagttgtggcagcgtctccccccaagaccagggtgtcctccagccccatcaatcagcgtggcgccttacccttcagcttgcagtcttgaacactggagacagccggagttggaacgccgcttctccagagttcaggaggttgtgcaggtgctgcgagccttgcgcgccacataccaacttacaaaggcccgcccgcgcgtattgcttcaatcaagcgagcccggcgaccaagggctctttgaagcgtttctggaacccttgggaacactaggttactgcggggcagtaggacttcttccccctggagctgcagcacctagtgggtgggcacaggcacccctgtctgacacagcccaggtttacatggaactgcaaggcttagtggaccctcagatccagctgcctttgctggctgccaggcggtacaagctacagaaacagctggacagccttaccgcgcgtactcccagtgagggagaggccgggacacagaggcaacagaagctttcttcacttcagctggaactttccaaactggataaggccgcctcgcaccttcggcagctgatggacgaaccgcctgccccaggaagtcccgagctgtag

SEQ ID NO: 65489 - DNA, 3282 bp, Artificial Sequence
  derived and/or modified sequence
atgggcggcaaggcctggccccggcgggccgtgggcaccgccggcggtccttgcgccgagcagatttctgccccattccaaaccctgctgatgccccatctgccgttagcttcatttaggcctccattctggggcctgagacattcccgaggcctgcctagatttcattctgtgtccacccaaagcgaaccccacggtagtcctatcagtcgcagaaatcgggaagctaaacagaagcggcttagagagaagcaggctacgcttgaggccgaaattgcaggcgagtctaagagcccagcagagtctatcaaggcctggagacccaaggaactggtcctgtacgaaatccccacaaaaccgggtgagaagaaagatgtctccggcccactgccgccagcctactctccccgctatgtagaagccgcgtggtatccatggtgggtgagggaaggcttttttaaaccagagtaccaggccaggctgcctcaggctacgggagagaccttcagtatgtgcatcccaccccccaacgtgactggttccctgcatataggacacgccctgaccgtagcgattcaggacgctctggtgcggtggcaccgcatgcggggcgaccaggtgctgtgggtccctgggtctgaccacgcaggaatagccactcaggccgtcgtggagaagcagctgtggaaagagcgcggagtccggaggcacgagctgtcccgagaggcctttcttagagaggtgtggcagtggaaggaggcgaaaggaggggagatttgcgaacaattgcgggccttgggggcaagcctggactgggaccgggagtgcttcaccatggacgttggatcaagtgtggccgtcacggaggccttcgtgcggctgtacaaagccggcctcctgtatagaaaccatcagttggtgaactggtcttgtgctctcagaagtgcaatttccgacatcgaggtcgagaatcgacccttacccggccacacacagctgagactcccgggatgccctacaccggtctcatttggactgctcttctccgttgccttccccgtggacggagagccagacgccgaggttgtagtgggaacaacaaggccagagaccctgccaggcgacgttgcagtagcagtgcaccccgatgattccagatacacacacctgcatggcagacagctgcggcatcctcttatgggccagcctctgccccttatcactgactatgccgtgcagccacacgtcgggacgggggctgtgaaagtgacccccgcgcactctccagcggatgccgaaatgggagcccggcacggactatcccccctcaatgttattgccgaagacggcacaatgacatctctttgtggggattggctccagggactgcacagatttgttgctcgggaaaagattatgtccgtcctgtccgaatggggactcttcagaggtcttcaaaatcatcctatggtactcccgatttgttcacggtccggagacgtgatagagtatctgctgaaaaatcaatggtttgttagatgtcaggaaatgggtgccagagcagccaaggctgttgaatccggtgcgctcgagcttagtccctcttttcatcagaagaattggcaacattggttctctcatatcggggattggtgtgtgtcccggcagctgtggtggggccatcagatcccagcctacctcgtcgttgaagatcatgctcagggcgaagaggactgttgggtggtgggccggtccgaggccgaggctcgcgaggttgcggcggaactgaccggtcggcccggtgccgagctgactttagagcgtgatcccgacgttctcgacacctggttttccagtgcactgtttccgttctctgcgctaggctggccccaggagacacctgatttggcaaggttttatcccctgagcctgctggaaactggcagcgacctgttattgttttgggttggccggatggtgatgctgggcacacagttaacgggtcagctgcctttctctaaggtactgcttcaccctatggttagagacagacagggccgaaaaatgagtaaaagcctgggcaatgtgctggacccgagagatatcataagcggagtcgagatgcaggtcctgcaggagaagctccgaagtggcaacctcgacccggccgaactggccatagtcgcggcagcccagaagaaagactttcctcacggaattcccgagtgtggaactgatgctcttcggttcactctctgctcccatggtgtacaggccggagatcttcatctgtccgtatcagaggtccagtcctgtcgacatttttgcaacaaaatttggaacgctctgaggttcattttgaatgcacttggcgaaaaatttgtgccccagccagcagaggaactctccccctcaagcccaatggacgcatggatcttgtcaaggcttgccctcgccgcccaagaatgtgaacgcggcttccttacaagggaacttagcttagttactcatgcacttcatcacttttggctccacaacttgtgcgatgtgtatcttgaagcggtgaagccagtgctgtggcactcgccccgcccactcggcccccctcaggtcttgttcagctgtgccgacctggggctacgcttactggccccccttatgcccttccttgccgaggagctttggcagaggctcccaccgagacccggctgccccccagccccttccattagtgtcgcaccctatccctctgcatgcagcctggagcactggcgtcagcctgaattggagcggcgatttagcagggtgcaagaggtcgtacaggtgctgagagcgcttcgtgccacgtaccagctgaccaaggcccgcccgcgggtccttctccagtcctcggagcctggggatcaaggactcttcgaagcttttctggagcccctaggaacattgggatactgtggcgccgtaggcttgctcccccctggggctgctgccccatctggatgggcacaagcccccttgagtgatactgctcaagtctatatggaactgcagggcttggtggatccacagattcagctgcctcttctggccgccaggcgatacaagctgcagaagcagctggactccctgacggctcgtacgccgtcagaaggcgaggccgggacccagaggcaacagaagctgagctcgttacaactggaactctcaaagctggacaaggcagccagccacctcagacaacttatggacgagcctccagctcctggatccccagagctttag

SEQ ID NO: 65490 - DNA, 2772 bp, Artificial Sequence
  derived and/or modified sequence
atgtgcatccccccccccaacgtgaccggcagcctgcacatcggccacgccctcacagtggcgatacaggacgccctggtgcggtggcaccgaatgaggggagaccaagtgttatgggtgcccggcagtgatcatgccggcattgcgacgcaggcagtcgtggagaagcagttatggaaggaacggggcgttaggcgtcatgagctgagtcgcgaggcattcttaagagaggtgtggcagtggaaggaggcaaagggtggggaaatctgtgagcagctgcgggcattgggcgctagcctggactgggacagggagtgctttacaatggatgtgggaagttccgtggctgtgactgaagccttcgtgagactatacaaggcaggactgctatacagaaatcaccagctcgtcaactggagctgcgcactcaggtcagccatcagcgacattgaagtagaaaacagaccactccctgggcatacccagttgcgactgccaggctgcccaacacccgtgtctttcggtctcctcttcagtgtcgcttttcccgtggacggggagccagacgctgaggttgtggttggaaccaccaggcccgaaaccctcccgggggacgtcgccgtcgcagtccaccccgatgactctcggtatacccatttgcacggccggcaattaagacatcccttaatggggcagcctcttccgctgatcacagattatgcagtgcaaccccacgtgggaactggcgcagttaaagtgaccccagctcattctccggccgatgctgaaatgggtgcaagacacggcctcagtcccctgaacgtgatcgctgaggatggcacaatgacgagtctctgtggggattggctgcaagggttacatcggttcgtcgcgagggagaagattatgtccgttctgtctgaatggggcctgttccggggtcttcaaaaccatcctatggtcttaccaatttgcagcagaagtggtgacgtgattgagtatttgctcaagaaccaatggtttgtgcgatgccaggaaatgggggccagagctgccaaagcagtggaatccggggcattggaactctcaccatccttccatcagaaaaactggcaacattggttttcccacatcggcgattggtgtgtgagccggcagttatggtggggtcaccagatccctgcctatctggtggtggaagaccatgcgcagggcgaggaggattgttgggttgtgggaagatctgaggctgaagcccgcgaagtcgccgcggagctgactggcagacccggcgccgaactcaccctggaacgggaccccgacgtcctggatacatggttctcatctgctctgtttccgttcagcgctctgggctggcctcaggagacacctgacttagctcgtttttaccctctgagcctgctagaaacaggaagtgacctccttttgttctgggtgggcagaatggtgatgctaggcactcagcttaccgggcaactgccctttagtaaagtgctgctgcatcctatggtcagagatcgccaggggcgaaaaatgtccaagagcctgggtaacgttctggatccccgtgatataattagcggcgtagaaatgcaggtgcttcaggagaagctgcggagcggcaacctcgacccagcagagctggccatagtggctgcagctcagaagaaggatttcccacacggcattcccgaatgcggcaccgatgcgctacgcttcactctgtgttcacacggcgtgcaggccggggatctccacctcagcgtctcagaggttcagagttgtcggcatttttgtaacaagatatggaatgcactgagattcatattgaatgcgttaggagagaagtttgtcccacaacccgccgaggagctctcaccctcatcccccatggatgcttggattctgagccggctggcactggccgcccaggaatgcgagcgcggattcctcacacgcgagctgagcctcgttacccatgccttacaccatttctggcttcacaatctttgcgacgtctacctcgaggccgtaaagcctgttctctggcatagcccccgacctctggggcctcctcaggtcctgttctcttgtgcagacctgggcctgcggctcttagcacccctcatgcctttcctcgctgaggagctgtggcagcgcctgcccccgaggccaggatgcccccccgccccgtcgatttcagtggctccctatccgtccgcctgcagcttagagcactggcgtcagccagaacttgagaggcggtttagcagggtgcaagaggttgtgcaggtgctgcgagcacttagagctacttatcaactcacgaaggcccgtccacgtgtgttgctccaaagcagcgaaccaggcgaccaaggactgtttgaggcttttctcgaacctctcggcaccttgggctactgcggggcggttggtttactgccgcctggtgctgctgccccctcgggatgggctcaggcccctctctctgatacagcacaggtgtatatggagcttcaggggttagtggatccccaaattcagctgcctctactggcggcgcgtagatacaagcttcagaagcagctggactccctgacagctagaacacctagcgaaggcgaagcaggtacccagaggcagcagaagctgtcttcattgcagctggaactgtcaaaactggacaaggcagccagccatcttcggcagctaatggacgagccccccgcaccagggtcaccggagctgtag

SEQ ID NO: 65491 - DNA, 3192 bp, Artificial Sequence
  derived and/or modified sequence
atgccacaccttcccctcgcgtcctttcggccaccgttttggggcttgagacatagcagaggcctaccacgatttcactctgtgtctacccagtctgaaccgcacgggtctcctatctctaggcggaatagggaagccaaacagaagaggttgagggagaaacaagccacactggaggctgaaatcgctggcgagtccaaatcccctgctgaatcaatcaaagcttggaggccaaaggaactagttctttacgagatccctacgaagccaggggaaaaaaaagacgtgtcaggcccactgccaccggcttattccccgcgttatgttgaggccgcttggtatccttggtgggtgagagaaggcttttttaaaccagaataccaggctagactgccgcaggccacgggagagaccttctctatgtgtatcccgcctcccaatgtgaccgggtccctgcatatagggcatgccctgacagtggctattcaagatgctctggtccgctggcaccggatgagaggcgaccaggtgctctgggtccccggttctgatcacgccggtatcgccacacaggcggtggtcgaaaagcagctctggaaggaacggggagtcaggaggcacgagctgtcacgggaggctttcttaagggaggtctggcagtggaaagaagctaagggaggcgagatttgtgaacaattgagagcccttggcgcatcacttgactgggaccgcgaatgttttacaatggatgtagggtcgagtgttgcggttaccgaagccttcgtccggctgtataaagccggattgttgtatcggaatcaccagctcgtaaattggtcgtgtgccttgcggtcagccattagcgacattgaggtggaaaaccgacccctacctggccatacgcagctccgactgcccggttgtccgacaccagtctcctttgggttgctattttcagtggcttttccagttgatggggaaccagatgccgaagtggtcgtaggtacgacaagaccagagacactgccaggggacgtggcagtcgcagttcaccccgatgattctagatatacacacctgcacggcagacagctgagacaccccctgatgggccagcccctgcccctgatcaccgactatgccgttcagccccatgtgggtactggagcagtgaaagtcacacctgcgcattccccagcagatgctgaaatgggggctcggcatggtctttccccattgaatgtgatcgctgaagacggcacaatgacttccctatgtggggattggctgcagggcctgcatcgctttgtggctcgagagaaaataatgtcggtcctgtcagaatggggcttgtttcgaggattgcagaaccaccctatggtgcttccaatctgttccaggtcaggcgacgtgatcgagtacctactcaaaaatcagtggtttgtgcgttgccaagagatgggagctcgggcagccaaagccgtggagagtggggcactagagctctcaccttccttccaccagaaaaattggcagcattggtttagccacatcggagactggtgtgttagtaggcagctctggtggggtcaccaaattccagcgtatctcgtggtggaggatcacgcgcagggcgaggaagattgctgggtggttggtagaagtgaagcggaggcgcgtgaagtggccgctgagttaacgggcagaccaggcgcagaattaactctcgaaagagacccagatgtcctggacacctggtttagcagcgccttattcccattctccgcgttgggctggccacaggagactcctgacctagctaggttctatcccttgtcattgttggagacaggtagtgacctgttgctgttctgggtggggcgtatggtgatgttaggcacacagttaaccggtcagctgccattcagtaaagtattacttcatcccatggtacgggacaggcagggccgaaaaatgtctaaatctctgggtaacgtcctagacccaagggacatcattagcggcgtcgagatgcaggtcttgcaggagaagctgaggtcagggaaccttgaccccgctgagttggcaatagtggcagccgctcagaagaaggactttcctcacggcattccagagtgcggcactgacgcactgcgcttcacgctgtgctctcacggcgtccaggccggagacctgcacctgtccgtgtctgaagtacagtcatgcagacatttttgtaataagatttggaacgcccttcggttcatcctgaacgccctgggggagaaatttgtgccccagcccgctgaagagctatcacctagcagccccatggatgcatggatcctgagtagattagcactggcagcacaagagtgcgagcggggttttttgactcgcgagttgtctttggtaacgcacgccttacatcacttctggctccataacctctgcgatgtgtacttggaggctgtgaagcccgtcctttggcattcccccagacctttagggcctccacaggtgctgttttcatgcgctgacctggggctgcgcctgctggccccacttatgccattcttggccgaagagctgtggcagagacttcctcctagacccggatgtcccccagctccgagcatcagcgtggcaccttatccaagcgcctgcagtctggaacattggcgtcagcccgagttggaacggcgttttagtagggtgcaggaggtggtgcaggtcctgcgcgcactgcgagcaacctaccagttaacaaaggctcgcccaagggtcctacttcagtcgtccgagccaggagaccaaggcctctttgaggcctttctcgaaccactgggaaccctgggttactgcggagctgtgggacttttgccaccaggagccgcagctccctctggttgggcgcaggctccattgagtgacaccgcccaggtttacatggagctgcagggcctagtggatcctcaaatccagctcccgctgcttgccgctagacgatacaagttacagaagcagctggacagccttacagcccgtacccccagcgagggtgaagccggtactcagaggcagcagaagttgtctagtcttcagctcgaactgtctaaactggataaggctgccagccacttgcgacagctaatggacgagccccctgcacctggcagccccgagctgtag

SEQ ID NO: 65492 - DNA, 3192 bp, Artificial Sequence
  derived and/or modified sequence
atgcctcacctgcctctcgcatccttccgcccacccttctggggactacgtcatagccgcggtctgcccaggttccactcagtttcaacccagagcgaaccccacggatcacctatcagcagacggaatcgcgaggccaagcaaaaaagactcagggagaaacaggctacccttgaagccgagatcgcgggagagtcaaagagcccagctgagtcaattaaagcttggcgccctaaagagttagtcctgtacgaaattccaacaaagccaggggaaaaaaaagatgtgagcggtcctttgccccctgcctatagtcctcgatatgtggaagcagcttggtacccgtggtgggtcagggagggcttctttaaacccgaatatcaggccagactgccccaggccacaggagaaactttctcaatgtgtatcccaccccctaatgtgaccggtagcctgcatatcggccacgctttgaccgtggccattcaggatgctctcgtgcgatggcatcgcatgcgcggagaccaagtgctgtgggtgcccggatctgatcacgctgggattgctactcaggccgtggtggaaaagcagctgtggaaggaacggggagtcaggagacacgagctgagccgagaggccttccttagagaagtgtggcagtggaaagaggcgaagggcggtgagatttgcgagcagttaagagcattaggcgctagcctcgactgggacagagaatgttttacgatggacgttgggagctcagtggctgtcactgaagcttttgtcagactttacaaagcaggactgctgtatagaaaccaccagctggtgaactggtcctgcgctctgcgctccgctatcagtgatattgaagtggaaaatcgtccactgcctggccatacacagctgaggctgcctggttgccctacgcccgtgtccttcggtttgcttttttctgttgcctttcctgttgacggcgaaccagacgcagaggtagtggtcggaactacccgcccagaaactttgcctggagacgtcgcagtggctgtccatccagacgatagtagatacacccatcttcatggccgacagctgcgtcatccactaatgggtcagccgttacccctgattacagactatgcagtgcaaccacacgtcggtaccggcgctgtgaaagtgacacccgctcactccccagcagacgccgaaatgggggcacgccacggcctcagcccacttaacgtgatcgcggaggatgggacgatgacaagcctatgtggcgactggctccagggtctacatcgtttcgttgctcgagagaagattatgtctgtgctgagcgagtgggggctgtttagaggactgcagaatcatccaatggtcctgcctatttgctctcggtccggggatgtcatcgaatacctactgaagaatcaatggtttgtgaggtgtcaggaaatgggggcacgcgctgccaaagctgtcgaaagcggcgcactggagctgagcccctcattccatcaaaaaaactggcaacactggttttcccatattggcgattggtgcgtgtcgagacaattgtggtggggccaccagatcccagcatacctggtggttgaggaccatgctcagggcgaggaagactgctgggtggtcggcaggagcgaagccgaggctagagaagtggccgctgagttgacggggagaccaggcgctgagctgacacttgagcgcgatcccgacgtccttgacacctggttctcctccgctctcttccccttctctgccttgggctggccgcaggaaactcccgatctagctaggttctaccctctttctctgctcgaaaccggtagcgatttgctgctgttctgggtcggcaggatggtcatgctcgggactcagttaacggggcagttacctttctccaaggttctgcttcatcccatggtgagggatcgccagggccgaaagatgagcaagtccctcggcaatgtacttgatcccagagacataatctcgggcgtggagatgcaagttctacaggagaagctgaggagtggcaaccttgacccggctgaacttgcgatagtcgccgctgcacagaagaaagatttccctcatggcatacctgaatgtggcactgacgcactgcgattcacactatgctctcatggagtccaggctggcgatttacacctttctgtgtcggaggtccagagctgccgccacttctgcaacaaaatctggaacgcactgcgttttatcctaaatgcattaggtgaaaaattcgtgccgcagcctgccgaagagctctctcccagcagccccatggacgcatggattttgagcagacttgccttagctgctcaagagtgcgagcgcggattcctgactcgcgagctgtctctagtcacccacgcattgcaccatttctggctgcacaatctttgcgacgtgtacctcgaggcagtgaagccagtgttatggcactcgcctagacccctgggccctccacaggtcctgttcagctgtgccgacttaggcctaagactgttggccccactgatgcccttcctagctgaggagctttggcagaggcttcctcctcgacccggatgtccacccgcaccatccattagcgtagccccatacccctccgcttgctccctggagcactggcggcaacccgaacttgaacggagattttcacgggtacaggaggtggttcaggttctgcgggcactgcgagctacttaccagctgacaaaagcacgaccacgggtgctgttgcagagctcagaaccgggtgaccagggactgttcgaggccttcttggagcctctgggcacccttggttattgtggggctgtggggttactgccccctggagccgcagctcctagtgggtgggctcaggctccattgtctgataccgcccaggtttatatggagttgcaggggctggtcgacccacagatccaattaccactcctagcagcccgtaggtataagcttcagaagcagctggattcacttacagcacgcacacctagcgaaggcgaagccggaactcaaagacaacagaagttaagtagccttcagctggaactgtccaaactggataaggctgcgagtcacctgcgacaactcatggatgagccccctgcgcctgggagccccgagctgtag

SEQ ID NO: 65493 - DNA, 3282 bp, Artificial Sequence
  derived and/or modified sequence
atgggaggcaaggcttggcccaggagggcggtgggcacagccggaggtccctgcgcggaacaaatttcagcgccattccagacattgctgatgccccatctgccactggcctcatttcggccacctttttggggcctcaggcactctcgtggtcttccccgattccacagcgtcagcacccagtccgagcctcatggatccccgatctccagaaggaaccgcgaagcaaagcagaagcgactccgggaaaaacaggccactttggaagcagagattgccggagaaagcaaaagtccagccgaatcaataaaggcatggcgaccaaaggagcttgtcctatacgagatccctaccaaacctggcgaaaaaaaagatgtttctggccctctccctcccgcatatagtcctcgctacgttgaagctgcctggtacccctggtgggtgagagaagggtttttcaaacccgaataccaggcgaggttgccgcaggcaacaggggagacattctctatgtgcattccccctcccaatgtcaccgggtccctgcacattggacatgccctaaccgttgctatccaggacgcacttgtgcggtggcacaggatgcgcggagatcaagtgctgtgggtgcctggctccgatcacgctggcattgccactcaggccgtcgtagaaaaacagctctggaaggagagaggagtgagaagacatgagcttagcagagaagcctttctgcgggaagtgtggcagtggaaggaagccaaaggaggagagatttgcgagcaactgcgagccttgggagcaagtcttgattgggatagagagtgcttcacgatggacgtgggttcatctgtggctgtgacagaggccttcgtgcggctgtataaggccggacttctttataggaatcatcaattggttaactggtcctgtgccctcaggtctgcgattagcgacattgaagtcgaaaacagaccactgcccggacacacacaactccgcctgccaggctgtccgacccctgtttcattcgggttgttattcagtgttgcattcccagtggatggggagcctgacgctgaagtggtggtgggaaccaccaggccagagaccctacctggagacgttgctgtcgccgtccatcccgacgactctagatatacccacctgcacgggaggcagctgcgtcaccctctcatgggccagcccttgcccctcatcaccgattacgcagttcaacctcatgtgggaactggtgcagttaaggtcactcccgcacactctccagcagatgcagagatgggcgctaggcacggcctttcccctttgaatgtgatcgctgaggacggtaccatgaccagtctgtgcggggattggctccagggcctccatcggtttgtggctagagaaaaaatcatgtccgtgttaagcgagtggggactgttccgtggcctgcagaaccaccccatggtactcccgatatgcagtcgctccggggatgtgatcgagtatctgctgaaaaaccagtggtttgttcgatgtcaggagatgggcgcaagagccgcaaaagcagtggagagcggcgcactcgagctctccccgagttttcatcagaagaactggcagcactggttcagtcacattggtgattggtgcgtcagtaggcaactatggtggggacaccagattcccgcttacctcgtcgtcgaggaccatgcccagggcgaagaggattgttgggtcgtgggtagatctgaggccgaagctagggaagttgcggctgagctcactggcaggcctggcgcagaactgaccctagaaagggaccccgacgtgctggacacgtggtttagttcagctctctttcccttttctgcccttgggtggccacaggagacaccggacttagctcgattctaccctctgagtttgctggaaacaggcagcgatctgttattattctgggtcggaaggatggtaatgcttggcactcagctgacaggccaactgccattcagcaaagtcctgttacacccaatggttagagaccgacagggacgcaagatgagtaagagtctgggaaatgttttggatccacgagacattatttcaggagtcgagatgcaagtcctgcaagaaaagctccggagcggaaatttagatcccgcagagctcgcgattgtggccgcagcacagaaaaaggacttcccacatgggattcctgaatgtgggaccgacgcattgaggttcacactctgcagtcatggcgttcaagccggagatcttcatctcagcgtctcagaggtgcagtcatgccggcacttctgcaataagatatggaacgctctgcggttcatcctgaacgcactcggggagaagttcgtcccccagccagcggaggaactgtccccctctagtccaatggatgcatggatcctgagccgcctcgcactcgccgctcaagagtgtgagaggggatttctgactagagagctctccctggtgacccatgcactgcatcacttctggttgcataacctgtgtgacgtgtatcttgaggcagtaaagccagtgttgtggcactcgcctcgccctctgggaccccctcaagttctgttcagctgcgctgatctaggcctgcgactgctggcaccgctaatgcctttcttggctgaagagctttggcaaaggctgccaccaaggcccggatgcccacccgcaccgagcatttcggtcgctccttacccctctgcatgctcattagagcactggcgccagcctgagctggagagacgcttttcccgtgtgcaggaggttgtgcaggtcctaagggctttacgcgcaacctaccagcttacaaaagctcgtccacgcgtcctcttgcagtcctcagaacccggagaccagggcctatttgaggcgtttctcgagcctctcggtactctggggtactgtggggctgtgggtctgttaccacctggggcagccgctcccagcggttgggctcaggcacccttgagcgacacagcacaggtgtacatggagctgcagggacttgtggaccctcagatccagctcccactgctcgccgcacgcagatataagctccaaaaacaattagatagtttgaccgcgcgtaccccatccgaaggtgaggcaggaactcaacggcagcagaaactcagttccctccaactggaattgtcaaagctggataaggccgctagtcacctcaggcaactcatggatgagccaccggctcctggctctcctgagctgtag

SEQ ID NO: 65494 - DNA, 2772 bp, Artificial Sequence
  derived and/or modified sequence
atgtgcatccccccacccaacgttacaggctccctgcacatcgggcatgccctgaccgtcgccattcaggacgcactggttaggtggcaccggatgaggggcgatcaggtgctctgggtccccggtagtgaccacgccggaattgctactcaggccgtggtggagaagcaactgtggaaggaacgcggtgtccgaagacacgaattgagtcgggaagcatttttgcgtgaggtgtggcaatggaaggaggctaagggaggggagatctgcgaacagctccgcgctctcggagcctcactggactgggaccgtgagtgtttcacgatggacgttgggtcgtctgtggccgtgaccgaagctttcgtgagactatacaaggccggactgctgtacagaaaccatcagctggttaattggtcatgcgccctgcggagcgcaatttccgatatcgaagtagagaaccggcctctgcctggtcatactcagttgaggctgcccggatgcccaacccctgtgtcatttggtttgctgtttagcgtggcctttcccgttgatggcgagccggacgcagaagttgtcgtaggcactacacgtcccgaaaccctccctggcgatgtcgctgttgctgtgcacccggatgactcccgttatacacacttacacggccgacagctgcgtcacccactgatggggcagccgctgcctctcattacagactatgccgtacagccacatgtcggcaccggcgctgtgaaggtaactcccgcacactcacctgccgacgcggagatgggggctcgtcacggcctgagccccctcaacgtgatcgcggaggatggtacaatgaccagcctttgcggcgactggctacagggcctgcaccgctttgtggcgagagagaagattatgagcgttctgagcgagtgggggctcttcaggggattgcagaaccaccctatggtgctgccaatctgcagtagaagtggcgacgtcattgagtacctgttgaagaaccagtggttcgtgcgctgtcaggaaatgggagcccgagccgctaaggcggttgagtctggcgctcttgagctctccccctctttccaccagaaaaattggcagcattggtttagtcatataggggattggtgcgtcagccgacaactgtggtgggggcaccagatccccgcatacttagtggtggaagatcacgcccagggcgaagaggactgttgggtagtgggacggtctgaagcggaggccagggaagtggccgcagagctgacgggccgacccggagcagagctcactttggagagagaccccgacgtattagatacctggttcagctccgccctcttcccctttagcgccttaggatggccccaggagaccccagaccttgcgcgattttaccccctcagcctgttggaaaccggcagcgatctattactgttttgggtgggaagaatggtcatgttaggcacccagctgacagggcagcttccctttagcaaggttctgctgcatccaatggtcagagataggcaagggcgtaagatgtcgaagagtcttggaaacgtgctggatccgagagacattatcagtggggttgagatgcaagtgcttcaagagaaactgcgcagcggcaacttagacccagccgaacttgcaatcgtggccgctgctcagaaaaaagacttccctcatgggatccccgaatgtggaaccgatgccctgaggtttactctctgcagtcatggtgttcaggccggtgatctgcatctcagcgtgtctgaagtgcagtcttgccgacacttctgtaacaagatctggaacgctctgaggttcattctcaatgccctcggcgagaagttcgtcccacaacccgctgaggagctttcccccagtagcccaatggacgcctggatactttcacggctcgcgctcgccgcacaggagtgcgagcgtggctttctgacacgggagctgagcctggtgacgcatgctctgcatcatttttggctgcataacctgtgcgatgtgtatctggaagccgtgaagcctgtgctctggcactcaccgaggcctctgggcccaccacaggtgctgttctcatgcgcagacttgggtcttaggctactggccccactcatgccttttttggctgaagagctttggcagaggctgcctccaaggcccggatgtcctcccgcaccgtcaatttcagtggcgccttacccatcagcctgctctctggaacactggaggcagcctgaactcgaaaggagattcagcagggtccaggaagtggtccaggttttacgagctctgagagctacataccaattgaccaaggctaggccacgggtgttgctgcaatctagtgaaccgggtgaccaaggactgtttgaggccttcctggaacccctcggcactctgggctactgcggggcagtgggactgctgcccccaggcgcagcagccccatcagggtgggcccaggcacctctaagcgacactgctcaggtgtacatggaattacaggggttagttgatccacagatccaactgccattgctggccgctcgcagatacaaactccagaaacagctggactcactcacagcgaggactccttcggagggggaggctggcacgcagaggcaacagaagttatccagtctccagctcgagctcagcaagctcgataaggctgcaagtcacttgcggcagctcatggatgagccccctgcacccggatcacctgagctgtag

SEQ ID NO: 65495 - DNA, 3605 bp, Artificial Sequence
  derived and/or modified sequence
gccagctgctgcgcatgcgccggccggggccccgcccccatgcgccgcgcggctccagggccacgttccagggtcgggtttggtggattcctcagtccctgccgccgcggggcgccctgggatagcggcggggcctcctgatctcggcccctttccaaacactcctgatgcctcatttgcctctcgcctcttttcgaccaccattttgggggctgaggcactcacggggcctccccaggtttcactccgtttctacacagtcggagccccatggatctcccatctcccggaggaaccgtgaagccaaacagaagcgcctgcgagagaagcaggcgactctggaggctgagatagcaggggagagcaagtcacctgcagaatccattaaggcctggaggcctaaggagttagtattgtatgaaatccctacgaaacccggtgaaaagaaagatgtctctgggcccctgcctcctgcatacagcccccgatatgttgaggctgcctggtacccgtggtgggtacgagagggcttcttcaaaccagaatatcaggcccggctgccccaagctacaggggagaccttttccatgtgtatcccacctcccaatgtcactggctccctgcacattggccacgcactcacggtggccatacaggatgccctcgtgcgctggcaccggatgcgtggggatcaagtgctgtgggtccctggttcagatcatgcaggaattgctacacaagctgtggtggagaaacaactgtggaaggaacggggagtgaggagacatgagctgagccgggaggccttccttagggaggtgtggcagtggaaggaggcgaaaggtggagagatctgtgagcagctgcgagctctgggtgcctccctggactgggatcgagagtgttttaccatggatgttggctcctcagtggctgtgactgaagcttttgtgcggctctacaaggcggggttgctgtaccggaaccatcagcttgtcaactggtcatgtgctttaagatcagccatctcggacattgaggtggagaaccggcccctgcctggccacacacagcttcgactgcctggctgccccacccccgtgtcttttggcctcctattttctgttgccttccccgtggatggagagcctgatgcagaggttgtggtaggaaccacaaggccagagacgctgcctggagatgtggctgtggccgttcatccagacgactcgcgatacacacatctacacgggcgacagcttcgtcaccccttgatggggcagcctcttcccctcatcacagactatgctgttcagccacatgtgggcacgggggcagtgaaggtgactccagctcacagtcctgccgatgctgagatgggggcccgacatggcttgagccccttgaatgtcattgcggaggatgggaccatgacctccctctgcggggactggctgcagggtcttcaccggtttgtggcccgggaaaagataatgtctgtgctgagtgaatggggcctgttccggggcctccagaaccaccccatggtactgcccatctgcagccgttctggggatgtgatagaatacctgctgaagaaccagtggtttgtccgctgccaggaaatgggggcccgagctgccaaggctgtggagtcgggggccctggagctcagtccctccttccaccagaagaactggcagcactggttttcccatattggggactggtgtgtctcccggcagctgtggtggggccatcagattccagcctacctggttgtagaggaccatgcgcagggagaagaggactgttgggtggttgggcggtcagaggctgaggccagagaggtagcagcggaactgacagggaggccaggggcagagctgaccctggagagggatcctgatgtcctagacacatggttttcttctgccctgttccccttttctgccctgggctggccccaagagaccccagaccttgctcgtttctaccccctgtcacttttggaaacgggcagcgaccttctgctgttctgggtgggccgcatggtcatgttggggacccagctcacagggcagctgcccttcagcaaggtgcttcttcatcccatggttcgggacaggcagggccggaagatgagcaagtccctggggaatgtgctggacccaagagacatcatcagtggggtggagatgcaggtgctgcaggaaaagctgagaagcggaaatttggaccctgcagagctggccattgtggctgcagcacagaaaaaggactttcctcacgggatccctgagtgtgggacagatgccctgagattcacactctgctcccatggagttcaggcgggcgacttgcacctgtcagtctctgaggtccagagctgccgacatttctgcaacaagatctggaatgctcttcgctttatcctcaatgctttaggggagaaatttgtgccacagcctgctgaggagctgtctccctcctccccgatggatgcctggatcctgagccgccttgccctggctgcccaggagtgtgagcggggcttcctcacccgagagctctcgctcgtcactcatgccctgcaccacttctggcttcacaacctctgtgacgtctacctggaggctgtgaagcccgtgctgtggcactcgccccgccccctggggccccctcaggtcctgttctcctgcgctgacctcggcctccgcctcctggccccactgatgcccttcctggctgaagagctctggcagaggctgccccccaggcctggttgcccccctgcccccagcatctcggttgccccctaccccagcgcctgcagcttggagcactggcgccagccagagctggagcggcgcttctcccgggtccaagaggtcgtgcaggtgctaagggctctccgagccacgtaccagctcaccaaagcccggccccgagtgctgctgcagagctcagagcctggggaccagggcctcttcgaggccttcttggagcccctgggcaccctgggctactgtggggctgtgggcctgttacccccaggcgcagcagctccctccggctgggcccaggctccactcagtgacacggctcaagtctacatggagctgcagggcctggtggacccgcagatccagctacctctgttagccgcccgaaggtacaagttgcagaagcagcttgacagcctcacagccaggaccccatcagaaggggaggcagggactcagaggcaacaaaagctttcttccctccagctggaattgtcaaaactggacaaggcagcctctcacctccggcagctgatggatgagcctccagccccagggagcccggagctctaactcatcatccccatcagttttcctccctctcagacctgtctttgaggacaaacagatttgtcagctgtcagggtgcagtgggacgtcagagactatgtggtccatcgccttcattgtgtaaatgaggacacagactggcttggtcgcagtgactgtggtgtccttgagatgctcacattactgcccggcctgcctcccacctggaagtctgggaatgaggagattgagataaacttttgaaatccc

SEQ ID NO: 65496 - protein, 1483 aa, Artificial Sequence
  derived and/or modified sequence
MLHLPLPRSGRTVNFPRSWDESSSISSGLSDASDNLSSEEFNASSSLNSLPSTPTASRRNSTIVLRTDSEKRSLAESGLSWFSESEEKAPKKLEYDSGSLKMEPGTSKWRRERPESCDDSSKGGELKKPISLGHPGSLKKGKTPPVAVTSPITHTAQSALKVAGKPEGKATDKGKLAVKNTGLQRSSSDAGRDRLSDAKKPPSGIARPSTSGSFGYKKPPPATGTATVMQTGGSATLSKIQKSSGIPVKPVNGRKTSLDVSNSAEPGFLAPGARSNIQYRSLPRPAKSSSMSVTGGRGGPRPVSSSIDPSLLSTKQGGLTPSRLKEPTKVASGRTTPAPVNQTDREKEKAKAKAVALDSDNISLKSIGSPESTPKNQASHPTATKLAELPPTPLRATAKSFVKPPSLANLDKVNSNSLDLPSSSDTTHASKVPDLHATSSASGGPLPSCFTPSPAPILNINSASFSQGLELMSGFSVPKETRMYPKLSGLHRSMESLQMPMSLPSAFPSSTPVPTPPAPPAAPTEEETEELTWSGSPRAGQLDSNQRDRNTLPKKGLRYQLQSQEETKERRHSHTIGGLPESDDQSELPSPPALPMSLSAKGQLTNIVSPTAATTPRITRSNSIPTHEAAFELYSGSQMGSTLSLAERPKGMIRSGSFRDPTDDVHGSVLSLASSASSTYSSAEERMQSEQIRKLRRELESSQEKVATLTSQLSANANLVAAFEQSLVNMTSRLRHLAETAEEKDTELLDLRETIDFLKKKNSEAQAVIQGALNASETTPKELRIKRQNSSDSISSLNSITSHSSIGSSKDADAKKKKKKSWLRSSFNKAFSIKKGPKSASSYSDIEEIATPDSSAPSSPKLQHGSTETASPSIKSSTSSSVGTDVTEGPAHPAPHTRLFHANEEEEPEKKEVSELRSELWEKEMKLTDIRLEALNSAHQLDQLRETMHNMQLEVDLLKAENDRLKVAPGPSSGSTPGQVPGSSALSSPRRSLGLALTHSFGPSLADTDLSPMDGISTCGPKEEVTLRVVVRMPPQHIIKGDLKQQEFFLGCSKVSGKVDWKMLDEAVFQVFKDYISKMDPASTLGLSTESIHGYSISHVKRVLDAEPPEMPPCRRGVNNISVSLKGLKEKCVDSLVFETLIPKPMMQHYISLLLKHRRLVLSGPSGTGKTYLTNRLAEYLVERSGREVTEGIVSTFNMHQQSCKDLQLYLSNLANQIDRETGIGDVPLVILLDDLSEAGSISELVNGALTCKYHKCPYIIGTTNQPVKMTPNHGLHLSFRMLTFSNNVEPANGFLVRYLRRKLVESDSDINANKEELLRVLDWVPKLWYHLHTFLEKHSTSDFLIGPCFFLSCPIGIEDFRTWFIDLWNNSIIPYLQEGAKDGIKVHGQKAAWEDPVEWVRDTLPWPSAQQDQSKLYHLPPPTVGPHSIASPPEDRTVKDSTPSSLDSDPLMAMLLKLQEAANYIESPDRETILDPNLQATL

SEQ ID NO: 65497 - DNA, 4452 bp, Artificial Sequence
  derived and/or modified sequence
atgctgcacctgcccctgccccggagcggcaggacagtaaatttccctaggagctgggatgaatcttcctcaatctcatccggtctgagtgatgcatctgacaatctgtcttcggaagaatttaacgccagctcgagcctcaattctcttccctctaccccgaccgcttcaaggcggaactcaactatcgtgctgcgcactgactccgagaaacggagcctggccgaatccggcctctcttggttctcagaatctgaagaaaaagctcccaaaaagctagaatacgacagcggcagtctcaagatggaaccggggacgtctaagtggagacgcgagaggcctgaatcttgtgatgattcctccaaaggcggggagctgaaaaagcccatctcgctggggcatccaggctccctcaagaaggggaagactccccccgtggctgtaacatcccctatcacgcacactgcgcaatccgccctcaaagtggccggaaagcctgagggaaaagccactgataaaggcaaattggccgtgaagaacacaggtctccagcgatccagctcggatgctgggcgcgataggttgtccgacgccaagaagccacctagtggaattgcccggccgtcaaccagcgggagcttcggctacaagaagcccccccccgccaccggcaccgccaccgtcatgcaaactggaggcagtgcaactttgtcgaagatccaaaagtctagtgggatcccagttaagccagtgaacggaagaaagacaagtctggatgtgagtaattccgccgagccagggtttttggcacccggtgcacgttctaacattcagtatcggtcactacctcgtcctgccaaaagctcgtccatgagtgtaacagggggcagaggcggccccaggcccgtgtcctcctccattgacccctccctcctctcaaccaaacaaggggggttgaccccttcccggcttaaggaacccactaaggtagcttctggaagaacgacccccgctcccgtcaatcagaccgaccgggagaaggagaaggccaaagctaaggcggtggcactcgactctgacaacattagtctgaagagcattggaagccccgagtccaccccaaaaaaccaggcttctcaccccacagccacgaagcttgcggaactcccccccacacccctgcgcgctactgcgaaatctttcgtgaaaccgccaagtctggctaaccttgacaaggtcaattcgaattctctggatcttccctcgtctagtgacaccacgcacgccagcaaggtccctgatttgcatgccacgagctctgcttccggaggtcccctgccgtcatgctttactccaagccctgccccaattctgaacatcaattccgcttcattctctcaagggctcgaactcatgtctggctttagcgtgccgaaagagacccggatgtaccccaaacttagtggtctgcataggtctatggagtccctgcagatgcctatgtctcttcccagcgcttttccctctagcacacccgtgcctacacccccggccccaccagcggcccctaccgaggaggaaacagaggagctgacctggagtggctcccctcgagctggtcaacttgactcaaatcagagggaccgcaacactctgccaaagaagggactgaggtaccagctacaaagtcaagaggaaaccaaggaacggcgccactcacatactattgggggactcccagagagcgatgaccagtctgagttaccttcacccccggcgctgcccatgtcactttctgcaaagggacaattaactaacattgtgtccccaacagcggcaacaactccccgaattaccagaagcaactccattcccacacatgaagcggcctttgagctttactccgggtctcagatgggaagcacgctctcccttgccgagcgtcccaaagggatgatccgcagcggctcatttagagaccctacagatgatgttcatggctccgtgctgtcactggcctcaagcgccagttccacgtacagctccgccgaagagcgcatgcagtctgaacaaattaggaagctgaggagagagctggagagttctcaggagaaggttgctacgctaaccagtcagctgtccgctaacgccaatctggtagcagcttttgaacaatcgctggtaaacatgacctccaggctgaggcatctagccgagacagctgaggagaaggatactgaattgctggacctgcgggagaccattgacttcctgaagaagaaaaacagcgaagcccaggccgtgatccaaggcgcactcaacgccagcgagacaacaccaaaggagttacgcattaaacgacaaaactcttcggatagtataagctccctcaactccattacatcgcacagcagcatcggaagttctaaagacgcggacgccaagaagaagaaaaagaaatcctggctccgcagctcgttcaataaagcattttccatcaagaaggggcccaaaagtgcgagctcctactccgatatagaagagattgccacgcccgactcgagcgctccaagcagtcccaaactacagcacggaagtactgagactgctagcccctcgattaaaagcagcacatcttcaagtgtcggcaccgatgtgactgagggcccagcgcatccagccccacacacgaggctatttcatgccaatgaggaggaagagcctgaaaaaaaggaagtgtccgaattgcgatccgaattgtgggagaaggaaatgaagcttacagacatccgcctggaagccctgaattcggcccaccaacttgaccagttaagagagactatgcataacatgcagttagaggtggacttgcttaaagctgaaaacgataggctgaaggttgcccctggtccgagctcaggatccacacctggccaagttcccggctcttcggccctgtccagccccaggaggagcttggggctggccttgacacacagcttcggccccagtctcgccgataccgacctcagtccgatggacgggatctctacctgtggtcctaaagaagaggtgactttacgggtggtggtgagaatgccaccccagcatattatcaagggcgacctcaagcagcaagaatttttcctggggtgttctaaggtgtcgggcaaggtggattggaaaatgctcgacgaggcagtgtttcaggtgtttaaagactacattagcaagatggatcccgcttcaacactgggtctgagtactgagtccatccatggctacagtataagccatgtgaagcgcgtcttagatgccgagcctccagaaatgcccccttgcaggcggggtgtgaacaatatttctgtctctttgaaaggtctaaaagagaaatgtgtggacagcctggtattcgaaaccttaattcccaagccaatgatgcagcattatatttcactgctactgaaacataggcgtcttgtcctttctgggcctagcggaacaggcaagacttacttaacgaacagactagctgaatatctggttgagcggtccgggagagaagttaccgaaggcattgtctctacgtttaacatgcatcagcagtcttgcaaggacctgcagctttacctctcaaacttggcaaaccagattgatcgggaaaccgggataggcgacgttccactggtaatccttcttgacgatctgtctgaagcggggagtattagcgagctggtgaatggagcccttacctgtaagtaccataaatgtccctacattatcgggaccacaaaccagcctgtgaaaatgactccaaatcacggattacacctctcgttccggatgttgactttctcaaacaacgtggaacccgctaacggttttctggtccggtatcttcgccggaaacttgtcgagtcagattccgacataaatgcaaataaagaggagttgctacgcgttttggactgggtgccaaaactctggtaccatttgcacacttttctagagaaacattctacgtctgactttctgatagggccttgtttttttctgtcttgcccaattggaattgaggactttaggacatggttcatcgatttatggaacaatagcattattccttatttacaggagggagcgaaagatggtataaaggtgcacggccagaaggccgcttgggaagatccagtagagtgggtacgtgatactctgccatggccgtcagctcagcaagaccagagtaaattataccacttgcctccgccgacagtcggaccacactctatcgctagccccccagaagacagaactgtgaaagacagtactccatcctcacttgattccgaccctcttatggctatgcttcttaaactacaggaggcagccaactacattgagtctcccgatcgggaaactattctggatccaaatctgcaagctactctctag

SEQ ID NO: 65498 - DNA, 4452 bp, Artificial Sequence
  derived and/or modified sequence
atgctgcacctgcccctgcccaggagcggccgcacagtgaacttccccaggtcctgggatgagagcagcagcatcagcagcggcctgagtgatgccagtgacaacctgagcagcgaggagttcaatgccagcagcagcctgaacagcctgcccagcacccccacagccagcagaagaaacagcaccatcgtgctgaggacagattctgagaagaggagcctggccgagagcggcctgtcctggttcagcgagagcgaggagaaggcccccaagaagctggagtatgattctggcagcctgaagatggagcccggcaccagcaagtggaggcgggagaggcctgagagctgtgatgacagcagcaagggcggggagctgaagaagcccatcagcctgggccaccctggcagcctgaagaagggcaagaccccacctgtggccgtgaccagccccatcacccacacagcccagagcgccctgaaggtggccggcaagccagagggcaaggccacagacaagggcaagctggccgtgaagaacacaggcctgcagaggagcagcagtgatgctggccgggaccggctgagtgatgccaagaagcccccatctggaattgcccggcccagcaccagcggcagctttggctacaagaagcccccaccagccactggaacagccaccgtgatgcagacaggaggcagcgccaccctgagcaagatccagaagagcagcggcatccctgtgaagcctgtgaatggaaggaagaccagcctggatgtgagcaacagcgctgagcccggcttcctggcccctggggcccggagcaacatccagtaccgcagcctgcccaggcctgccaagagcagctccatgtctgtgactggaggccggggcggccccaggcctgtgagcagcagcattgaccccagcctgctgagcaccaagcagggcggcctgacccccagccggctgaaggagcccaccaaggtggccagcggccgcaccaccccagcccctgtgaaccagacagaccgggagaaggagaaggccaaggccaaggctgtggccctggacagcgacaacatcagcctgaagagcatcggcagccctgagagcacccccaagaaccaggccagccaccccacagccaccaagctggccgagctgccccccacccccctgcgggccacagccaagagctttgtgaagccacccagcctggccaacctggacaaggtgaacagcaacagcctggacctgcccagcagcagtgacaccacccacgccagcaaggtgcctgacctgcacgccaccagcagcgccagcggcggccccctgcccagctgcttcacccccagccctgcccccatcctgaacatcaacagcgccagcttcagccagggcctggagctgatgagcggcttctctgtgcccaaggagaccaggatgtaccccaagctgagcggcctgcaccgctccatggagagcctgcagatgcccatgagcctgcccagcgccttccccagcagcacccctgtgcccaccccaccagcccctcctgctgcccccacagaggaggagacagaggagctgacctggagcggcagccccagggctggccagctggacagcaaccagagggacaggaacaccctgcccaagaagggcctgcgctaccagctgcagagccaggaggagaccaaggagcggcggcacagccacaccatcggcggcctgcctgagagtgatgaccagagcgagctgcccagccccccagccctgcccatgagcctgagcgccaagggccagctgaccaacatcgtgagccccacagctgccaccaccccccgcatcaccaggagcaacagcatccccacccatgaagctgcctttgagctgtacagcggcagccagatgggcagcaccctgagcctggccgagcggcccaagggcatgatccgcagcggcagcttccgggaccccacagatgatgtgcacggctctgtgctgagcctggccagcagcgccagcagcacctacagcagcgctgaggagaggatgcagagcgagcagatcaggaagctgcggcgggagctggagagcagccaggagaaggtggccaccctgaccagccagctgagcgccaatgccaacctggtggccgcctttgagcagagcctggtgaacatgaccagccggctgcggcacctggccgagacagctgaggagaaggacacagagctgctggacctgcgggagaccatcgacttcctgaagaagaagaacagcgaggcccaggccgtcatccagggcgccctgaatgccagcgagaccacccccaaggagctgcgcatcaagaggcagaacagcagtgacagcatcagcagcctgaacagcatcaccagccacagcagcatcggcagcagcaaggatgctgatgccaagaagaagaagaagaagtcctggctgcggagcagcttcaacaaggccttcagcatcaagaagggccccaagagcgccagcagctacagcgacatcgaggagatcgccaccccagacagcagcgcccccagcagccccaagctgcagcacggcagcacagaaacagccagccccagcatcaagagcagcaccagcagctctgtgggcacagatgtgacagagggccctgcccacccagccccccacaccaggctcttccacgccaatgaggaggaggagcctgagaagaaggaggtgtctgagctgcggtctgagctgtgggagaaggagatgaagctgacagacatccggctggaggccctgaacagcgcccaccagctggaccagctgcgggagaccatgcacaacatgcagctggaggtggacctgctgaaggcagaaaatgaccggctgaaggtggcccctggccccagcagcggcagcaccccaggccaggtgcccggcagcagcgccctgagcagcccccggcgcagcctgggcctggccctgacccacagctttggccccagcctggccgacacagacctgagccccatggatggcatcagcacctgtggccccaaggaggaggtgaccctgcgggtggtggtgaggatgccaccccagcacatcatcaagggggacctgaagcagcaggagttcttcctgggctgcagcaaggtgtctgggaaggtggactggaagatgctggatgaagctgtgttccaggtgttcaaggactacatcagcaagatggaccctgccagcaccctgggcctgagcacagagagcatccacggctacagcatcagccacgtgaagagggtgctggatgctgagcccccagagatgccaccctgcagaagaggagtgaacaacatctctgtgtccctgaagggcctgaaggagaagtgtgtggacagcctggtgtttgagaccctcatccccaagcccatgatgcagcactacatcagcctgctgctgaagcaccggcggctggtgctgagcggccccagcggcaccgggaagacctacctgaccaaccggctggccgagtacctggtggagaggagcggccgggaggtgacagagggcatcgtgtccaccttcaacatgcaccagcagagctgcaaggacctgcagctgtacctgagcaacctggccaaccagattgaccgggagaccggcattggagatgtgcccctggtgatcctgctggatgacctgtctgaggccggcagcatcagcgagctggtgaatggagccctgacctgcaagtaccacaagtgcccctacatcatcggcaccaccaaccagcctgtgaagatgacccccaaccacggcctgcacctgtccttcaggatgctgaccttcagcaacaacgtggagcccgccaacggcttcctggtgcgctacctgcggaggaagctggtggagagtgacagcgacatcaatgccaacaaggaggagctgctgcgggtgctggactgggtgcccaagctgtggtaccacctgcacaccttcctggagaagcacagcaccagtgacttcctgattggcccctgcttcttcctgagctgccccatcggcatcgaggacttccgcacctggttcatcgacctgtggaacaacagcatcatcccctacctgcaggagggcgccaaggatggcatcaaggtgcacggccagaaggccgcctgggaggaccctgtggagtgggtgcgggacaccctgccctggcccagcgcccagcaggaccagagcaagctgtaccacctgcccccacccaccgtgggcccccacagcatcgccagccccccagaggacagaacagtgaaggacagcacccccagcagcctggacagcgaccccctgatggccatgctgctgaagctgcaggaggccgccaactacatcgagagcccagaccgggagaccatcctggaccccaacctgcaggccaccctgtag

SEQ ID NO: 65499 - DNA, 4452 bp, Artificial Sequence
  derived and/or modified sequence
atgctgcacctgcccctgccccggagcggccggaccgtgaacttccccagatcctgggatgagtctagtagcattagtagtggactttctgacgcctccgacaatctgtcatccgaagaatttaacgcctcttcctccctgaacagtctgccatccacacccaccgcatcaagacgtaattcaacaatcgtccttcggactgactctgaaaaaagaagcctcgctgagtctggactgtcatggttttcagagagcgaggagaaggccccaaaaaagctggagtatgacagtgggtccctgaagatggagcccggcacgtcaaagtggcgtcgggaacggccagagtcgtgtgatgattccagcaagggcggagaactgaagaaaccaatctccttgggacatccagggagtttgaagaagggcaaaactcctccagttgccgtcacctctccaattactcacacggctcaaagcgccctgaaggtcgccggaaaacctgagggcaaagcgaccgacaagggaaaactggctgtgaaaaatacagggctgcaaagatcttctagtgacgcagggagagatagactcagtgacgccaaaaagcccccatctggtattgcgcgccccagtacatcaggctcctttggttacaaaaaacctccccccgcaacgggaactgccactgtcatgcagacaggtggttccgcaacactgtccaagatccagaagtcttcagggatcccagtcaagcccgtgaatggacggaaaacatcattagatgttagtaactccgctgaaccaggattcttggctcctggtgctaggtctaacattcagtaccggtccctcccaagacctgccaagtcatccagcatgagtgtgactgggggtaggggtgggcctcgcccagtgtcttccagcatagatccgtctttactctctacaaagcaggggggtctgacccccagccgactcaaggaacctaccaaggtggcctctggaagaacgacgccggcccctgtgaaccagaccgaccgggagaaggagaaagctaaggctaaggcagtcgccttggattccgacaacattagtctgaagagtatcggatccccagagtccaccccaaagaaccaggcatcgcaccctaccgcgactaagctggctgagttacccccaaccccgcttcgcgccacagctaaaagtttcgttaagccaccatcattagccaaccttgacaaagtgaattcaaattccttagacctgccaagctcatccgatacaacccacgcttctaaagttcccgacctgcatgccacctcttccgccagcggtgggcccctgcccagttgcttcaccccatcaccggcccccatcttaaatattaattcagcctctttctcccaggggctggagctgatgtctggattcagcgtgcctaaggaaacaagaatgtacccaaaattgtctggcctccaccggagcatggagagtctgcagatgcccatgtcacttccatctgcgtttccaagctccacccccgtccctactccacccgctccccccgctgcccccaccgaggaagagacagaggaactgacatggagcggaagcccacgggccggccagttagattcaaatcaacgcgacagaaatacccttcctaagaaagggctgcggtatcagctgcagtcccaggaagaaacaaaagaacggcgccattcccatactattggtgggctaccagaatcggatgatcagtcagagctgccttcaccccctgccctgcctatgagcctgagcgccaaggggcaactgactaatatcgtctctccaaccgccgcgacgacgcctcggattacccggagcaacagtatcccgacccacgaagccgcgtttgagctgtattctggcagccagatgggaagcaccttaagcctggcagagaggccaaaaggcatgattcggagcggctcattcagggaccccaccgatgacgtccatgggagcgtattgtccttagcctcgagtgcatcaagtacctattctagtgcagaagaacgtatgcagtcggagcagatcaggaagttgaggcgcgagctagagtctagccaggagaaggtcgccacactgaccagccagcttagcgctaacgcaaacctggttgccgcattcgaacagagcctcgtgaacatgacgtctcggttacgccaccttgcagaaacagccgaagagaaagatacagaactgcttgatctcagagagaccatcgactttttgaagaaaaagaattctgaagcccaggcagtcatccagggcgcactgaacgccagcgagactacaccaaaagagctacgcatcaaaaggcagaattctagtgatagtatttcctccctgaatagcattacctcccacagcagtattggcagtagtaaggacgccgacgccaaaaagaagaagaagaagagctggttaagatccagctttaataaagccttctctatcaaaaaaggcccgaaaagtgcaagctcctatagcgatatcgaggagatcgcaactcccgatagttctgccccgtcttccccgaagctgcagcacggctcaacagaaaccgcgagtcccagcatcaaatcatctacatcaagttctgtcggtacggatgtgacagaaggccctgcccatcctgccccacacactcgtttgtttcacgccaatgaggaagaggagcccgaaaagaaagaagttagtgagctgcggtcagaactctgggaaaaggagatgaaactgaccgacattcgccttgaagccctgaactccgctcatcagctggatcagctgagggagaccatgcacaatatgcagctggaagtcgacctcctgaaggccgagaatgatcgcctgaaggtagcccccggcccgtcgtcagggagtacccccggacaggttcccggcagcagcgctctaagctcccctcggaggtcactcggtctcgcattgacacattcgttcggcccttcactcgctgatacggacttaagtcctatggacggtatctcaacttgcggcccaaaagaggaggtcacattgcgtgttgtggtgaggatgcctccgcagcacataattaagggggatcttaagcagcaggaattttttttaggttgcagtaaagtatccggcaaggtcgattggaagatgctagacgaggcagtctttcaggtgttcaaggattacatttccaagatggatcctgcatccaccttgggtctttctacagagagtatccatgggtatagtatcagtcacgtgaaaagagtgctcgacgctgagccgcccgagatgcccccatgtaggaggggcgtgaacaacattagtgtcagcctaaagggtctcaaggagaagtgcgtggactccttggtattcgaaactcttattccaaaacccatgatgcaacactacattagcttactgctcaaacaccgccgcttggtcctgtccggtccttctgggaccgggaagacctatctgacgaaccgcctggccgagtatctagtggagcgcagtggccgggaagtcacagaaggcattgtgtccaccttcaatatgcatcagcagtcctgtaaggaccttcaactatacctctcaaacctagctaaccaaattgatagagagactggaatcggagatgtgccattagtgatactgctggatgatctctccgaggctggtagcatttcagagctggtgaacggggctcttacatgcaagtatcacaaatgcccctatatcatagggaccactaaccagcctgttaagatgactccaaatcacggactgcatctatcttttaggatgctgacatttagcaacaacgtggagcctgccaacggttttttggtgagatatctgcggcggaaactggttgagtctgactccgacatcaatgctaacaaggaagagcttcttcgagtgctggactgggtacccaagctctggtaccacctgcatacctttctggaaaaacattccacatctgacttcttaattgggccatgttttttcctcagctgtccaattggtattgaggacttccgaacatggttcattgatctttggaacaatagtattattccgtacctccaggagggcgctaaagacggcatcaaggtacacggtcagaaagcggcttgggaggatccggtggagtgggtgcgcgataccctgccatggcctagcgctcagcaggaccagtctaaactgtaccacctgccacctccaaccgtcggcccgcacagcatcgcttctccccctgaggaccgaaccgtgaaagactccaccccttcatccctggacagcgatcctctgatggcgatgcttctgaagctgcaggaggctgccaattatatcgaatcacctgaccgtgaaacaatattggacccaaatttgcaagcaacgctatag

SEQ ID NO: 65500 - DNA, 5353 bp, Artificial Sequence
  derived and/or modified sequence
ggagaaaagggagcggagggcaggcgagggttaggtttccgaccctccgcgtggcccacagctcataccttttcgggtgtccccgggtgtcaggcgagagcggtcctggggggcgctgggtgcccacccggtgaatggccgcctgagccggggaagatgcttcatctgcccctgcccagatccggaagaacggtgaatttcccccgcagctgggatgaaagcagctccatcagtagtggactcagcgatgcctcagacaatctcagttcagaagaattcaatgccagctcctcactcaactccctcccaagtactcccactgcttctcgcaggaactcaacaatagtgctacgcacagactcagagaagcgctcactggcagaaagtgggctgagctggtttagtgaatcagaggagaaagcccctaaaaaactggagtacgacagtggtagcctgaagatggaacctgggacttctaagtggcggagggagcggcctgagagctgtgatgattcatccaagggtggagaactgaaaaagcccatcagcctgggccaccctggttccctgaagaagggcaagaccccacctgtggctgtaacttcccccatcactcacacagcccagagtgccctcaaagtcgcaggcaaacctgagggcaaagctacagacaagggtaagcttgcagtgaagaatactgggctccaacgctcctcctctgatgctggtcgggaccgcctgagtgatgctaagaagcccccctcgggcattgctcgcccctccacttcgggatcctttggctacaagaagcctcctcctgccacaggcacagccactgtcatgcaaactggtggttcagccactctcagcaagatccagaagtcctcaggcatccctgtcaagccagtaaatgggcgcaagactagcttagatgtttccaacagtgcagagccaggattcctggctcctggagcccgttctaacatccagtaccgcagcctgccccggccagccaagtcaagttctatgagcgtgaccggcgggcggggtggacctcgccctgtgagcagcagcattgaccccagtctcctcagcaccaagcagggaggccttacgccttccagactgaaggagcctaccaaggtagccagtgggcggaccactccagcccctgtcaatcagacagatcgggaaaaggagaaggccaaagccaaggcagtggccttggactcagacaacatctccttgaagagtattggctccccagaaagtactcccaagaaccaagcaagccaccccacagccaccaagctggcagagctgccaccaacccctctcagggccacagcgaagagctttgtcaaaccaccctcactagccaatcttgacaaggtcaactccaacagtctggatctaccatcatccagtgataccacccatgcttcaaaggtcccagatctgcatgctacaagctcagcatctgggggccctctcccttcctgcttcacccccagtccggcacccatcctcaatattaactcagccagcttctcccagggcctggagctaatgagtggtttcagtgtgccaaaagagacccgcatgtaccccaaactctcaggcctgcacaggagcatggagtccctccagatgccaatgagcctccccagtgccttccccagcagtactcccgtccccaccccacctgctccccctgctgctcccacagaagaagagacggaagagctgacttggagtggaagccccagagctgggcaactggacagtaatcagcgggatcggaacactcttcccaagaaagggctcaggtaccagcttcagtcccaggaggagaccaaggagaggcgacattcccataccattggtgggctgcctgaatccgatgaccagtcagagctgccttctccccctgcacttcccatgtctctgagtgcaaagggccaacttaccaacatagtgagtcccactgcggccaccacgccaagaatcacccgctccaacagcatccccacccacgaggcggccttcgagctgtacagcggctcccaaatggggagcaccctgtccctggccgagagacccaagggaatgattcggtcaggatccttccgagaccccacggacgatgttcacggctcagtgctgtccctggcctccagtgcctcctccacctactcctcagctgaggagaggatgcaatctgagcaaatccggaagcttcgtagggaactggaatcatcccaggaaaaagtggccaccttgacgtctcagctttctgccaatgctaatctggtggctgcttttgagcagagcctggtgaatatgacatcccgcctgcgacacctggcagagacggccgaggagaaggacactgagctgctggatttgcgagaaaccatagactttctgaagaaaaagaactctgaggcccaggcagtcattcagggagcccttaatgcctcagaaaccacacccaaagaacttcggatcaagagacaaaactcctcagatagcatctcaagcctcaacagcatcactagccattccagcatcggcagcagcaaggatgctgatgcgaaaaagaagaaaaaaaagagttggcttcgaagttccttcaacaaagcgttcagtataaaaaaggggcccaagtcagcttcctcatactcggatatagaggagattgctacacccgactcttcagccccctcatcccccaaactacagcatggttctacagagactgcttcaccctccatcaagtcctccacctcgtcctccgtgggcactgatgtcaccgagggccctgctcacccagccccccacactaggctgttccatgcaaatgaggaggaggagccagagaagaaggaggtatcggagctgcgctctgagctatgggagaaggaaatgaagcttacagacatccgcttggaggccctcaactctgcccaccaactggatcagcttcgggagaccatgcacaacatgcagttggaggtggacctgctgaaagcagagaatgaccgactgaaggtagccccaggcccctcatcaggctccactccagggcaggtccctggatcatctgcattatcttccccacgccgctccctaggcctggcactcacccattccttcggccccagtcttgcagacacagacctgtcacccatggatggcatcagtacttgtggtccaaaggaggaagtgaccctccgggtggtggtgaggatgcccccgcagcacatcatcaaaggggacttgaagcagcaggaattcttcctgggctgtagcaaggtcagtggaaaagttgactggaagatgctggatgaagctgttttccaagtgttcaaggactatatttctaaaatggacccagcctctaccctgggactaagcactgagtccatccatggctacagcatcagccacgtgaaacgagtgttggatgcagagccccccgagatgcctccttgccgtcgaggtgtcaataacatatcagtctccctcaaaggtctgaaggagaaatgcgtcgacagcctggtgttcgagacgctgatccccaagccgatgatgcagcactacataagcctcctgctgaagcaccggcgcctcgtcctctcgggccccagcggcacgggcaagacctacctgaccaatcgcttggccgagtacctggtggagcgctctggccgtgaggtcacagagggcatcgtcagcaccttcaacatgcaccagcagtcttgcaaggatctgcaactgtatctttccaacctagccaaccagatagaccgggaaacaggaattggggatgtgcccctggtgattctattggatgacctgagtgaagcaggctccatcagtgagttggtcaatggggccctcacctgcaagtatcataaatgtccctatattataggtaccaccaatcagcctgtaaaaatgacacccaaccatggcttgcacttgagcttcagcaggatgttgaccttctccaacaacgtggagccagccaatggcttcctggttcgttacctgaggaggaagctggtagagtcagacagcgacatcaatgccaacaaggaagagctgcttcgggtgctcgactgggtacccaagctgtggtatcatctccacaccttccttgagaagcacagcacctcagacttcctcatcggtagcccttgcttctttctgtcgtgtcccattggcattgaggacttccggacctggttcattgacctgtggaacaactctatcattccctatctacaggaaggagccaaggatgggataaaggtccatggacagaaagctgcttgggaggacccagtggaatgggtccgggacacacttccctggccatcagcccaacaagacgacagcaccccaagttctctggactcagatcctctgatggccatgctgctgaaacttcaagaagctgccaactacattgagtctccagatcgagaaaccatcctggaccccaaccttcaggcaacactttaagggttcggcaatcactgtcacccccggacagcagaacgctggcatcagctatcttagctcctcctctcccctctcctctttcagagcactggctctccagccccaggaggagaacaggagggaggaggagatgaaagaggagggacaggttcttggtgctgtacctttgagaacttcctaggaaggaatggtggggtggcgtttgggaacttgtgccccctaaacacatttactggcctcctctaatgactttggggaaaagatgattctgggtctttcccttgacttcttgtttcaattacaaactcctgggctttctggggaggggttcagaaaacatcaaaacactgcagcagttcctaaatgattctcacaagcaaccctgagagagacagtcttgtgagggagatctgggggaggcaggaagctcctcagattttctcacagacccttcccaattccatcaccactgccaacaactcctcccccagagatctggctggagcccagaaaaagaagcatgtggtttaaaaaatgtttaaatcaatctgtaaaaggtaaaaatgaaaaacaaaaacaagcaaacaaacaaaaaacaatggaaaagatgaagctggagagagaggaaccagttgccaaggtagagagctgcccgctcctgccctctggatgacataggggacatcaacaagacggctgccaacctgagaagtcaccaaaccacaaaaataaccttacagccttcagggaaagactaccagctctgtctttctaccctctaatttaacaatgcataagagtcaataaaccctactttttt

SEQ ID NO: 65501 - DNA, 11645 bp, Artificial Sequence
  derived and/or modified sequence
ggagaaaagggagcggagggcaggcgagggttaggtttccgaccctccgcgtggcccacagctcataccttttcgggtgtccccgggtgtcaggcgagagcggtcctggggggcgctgggtgcccacccggtgaatggccgcctgagccggggaagatgcttcatctgcccctgcccagatccggaagaacggtgaatttcccccgcagctgggatgaaagcagctccatcagtagtggactcagcgatgcctcagacaatctcagttcagaagaattcaatgccagctcctcactcaactccctcccaagtactcccactgcttctcgcaggaactcaacaatagtgctacgcacagactcagagaagcgctcactggcagaaagtgggctgagctggtttagtgaatcagaggagaaagcccctaaaaaactggagtacgacagtggtagcctgaagatggaacctgggacttctaagtggcggagggagcggcctgagagctgtgatgattcatccaagggtggagaactgaaaaagcccatcagcctgggccaccctggttccctgaagaagggcaagaccccacctgtggctgtaacttcccccatcactcacacagcccagagtgccctcaaagtcgcaggcaaacctgagggcaaagctacagacaagggtaagcttgcagtgaagaatactgggctccaacgctcctcctctgatgctggtcgggaccgcctgagtgatgctaagaagcccccctcgggcattgctcgcccctccacttcgggatcctttggctacaagaagcctcctcctgccacaggcacagccactgtcatgcaaactggtggttcagccactctcagcaagatccagaagtcctcaggcatccctgtcaagccagtaaatgggcgcaagactagcttagatgtttccaacagtgcagagccaggattcctggctcctggagcccgttctaacatccagtaccgcagcctgccccggccagccaagtcaagttctatgagcgtgaccggcgggcggggtggacctcgccctgtgagcagcagcattgaccccagtctcctcagcaccaagcagggaggccttacgccttccagactgaaggagcctaccaaggtagccagtgggcggaccactccagcccctgtcaatcagacagatcgggaaaaggagaaggccaaagccaaggcagtggccttggactcagacaacatctccttgaagagtattggctccccagaaagtactcccaagaaccaagcaagccaccccacagccaccaagctggcagagctgccaccaacccctctcagggccacagcgaagagctttgtcaaaccaccctcactagccaatcttgacaaggtcaactccaacagtctggatctaccatcatccagtgataccacccatgcttcaaaggtcccagatctgcatgctacaagctcagcatctgggggccctctcccttcctgcttcacccccagtccggcacccatcctcaatattaactcagccagcttctcccagggcctggagctaatgagtggtttcagtgtgccaaaagagacccgcatgtaccccaaactctcaggcctgcacaggagcatggagtccctccagatgccaatgagcctccccagtgccttccccagcagtactcccgtccccaccccacctgctccccctgctgctcccacagaagaagagacggaagagctgacttggagtggaagccccagagctgggcaactggacagtaatcagcgggatcggaacactcttcccaagaaagggctcaggtaccagcttcagtcccaggaggagaccaaggagaggcgacattcccataccattggtgggctgcctgaatccgatgaccagtcagagctgccttctccccctgcacttcccatgtctctgagtgcaaagggccaacttaccaacatagtgagtcccactgcggccaccacgccaagaatcacccgctccaacagcatccccacccacgaggcggccttcgagctgtacagcggctcccaaatggggagcaccctgtccctggccgagagacccaagggaatgattcggtcaggatccttccgagaccccacggacgatgttcacggctcagtgctgtccctggcctccagtgcctcctccacctactcctcagctgaggagaggatgcaatctgagcaaatccggaagcttcgtagggaactggaatcatcccaggaaaaagtggccaccttgacgtctcagctttctgccaatgctaatctggtggctgcttttgagcagagcctggtgaatatgacatcccgcctgcgacacctggcagagacggccgaggagaaggacactgagctgctggatttgcgagaaaccatagactttctgaagaaaaagaactctgaggcccaggcagtcattcagggagcccttaatgcctcagaaaccacacccaaagaacttcggatcaagagacaaaactcctcagatagcatctcaagcctcaacagcatcactagccattccagcatcggcagcagcaaggatgctgatgcgaaaaagaagaaaaaaaagagttggcttcgaagttccttcaacaaagcgttcagtataaaaaaggggcccaagtcagcttcctcatactcggatatagaggagattgctacacccgactcttcagccccctcatcccccaaactacagcatggttctacagagactgcttcaccctccatcaagtcctccacctcgtcctccgtgggcactgatgtcaccgagggccctgctcacccagccccccacactaggctgttccatgcaaatgaggaggaggagccagagaagaaggaggtatcggagctgcgctctgagctatgggagaaggaaatgaagcttacagacatccgcttggaggccctcaactctgcccaccaactggatcagcttcgggagaccatgcacaacatgcagttggaggtggacctgctgaaagcagagaatgaccgactgaaggtagccccaggcccctcatcaggctccactccagggcaggtccctggatcatctgcattatcttccccacgccgctccctaggcctggcactcacccattccttcggccccagtcttgcagacacagacctgtcacccatggatggcatcagtacttgtggtccaaaggaggaagtgaccctccgggtggtggtgaggatgcccccgcagcacatcatcaaaggggacttgaagcagcaggaattcttcctgggctgtagcaaggtcagtggaaaagttgactggaagatgctggatgaagctgttttccaagtgttcaaggactatatttctaaaatggacccagcctctaccctgggactaagcactgagtccatccatggctacagcatcagccacgtgaaacgagtgttggatgcagagccccccgagatgcctccttgccgtcgaggtgtcaataacatatcagtctccctcaaaggtctgaaggagaaatgcgtcgacagcctggtgttcgagacgctgatccccaagccgatgatgcagcactacataagcctcctgctgaagcaccggcgcctcgtcctctcgggccccagcggcacgggcaagacctacctgaccaatcgcttggccgagtacctggtggagcgctctggccgtgaggtcacagagggcatcgtcagcaccttcaacatgcaccagcagtcttgcaaggatctgcaactgtatctttccaacctagccaaccagatagaccgggaaacaggaattggggatgtgcccctggtgattctattggatgacctgagtgaagcaggctccatcagtgagttggtcaatggggccctcacctgcaagtatcataaatgtccctatattataggtaccaccaatcagcctgtaaaaatgacacccaaccatggcttgcacttgagcttcaggatgttgaccttctccaacaacgtggagccagccaatggcttcctggttcgttacctgaggaggaagctggtagagtcagacagcgacatcaatgccaacaaggaagagctgcttcgggtgctcgactgggtacccaagctgtggtatcatctccacaccttccttgagaagcacagcacctcagacttcctcatcggcccttgcttctttctgtcgtgtcccattggcattgaggacttccggacctggttcattgacctgtggaacaactctatcattccctatctacaggaaggagccaaggatgggataaaggtccatggacagaaagctgcttgggaggacccagtggaatgggtccgggacacacttccctggccatcagcccaacaagaccaatcaaagctgtaccacctgcccccacccaccgtgggccctcacagcattgcctcacctcccgaggataggacagtcaaagacagcaccccaagttctctggactcagatcctctgatggccatgctgctgaaacttcaagaagctgccaactacattgagtctccagatcgagaaaccatcctggaccccaaccttcaggcaacactttaagggttcggcaatcactgtcacccccggacagcagaacgctggcatcagctatcttagctcctcctctcccctctcctctttcagagcactggctctccagccccaggaggagaacaggagggaggaggagatgaaagaggagggacaggttcttggtgctgtacctttgagaacttcctaggaaggaatggtggggtggcgtttgggaacttgtgccccctaaacacatttactggcctcctctaatgactttggggaaaagatgattctgggtctttcccttgacttcttgtttcaattacaaactcctgggctttctggggaggggttcagaaaacatcaaaacactgcagcagttcctaaatgattctcacaagcaaccctgagagagacagtcttgtgagggagatctgggggaggcaggaagctcctcagattttctcacagacccttcccaattccatcaccactgccaacaactcctcccccagagatctggctggagcccagaaaaagaagcatgtggtttaaaaaatgtttaaatcaatctgtaaaaggtaaaaatgaaaaacaaaaacaagcaaacaaacaaaaaacaatggaaaagatgaagctggagagagaggaaccagttgccaaggtagagagctgcccgctcctgccctctggatgacataggggacatcaacaagacggctgccaacctgagaagtcaccaaaccacaaaaataaccttacagccttcagggaaagactaccagctctgtctttctaccctctaatttaacaatgcataagagtcaataaaccctacttttttatttttggtttttattttgttttcatttttttctcccatttgcctatttatttttttgtttcccttttttttttctttttccgtttttccatttcctcacatgtccacgagatgcttgggttgcttttccaggggctagtttggcttttccaagtgggttttctttggagaatctgatgccatgcaattggcatgacacctgccatgccactatctttggcatccatggggcttatatgagacatgaagcattggctcagaagtagagggagaagaggaacccagttcccttgacttcccttttgagagcacacgttctgctgggtagctcaattgccagcctctgtcatgagaaggtatagccccatcttgatagaagagttactccgagctttatcatggaccagaggaaaaccagaaaactgaaaacattcctctgtcttgtggccagtttggcctttcactgcactattctgatggtgcctgactgaatccaaatatcctagctggctcttactatttttcacaaatgagtattcacatataagagatgaacatccatgtgagatcatcccaatcagaatataagactcaaggagtttgacttggtggccaatacctgccttccaaagagatcctacctttgcagatttgctcctttcccattgccttgaaggtctggcaatccctgttctttcatttgacaagtacttactgagtactcactatatacaaatcattaggttaaaacagacacacacacacacacacacacacacacacacacacacacacacacaagacctgggcccttaagtttacagtccagcaggaaatgttaacctccattcagctacgcccccttgttatctagaccttcgggatcatctaagaaatgtagctgaaacccaaggagccagctagaaagaagcttttgattagatgtacaatacattgggggcagaagatctgggatcaattaagatggagcctgaaggactatggaatcttgcttgtcaggaatgggcaagtctacttcctgccatttctgaaagccccgcgggaccagcttctaggctgagctgcctagtaggctgaagcttcaggactctgcaggtcaaggatatgtgatgagcaccggcctaagtgtttgctcttcagattcctaagtagcacaagactttatcagaatctataggcataccaacctggatcactcttccacccaaccgaggagtagatgcatctgaatcttcatatcggtatattaagtccaaaagatggtccgggctgcccctcacaaaagcttctgcatccacgtggtaagctcccatggatgacagggttctgtatgatggagactattattgctattgctgctaattccatgagctgtgaagatccctaaccaactcagctgtaacatatgcaattctgtggtgggaagaggctgtgtgtccaaggatggtgctgaaatcactgccttaaggtctctgctgtgcagaatgaggaggcccccgagctggctgttctaacttagaaggaagagaagactggatgggcctgcttgggatctaggcctcttctaaaccctatcctaagctccagttccatggcaaggctcagacttttaatgccatcttaatctgatggttgagcgcttcactctattttctggtgctgcccagccagtgccttctgccatggatgttactggctacttgagaaaaaggagaggggagaaccccttctttcattccaactgcctccgaccccaaagggattcttggctctctggtaaccatggataccaccatgaattttatttggatcctcagcaggttgattctggaggcctcatgctatgactttttatttctcttcctgggatccaccaccctctactctcagctgactgctgcatttaggccaggtctccaattgctttcctccagaaagtgtgttcccgtctagtgaggtagtattgaagcctcggctttccctctggagcctgggaccctgtttacagttgcacatctgggcccctcactgtggggattgatcattctcatgaaggaatcacagttatatggcaactgcagaaggctgagcctcctcatggtgctataaccccttgggacactcatccagacttctctgaagcagaaaacctgagctccccactcactgccctagaatttatggcaaggagcaaatctacagcattctctcccacctacgtcctgcttcttggttgagactactgggatccttcagaaaagaaacactgggtcccatagctaaattctcaaccgccaggcaccttcagaagaatccagcctaatactggaatttgtgctattatcttcctctccagccccccaactccatccctcaccacagttgtctaggaaatgacatgaattcaatatctaatgtcaaccaatggggagagccacaactccaggagaggttcctgagctgagtcccttaatttctggatgaagaagaccaacaagttttgtccaatgtatttgtttctcagaccttgcctaggcactaaaaataaaatactaggtcattggaggctaatgtgggacctgatgtctgcgtgtgtgtgtgtgtgtgtgtgtgtgtgtgtctccctctctcacacacacaagagcagtttgctgttgctgtttcctaccttctgaggcttcaaagtattttttaaaatctatgctttgtggcagctctacggtgcttatctctgtctttgtgtcaatccttaagtacccatgtctttttcatgtctaaccattgggaaggtagaggctggcagggaagacaaatctgctacaagtccatgggaagaccctacaatgaaatgttcattggttggtatactgttttagtcttgaattgccaactttccaactgatctatccatattccttaagtactaaagacaaaatagagggcttctttttctctcttaatgtcttgccttctggttttcctggtttgcaagactaagtgtacctaatctcaccatctcttcacttctagctctctgaaacaagggtcacactactcagagggataaccccttacagtggtctgaggagtaactatttcctaaagtattctaaaagagtaggaagagagaaatggtagcctgctgcttctcacagacacctcacatcctcacttgggatggcatccacatagaaaccctgcatttaggtaaaatttgcctgactgaaggggactcagtcctccaaatcaaggtcaagaagatatctgcatgagaccttaagaactctttattgccattatttggagagggcgggggaattgtcctaatcacacatttaacacagggaataagtgctgaagtgacccagatcaccaagcgcagttcctcatcatactttatttttgctttccttattccttggcactgactaagctaaagttaagaagccgacttcataagccaacccctgtgatgggatggaaaaatgggcttttgcagagggtttattaatagagatggatatactactcacaagttctggctcatggctccactgagaaggccatagtaataaaatgatcttatgaacactgttccccaaaggccaaagcctgaagatattgccccttataatccaatcagccttatattttaataagtcctgaatcaacctgactacggatatatggggccaccagggtgcatgggtgcatgtctgctcagcctagccctggaagtgagcactgccggccacagatcctgggaaaggtggtagtaacccagaagatgtagccttgaagggaggatacctatcaaaatgccaaagctgcagggacacgaagacggttgaaaattcaacctgtgtatactagatccttccagtttgatggtttggtcattcttcttcatgattataccatggagaattttctgtgacaagggtggtcatggaagtaagtgagtgatcccctggtttctcattccttaaagcagtggttcgcaaagtatggcacaagaccagcagcatcagcagcctttgggaacttgttagaaacgaaaattctcaatcccatcccagatctgctgaatcagaaactctaatgagaggacccggcaatccacgttttaataagccctcctggtgattctgatgcacactaaattcaactgttttaaagggaaagccctttatagtattggagttcccacactgagaggctttggggcccaaaataagaaggttctaggttgtcattcagactttaacattaatttcaaagtcacctttctcatgcttccttgtgtttctgtttttccatttatgattttaacaaagaaaggtatgtgtgcttttgggtggaagttaggagaatgtttgtgtctttcctagttgaatacaaccttcagagaaaaaccttatgccttggaaattactacctggcacacaaaggggcttcaacaaggaaaagcagttggaggtctcttccagattgctcttctgccgaattatttgtatctattccgagctgattatgtaataggatggaaaaagtaaaaaaaaaaaaaaaaatctaatttgtatttccatgacaacgtgttctcccagcaacatccctctcctttatttgagttataaagggcactgctgggcctgagaaccaggccagaacctccttctgtatggcagctaacagtgtagggctccagtatcccaggaaggccccttatccacactccactcagctcataggagagtcttgcataatgaagacacagacctgggcacttcagtccttgtgctcctcctctcttttccccacagcaggacctggatacagaagtactcagccaaggtgacagaataaaatcctttttttgttgttttctgtttgtttgtttgttttggagaaggagtctcgctttgtcacccaggctggtgtgcagtggcacgatctcggctcactgcaacctccgcctcccaggttcaagcgattctcctgtctcagcctcctgagtagctgggattacagacgtgcgccatcacgcccagctaatttttgtatttttagtagatacggagttttgccttgttggccaggctgtgctggagctcctgacctcaggtgattcacctgccacagcctcccaaagtgctgggattacaggcgtgagccacagcaccctgccaaataagatcctttttaaaaaatatctgaaaaaagcttcatatctttacaaactcataaaatagctgattgggccatggaggagatgaggctgtttagaactggttttgtttcaagtttgtcaattttccctgtatgagaacttgggtaaagcacaaagaaacatacagtgctagtaacaggtctcctgcgccctggaactaagtgtttggaggaaggactaaaccccgggggaggtgagtataaaataattccactaagatcacctcctcagtccccagaaggctgatggtggatcctctggccatctcctgtggggtcttactgctcctctgccatttctctatgcctgaagacacgaagatgatatcaaggcagagctaccatatcgcagccagtctctaggctactgctgtgcagtggctcccactttctaatgcttttttgtttttgctttttctaacaaaacaatcttttttcaaaatgaattccaacccctgctagcttccttccccgcctccatactgttttaggcagcaccgtttatgtgacagagtccgtgtttctcaaatgcatggtgttcctcaggtggagagtgggcagaagtttttgcaacactttttttttaagttattgggtgcaaaatcccaaaccaggatatgtgtatgtctgtgtgtttatgttttttatttgaccctcccctctttcaacctacccccttttatatctaatgtagaaaaagcgaaattgaatctggaaagcaaactgttgtatatagttgcggtaacaatcatgaagagagagccgggctgtcccctcagtaattcattttaaataacaaattatttaaaaataaaattcatgccagagccagctgaagaggccttccttcatcaccactgaggccacccccaatctgggccctctgtccatctggcatgtctcctcccagcaagattcatctgttcaatgccatttgcgtttcaataaagttatctcctgtactgtc

SEQ ID NO: 65502 - DNA, 4451 bp, Artificial Sequence
  derived and/or modified sequence
atgctccatctgcccctgcctcgctctggaaggaccgttaactttccccgaagctgggacgagtcatcctccatctcctctgggctgagcgacgcttctgacaacctgtcttccgaggagttcaacgcaagtagcagtctgaattctctcccttctacacctaccgcgtcgaggcgcaactcgaccatcgtcttgcggaccgactccgagaaacgctccctcgccgaaagtggcctttcgtggttctcggagtctgaggaaaaggccccaaagaaactcgaatatgactcaggcagcctgaagatggagccaggcacttctaagtggagaagggagaggcccgagtcttgcgacgactcttctaaggggggagagctgaagaaaccaatcagcctgggacatcccggttcacttaaaaaggggaagacacctccggtggcagtcacatcacctattacgcacacggcccagtctgcccttaaagtcgccggtaaacccgaaggaaaggccacggacaaggggaaactcgctgtcaagaacactggcttacagcgctccagcagtgatgcgggtagggaccgtctgtcggatgcgaaaaagcctcccagtggaatcgctcgaccttcgaccagcgggagctttgggtataaaaaaccccctcctgcaaccggtaccgcaaccgtaatgcagacaggagggtcggccacactctcgaagatccagaagagctctggcatccccgtgaaaccggtgaacggacgaaagactagtctggatgtaagtaatagcgcagagccgggttttcttgctcccggagcaaggagcaacatccaataccgctctctgcctagacctgcgaaatcgtcttcaatgtctgtgacaggcggtagaggaggtccacgacccgtatcttcatcgattgacccttctttgttgagcaccaagcaaggtggccttactccttcccggctcaaggagcccactaaagttgcctcaggacgaacgacaccggcacctgtcaatcaaacagacagagaaaaggagaaagctaaggcgaaagcagtggccttggatagcgataatatctcacttaaatcgatcgggtcacctgagagcactccgaaaaatcaggcttctcaccctaccgctactaagctcgccgagctgcctcccacaccactacgggctacagcaaagtcatttgtcaaaccccctagccttgccaacctagacaaggtgaactcgaatagcctcgatttgccttcaagctctgatactacccatgcaagcaaagtcccagacctgcacgccacatcctctgctagcggtggcccactgccatcgtgcttcaccccttctcccgcacctatccttaacattaattcggcttcgttctctcagggacttgagctgatgtctggattttccgtcccgaaagaaacgagaatgtaccctaagctctccggtcttcatcggtccatggagagtctccagatgccgatgtccctgccctcagcttttcccagtagcactcccgttcccacgcctcctgcaccccctgcggctcctacagaggaggagacggaggagctcacctggagcggttcgcccagagctggacagctcgattcaaaccagcgagatcgcaacactttgccgaaaaaagggttgagataccagctgcagtcccaggaggagaccaaagagcggagacactctcacactataggagggctgcccgagtccgacgaccagagcgaattgccgtcaccaccggcactgccaatgtctttgtccgcgaagggccagttgactaacatcgttagtccaacagctgctaccaccccacgcatcaccaggtcaaactccatcccgacccatgaagcagctttcgaactttactctgggtcccagatgggatccacattaagcctcgcagagaggcctaaggggatgattaggtccggaagcttcagggacccaacagatgatgtccacggatccgtcctgagtcttgcctcctccgccagctccacctattctagtgctgaagagaggatgcagtcggagcagatcagaaagctgcgacgggaattagagtcctcccaggagaaggtggctactctaacgtcacaattgtcagctaacgcaaacctggtagccgctttcgagcagagcctggtcaacatgacgagcaggctgagacacctggctgagaccgcggaagagaaagacacagaactgctcgaccttagggagaccatagattttctaaagaaaaagaactcggaagctcaggccgtgattcagggagcactgaatgctagcgagacaactcctaaggaactgcgaattaaacgccagaactctagtgattctattagcagtctgaacagcataacttctcacagctcaatcggctcctctaaggacgccgacgccaagaagaagaaaaagaagagttggttgaggtcatcctttaataaggcgttctctatcaaaaagggccctaaaagcgcttcctcatactctgatattgaagaaattgcaactcctgactccagcgcccctagtagcccaaaactgcagcatgggagcactgagacagcctcaccttcgatcaaatctagcacgtctagcagcgtcgggaccgacgttaccgaaggcccagctcatccagccccacatactagactgtttcatgccaacgaagaggaggagcctgagaaaaaagaggtgagtgagctgcgaagtgagctgtgggaaaaggagatgaaactcaccgacatcagacttgaggcattgaacagtgcccatcaactggatcagctccgcgagactatgcacaacatgcagttggaagtggacttactgaaagctgagaatgaccggttgaaagttgcaccaggcccttcttccggtagtactccgggacaggtgcctggatcttccgccctatcttcccccagacgctctctcggccttgcattaacccacagcttcggccctagcctcgccgacaccgatttgtctcctatggacggcatctcaacctgcggtccaaaggaagaggtgacattgcgcgtggtcgtcaggatgccaccccagcacatcatcaagggcgatcttaagcagcaggaattttttttggggtgttctaaggtttctgggaaagtggattggaaaatgctggatgaggccgtgttccaggtgtttaaggactacatatcaaaaatggatcccgcttccaccctggggctgtctactgagtcgatccatggctactccatatcacatgtaaaaagggttctggacgcggagcccccagaaatgccgccttgtcgtcggggagtcaacaatatttctgtgtctctgaaggggctgaaggagaaatgcgtggacagtctggtgtttgaaacactcataccgaagccaatgatgcagcattatataagcctccttctgaagcacagaagactggtgctgtccgggccttctggcactgggaagacctacctgacaaatcgactcgccgagtaccttgtggagcgcagtggaagagaagtcacagagggcatcgtatccactttcaacatgcatcaacagagctgtaaggacctccaactttatttaagtaacctggcgaatcaaattgatagagaaactggcattggggatgtgccactggtgatattgctggacgatctgtctgaggccggatctatatcagagctggtgaacggtgccctcacctgtaagtaccataagtgtccatatatcattggcacgaccaaccagcccgtgaagatgactccaaatcatggtctccatttgagtttccgcatgcttacctttagcaataacgtcgagcctgccaacggtttcctcgtgcgatacctgagaagaaagctggtggagtctgactccgacatcaacgcgaacaaggaggagttactgagagtgctggactgggttcccaagctctggtaccacctgcatacattcctggagaagcactcaactagcgattttctgattggaccatgctttttcttgtcatgccccatcggcattgaagatttccggacctggttcatagacctgtggaacaacagcatcatcccatatctgcaagagggggctaaggatggaatcaaggtacacgggcaaaaagctgcgtgggaagatccggtggagtgggtgagagacaccctaccatggccctccgcacagcaggatcagtccaaactttatcaccttccgccaccaaccgtggggcctcactccattgcatcccccccagaggaccgaaccgtgaaagattcgacgcccagtagtctggactctgacccacttatggccatgttactcaaactccaggaagccgctaattacatcgaatctccggaccgggaaaccattctggaccccaacctgcaagccaccctgta

SEQ ID NO: 65503 - DNA, 4452 bp, Artificial Sequence
  derived and/or modified sequence
atgctgcacctgcccctgcccagaagcggcagaaccgtgaacttccccagaagctgggacgagagcagcagcatcagcagcggcctgagcgacgccagcgacaacctgagcagcgaggagttcaacgccagcagcagcctgaacagcctgcccagcacccccaccgccagcagaagaaacagcaccatcgtgctgagaaccgacagcgagaagagaagcctggccgagagcggcctgagctggttcagcgagagcgaggagaaggcccccaagaagctggagtacgacagcggcagcctgaagatggagcccggcaccagcaagtggagaagagagagacccgagagctgcgacgacagcagcaagggcggcgagctgaagaagcccatcagcctgggccaccccggcagcctgaagaagggcaagaccccccccgtggccgtgaccagccccatcacccacaccgcccagagcgccctgaaggtggccggcaagcccgagggcaaggccaccgacaagggcaagctggccgtgaagaacaccggcctgcagagaagcagcagcgacgccggcagagacagactgagcgacgccaagaagccccccagcggcatcgccagacccagcaccagcggcagcttcggctacaagaagcccccccccgccaccggcaccgccaccgtgatgcagaccggcggcagcgccaccctgagcaagatccagaagagcagcggcatccccgtgaagcccgtgaacggcagaaagaccagcctggacgtgagcaacagcgccgagcccggcttcctggcccccggcgccagaagcaacatccagtacagaagcctgcccagacccgccaagagcagcagcatgagcgtgaccggcggcagaggcggccccagacccgtgagcagcagcatcgaccccagcctgctgagcaccaagcagggcggcctgacccccagcagactgaaggagcccaccaaggtggccagcggcagaaccacccccgcccccgtgaaccagaccgacagagagaaggagaaggccaaggccaaggccgtggccctggacagcgacaacatcagcctgaagagcatcggcagccccgagagcacccccaagaaccaggccagccaccccaccgccaccaagctggccgagctgccccccacccccctgagagccaccgccaagagcttcgtgaagccccccagcctggccaacctggacaaggtgaacagcaacagcctggacctgcccagcagcagcgacaccacccacgccagcaaggtgcccgacctgcacgccaccagcagcgccagcggcggccccctgcccagctgcttcacccccagccccgcccccatcctgaacatcaacagcgccagcttcagccagggcctggagctgatgagcggcttcagcgtgcccaaggagaccagaatgtaccccaagctgagcggcctgcacagaagcatggagagcctgcagatgcccatgagcctgcccagcgccttccccagcagcacccccgtgcccaccccccccgccccccccgccgcccccaccgaggaggagaccgaggagctgacctggagcggcagccccagagccggccagctggacagcaaccagagagacagaaacaccctgcccaagaagggcctgagataccagctgcagagccaggaggagaccaaggagagaagacacagccacaccatcggcggcctgcccgagagcgacgaccagagcgagctgcccagcccccccgccctgcccatgagcctgagcgccaagggccagctgaccaacatcgtgagccccaccgccgccaccacccccagaatcaccagaagcaacagcatccccacccacgaggccgccttcgagctgtacagcggcagccagatgggcagcaccctgagcctggccgagagacccaagggcatgatcagaagcggcagcttcagagaccccaccgacgacgtgcacggcagcgtgctgagcctggccagcagcgccagcagcacctacagcagcgccgaggagagaatgcagagcgagcagatcagaaagctgagaagagagctggagagcagccaggagaaggtggccaccctgaccagccagctgagcgccaacgccaacctggtggccgccttcgagcagagcctggtgaacatgaccagcagactgagacacctggccgagaccgccgaggagaaggacaccgagctgctggacctgagagagaccatcgacttcctgaagaagaagaacagcgaggcccaggccgtgatccagggcgccctgaacgccagcgagaccacccccaaggagctgagaatcaagagacagaacagcagcgacagcatcagcagcctgaacagcatcaccagccacagcagcatcggcagcagcaaggacgccgacgccaagaagaagaagaagaagagctggctgagaagcagcttcaacaaggccttcagcatcaagaagggccccaagagcgccagcagctacagcgacatcgaggagatcgccacccccgacagcagcgcccccagcagccccaagctgcagcacggcagcaccgagaccgccagccccagcatcaagagcagcaccagcagcagcgtgggcaccgacgtgaccgagggccccgcccaccccgccccccacaccagactgttccacgccaacgaggaggaggagcccgagaagaaggaggtgagcgagctgagaagcgagctgtgggagaaggagatgaagctgaccgacatcagactggaggccctgaacagcgcccaccagctggaccagctgagagagaccatgcacaacatgcagctggaggtggacctgctgaaggccgagaacgacagactgaaggtggcccccggccccagcagcggcagcacccccggccaggtgcccggcagcagcgccctgagcagccccagaagaagcctgggcctggccctgacccacagcttcggccccagcctggccgacaccgacctgagccccatggacggcatcagcacctgcggccccaaggaggaggtgaccctgagagtggtggtgagaatgcccccccagcacatcatcaagggcgacctgaagcagcaggagttcttcctgggctgcagcaaggtgagcggcaaggtggactggaagatgctggacgaggccgtgttccaggtgttcaaggactacatcagcaagatggaccccgccagcaccctgggcctgagcaccgagagcatccacggctacagcatcagccacgtgaagagagtgctggacgccgagccccccgagatgcccccctgcagaagaggcgtgaacaacatcagcgtgagcctgaagggcctgaaggagaagtgcgtggacagcctggtgttcgagaccctgatccccaagcccatgatgcagcactacatcagcctgctgctgaagcacagaagactggtgctgagcggccccagcggcaccggcaagacctacctgaccaacagactggccgagtacctggtggagagaagcggcagagaggtgaccgagggcatcgtgagcaccttcaacatgcaccagcagagctgcaaggacctgcagctgtacctgagcaacctggccaaccagatcgacagagagaccggcatcggcgacgtgcccctggtgatcctgctggacgacctgagcgaggccggcagcatcagcgagctggtgaacggcgccctgacctgcaagtaccacaagtgcccctacatcatcggcaccaccaaccagcccgtgaagatgacccccaaccacggcctgcacctgagcttcagaatgctgaccttcagcaacaacgtggagcccgccaacggcttcctggtgagatacctgagaagaaagctggtggagagcgacagcgacatcaacgccaacaaggaggagctgctgagagtgctggactgggtgcccaagctgtggtaccacctgcacaccttcctggagaagcacagcaccagcgacttcctgatcggcccctgcttcttcctgagctgccccatcggcatcgaggacttcagaacctggttcatcgacctgtggaacaacagcatcatcccctacctgcaggagggcgccaaggacggcatcaaggtgcacggccagaaggccgcctgggaggaccccgtggagtgggtgagagacaccctgccctggcccagcgcccagcaggaccagagcaagctgtaccacctgcccccccccaccgtgggcccccacagcatcgccagcccccccgaggacagaaccgtgaaggacagcacccccagcagcctggacagcgaccccctgatggccatgctgctgaagctgcaggaggccgccaactacatcgagagccccgacagagagaccatcctggaccccaacctgcaggccaccctgtag

SEQ ID NO: 65504 - protein, 428 aa, Artificial Sequence
  derived and/or modified sequence
MEPLKVEKFATAKRGNGLRAVTPLRPGELLFRSDPLAYTVCKGSRGVVCDRCLLGKEKLMRCSQCRVAKYCSAKCQKKAWPDHKRECKCLKSCKPRYPPDSVRLLGRVVFKLMDGAPSESEKLYSFYDLESNINKLTEDKKEGLRQLVMTFQHFMREEIQDASQLPPAFDLFEAFAKVICNSFTICNAEMQEVGVGLYPSISLLNHSCDPNCSIVFNGPHLLLRAVRDIEVGEELTICYLDMLMTSEERRKQLRDQYCFECDCFRCQTQDKDADMLTGDEQVWKEVQESLKKIEELKAHWKWEQVLAMCQAIISSNSERLPDINIYQLKVLDCAMDACINLGLLEEALFYGTRTMEPYRIFFPGSHPVRGVQVMKVGKLQLHQGMFPQAMKNLRLAFDIMRVTHGREHSLIEDLILLLEECDANIRAS

SEQ ID NO: 65505 - protein, 148 aa, Artificial Sequence
  derived and/or modified sequence
MQEVGVGLYPSISLLNHSCDPNCSIVFNGPHLLLRAVRDIEVGEELTICYLDMLMTSEERRKQLRDQYCFECDCFRCQTQDKDADMLTGDEQVWKEVQESLKKIEELKAHWKWEQVLAMCQAIISSNSERLPDINIYQLKVLDCAMDA

SEQ ID NO: 65506 - DNA, 1287 bp, Artificial Sequence
  derived and/or modified sequence
atggagcccctgaaggtggagaagttcgccaccgccaagagaggcaacggcctgagagccgtgacccccctgagacccggcgagctgctgttcagaagcgaccccctggcctacaccgtgtgcaagggcagcagaggcgtggtgtgcgacagatgcctgctgggcaaggagaagctgatgagatgcagccagtgcagagtggccaagtactgcagcgccaagtgccagaagaaggcctggcccgaccacaagagagagtgcaagtgcctgaagagctgcaagcccagatacccccccgacagcgtgagactgctgggcagagtggtgttcaagctgatggacggcgcccccagcgagagcgagaagctgtacagcttctacgacctggagagcaacatcaacaagctgaccgaggacaagaaggagggcctgagacagctggtgatgaccttccagcacttcatgagagaggagatccaggacgccagccagctgccccccgccttcgacctgttcgaggccttcgccaaggtgatctgcaacagcttcaccatctgcaacgccgagatgcaggaggtgggcgtgggcctgtaccccagcatcagcctgctgaaccacagctgcgaccccaactgcagcatcgtgttcaacggcccccacctgctgctgagagccgtgagagacatcgaggtgggcgaggagctgaccatctgctacctggacatgctgatgaccagcgaggagagaagaaagcagctgagagaccagtactgcttcgagtgcgactgcttcagatgccagacccaggacaaggacgccgacatgctgaccggcgacgagcaggtgtggaaggaggtgcaggagagcctgaagaagatcgaggagctgaaggcccactggaagtgggagcaggtgctggccatgtgccaggccatcatcagcagcaacagcgagagactgcccgacatcaacatctaccagctgaaggtgctggactgcgccatggacgcctgcatcaacctgggcctgctggaggaggccctgttctacggcaccagaaccatggagccctacagaatcttcttccccggcagccaccccgtgagaggcgtgcaggtgatgaaggtgggcaagctgcagctgcaccagggcatgttcccccaggccatgaagaacctgagactggccttcgacatcatgagagtgacccacggcagagagcacagcctgatcgaggacctgatcctgctgctggaggagtgcgacgccaacatcagagccagctag

SEQ ID NO: 65507 - DNA, 1287 bp, Artificial Sequence
  derived and/or modified sequence
atggagccactgaaggtcgagaagtttgctacagccaaaaggggaaacggactacgggcagtcactccattgcgacccggtgagctcttgttccggtctgatcccctcgcctataccgtctgtaagggatcccggggggtcgtgtgcgacaggtgccttctggggaaggaaaagttgatgcggtgcagtcagtgccgcgttgccaagtattgttctgccaaatgtcagaaaaaggcctggcctgaccacaagcgagaatgtaaatgtttgaagtcctgcaaaccccgctatccaccggactccgttcgactgctcggacgggtagtgttcaagctcatggatggcgccccttcagagagcgagaagctatattctttctacgaccttgagagcaacattaataaacttacagaggacaaaaaagagggccttcggcagctggtgatgacttttcagcactttatgcgcgaggagatccaagacgcctcccagttgccgcccgcgttcgatctattcgaagcgttcgcgaaagtaatctgtaacagcttcaccatttgcaatgcggagatgcaggaagtcggcgtgggactttatcccagtatttccctgttgaatcatagctgtgatcctaactgctctatcgtgtttaacggaccccatttactgctcagagcagttcgcgacatagaggtgggtgaggagctgactatctgttacctggatatgctaatgacctccgaggagaggcgcaaacagcttcgggatcaatattgcttcgaatgtgactgcttcagatgccaaactcaagacaaagatgccgacatgctcacaggggacgagcaggtctggaaggaagttcaggagagcctgaagaaaatcgaggaattgaaagcccactggaagtgggagcaggtgctcgcaatgtgccaggccatcatcagcagtaactctgaacgcttacctgacattaatatctaccaactcaaagttctggactgcgcgatggacgcatgcatcaaccttgggctgctcgaagaggcccttttctatgggaccagaaccatggagccctaccgcatattttttcctggttctcacccggtgagaggagtacaagtgatgaaggtgggaaaacttcaactccaccaaggtatgttcccgcaggcaatgaaaaatttgcgtctggctttcgacattatgcgtgtgacccatggcagagaacacagcctgatagaggatttgattttgctcttggaagaatgcgatgccaacatcagagcgagctag

SEQ ID NO: 65508 - DNA, 1287 bp, Artificial Sequence
  derived and/or modified sequence
atggagcccctgaaggtggagaagtttgccacagccaagagaggaaatggcctgcgggctgtgacccccctgcggcctggagagctgctcttcagaagtgaccccctggcctacacagtgtgcaagggcagccggggcgtggtgtgtgaccgctgcctgctgggcaaggagaagctgatgcgctgcagccagtgccgggtggccaagtactgcagcgccaagtgccagaagaaggcctggccagaccacaagcgggagtgcaagtgcctgaagagctgcaagccccgctaccccccagattctgtgcggctgctgggccgggtggtgttcaagctgatggatggagcccccagcgagagcgagaagctgtacagcttctatgacctggagagcaacatcaacaagctgacagaggacaagaaggagggcctgcggcagctggtgatgaccttccagcacttcatgagggaggagatccaggatgccagccagctgcccccagcctttgacctgtttgaggcctttgccaaggtgatctgcaacagcttcaccatctgcaatgctgagatgcaggaggtgggcgtgggcctgtaccccagcatcagcctgctgaaccacagctgtgaccccaactgcagcatcgtgttcaacggcccccacctgctgctgcgggctgtgcgggacatcgaggtgggggaggagctgaccatctgctacctggacatgctgatgaccagcgaggagaggaggaagcagctgcgggaccagtactgctttgaatgtgactgcttccgctgccagacccaggacaaggatgctgacatgctgactggagatgagcaggtgtggaaggaggtgcaggagagcctgaagaagattgaggagctgaaggcccactggaagtgggagcaggtgctggccatgtgccaggccatcatcagcagcaacagcgagcggctgcctgacatcaacatctaccagctgaaggtgctggactgtgccatggatgcctgcatcaacctgggcctgctggaggaggccctcttctacggcaccaggaccatggagccctaccgcatcttcttccctggcagccaccctgtgcggggcgtgcaggtgatgaaggtgggcaagctgcagctgcaccagggcatgttcccccaggccatgaagaacctgcggctggcctttgacatcatgagggtgacccacggccgggagcacagcctgattgaggacctgatcctgctgctggaggagtgtgatgccaacatccgggccagctag

SEQ ID NO: 65509 - DNA, 1287 bp, Artificial Sequence
  derived and/or modified sequence
atggagccgctgaaggtggaaaagttcgcaaccgccaagaggggaaacgggctgcgcgccgtgaccccgctgcgccccggagagctactcttccgctcggatcccttggcgtacacggtgtgcaaggggagtcgtggcgtcgtctgcgaccgctgccttctcgggaaggaaaagctgatgcgatgctctcagtgccgcgtcgccaaatactgtagtgctaagtgtcagaaaaaagcttggccagaccacaagcgggaatgcaaatgccttaaaagctgcaaacccagatatcctccagactccgttcgacttcttggcagagttgtcttcaaacttatggatggagcaccttcagaatcagagaagctttactcattttatgatctggagtcaaatattaacaaactgactgaagataagaaagagggcctcaggcaactcgtaatgacatttcaacatttcatgagagaagaaatacaggatgcctctcagctgccacctgcctttgacctttttgaagcctttgcaaaagtgatctgcaactctttcaccatctgtaatgcggagatgcaggaagttggtgttggcctatatcccagtatctctttgctcaatcacagctgtgaccccaactgttcgattgtgttcaatgggccccacctcttactgcgagcagtccgagacatcgaggtgggagaggagctcaccatctgctacctggatatgctgatgaccagtgaggagcgccggaagcagctgagggaccagtactgctttgaatgtgactgtttccgttgccaaacccaggacaaggatgctgatatgctaactggtgatgagcaagtatggaaggaagttcaagaatccctgaaaaaaattgaagaactgaaggcacactggaagtgggagcaggttctggccatgtgccaggcaatcataagcagcaattctgaacggcttcccgatatcaacatctaccagctgaaggtgctcgactgcgccatggatgcctgcatcaacctcggcctgttggaggaagccttgttctatggtactcggaccatggagccatacaggatttttttcccaggaagccatcccgtcagaggggttcaagtgatgaaagttggcaaactgcagctacatcaaggcatgtttccccaagcaatgaagaatctgagactggcttttgatattatgagagtgacacatggcagagaacacagcctgattgaagatttgattctacttttagaagaatgcgacgccaacatcagagcatcctaa

SEQ ID NO: 65510 - DNA, 1287 bp, Artificial Sequence
  derived and/or modified sequence
atggagcccctgaaggtggagaagttcgccaccgccaagcggggcaatggcctgcgcgccgttaccccactccggcccggcgaactgctgtttagaagcgaccccctggcttacaccgtgtgcaaggggtcccgcggcgttgtctgcgatcgatgccttttagggaaagaaaaattgatgcgctgtagccagtgccgggtcgccaagtattgctctgcgaagtgtcagaaaaaggcttggccggatcataagcgcgaatgcaagtgcctgaagtcatgcaaacctcgttatccaccagactctgtgcggctgctgggacgcgtggtctttaagctcatggatggggccccgtcagaatctgagaaactatactccttctacgacttagagtccaatattaacaagctaactgaagacaagaaagagggacttagacagctggtaatgactttccagcacttcatgagggaggaaatccaggacgcgtcccagttacccccagccttcgatctgtttgaagcctttgctaaggtgatttgcaactccttcacaatttgtaatgccgagatgcaggaagtgggggtgggtttgtatcccagtattagcttgctgaaccacagctgtgatcccaactgtagcatcgtgttcaatggaccccaccttctcctcagagctgtacgggatatcgaagtcggcgaggagttaaccatctgttatctagatatgctcatgacttccgaggaacgccggaagcagctgagagaccaatactgctttgagtgcgattgtttccgttgtcagacacaggataaagatgccgatatgctcactggggacgagcaggtgtggaaggaagtgcaggagtctctaaagaagatcgaggaactcaaggctcattggaagtgggaacaggtgctggccatgtgccaagcaatcatctcatccaattcagagcgactgcccgatattaatatctatcagttaaaagtactggactgcgctatggatgcctgcattaacctgggactcttggaggaggcgctgttctacggcacccggacaatggaaccgtatagaattttctttccaggttcccatcctgtcagaggcgtccaagtgatgaaagtgggtaaactgcagctgcatcagggcatgttcccacaggctatgaagaatttgaggcttgcattcgatataatgcgggtcactcacggtagagaacactccctgatcgaggatctgattctgctgctggaggagtgtgatgctaatattcgagccagctag

SEQ ID NO: 65511 - DNA, 1287 bp, Artificial Sequence
  derived and/or modified sequence
atggagcccctcaaggttgaaaaattcgccaccgccaagcgtggcaacggcttacgagcagttaccccactgagacctggagaacttttgttcaggagcgacccattggcgtacaccgtctgtaagggttcccggggtgtggtctgcgatcgctgccttctgggcaaagagaaactcatgcggtgctctcaatgccgggtggcaaaatactgctcagcaaagtgccagaagaaagcatggccagaccacaagcgtgaatgtaaatgtctgaagtcctgcaagccaaggtatccgcctgatagcgttagactgttgggtcgggtggtgttcaagttgatggatggcgcaccgagcgagagtgaaaagctttatagcttttatgatctggaatcgaacattaataagctcacagaggacaagaaagagggcctgcggcaactggtaatgacatttcaacacttcatgagagaagaaattcaggatgcatcccagcttccccctgcattcgatctgttcgaggcttttgcaaaagtaatctgtaacagcttcaccatatgcaacgcagaaatgcaggaggtgggggtgggcctttatcccagcatttctctgctgaaccactcttgtgacccaaattgttcgattgtgtttaatggccctcatctcctcctgagggccgtcagagacattgaggttggcgaagagttaaccatttgttacctcgatatgctgatgacaagcgaggaacggaggaaacagctgcgtgatcagtactgttttgaatgtgattgtttccgatgccaaactcaggacaaggacgctgatatgcttacaggtgatgagcaggtctggaaggaggtgcaggaatccttgaagaagattgaggagttgaaggcgcattggaaatgggagcaagtcttggcaatgtgtcaagctatcatttctagcaatagtgagcgtttgcctgatattaacatttaccagcttaaagttttggattgcgccatggacgcgtgtatcaacttaggcttgctcgaggaggctttgttttacgggactcgaaccatggaaccttataggatttttttccccggaagccatcctgtccgcggagttcaagtgatgaaggtgggtaaattacagttgcaccagggaatgttcccacaggccatgaaaaatctaaggttagcctttgacatcatgagggtgacacatggacgggaacactccctcattgaggacttgattttgcttctagaggaatgtgacgcaaacatccgggcttcctag

SEQ ID NO: 65512 - DNA, 1548 bp, Artificial Sequence
  derived and/or modified sequence
ggacgcgggtagccgtctgaggtgccggagctgcgggaggatggagccgctgaaggtggaaaagttcgcaaccgccaagaggggaaacgggctgcgcgccgtgaccccgctgcgccccggagagctactcttccgctcggatcccttggcgtacacggtgtgcaaggggagtcgtggcgtcgtctgcgaccgctgccttctcgggaaggaaaagctgatgcgatgctctcagtgccgcgtcgccaaatactgtagtgctaagtgtcagaaaaaagcttggccagaccacaagcgggaatgcaaatgccttaaaagctgcaaacccagatatcctccagactccgttcgacttcttggcagagttgtcttcaaacttatggatggagcaccttcagaatcagagaagctttactcattttatgatctggagtcaaatattaacaaactgactgaagataagaaagagggcctcaggcaactcgtaatgacatttcaacatttcatgagagaagaaatacaggatgcctctcagctgccacctgcctttgacctttttgaagcctttgcaaaagtgatctgcaactctttcaccatctgtaatgcggagatgcaggaagttggtgttggcctatatcccagtatctctttgctcaatcacagctgtgaccccaactgttcgattgtgttcaatgggccccacctcttactgcgagcagtccgagacatcgaggtgggagaggagctcaccatctgctacctggatatgctgatgaccagtgaggagcgccggaagcagctgagggaccagtactgctttgaatgtgactgtttccgttgccaaacccaggacaaggatgctgatatgctaactggtgatgagcaagtatggaaggaagttcaagaatccctgaaaaaaattgaagaactgaaggcacactggaagtgggagcaggttctggccatgtgccaggcaatcataagcagcaattctgaacggcttcccgatatcaacatctaccagctgaaggtgctcgactgcgccatggatgcctgcatcaacctcggcctgttggaggaagccttgttctatggtactcggaccatggagccatacaggatttttttcccaggaagccatcccgtcagaggggttcaagtgatgaaagttggcaaactgcagctacatcaaggcatgtttccccaagcaatgaagaatctgagactggcttttgatattatgagagtgacacatggcagagaacacagcctgattgaagatttgattctacttttagaagaatgcgacgccaacatcagagcatcctaagggaacgcagtcagagggaaatacggcgtgtgtctttgttgaatgccttattgaggtcacacactctatgctttgttagctgtgtgaacctctcctattggaaattctgttccgtgtttgtgtaggtaaataaaggcagacatggtttgcaaaccacaagaatcattagttgtagagaagcacgattataataaattcaaaacatttggttgaggatgcca

SEQ ID NO: 65513 - DNA, 1463 bp, Artificial Sequence
  derived and/or modified sequence
gaggtggatttgagagatacctcccctccttctgctcagctgccttgcagtaattaaactctttctctgctgcaacacccctactgttctccgtgtattggcttttctgggcagcaggaaggaaaagctgatgcgatgctctcagtgccgcgtcgccaaatactgtagtgctaagtgtcagaaaaaagcttggccagaccacaagcgggaatgcaaatgccttaaaagctgcaaacccagatatcctccagactccgttcgacttcttggcagagttgtcttcaaacttatggatggagcaccttcagaatcagagaagctttactcattttatgatctggagtcaaatattaacaaactgactgaagataagaaagagggcctcaggcaactcgtaatgacatttcaacatttcatgagagaagaaatacaggatgcctctcagctgccacctgcctttgacctttttgaagcctttgcaaaagtgatctgcaactctttcaccatctgtaatgcggagatgcaggaagttggtgttggcctatatcccagtatctctttgctcaatcacagctgtgaccccaactgttcgattgtgttcaatgggccccacctcttactgcgagcagtccgagacatcgaggtgggagaggagctcaccatctgctacctggatatgctgatgaccagtgaggagcgccggaagcagctgagggaccagtactgctttgaatgtgactgtttccgttgccaaacccaggacaaggatgctgatatgctaactggtgatgagcaagtatggaaggaagttcaagaatccctgaaaaaaattgaagaactgaaggcacactggaagtgggagcaggttctggccatgtgccaggcaatcataagcagcaattctgaacggcttcccgatatcaacatctaccagctgaaggtgctcgactgcgccatggatgcctgcatcaacctcggcctgttggaggaagccttgttctatggtactcggaccatggagccatacaggatttttttcccaggaagccatcccgtcagaggggttcaagtgatgaaagttggcaaactgcagctacatcaaggcatgtttccccaagcaatgaagaatctgagactggcttttgatattatgagagtgacacatggcagagaacacagcctgattgaagatttgattctacttttagaagaatgcgacgccaacatcagagcatcctaagggaacgcagtcagagggaaatacggcgtgtgtctttgttgaatgccttattgaggtcacacactctatgctttgttagctgtgtgaacctctcctattggaaattctgttccgtgtttgtgtaggtaaataaaggcagacatggtttgcaaaccacaagaatcattagttgtagagaagcacgattataataaattcaaaacatttggttgaggatgccatc

SEQ ID NO: 65514 - DNA, 1119 bp, Artificial Sequence
  derived and/or modified sequence
ttcgtgttcaaggcctacatgtacctgaacgagggccagaagctgctgaagaccctgaagaaggacaagagctggagccagaccttcgagagcgccaccttctacagcctgaagggcgaggtgtgcttcaacatgggccagatcgtgctggccaagaagatgctgagaaaggccctgaagctgctgaacagaatcttcccctacaacctgatcagcctgttcctgcacatccacgtggagaagaacagacacttccactacgtgaacagacaggcccaggagagccccccccccggcaagaagagactggcccagctgtacagacagaccgtgtgcctgagcctgctgtggagaatctacagctacagctacctgttccactgcaagtactacgcccacctggccgtgatgatgcagatgaacaccgccctggagacccagaactgcttccagatcatcaaggcctacctggactacagcctgtaccaccacctggccggctacaagggcgtgtggttcaagtacgaggtgatggccatggagcacatcttcaacctgcccctgaagggcgagggcatcgagatcgtggcctacgtggccgagaccctggtgttcaacaagctgatcatgggccacctggacctggccatcgagctgggcagcagagccctgcagatgtgggccctgctgcagaaccccaacagacactaccagagcctgtgcagactgagcagatgcctgctgctgaacagcagatacccccagctgatccaggtgctgggcagactgtgggagctgagcgtgacccaggagcacatcttcagcaaggccttcttctacttcgtgtgcctggacatcctgctgtacagcggcttcgtgtacagaaccttcgaggagtgcctggagttcatccaccagtacgagaacaacagaatcctgaagttccacagcggcctgctgctgggcctgtacagcagcgtggccatctgggagtgcgaggccggcgtgggcagaagactgcacaccagcagagaccccggcatgcccgacttcagaaacggcaccaccttcaccaacttccccatcgagctgaagatcttctgccaggaggagccctag

SEQ ID NO: 65515 - DNA, 1119 bp, Artificial Sequence
  derived and/or modified sequence
tttgtcttcaaagcctacatgtacctcaatgaaggacagaagcttttgaagacgcttaagaaggataagtcgtggagtcagacattcgagtctgctactttctacagcctcaagggcgaggtttgttttaacatgggccagatcgtactcgcgaagaagatgctgcgcaaagccctgaaactgcttaaccgcatcttcccatacaatttgatctccctgtttctgcacatccacgtggaaaagaatcgacattttcactatgtgaaccgccaggcccaggaaagtcccccacctggcaagaaaagactggctcagttgtataggcagaccgtctgtctttctctactttggcgaatctattcatacagctatctgttccactgcaagtattatgcccacctggcagtcatgatgcagatgaacacagctctcgagacccagaactgttttcagattattaaggcttacttggattactcactttaccatcacctcgctggatacaaaggagtttggtttaaatatgaagtgatggccatggagcatatcttcaacctgcctctcaaaggtgagggtatagagatcgtagcctacgtcgctgagactttagtatttaacaaactgatcatgggccacctggacctggccatagaactaggctcacgagccctgcagatgtgggccctgctgcagaatcctaaccggcactatcagtccctatgtagactgagcagatgcctgctgctgaattcacggtaccctcagttgatccaggtgctgggtagactttgggagttatccgtgacacaggaacacatcttcagcaaggctttcttctacttcgtgtgtctggacattctgctttacagcggcttcgtgtacaggactttcgaggagtgcctggagttcattcatcagtacgaaaataacaggatcctcaaattccactccgggctattattggggctgtactctagcgttgctatctgggagtgtgaggcaggagttggacggagactacacacaagccgggaccccggcatgccagatttccggaacggcactaccttcaccaattttcctatcgagctgaagattttctgccaagaggaaccatag

SEQ ID NO: 65516 - DNA, 1119 bp, Artificial Sequence
  derived and/or modified sequence
tttgtgttcaaggcctacatgtacctgaatgaaggccagaagctgctgaagaccctgaagaaggacaagtcctggagccagacctttgaaagtgccaccttctacagcctgaagggggaggtgtgcttcaacatgggccagatcgtgctggccaagaagatgctgaggaaggccctgaagctgctgaaccgcatcttcccctacaacctgatcagcctcttcctgcacatccacgtggagaagaacagacacttccactacgtgaaccggcaggcccaggagagccccccacctgggaagaagaggctggcccagctgtaccggcagacagtgtgcctgagcctgctgtggaggatctacagctacagctacctgttccactgcaagtactatgcccacctggccgtgatgatgcagatgaacacagccctggagacccagaactgcttccagatcatcaaggcctacctggactacagcctgtaccaccacctggccggctacaagggcgtgtggttcaagtatgaggtgatggccatggagcacatcttcaacctgcccctgaagggggagggcattgaaattgtggcctacgtggccgagaccctggtgttcaacaagctgatcatgggccacctggacctggccatcgagctgggcagccgggccctgcagatgtgggccctgctgcagaaccccaacagacactaccagagcctgtgccgcctgagccgctgcctgctgctgaacagccgctacccccagctgatccaggtgctgggccgcctgtgggagctgtctgtgacccaggagcacatcttcagcaaggccttcttctactttgtgtgcctggacatcctgctgtacagcggctttgtgtaccgcacctttgaagaatgtctggagttcatccaccagtatgagaacaaccgcatcctgaagttccacagcggcctgctgctgggcctgtacagctctgtggccatctgggagtgtgaggccggcgtgggccggcggctgcacaccagccgggaccccggcatgccagacttcagaaatggcaccaccttcaccaacttccccatcgagctgaagatcttctgccaggaggagccctag

SEQ ID NO: 65517 - DNA, 1119 bp, Artificial Sequence
  derived and/or modified sequence
ttcgtgttcaaggcctacatgtacctgaacgagggccagaagctgttaaaaacccttaagaaggataagtcgtggagtcagaccttcgagagtgctactttttattccttaaaaggagaagtttgcttcaacatggggcaaatcgtcctagccaaaaagatgctgcgaaaagcccttaagttgctcaaccggatatttccctacaatctgatcagcttatttttacacattcatgtcgagaaaaatcgccacttccattatgttaacagacaggcccaggagtccccaccccctggcaagaaaaggctggctcagctctaccggcagaccgtgtgtcttagtctcctgtggcgcatatactcatatagctacttgttccattgcaaatattacgcacatcttgctgtcatgatgcagatgaacactgcacttgaaactcagaactgtttccagatcatcaaggcttaccttgactactcgctgtaccatcacctagcgggttataaaggagtgtggttcaagtacgaagtgatggcaatggagcacatcttcaatctgccactgaagggagaaggaatcgagattgtagcatacgtggccgagaccctggtcttcaataagcttatcatgggccatctcgatcttgctattgaactagggtcccgcgctctccaaatgtgggccctgttgcagaaccccaatcggcactatcagtctctatgccggctgtccaggtgcttgttgttgaactcccgctaccctcaacttatccaggtgctcgggcggctgtgggagctgagcgtgacacaggaacatatattctccaaagcctttttttactttgtgtgcttagacatactgttgtatagtggttttgtgtacagaacatttgaagagtgtctagaatttatccaccagtatgagaacaatcggattctgaagttccattccggcctgcttctgggcctatactcgtccgtcgctatctgggagtgtgaggcgggggtcgggaggagacttcatacctcacgtgatcctggaatgcccgacttccgtaacggcactacattcaccaactttccgattgagttaaaaattttttgccaggaggaaccatag

SEQ ID NO: 65518 - DNA, 1119 bp, Artificial Sequence
  derived and/or modified sequence
tttgtgttcaaagcttatatgtatctgaacgaaggacagaaacttctgaagaccctgaagaaagataaatcctggagtcaaacgttcgaatctgccacgttttatagcctcaagggggaagtgtgtttcaacatgggccagatcgttctggcaaaaaaaatgttgagaaaagccctgaaactgcttaatcggatctttccctacaacttgatttctttatttttgcacattcacgttgaaaagaaccgacattttcactatgtgaacaggcaggcgcaggaatccccacctccagggaaaaaaaggttggcccagttgtatagacagacagtgtgcctgtcactgctgtggcggatctacagttatagttatctattccactgcaaatattatgcccacctggccgtgatgatgcagatgaacaccgctctagagactcagaactgctttcagattatcaaggcctaccttgattactcactctatcaccacctcgccggatacaaaggggtgtggtttaagtacgaggtgatggcaatggagcacatatttaatctgccgctaaaaggcgagggaatcgagattgtcgcatacgtggccgagaccctggtgtttaacaagcttatcatgggccacctcgacctggccatagagctgggatccagagcactacagatgtgggcccttttacagaatcccaatagacattaccaaagcctctgccgtttgtcaaggtgcctgttgttgaattcgcgctatccacagctcatccaagtgcttggccgtctttgggagctgtctgtgacccaggaacatatcttttctaaggccttcttttatttcgtgtgcctggacatcctactgtacagcggctttgtgtatcggacattcgaagagtgtcttgagtttatccaccagtacgagaataaccgaatcctgaagtttcactcaggcctactgctagggctctatagttccgtggccatttgggaatgcgaggccggagtgggtcgaagactgcataccagccgagatcccggtatgcccgactttcggaatggaacaacctttactaatttccctatagagctcaagattttttgccaagaggagccctag

SEQ ID NO: 65519 - protein, 87 aa, Artificial Sequence
  derived and/or modified sequence
MYCLQWLLPVLLIPKPLNPALWFSHSMFMGFYLLSFLLERKPCTICALVFLAALFLICYSCWGNCFLYHCSDSPLPESAHDPGVVGT

SEQ ID NO: 65520 - protein, 62 aa, Artificial Sequence
  derived and/or modified sequence
MYCLQWLLPVLLIPKPLNPALWFSHSMFMGFYLLSFLLERKPCTICALVFLAALFLICYSCW

SEQ ID NO: 65521 - protein, 78 aa, Artificial Sequence
  derived and/or modified sequence
MYCLQWLLPVLLIPKPLNPALWFSHSMFMGFYLLSFLLERKPCTICALVFLAALFLICYSCWGNCFLYHCSDSPLPES

SEQ ID NO: 65522 - DNA, 264 bp, Artificial Sequence
  derived and/or modified sequence
atgtattgcctccagtggctgttaccagttctcctaatcccaaaaccacttaatccagctctgtggttctctcattcgatgttcatgggcttttacctgctctccttcttactcgaacgaaaaccgtgtactatttgcgcgcttgtatttctggcggccctatttctgatttgctactcttgttgggggaactgctttctttaccattgctccgactcgcccctgccagagtcagcacatgaccccggagtggttgggacatag

SEQ ID NO: 65523 - DNA, 264 bp, Artificial Sequence
  derived and/or modified sequence
atgtactgcctgcaatggttgttgccagtgctgctgatccccaagcccctgaaccccgccttgtggttcagccattcgatgtttatggggttttacctcctcagcttcttgttagaaaggaagccctgtaccatttgcgcattagtatttcttgctgccctgttccttatctgttacagctgttgggggaactgcttcctataccattgcagcgactcaccgctcccagaatccgcccacgaccctggggtggtcggaacgtag

SEQ ID NO: 65524 - DNA, 264 bp, Artificial Sequence
  derived and/or modified sequence
atgtattgcctgcaatggctgctgccggtgctcctcattcctaagcccttaaaccctgcattgtggttttcacactctatgtttatggggttttatctgctcagctttctgctggaacgcaaaccctgcaccatttgcgcactagtgttcttagcggcgctcttcctaatctgttattcctgttgggggaattgctttctttaccactgctcggattctcccttgcctgaatcagctcatgatcccggcgtcgtcggcacatag

SEQ ID NO: 65525 - DNA, 264 bp, Artificial Sequence
  derived and/or modified sequence
atgtattgccttcagtggttgttgccggtactccttataccaaagccccttaaccccgccttgtggttcagccactcaatgtttatggggttctacctgctcagcttcctgctggaaaggaaaccttgcaccatttgcgctcttgtgtttttggctgccctgttcctgatatgctattcctgctggggcaattgttttctgtaccattgctccgattcccccctgcctgagagcgcccacgacccgggtgtcgtgggcacatag

SEQ ID NO: 65526 - DNA, 264 bp, Artificial Sequence
  derived and/or modified sequence
atgtactgcctacagtggctgttaccggtgttactgatcccaaagccactcaatcccgccctgtggttttcccacagtatgttcatgggattctatctcctgtcatttttactggaacgcaagccatgtactatttgcgcacttgtgttcctggccgcactgttcctaatctgttacagctgctggggcaattgcttcctgtatcattgttctgactcacccttgcccgagtcagctcatgaccctggagtggtggggacatag

SEQ ID NO: 65527 - DNA, 189 bp, Artificial Sequence
  derived and/or modified sequence
atgtattgcctacagtggctgctgcccgtgcttctcatccctaaaccactgaaccctgccttgtggtttagtcactcaatgtttatgggcttctatcttttgagctttctccttgagcgaaaaccgtgcactatctgtgccctcgttttccttgcagcattgtttctaatctgttactcttgttggtag

SEQ ID NO: 65528 - DNA, 264 bp, Artificial Sequence
  derived and/or modified sequence
atgtactgcctgcagtggctgttaccagtcctgctcattccgaaacccctgaaccccgctctatggttttcccattccatgtttatgggtttctacctgctgagcttcctgttggaaagaaaaccatgtactatctgcgccctcgtctttctggccgccctcttccttatctgttacagctgctggggtaactgctttctctatcactgttctgactctccactgccagagagtgcccacgacccgggggtggtcggaacctag

SEQ ID NO: 65529 - DNA, 264 bp, Artificial Sequence
  derived and/or modified sequence
atgtactgcttgcagtggctactccctgtcctgctgattcccaagcccctcaatccagcgctgtggttctctcattccatgttcatggggttctaccttctctcgtttctacttgagcgaaaaccatgcacaatttgcgcattggtcttcctagcagctttgttcctgatctgttatagttgctggggaaattgcttcttgtatcactgttccgattctccgctgccagagagtgcacatgaccccggcgtggtcggtacatag

SEQ ID NO: 65530 - DNA, 237 bp, Artificial Sequence
  derived and/or modified sequence
atgtactgtcttcaatggctcctgcccgtgttgttaattcctaaacccctgaacccggccctgtggttctcacactccatgttcatgggtttttatttgctgtctttccttctggagcgaaagccatgtactatttgcgccctggtgttcctcgctgctctgttcttgatctgctattcctgttggggaaactgttttttataccattgtagcgattcaccactcccagagagctag

SEQ ID NO: 65531 - DNA, 264 bp, Artificial Sequence
  derived and/or modified sequence
atgtactgcctgcagtggctgctgcctgtgctgctgatccccaagcccctgaacccagccctgtggttcagccacagcatgttcatgggcttctacctgctgtccttcctgctggagaggaagccctgcaccatctgtgccctggtgttcctggccgccctcttcctgatctgctacagctgctggggcaactgcttcctgtaccactgcagcgacagccccctgcctgagagcgcccatgaccccggggtggtgggcacctag

SEQ ID NO: 65532 - DNA, 189 bp, Artificial Sequence
  derived and/or modified sequence
atgtactgcctgcagtggctgctgcctgtgctgctgatccccaagcccctgaacccagccctgtggttcagccacagcatgttcatgggcttctacctgctgtccttcctgctggagaggaagccctgcaccatctgtgccctggtgttcctggccgccctcttcctgatctgctacagctgctggtag

SEQ ID NO: 65533 - DNA, 237 bp, Artificial Sequence
  derived and/or modified sequence
atgtactgcctgcagtggctgctgcctgtgctgctgatccccaagcccctgaacccagccctgtggttcagccacagcatgttcatgggcttctacctgctgtccttcctgctggagaggaagccctgcaccatctgtgccctggtgttcctggccgccctcttcctgatctgctacagctgctggggcaactgcttcctgtaccactgcagcgacagccccctgcctgagagctag

SEQ ID NO: 65534 - DNA, 264 bp, Artificial Sequence
  derived and/or modified sequence
atgtactgcctgcagtggctgctgcccgtgctgctgatccccaagccactgaatccagcactgtggttcagccattcaatgtttatggggttctatcttctgtcctttctgctggaacgcaagccttgcactatttgcgcactggtttttctggcggcactgtttttaatctgttattcttgttgggggaattgtttcctttaccattgttccgattctcccctacctgagtccgcccatgaccctggtgtcgtaggcacctag

SEQ ID NO: 65535 - DNA, 264 bp, Artificial Sequence
  derived and/or modified sequence
atgtactgcctgcagtggctgctgcccgtgctgctgatccccaagcctctgaatccagcgctgtggttctctcacagtatgttcatgggcttctatctgctttccttcctcctcgagcgtaagccctgtaccatctgcgcactcgtgtttctggctgccctcttcctgatatgctactcttgttggggcaactgctttctgtaccactgctcagactcaccccttccggaatcagctcacgatccaggagttgttggtacttag

SEQ ID NO: 65536 - DNA, 264 bp, Artificial Sequence
  derived and/or modified sequence
atgtactgcctgcagtggctgctgcccgtgctgctgatccccaagcccctcaatcccgccctgtggttctcacattccatgtttatgggtttttatctgctgagtttcctcctggagaggaaaccctgcacaatatgcgcgctggtcttcctcgccgcactatttcttatctgttactcatgttggggcaactgtttcctttaccattgtagcgatagccccttgcccgaatctgcccatgatcccggagtggttggcacctag

SEQ ID NO: 65537 - DNA, 264 bp, Artificial Sequence
  derived and/or modified sequence
atgtactgcctgcagtggctgctgcccgtgctgctgatccccaagccattgaatcccgcgctgtggttcagccacagcatgttcatgggcttctacctgctcagctttctgctggagcgcaaaccttgtaccatttgtgcattggttttccttgctgcgctgttcctgatctgttattcctgctggggaaattgcttcttatatcattgctctgattccccacttccggaatccgcccacgaccccggcgtagtggggacttag

SEQ ID NO: 65538 - DNA, 264 bp, Artificial Sequence
  derived and/or modified sequence
atgtactgcctgcagtggctgctgcccgtgctgctgatccccaagcctttgaacccggcactatggttttcccatagcatgttcatgggtttctatctgttgagcttccttcttgagcggaaaccctgtactatctgcgctttggtgttcttggcagctttgttccttatttgttattcatgttgggggaattgctttctgtaccactgcagcgatagccccctccccgaatccgctcacgatcctggcgtagtggggacatag

SEQ ID NO: 65539 - DNA, 189 bp, Artificial Sequence
  derived and/or modified sequence
atgtactgcctgcagtggctgctgcccgtgctgctgatccccaagcccctgaaccccgccttatggttctcacatagcatgttcatgggtttttacttgcttagtttcctgttagaaagaaaaccatgtactatatgtgctttagtatttttggccgccctctttctgatctgctattcttgctggtag

SEQ ID NO: 65540 - DNA, 264 bp, Artificial Sequence
  derived and/or modified sequence
atgtactgcctgcagtggctgctgcccgtgctgctgatccccaagcctctcaaccccgccctgtggttttcacactcgatgtttatggggttctacctgctgagtttccttctcgagaggaaaccttgtacaatttgcgcccttgtatttctggctgccctgtttctcatttgctattcatgctggggaaattgcttcctctatcattgttccgactctccgttgccagaatcagcccatgaccccggtgttgttggaacttag

SEQ ID NO: 65541 - DNA, 264 bp, Artificial Sequence
  derived and/or modified sequence
atgtactgcctgcagtggctgctgcccgtgctgctgatccccaagcctcttaatcctgccttgtggttcagccatagcatgtttatgggtttctacttactcagctttctgctggaacgaaagccctgtaccatctgtgccttggtattcttagctgctttatttctcatctgttactcatgctggggcaactgttttttgtatcactgtagcgattctcccctgccggagtcagcccacgatcccggagtcgtgggtacctag

SEQ ID NO: 65542 - DNA, 237 bp, Artificial Sequence
  derived and/or modified sequence
atgtactgcctgcagtggctgctgcccgtgctgctgatccccaagccactcaatcctgccctttggttctctcattcaatgttcatggggttctatctgttaagctttttgttagagcgaaaaccctgtacaatctgcgcgctcgtgttcctagcagctttgtttctgatctgttactcatgctggggaaattgtttcttatatcattgtagcgattcaccgttgccggagtcctag

SEQ ID NO: 65543 - DNA, 264 bp, Artificial Sequence
  derived and/or modified sequence
atgtactgtctacagtggctcctgcccgttcttctcatccccaagcctctcaaccccgctctctggttcagccacagcatgtttatggggttttacctcctctcatttctcctcgagcgtaagccatgcaccatctgtgcgcttgtgttcctggcagctctgttcttaatttgctacagctgctggggcaactgctttctgtatcattgttcagacagtcctctgcccgagagcgcccacgaccccggtgtggtagggacgtag

SEQ ID NO: 65544 - DNA, 264 bp, Artificial Sequence
  derived and/or modified sequence
atgtactgcctgcagtggctgctccctgtgcttctaattccgaaacctctgaacccagccctgtggttttcccactcaatgttcatgggtttctacctgctgtccttcctgcttgaacggaagccttgcactatttgcgccctcgttttcctcgccgcattgttcctaatatgctatagctgctggggcaactgcttcctctaccactgtagcgattcacctctcccagagtccgcacatgatcccggagtggttggtacttag

SEQ ID NO: 65545 - DNA, 264 bp, Artificial Sequence
  derived and/or modified sequence
atgtactgtctgcagtggttgctcccagtactccttatccccaagccactaaaccccgcactttggtttagccactccatgtttatgggattttacctgctttcgttcctgttggagcgcaagccctgcaccatctgtgccttggtgttcctcgcagccctgtttctcatttgctattcctgctgggggaattgctttctgtatcactgttccgatagcccgctaccggaatccgcacacgatccaggtgttgtgggtacctag

SEQ ID NO: 65546 - DNA, 264 bp, Artificial Sequence
  derived and/or modified sequence
atgtattgcctccagtggttactccccgtcctgctgataccgaagcctctcaaccctgctctctggttctcccactcaatgttcatgggcttctatctgctaagtttcttgctcgaaagaaaaccgtgcacaatatgcgctctagtattcctggccgctctgtttctcatatgctattcatgttgggggaattgttttctttatcattgtagtgacagccccctaccggaatcggctcatgatcccggtgtagtaggcacctag

SEQ ID NO: 65547 - DNA, 264 bp, Artificial Sequence
  derived and/or modified sequence
atgtactgcttacaatggttattacccgtgctattaatccctaaaccgctcaaccccgcactctggtttagccacagcatgttcatggggttctacctgttgtcctttcttctggagagaaagccatgcacgatctgcgccctggttttcctggccgcacttttcctgatttgctattcttgttggggcaattgttttctctaccactgtagtgattccccactacccgaatcagcccacgaccccggagttgtgggtacatag

SEQ ID NO: 65548 - DNA, 189 bp, Artificial Sequence
  derived and/or modified sequence
atgtactgtctgcaatggctattgcccgtgctgctcatcccgaagcccctgaatcccgctctctggttcagccacagcatgttcatggggttctatctgctgagcttccttttggagcgtaagccttgtacaatttgtgcattggtcttcctggccgctctgtttctgatttgctacagctgttggtag

SEQ ID NO: 65549 - DNA, 264 bp, Artificial Sequence
  derived and/or modified sequence
atgtattgtttacaatggcttctcccagtgttacttattcctaagccgctgaaccccgctctgtggttctcgcacagcatgttcatgggattttatctcttgtccttcctcttggagaggaagccctgcactatctgtgccttggttttcttggctgctctgttcctcatctgctactcttgttggggtaactgttttctgtatcactgcagcgacagccccttaccagagtctgcgcacgatcctggagtggtgggaacgtag

SEQ ID NO: 65550 - DNA, 264 bp, Artificial Sequence
  derived and/or modified sequence
atgtactgtttgcagtggcttttaccagtgcttttaatcccaaaacctctgaaccccgcactgtggttttcccacagtatgtttatgggattctacctcctgtcgttccttctggagagaaaaccctgtaccatctgcgcactggtgtttttagcggctctgttccttatctgttactcgtgctggggcaactgcttcctgtaccattgctcagattcccctctccccgagagtgcacacgacccgggtgttgtgggtacctag

SEQ ID NO: 65551 - DNA, 237 bp, Artificial Sequence
  derived and/or modified sequence
atgtactgtctgcagtggctgctgccagttttgctgatacctaagccactcaatcccgctttgtggtttagtcactctatgttcatgggattttacctactatcctttctgctggagcgaaagccctgcaccatttgcgctctcgtgtttctcgccgctctctttttgatctgctactcttgctgggggaattgctttttgtatcattgctctgactctcctcttcccgaaagctag

SEQ ID NO: 65552 - DNA, 2073 bp, Artificial Sequence
  derived and/or modified sequence
aggatgggtcctcggccggctcgactagaagactaagggggcgtctccccggcttcctgcggcgtcggtggcgagctgaggtggaggcaggctgcggcagacggcgacagtggcggcggcgccatggcagggcttgcaggatccctgctgccttggtgatcccgggctgacagccagagagcacagcggctcagctcctggagagtgagggttgaagaaagcggagggcagccgcctgcgcccgctggctcccattaggtcggttcctgcagcggtgcccggcagccttggtgaaggccctgcccggcagagatcatgtattgcctccagtggctgctgcccgtcctcctcatccccaagcccctcaaccccgccctgtggttcagccactccatgttcatgggcttctacctgctcagcttcctcctggaacggaagccttgcacaatttgtgccttggttttcctggcagccctgttccttatctgctatagctgctggggaaactgtttcctgtaccactgctccgattccccgcttccagaatcggcgcatgatcccggcgttgtgggcacctaacggcctgccctgttagctttccaaggaagcagaagacgggaggggaggcattgacataggtcataaagcattggagtttcaaatcccgcagcctcgcgggtgtcacattcctgacggcgcctttttggcctgtgatgttttatccttacaatgtgaataatggcactgaccggtgcttttattgtaaagtcctatagtcgtgggtggtcttgtggttgtgtgtgttctgtccccatctaggtcctggctggccgcatgaccacccctctcgcctcattactgtgaggagtctgggtccatcctggtcagctgccccaatgtgacctggggcagataaaatgccagtctcattgtcacctctgtgacccctccttgtcagggtctccttccttcccagaatgttactgactcctcagtccctcttctggtttccctttatttctcttctacccttttccttttttggggagtacctgtccaagacagggctcatttttgcacttatctcgaatttgaagagattgctgacgcccgagagcctcgctttttcatccttctttccttgttcagcaggctagacagaaacatgtcttgactgttagttgtccacaaatcttcagtattttctccacttcatttttaagaaaggaagcaacagatagatgttgctctttcacctgggtgtctgggctcaagctttcccgcccagcctcacttcctttgcccttcctcctgcctttctcaactgtcccaaggagggggcctcattgtgtctcccgtgcatgctctgcagcattgaagtatggtgtgttcacgtagttctagcagtccccagctgagtgagtgggagagtacctgtgtgtttcgtaacggccttgatccccttgatagatgtttggatattttttggtgtgccctgtgtgtgtgtgtgtacaaatacatgtgtatattccttttaaagaagctttatcgaacgtggtctgattttgaggtttagcaatagctagctatatatggtaggtgccgctacagtttttatttagcatggggattgcagagtgaccagcacactggactccgaggtggttcagacaagacagaggggagcagtggccatcatcctcccgccaggagcttcttcgttcctgcgcatatagactgtacattatgaagaatacccaggaagactttgtgactgtcacttgctgctttttctgcgcttcagtaacaagtgttggcaaacgagactttctcctggcccctgcctgctggagatcagcatgcctgtcctttcagtctgatccatccatctctctcttgcctgaggggaaagagagatgggccaggcagagaacagaactggaggcagtccatctagggaatgggactgtgaggccatacttgtgaaacgtctggactgctattctagagcttttatttggtgtgttcgttgcacagctgtttgaaatgtttaataaagctttataaacttta

SEQ ID NO: 65553 - DNA, 633 bp, Artificial Sequence
  derived and/or modified sequence
acataaagccagagacaaggctgaacaggcggcagggccatttggtgagacagtcagctgaccccgtgtagaaagagccctgactcactggggagtgggagaggaagacaagtccgaggccgagcactgcccaccctgacgtgatggcaggggagagcccagggccacggacctggatccctgctgccttggtgatcccgggctgacagccagagagcacagcggctcagctcctggagagtgagggttgaagaaagcggagggcagccgcctgcgcccgctggctcccattaggtcggttcctgcagcggtgcccggcagccttggtgaaggccctgcccggcagagatcatgtattgcctccagtggctgctgcccgtcctcctcatccccaagcccctcaaccccgccctgtggttcagccactccatgttcatgggcttctacctgctcagcttcctcctggaacggaagccttgcacaatttgtgccttggttttcctggcagccctgttccttatctgctatagctgctggggaaactgtttcctgtaccactgctccgattccccgcttccagaatcggcgcatgatcccggcgttgtgggcacctaacggcctgccctgttagct

SEQ ID NO: 65554 - DNA, 566 bp, Artificial Sequence
  derived and/or modified sequence
tagaccgccagtcttgtgggtccctcgcacagcgcggattttcgggcgggaagaccggaatgcggtttgatccctgctgccttggtgatcccgggctgacagccagagagcacagcggctcagctcctggagagtgagggttgaagaaagcggagggcagccgcctgcgcccgctggctcccattaggtcggttcctgcagcggtgcccggcagccttggtgaaggccctgcccggcagagatcatgtattgcctccagtggctgctgcccgtcctcctcatccccaagcccctcaaccccgccctgtggttcagccactccatgttcatgggcttctacctgctcagcttcctcctggaacggaagccttgcacaatttgtgccttggttttcctggcagccctgttccttatctgctatagctgctggggaaactgtttcctgtaccactgctccgattccccgcttccagaatcggcgcatgatcccggcgttgtgggcacctaacggcctgccctgttagctttccaaggaagcagaagacgggaggggaggcattgacata

SEQ ID NO: 65555 - DNA, 685 bp, Artificial Sequence
  derived and/or modified sequence
cttctgggtcaccttaggcgtcgccgggtccccgtcactggggttttccttccgcataccccgggaaggcagggcgcccctgtccggcttcaggtgattgccgtgattggacctagcctgggccttggggggtcccttcccagcccggaggatccctgctgccttggtgatcccgggctgacagccagagagcacagcggctcagctcctggagagtgagggttgaagaaagcggagggcagccgcctgcgcccgctggctcccattaggtcggttcctgcagcggtgcccggcagccttggtgaaggccctgcccggcagagatcatgtattgcctccagtggctgctgcccgtcctcctcatccccaagcccctcaaccccgccctgtggttcagccactccatgttcatgggcttctacctgctcagcttcctcctggaacggaagccttgcacaatttgtgccttggttttcctggcagccctgttccttatctgctatagctgctggggaaactgtttcctgtaccactgctccgattccccgcttccagaatcggcgcatgatcccggcgttgtgggcacctaacggcctgccctgttagctttccaaggaagcagaagacgggaggggaggcattgacataggtcataaagcattggagtttcaaatcccgcagcctc

SEQ ID NO: 65556 - DNA, 2036 bp, Artificial Sequence
  derived and/or modified sequence
atattgtcccttctgggtcaccttaggcgtcgccgggtccccgtcactggggttttccttccgcataccccgggaaggcagggcgcccctgtccggcttcaggatccctgctgccttggtgatcccgggctgacagccagagagcacagcggctcagctcctggagagtgagggttgaagaaagcggagggcagccgcctgcgcccgctggctcccattaggtcggttcctgcagcggtgcccggcagccttggtgaaggccctgcccggcagagatcatgtattgcctccagtggctgctgcccgtcctcctcatccccaagcccctcaaccccgccctgtggttcagccactccatgttcatgggcttctacctgctcagcttcctcctggaacggaagccttgcacaatttgtgccttggttttcctggcagccctgttccttatctgctatagctgctggggaaactgtttcctgtaccactgctccgattccccgcttccagaatcggcgcatgatcccggcgttgtgggcacctaacggcctgccctgttagctttccaaggaagcagaagacgggaggggaggcattgacataggtcataaagcattggagtttcaaatcccgcagcctcgcgggtgtcacattcctgacggcgcctttttggcctgtgatgttttatccttacaatgtgaataatggcactgaccggtgcttttattgtaaagtcctatagtcgtgggtggtcttgtggttgtgtgtgttctgtccccatctaggtcctggctggccgcatgaccacccctctcgcctcattactgtgaggagtctgggtccatcctggtcagctgccccaatgtgacctggggcagataaaatgccagtctcattgtcacctctgtgacccctccttgtcagggtctccttccttcccagaatgttactgactcctcagtccctcttctggtttccctttatttctcttctacccttttccttttttggggagtacctgtccaagacagggctcatttttgcacttatctcgaatttgaagagattgctgacgcccgagagcctcgctttttcatccttctttccttgttcagcaggctagacagaaacatgtcttgactgttagttgtccacaaatcttcagtattttctccacttcatttttaagaaaggaagcaacagatagatgttgctctttcacctgggtgtctgggctcaagctttcccgcccagcctcacttcctttgcccttcctcctgcctttctcaactgtcccaaggagggggcctcattgtgtctcccgtgcatgctctgcagcattgaagtatggtgtgttcacgtagttctagcagtccccagctgagtgagtgggagagtacctgtgtgtttcgtaacggccttgatccccttgatagatgtttggatattttttggtgtgccctgtgtgtgtgtgtgtacaaatacatgtgtatattccttttaaagaagctttatcgaacgtggtctgattttgaggtttagcaatagctagctatatatggtaggtgccgctacagtttttatttagcatggggattgcagagtgaccagcacactggactccgaggtggttcagacaagacagaggggagcagtggccatcatcctcccgccaggagcttcttcgttcctgcgcatatagactgtacattatgaagaatacccaggaagactttgtgactgtcacttgctgctttttctgcgcttcagtaacaagtgttggcaaacgagactttctcctggcccctgcctgctggagatcagcatgcctgtcctttcagtctgatccatccatctctctcttgcctgaggggaaagagagatgggccaggcagagaacagaactggaggcagtccatctagggaatgggactgtgaggccatacttgtgaaacgtctggactgctattctagagcttttatttggtgtgttcgttgcacagctgtttgaaatgtttaataaagctttataaacttta

SEQ ID NO: 65557 - DNA, 581 bp, Artificial Sequence
  derived and/or modified sequence
ttcctgcggcgtcggtggcgagctgaggtggaggcaggctgcggcagacggcgacagtggcggcggcgccatggcagggcttgcaggggcgcgagttgggaaccctctcccacccgaaaccccgtcagacttacctgcagcagcacgcggaagatgtaccagccgatgatgagcagttcagccgaggccgccgccactgccgccatggttccaagaatggatccctgctgccttggtgatcccgggctgacagccagagagcacagcggctcagctcctggagagtgagggttgaagaaagcggagggcagccgcctgcgcccgctggctcccattaggtcggttcctgcagcggtgcccggcagccttggtgaaggccctgcccggcagagatcatgtattgcctccagtggctgctgcccgtcctcctcatccccaagcccctcaaccccgccctgtggttcagccactccatgttcatgggcttctacctgctcagcttcctcctggaacggaagccttgcacaatttgtgccttggttttcctggcagccctgttccttatctgctatagctgctgg

SEQ ID NO: 65558 - DNA, 2205 bp, Artificial Sequence
  derived and/or modified sequence
aggatgggtcctcggccggctcgactagaagactaagggggcgtctccccggcttcctgcggcgtcggtggcgagctgaggtggaggcaggctgcggcagacggcgacagtggcggcggcgccatggcagggcttgcaggggcgcgagttgggaaccctctcccacccgaaaccccgtcagacttacctgcagcagcacgcggaagatgtaccagccgatgatgagcagttcagccgaggccgccgccactgccgccatggttccaagaatggatccctgctgccttggtgatcccgggctgacagccagagagcacagcggctcagctcctggagagtgagggttgaagaaagcggagggcagccgcctgcgcccgctggctcccattaggtcggttcctgcagcggtgcccggcagccttggtgaaggccctgcccggcagagatcatgtattgcctccagtggctgctgcccgtcctcctcatccccaagcccctcaaccccgccctgtggttcagccactccatgttcatgggcttctacctgctcagcttcctcctggaacggaagccttgcacaatttgtgccttggttttcctggcagccctgttccttatctgctatagctgctggggaaactgtttcctgtaccactgctccgattccccgcttccagaatcggcgcatgatcccggcgttgtgggcacctaacggcctgccctgttagctttccaaggaagcagaagacgggaggggaggcattgacataggtcataaagcattggagtttcaaatcccgcagcctcgcgggtgtcacattcctgacggcgcctttttggcctgtgatgttttatccttacaatgtgaataatggcactgaccggtgcttttattgtaaagtcctatagtcgtgggtggtcttgtggttgtgtgtgttctgtccccatctaggtcctggctggccgcatgaccacccctctcgcctcattactgtgaggagtctgggtccatcctggtcagctgccccaatgtgacctggggcagataaaatgccagtctcattgtcacctctgtgacccctccttgtcagggtctccttccttcccagaatgttactgactcctcagtccctcttctggtttccctttatttctcttctacccttttccttttttggggagtacctgtccaagacagggctcatttttgcacttatctcgaatttgaagagattgctgacgcccgagagcctcgctttttcatccttctttccttgttcagcaggctagacagaaacatgtcttgactgttagttgtccacaaatcttcagtattttctccacttcatttttaagaaaggaagcaacagatagatgttgctctttcacctgggtgtctgggctcaagctttcccgcccagcctcacttcctttgcccttcctcctgcctttctcaactgtcccaaggagggggcctcattgtgtctcccgtgcatgctctgcagcattgaagtatggtgtgttcacgtagttctagcagtccccagctgagtgagtgggagagtacctgtgtgtttcgtaacggccttgatccccttgatagatgtttggatattttttggtgtgccctgtgtgtgtgtgtgtacaaatacatgtgtatattccttttaaagaagctttatcgaacgtggtctgattttgaggtttagcaatagctagctatatatggtaggtgccgctacagtttttatttagcatggggattgcagagtgaccagcacactggactccgaggtggttcagacaagacagaggggagcagtggccatcatcctcccgccaggagcttcttcgttcctgcgcatatagactgtacattatgaagaatacccaggaagactttgtgactgtcacttgctgctttttctgcgcttcagtaacaagtgttggcaaacgagactttctcctggcccctgcctgctggagatcagcatgcctgtcctttcagtctgatccatccatctctctcttgcctgaggggaaagagagatgggccaggcagagaacagaactggaggcagtccatctagggaatgggactgtgaggccatacttgtgaaacgtctggactgctattctagagcttttatttggtgtgttcgttgcacagctgtttgaaatgtttaataaagctttataaacttt

SEQ ID NO: 65559 - DNA, 591 bp, Artificial Sequence
  derived and/or modified sequence
atctgtaggagggatacaggaaggattggcgcccttcgtatgcacggaaggaatgagctctacggagaagtggttggaatatgcttggggatagttttctgctggacaggtcgtttcgacctcagtcttccgctcccctcccccaagccctggatccctgctgccttggtgatcccgggctgacagccagagagcacagcggctcagctcctggagagtgagggttgaagaaagcggagggcagccgcctgcgcccgctggctcccattaggtcggttcctgcagcggtgcccggcagccttggtgaaggccctgcccggcagagatcatgtattgcctccagtggctgctgcccgtcctcctcatccccaagcccctcaaccccgccctgtggttcagccactccatgttcatgggcttctacctgctcagcttcctcctggaacggaagccttgcacaatttgtgccttggttttcctggcagccctgttccttatctgctatagctgctggggaaactgtttcctgtaccactgctccgattccccgcttccagaatcggcgcatgatcccggcgttgtgggcaccta

SEQ ID NO: 65560 - DNA, 588 bp, Artificial Sequence
  derived and/or modified sequence
ttcctgcggcgtcggtggcgagctgaggtggaggcaggctgcggcagacggcgacagtggcggcggcgccatggcagggcttgcagacttacctgcagcagcacgcggaagatgtaccagccgatgatgagcagttcagccgaggccgccgccactgccgccatggttccaagaatggatccctgctgccttggtgatcccgggctgacagccagagagcacagcggctcagctcctggagagtgagggttgaagaaagcggagggcagccgcctgcgcccgctggctcccattaggtcggttcctgcagcggtgcccggcagccttggtgaaggccctgcccggcagagatcatgtattgcctccagtggctgctgcccgtcctcctcatccccaagcccctcaaccccgccctgtggttcagccactccatgttcatgggcttctacctgctcagcttcctcctggaacggaagccttgcacaatttgtgccttggttttcctggcagccctgttccttatctgctatagctgctggggaaactgtttcctgtaccactgctccgattccccgcttccagaatcgg

SEQ ID NO: 65561 - DNA, 264 bp, Artificial Sequence
  derived and/or modified sequence
atgtactgcctgcagtggctgctgcccgtgctgctgatccccaagcccctgaaccccgccctgtggttcagccacagcatgttcatgggcttctacctgctgagcttcctgctggagagaaagccctgcaccatctgcgccctggtgttcctggccgccctgttcctgatctgctacagctgctggggcaactgcttcctgtaccactgcagcgacagccccctgcccgagagcgcccacgaccccggcgtggtgggcacctag

SEQ ID NO: 65562 - DNA, 189 bp, Artificial Sequence
  derived and/or modified sequence
atgtactgcctgcagtggctgctgcccgtgctgctgatccccaagcccctgaaccccgccctgtggttcagccacagcatgttcatgggcttctacctgctgagcttcctgctggagagaaagccctgcaccatctgcgccctggtgttcctggccgccctgttcctgatctgctacagctgctggtag

SEQ ID NO: 65563 - DNA, 237 bp, Artificial Sequence
  derived and/or modified sequence
atgtactgcctgcagtggctgctgcccgtgctgctgatccccaagcccctgaaccccgccctgtggttcagccacagcatgttcatgggcttctacctgctgagcttcctgctggagagaaagccctgcaccatctgcgccctggtgttcctggccgccctgttcctgatctgctacagctgctggggcaactgcttcctgtaccactgcagcgacagccccctgcccgagagctag

SEQ ID NO: 65564 - protein, 476 aa, Artificial Sequence
  derived and/or modified sequence
MASRIGLRMQLMREQAQQEEQRERMQQQAVMHYMQQQQQQQQQQLGGPPTPAINTPVHFQSPPPVPGEVLKVQSYLENPTSYHLQQSQHQKVREYLSETYGNKFAAHISPAQGSPKPPPAASPGVRAGHVLSSSAGNSAPNSPMAMLHIGSNPERELDDVIDNIMRLDDVLGYINPEMQMPNTLPLSSSHLNVYSSDPQVTASLVGVTSSSCPADLTQKRELTDAESRALAKERQKKDNHNLIERRRRFNINDRIKELGMLIPKANDLDVRWNKGTILKASVDYIRRMQKDLQKSRELENHSRRLEMTNKQLWLRIQELEMQARVHGLPTTSPSGMNMAELAQQVVKQELPSEEGPGEALMLGAEVPDPEPLPALPPQAPLPLPTQPPSPFHHLDFSHSLSFGGREDEGPPGYPEPLAPGHGSPFPSLSKKDLDLMLLDDSLLPLASDPLLSTMSPEASKASSRRSSFSMEEGDVL

SEQ ID NO: 65565 - protein, 562 aa, Artificial Sequence
  derived and/or modified sequence
MSEEDRTFSFGPGTRKLGFMSQLSPACSVTLGKSLPLSGLGVFSSKMDAVPVILASPCQPLCFEEDTCLIYLLPLLIHREPAPAATMASRIGLRMQLMREQAQQEEQRERMQQQAVMHYMQQQQQQQQQQLGGPPTPAINTPVHFQSPPPVPGEVLKVQSYLENPTSYHLQQSQHQKVREYLSETYGNKFAAHISPAQGSPKPPPAASPGVRAGHVLSSSAGNSAPNSPMAMLHIGSNPERELDDVIDNIMRLDDVLGYINPEMQMPNTLPLSSSHLNVYSSDPQVTASLVGVTSSSCPADLTQKRELTDAESRALAKERQKKDNHNLIERRRRFNINDRIKELGMLIPKANDLDVRWNKGTILKASVDYIRRMQKDLQKSRELENHSRRLEMTNKQLWLRIQELEMQARVHGLPTTSPSGMNMAELAQQVVKQELPSEEGPGEALMLGAEVPDPEPLPALPPQAPLPLPTQPPSPFHHLDFSHSLSFGGREDEGPPGYPEPLAPGHGSPFPSLSKKDLDLMLLDDSLLPLASDPLLSTMSPEASKASSRRSSFSMEEGDVL

SEQ ID NO: 65566 - protein, 490 aa, Artificial Sequence
  derived and/or modified sequence
MTASSGWEPAPAATMASRIGLRMQLMREQAQQEEQRERMQQQAVMHYMQQQQQQQQQQLGGPPTPAINTPVHFQSPPPVPGEVLKVQSYLENPTSYHLQQSQHQKVREYLSETYGNKFAAHISPAQGSPKPPPAASPGVRAGHVLSSSAGNSAPNSPMAMLHIGSNPERELDDVIDNIMRLDDVLGYINPEMQMPNTLPLSSSHLNVYSSDPQVTASLVGVTSSSCPADLTQKRELTDAESRALAKERQKKDNHNLIERRRRFNINDRIKELGMLIPKANDLDVRWNKGTILKASVDYIRRMQKDLQKSRELENHSRRLEMTNKQLWLRIQELEMQARVHGLPTTSPSGMNMAELAQQVVKQELPSEEGPGEALMLGAEVPDPEPLPALPPQAPLPLPTQPPSPFHHLDFSHSLSFGGREDEGPPGYPEPLAPGHGSPFPSLSKKDLDLMLLDDSLLPLASDPLLSTMSPEASKASSRRSSFSMEEGDVL

SEQ ID NO: 65567 - protein, 268 aa, Artificial Sequence
  derived and/or modified sequence
MASRIGLRMQLMREQAQQEEQRERMQQQAVMHYMQQQQQQQQQQLGGPPTPAINTPVHFQSPPPVPGEVLKVQSYLENPTSYHLQQSQHQKVREYLSETYGNKFAAHISPAQGSPKPPPAASPGVRAGHVLSSSAGNSAPNSPMAMLHIGSNPERELDDVIDNIMRLDDVLGYINPEMQMPNTLPLSSSHLNVYSSDPQVTASLVGVTSSSCPADLTQKRELTDAESRALAKERQKKDNHNLIERRRRFNINDRIKELGMLIPKANDL

SEQ ID NO: 65568 - protein, 223 aa, Artificial Sequence
  derived and/or modified sequence
MASRIGLRMQLMREQAQQEEQRERMQQQAVMHYMQQQQQQQQQQLGGPPTPAINTPVHFQSPPPVPGEVLKVQSYLENPTSYHLQQSQHQKVREYLSETYGNKFAAHISPAQGSPKPPPAASPGVRAGHVLSSSAGNSAPNSPMAMLHIGSNPERELDDVIDNIMRLDDVLGYINPEMQMPNTLPLSSSHLNVYSSDPQVTASLVGVTSSSCPADLTQKRELT

SEQ ID NO: 65569 - protein, 71 aa, Artificial Sequence
  derived and/or modified sequence
MASRIGLRMQLMREQAQQEEQRERMQQQAVMHYMQQQQQQQQQQLGGPPTPAINTPVHFQSPPPVPGEVLK

SEQ ID NO: 65570 - protein, 79 aa, Artificial Sequence
  derived and/or modified sequence
MASRIGLRMQLMREQAQQEEQRERMQQQAVMHYMQQQQQQQQQQLGGPPTPAINTPVHFQSPPPVPGEVLKVQSYLENP

SEQ ID NO: 65571 - protein, 32 aa, Artificial Sequence
  derived and/or modified sequence
MASRIGLRMQLMREQAQQEEQRERMQQQAVMH

SEQ ID NO: 65572 - DNA, 1689 bp, Artificial Sequence
  derived and/or modified sequence
atgtccgaggaggacaggacctttagttttgggcctggcaccagaaagctgggcttcatgtcgcagctgtcccccgcgtgcagtgtgactcttgggaagagcctgcccctcagcgggctgggcgtgttcagctctaagatggacgcagtgcccgtgatacttgctagcccttgccagccactgtgttttgaggaggatacatgtctcatctatctgctgccacttctgatccaccgggagcccgccccggccgcaactatggcttcaaggattggcctacggatgcaactgatgagggagcaggctcagcaagaggagcagagagaaaggatgcaacagcaagctgtgatgcattacatgcagcagcaacaacagcagcaacagcagcagcttggaggacctccaacgcctgctattaatactccagtacattttcagtccccgccaccagtaccaggggaggttttgaaagtccagtcctacctcgaaaatccaacctcttaccaccttcagcaatcccagcatcagaaggtcagggagtatcttagtgagacatacggaaacaagtttgctgcccacatttcaccagcacagggctcccccaagccacctccggcagcatccccgggagtgcgcgccggccacgttctgagcagtagcgcgggaaacagcgctcctaatagcccgatggccatgctccatattggttctaatcctgaaagagaactggacgacgtaattgacaatatcatgaggttggacgacgtgctcggctatatcaaccccgagatgcaaatgcccaacactctccctttgagcagctctcacttaaacgtctactcttcggatcctcaggtcaccgccagcctggtgggtgtaacctcctcatcgtgccccgccgacctaacacagaagcgtgagctaactgatgccgagtccagagcgctagccaaagagcgtcaaaagaaagacaatcataatctgatcgaaaggcggcggagatttaacatcaacgacagaattaaagagctggggatgttgataccaaaagcgaacgacctagacgtgagatggaataagggcactatcctcaaggctagcgttgactatataagaaggatgcaaaaggacctgcagaagtcccgggaacttgaaaaccatagccgtaggctggagatgactaataaacagctttggttaagaatccaggaactggaaatgcaggcccgagtgcacggtctgcccactacatccccatcaggcatgaatatggccgaactggcccagcaagtcgttaaacaggagctccccagcgaagagggtcccggggaggctttgatgctgggagctgaagtaccggatccagagccactccccgccctccccccacaggctccactgccactgccaacacagccaccatcccccttccatcatctcgacttttctcactctctctccttcggcggccgggaggacgagggaccacccggatatcccgaaccattggcccccggacacgggtcgcctttcccaagcctgagtaaaaaggacctggacctcatgctgcttgacgattcattgcttcccctcgccagcgacccccttctatccaccatgagtccagaggcatcaaaagcaagtagtcgtcgttcctcgttttcaatggaggagggcgatgtgctttag

SEQ ID NO: 65573 - DNA, 1473 bp, Artificial Sequence
  derived and/or modified sequence
atgaccgcttcttcaggatgggagcctgcgcctgctgcaaccatggcctcccgaattggcctgagaatgcagctcatgcgcgagcaggctcaacaggaagagcagagagagcgtatgcagcaacaggctgtcatgcactatatgcagcaacagcagcagcaacagcagcagcaattagggggtccacctacccctgctattaatacacccgtccacttccaatccccccctccagtgcccggtgaagtcctcaaggtccaatcatatcttgagaatccaacctcctatcaccttcagcagtctcagcaccagaaggtgcgagaatatctcagcgagacctacggaaacaagttcgccgcccatatcagccctgcgcagggtagcccaaaacctccgcccgccgcgtcccctggggtccgcgcgggacacgtgctcagcagctccgctgggaattcagcgcctaactctcctatggccatgctacacattgggtcaaatccagagcgcgaacttgacgatgttatcgataatatcatgaggttagacgatgtgctgggatacataaatccagaaatgcagatgccaaacaccttgcccctgtcctctagccatcttaatgtttactcttcagatcctcaggtgacggctagcctggtcggagtcacttcaagcagttgtcctgctgaccttacacagaagagagaattaactgacgctgaaagtagagccttggcaaaggagaggcagaagaaggacaaccacaatctaatagaaagacgccgaaggtttaacatcaatgaccgtattaaagagttgggcatgctgatccctaaagcaaacgacctggacgtgaggtggaacaaaggcactatactaaaggcttccgttgactatattagacgcatgcagaaagacttacaaaagtctcgagaactcgagaaccacagcaggaggctcgagatgaccaataagcaactgtggctgcgcattcaggagttggagatgcaagcaagggttcatggcttgccaaccacatccccatcagggatgaatatggccgaactagcacagcaggtggtaaaacaagaattaccatccgaggaaggtccgggtgaagcgctcatgcttggcgccgaggtgcctgatccagaacctctgcctgcactacctcctcaggcccctttacccttgccaactcaacctccgagtcctttccatcatctcgatttctcccattctctgtcattcggcgggcgggaggacgaaggtccaccaggatatcccgagcctctagccccaggccacggctccccattcccctccctctctaaaaaggacctcgacctcatgctcctagatgacagtctgctgcctttagcttcagaccccctactgtccactatgtctcccgaagcttccaaggcatcgtctaggcgaagctctttttctatggaggaaggagatgtactgtag

SEQ ID NO: 65574 - DNA, 39 bp, Artificial Sequence
  derived and/or modified sequence
atggccagccgtatcggattgcggatgcaacttatgtag

SEQ ID NO: 65575 - DNA, 39 bp, Artificial Sequence
  derived and/or modified sequence
atggcatccagaatcggtctgcgaatgcagcttatgtag

SEQ ID NO: 65576 - DNA, 1689 bp, Artificial Sequence
  derived and/or modified sequence
atgtctgaggaggacaggaccttctcctttggacctggcaccaggaagctgggcttcatgagccagctgagccctgcctgcagcgtgaccctgggcaagagcctgcccctgagcggcctgggcgtcttcagcagcaagatggatgctgtgcctgtgatcctggccagcccctgccagcccctgtgctttgaggaggacacctgcctgatctacctgctgcccctgctgatccaccgggagcccgccccagctgccaccatggccagcagaattggcctgaggatgcagctgatgagggagcaggcccagcaggaggagcagcgggagaggatgcagcagcaggccgtgatgcactacatgcagcagcagcagcagcagcagcagcagcagctgggcggcccccccaccccagccatcaacacccctgtgcacttccagagccccccacctgtgcctggagaggtgctgaaggtgcagagctacctggagaaccccaccagctaccacctgcagcagagccagcaccagaaggtgcgggagtacctgtctgagacctacggcaacaagtttgctgcccacatcagccctgcccagggcagccccaagcccccacctgctgccagccctggggtgcgggccggccacgtgctgagcagcagcgctggcaacagcgcccccaacagccccatggccatgctgcacatcggcagcaaccctgagcgggagctggatgatgtgattgacaacatcatgaggctggatgatgtgctgggctacatcaaccctgagatgcagatgcccaacaccctgcccctgagcagcagccacctgaatgtgtacagcagtgacccccaggtgacagccagcctggtgggcgtgaccagcagcagctgcccagctgacctgacccagaagcgggagctgacagatgctgagagccgggccctggccaaggagcggcagaagaaggacaaccacaacctgattgaaagaagaagacgcttcaacatcaatgaccgcatcaaggagctgggcatgctgatccccaaggccaatgacctggatgtgcgctggaacaagggcaccatcctgaaggcctctgtggactacatccggaggatgcagaaggacctgcagaagagccgggagctggagaaccacagccggcggctggagatgaccaacaagcagctgtggctgcgcatccaggagctggagatgcaggcccgggtgcacggcctgcccaccaccagccccagcggcatgaacatggccgagctggcccagcaggtggtgaagcaggagctgcccagcgaggagggccctggagaggccctgatgctgggcgctgaggtgcctgaccctgagcccctgcctgccctgcccccccaggcccccctgcccctgcccacccagccccccagccccttccaccacctggacttcagccacagcctgagctttggaggccgggaggatgagggccccccaggctacccagagcccctggcccctggccacggcagccccttccccagcctgagcaagaaggacctggacctgatgctgctggatgacagcctgctgcccctggccagtgaccccctgctgagcaccatgagccctgaggccagcaaggccagcagccgccgcagcagcttctccatggaggagggagatgtgctgtag

SEQ ID NO: 65577 - DNA, 1473 bp, Artificial Sequence
  derived and/or modified sequence
atgacagccagcagcggctgggagcccgccccagctgccaccatggccagcagaattggcctgaggatgcagctgatgagggagcaggcccagcaggaggagcagcgggagaggatgcagcagcaggccgtgatgcactacatgcagcagcagcagcagcagcagcagcagcagctgggcggcccccccaccccagccatcaacacccctgtgcacttccagagccccccacctgtgcctggagaggtgctgaaggtgcagagctacctggagaaccccaccagctaccacctgcagcagagccagcaccagaaggtgcgggagtacctgtctgagacctacggcaacaagtttgctgcccacatcagccctgcccagggcagccccaagcccccacctgctgccagccctggggtgcgggccggccacgtgctgagcagcagcgctggcaacagcgcccccaacagccccatggccatgctgcacatcggcagcaaccctgagcgggagctggatgatgtgattgacaacatcatgaggctggatgatgtgctgggctacatcaaccctgagatgcagatgcccaacaccctgcccctgagcagcagccacctgaatgtgtacagcagtgacccccaggtgacagccagcctggtgggcgtgaccagcagcagctgcccagctgacctgacccagaagcgggagctgacagatgctgagagccgggccctggccaaggagcggcagaagaaggacaaccacaacctgattgaaagaagaagacgcttcaacatcaatgaccgcatcaaggagctgggcatgctgatccccaaggccaatgacctggatgtgcgctggaacaagggcaccatcctgaaggcctctgtggactacatccggaggatgcagaaggacctgcagaagagccgggagctggagaaccacagccggcggctggagatgaccaacaagcagctgtggctgcgcatccaggagctggagatgcaggcccgggtgcacggcctgcccaccaccagccccagcggcatgaacatggccgagctggcccagcaggtggtgaagcaggagctgcccagcgaggagggccctggagaggccctgatgctgggcgctgaggtgcctgaccctgagcccctgcctgccctgcccccccaggcccccctgcccctgcccacccagccccccagccccttccaccacctggacttcagccacagcctgagctttggaggccgggaggatgagggccccccaggctacccagagcccctggcccctggccacggcagccccttccccagcctgagcaagaaggacctggacctgatgctgctggatgacagcctgctgcccctggccagtgaccccctgctgagcaccatgagccctgaggccagcaaggccagcagccgccgcagcagcttctccatggaggagggagatgtgctgtag

SEQ ID NO: 65578 - DNA, 39 bp, Artificial Sequence
  derived and/or modified sequence
atggccagcagaattggcctgaggatgcagctgatgtag

SEQ ID NO: 65579 - DNA, 1689 bp, Artificial Sequence
  derived and/or modified sequence
atgagcgaggaggaccggaccttcagcttcggccccggcacccggaaacttgggtttatgagccaactgagtcccgcgtgctctgtgaccctgggtaagagcttgccattatctggactgggagtgtttagtagcaaaatggacgccgtcccagtcatcctggcctcaccctgtcagcctctgtgctttgaagaagatacttgtctcatttacctcttacccctcctcatccatcgcgagcccgcccctgcagccaccatggcctccagaattggcctgcgaatgcaacttatgcgagagcaggcgcagcaagaggagcagcgcgagcgtatgcagcagcaggctgttatgcactacatgcaacagcagcagcagcagcagcagcagcagctgggaggcccccctacccccgccatcaacacccccgtgcatttccagtctcccccaccagttcctggcgaggtactgaaagttcaaagttatctcgagaatcccacctcataccaccttcagcagtcacagcatcagaaggtgcgtgagtacctgtctgaaacctatggtaataagttcgcggctcatatcagccccgctcaaggtagtccaaagccaccccctgccgccagtcccggggtgcgcgcaggccacgtgctttcaagctcagctgggaattcggccccaaattcgccgatggcaatgctgcacatcggcagcaaccccgaaagagagcttgacgatgtcattgataacattatgagactggatgacgtcctcggctacatcaatccagaaatgcagatgcccaataccttaccactctcatctagccatctgaatgtgtattcctcggatccgcaggttacagcctcgctggtgggagtcacttccagctcatgtcctgcagacctgacacagaaacgggaactgacagatgctgagagccgggcactggcaaaagaacgacaaaaaaaggacaatcataacctgatcgagagaaggcggcgctttaatattaacgacaggattaaggagcttggaatgttaataccaaaagctaatgatttagacgtgaggtggaacaagggaactatcctgaaggccagcgtcgattatattcggcgaatgcagaaagacttacagaagtcgagggaactggaaaaccatagcagacgcttggaaatgacaaacaagcagctgtggctccgcattcaagagctggaaatgcaggcaagagtgcacgggttgcctacaacctcgcccagtggcatgaatatggcagaactggcgcagcaagtggtgaaacaagaacttccttctgaggaaggccctggtgaagctctaatgctcggcgccgaggttccggacccagaaccgctgccagccctacctccccaagcaccccttccgttacccacacaacccccctcaccgtttcaccatctagatttttcacacagtctgtcttttggcggtagggaagacgaaggacctcccggatacccagaacccctcgcccccggccatggctctcctttcccaagcctgagtaagaaagacctagacctgatgctgctggatgattcgcttctacccctggcatccgatcccctcctatcaacgatgtctccagaggcttcaaaggcaagttcccgccgatcctcatttagcatggaagaaggggacgttttatag

SEQ ID NO: 65580 - DNA, 1473 bp, Artificial Sequence
  derived and/or modified sequence
atgaccgccagcagcggctgggagcccgcccccgccgccaccatggccagcaggattggtttgagaatgcagctcatgcgggagcaagcccagcaagaggaacagagggagcggatgcagcagcaagcggttatgcactatatgcagcagcagcagcagcagcagcagcagcagctaggcgggccccctacccccgcaatcaacaccccggttcacttccaatcgccaccaccagtgcctggcgaggtccttaaagtgcagtcatatttggagaatcctaccagctaccacttgcagcaaagccagcaccaaaaagtcagagagtacctgtctgaaacttacggtaataaattcgctgcacacatctctccagctcaggggtcaccgaaacctcctcctgcggccagtccaggcgtacgggctgggcatgtgcttagcagcagcgctggtaacagcgcacccaatagccccatggctatgctgcatataggcagtaatcctgaaagagaactcgacgacgtcatagacaatattatgaggctggatgacgtcctgggctacatcaaccccgagatgcaaatgcccaatactcttccactctcctcatctcacttgaatgtgtacagctctgacccccaggtcacagccagcctggttggagtgacttcctcctcttgtcctgccgacctgacacaaaaaagagagttaactgatgctgaatcgcgcgctcttgcaaaagaaagacagaagaaggataatcataatttgatcgagcggcggagacggttcaatatcaacgaccggattaaagaactgggtatgctaatcccgaaggcaaacgatctggacgtgcgatggaataaaggtaccatcctcaaggcctcagtcgactatatacggcgcatgcagaaggacctacagaaaagtagagagctggaaaatcacagccgccgcctcgaaatgactaataagcagctgtggctcaggatccaagagctggaaatgcaggcgcgagtgcatgggttaccaactacctcaccgtcagggatgaatatggcagaactcgcccagcaggtcgtgaaacaggagctgcccagcgaagaagggccaggcgaggcgttgatgcttggggccgaagtgccagaccctgaacctctgcccgctctaccaccgcaggccccgctgcctctgccaacccagccccccagtccattccaccatctagacttctcccatagcctgagctttgggggcagggaagatgaaggaccacctgggtatccagaacctctggcacctggacacggctcaccttttccctcactttctaaaaaggatctggatctgatgctgcttgatgacagtctcctgccacttgcctccgaccctctcctttccactatgagtccagaagccagcaaggcctccagccgcaggagttccttcagcatggaagagggcgatgtcctatag

SEQ ID NO: 65581 - DNA, 39 bp, Artificial Sequence
  derived and/or modified sequence
atggccagccggatcggcctgcggatgcagctgatgtag

SEQ ID NO: 65582 - DNA, 1689 bp, Artificial Sequence
  derived and/or modified sequence
atgtctgaggaggacaggactttttccttcggccctggaacccggaaactgggttttatgtctcaacttagcccggcatgcagtgtcaccctgggaaaaagtctgcctctctcagggctcggggttttctcttctaagatggacgcagtgcccgtgatcctggccagtccatgccagccgctctgtttcgaggaggacacctgcctcatctacctgctgcccctgctgatccaccgtgagcctgcccctgccgctactatggccagccgtattggcttgcggatgcagctaatgcgagagcaggcccagcaagaagagcaacgcgagaggatgcagcaacaggcggttatgcactatatgcaacagcagcagcagcagcagcagcagcagttagggggtccaccaaccccagccattaacactcctgttcactttcaaagcccgcctccagtacccggagaagtgctcaaagtgcagtcatacttggagaatcctaccagttaccacctgcaacagtctcagcatcaaaaggtgcgcgagtatctttcagaaacatatggcaacaaattcgccgctcacatatcaccagcgcagggctcaccaaagccccctcctgctgcctctcccggtgtaagagcagggcatgtgctctcgtccagcgcaggcaattccgcccctaactcccccatggcaatgctgcacatcggctccaacccggagagggagctcgatgatgttatcgacaacattatgaggctggacgacgttctggggtatataaacccagaaatgcagatgcccaacacgctgccgttatctagctcgcatctgaatgtctactctagtgaccctcaggtcactgcatccctggttggtgttaccagtagcagctgtccagctgacctgacacagaaaagagaactgacagatgccgagagtagggctctagctaaagaacgacaaaagaaagataatcataatctcatcgaaaggagaaggaggttcaacatcaacgatcggattaaggagttgggaatgcttataccgaaggccaacgatcttgatgttcgatggaacaaagggaccattctcaaagcgagcgtggactatattagaaggatgcagaaggaccttcagaagagtcgggagctcgaaaaccactccagaagactcgagatgacgaacaaacaactgtggcttcgtatccaggagctggaaatgcaggcccgagtacatggcctccccacaacgtccccttcaggcatgaacatggccgagctggcccagcaggtggtaaagcaggagctgccctcagaggagggaccgggagaagctcttatgctgggcgctgaagtccccgatccagaacctttgcctgccctgccaccacaggctccactgcccctgccaacgcagccaccaagcccattccatcatctggatttcagccattctctcagcttcgggggtagggaagacgagggcccacctggataccctgagcctcttgctccaggccacgggtcgccctttccatctttaagcaaaaaagatttggacttgatgcttctggacgacagccttttacccctggcctccgatcctctcctgtctacaatgagccccgaagcctctaaggcaagtagccggagatccagtttcagcatggaagagggcgacgtgctttag

SEQ ID NO: 65583 - DNA, 1473 bp, Artificial Sequence
  derived and/or modified sequence
atgaccgcctcctctggctgggaaccggcacccgcagccacaatggcttcaaggatcgggttaaggatgcagctcatgagagagcaggcccaacaagaagaacaacgggagcggatgcagcaacaagcagtcatgcattatatgcagcagcagcaacagcagcagcagcagcagttgggtgggcctcctaccccagctattaacacccccgtgcacttccagtcgccacccccagtaccaggtgaggtgttgaaggtccagagctatctagagaaccccaccagctaccatctgcagcagtcacagcatcagaaggtgcgggagtatctctctgaaacgtacggcaataaatttgcagcccacatatccccagctcagggcagtccaaagcctccacctgccgctagtccaggagtacgggctggacatgtcctgtctagcagtgccggaaacagcgctccaaattctcccatggcaatgctacatatcggatccaaccctgagcgcgaactggacgacgtcattgataatataatgaggctcgacgatgtactggggtacatcaatccagaaatgcagatgcccaataccctgccattgtcttctagtcatcttaacgtgtattcgagcgacccccaggtgaccgccagtctggttggcgtaaccagctcttcttgtccagcagatttaacccagaagcgcgagctgaccgatgcagagtcccgggcactggctaaggaacgccagaagaaagataaccacaacctgatcgaacgtcggaggaggttcaacattaatgaccgcattaaggagcttggaatgctgatccccaaagcgaacgacttggatgtcaggtggaataaggggaccatcttgaaagcctctgtcgactatatccggaggatgcagaaagacttgcaaaagtctcgggaattggagaaccattcgcgaagactcgaaatgactaacaagcagctgtggttgagaatccaagagctggaaatgcaggccagagtccatgggctgccaacgacgtcaccgagcggaatgaacatggcagaacttgcccagcaggtggtcaaacaggagttgccgtcagaggagggcccaggtgaggccctgatgctcggggcagaggtacctgatccagagcctctgcctgcactgccgcctcaggcacccctgccactgcctacccagccaccttccccttttcaccacctcgatttctcacactccctctccttcggtggtagggaggacgagggtccgcctggctaccccgaaccactggcacctgggcatggaagccctttcccgtccctgagtaagaaggatttggacctgatgctactggatgacagcctgttacccctggcttctgacccccttctatctactatgtcccctgaggcctcaaaagcaagctcacggaggtcctctttctctatggaggagggcgacgtgctgtag

SEQ ID NO: 65584 - DNA, 39 bp, Artificial Sequence
  derived and/or modified sequence
atggcatcccgcattggattacgcatgcagctgatgtag

SEQ ID NO: 65585 - DNA, 39 bp, Artificial Sequence
  derived and/or modified sequence
atggcctctaggataggattacggatgcagctaatgtag

SEQ ID NO: 65586 - DNA, 2354 bp, Artificial Sequence
  derived and/or modified sequence
ggccgggcgggcatgggccttcccggcccggagctgggagtcgaaggggcgggaggcgtgatggtgaactcgcaagaagtttgagggacgcgcgggccccgcgcccactccccctccaccggacacggctggggccggcgatgcctgagagggggtcggaggacgcagtgaacatatatgcatgtacagtgtggatcctcatctgagaggagggagatgaaaacacacccacctcacaggctgttgtgaggactaagggtgcggcagtgcctggtacatgggagccagcgccggcagccaccatggcgtcacgcatagggttgcgcatgcagctcatgcgggagcaggcgcagcaggaggagcagcgggagcgcatgcagcaacaggctgtcatgcattacatgcagcagcagcagcagcagcaacagcagcagctcggagggccgcccaccccggccatcaatacccccgtccacttccagtcgccaccacctgtgcctggggaggtgttgaaggtgcagtcctacctggagaatcccacatcctaccatctgcagcagtcgcagcatcagaaggtgcgggagtacctgtccgagacctatgggaacaagtttgctgcccacatcagcccagcccagggctctccgaaacccccaccagccgcctccccaggggtgcgagctggacacgtgctgtcctcctccgctggcaacagtgctcccaatagccccatggccatgctgcacattggctccaaccctgagagggagttggatgatgtcattgacaacattatgcgtctggacgatgtccttggctacatcaatcctgaaatgcagatgcccaacacgctacccctgtccagcagccacctgaatgtgtacagcagcgacccccaggtcacagcctccctggtgggcgtcaccagcagctcctgccctgcggacctgacccagaagcgagagctcacagatgctgagagcagggccctggccaaggagcggcagaagaaagacaatcacaacttaattgaaaggagacgaaggttcaacatcaatgaccgcatcaaggagttgggaatgctgatccccaaggccaatgacctggacgtgcgctggaacaagggcaccatcctcaaggcctctgtggattacatccggaggatgcagaaggacctgcaaaagtccagggagctggagaaccactctcgccgcctggagatgaccaacaagcagctctggctccgtatccaggagctggagatgcaggctcgagtgcacggcctccctaccacctccccgtccggcatgaacatggctgagctggcccagcaggtggtgaagcaggagctgcctagcgaagagggcccaggggaggccctgatgctgggggctgaggtccctgaccctgagccactgccagctctgcccccgcaagccccgctgcccctgcccacccagccaccatccccattccatcacctggacttcagccacagcctgagctttgggggcagggaggacgagggtcccccgggctaccccgaacccctggcgccggggcatggctccccattccccagcctgtccaagaaggatctggacctcatgctcctggacgactcactgctaccgctggcctctgatccacttctgtccaccatgtcccccgaggcctccaaggccagcagccgccggagcagcttcagcatggaggagggcgatgtgctgtgaccctggctgcccctgtgccagggaacaggggccggcctgggggctgggagggccaggggcacctccctcccacccttcaggctgcactgtgtgtgaagtagccacctgccctgcctccctcctccccgttggcccctgtttggacttagtgcctgtctggcagcctgtggggtcaggagaagcacccccagggcagccctcttgactggcgcagtgggaagaggccttcagcccctctcccggagatggaatcgcggggcagggaggggcagggtgttctagaggtgagaagagggcctggtggagattccctgtcttctgagcccgagcccctcattaccagtgaaggacatgcttgaggggttcgggaagctcctcatctgaggcaactggtcctgggggtgctcaggcctgcctttttgggactcagatggcaggaggtccaccccgcagcctggtcctcggctctcccacaggtgggcaccccccactttggtgctaatagctctccaccaggtggtgtgagcgcgggggctgccagaagcgggaggggtcactgccggaagagcagctgccctccgacccctcactttgtgcctttagtaaacactgtgctttgta

SEQ ID NO: 65587 - DNA, 2315 bp, Artificial Sequence
  derived and/or modified sequence
ctgcaatgagtgaagaagacagaaccttcagttttggtccaggaaccaggaaacttggattcatgtctcagctgtcacccgcttgctcagtgaccttgggcaaatctcttcccctctcagggctcggtgtcttctcctctaaaatggatgcggtcccagtcattctggcctccccctgccagcccctgtgctttgaggaggacacgtgcctcatatacctgctgccccttctcatccacagggagccagcgccggcagccaccatggcgtcacgcatagggttgcgcatgcagctcatgcgggagcaggcgcagcaggaggagcagcgggagcgcatgcagcaacaggctgtcatgcattacatgcagcagcagcagcagcagcaacagcagcagctcggagggccgcccaccccggccatcaatacccccgtccacttccagtcgccaccacctgtgcctggggaggtgttgaaggtgcagtcctacctggagaatcccacatcctaccatctgcagcagtcgcagcatcagaaggtgcgggagtacctgtccgagacctatgggaacaagtttgctgcccacatcagcccagcccagggctctccgaaacccccaccagccgcctccccaggggtgcgagctggacacgtgctgtcctcctccgctggcaacagtgctcccaatagccccatggccatgctgcacattggctccaaccctgagagggagttggatgatgtcattgacaacattatgcgtctggacgatgtccttggctacatcaatcctgaaatgcagatgcccaacacgctacccctgtccagcagccacctgaatgtgtacagcagcgacccccaggtcacagcctccctggtgggcgtcaccagcagctcctgccctgcggacctgacccagaagcgagagctcacagatgctgagagcagggccctggccaaggagcggcagaagaaagacaatcacaacttaattgaaaggagacgaaggttcaacatcaatgaccgcatcaaggagttgggaatgctgatccccaaggccaatgacctggacgtgcgctggaacaagggcaccatcctcaaggcctctgtggattacatccggaggatgcagaaggacctgcaaaagtccagggagctggagaaccactctcgccgcctggagatgaccaacaagcagctctggctccgtatccaggagctggagatgcaggctcgagtgcacggcctccctaccacctccccgtccggcatgaacatggctgagctggcccagcaggtggtgaagcaggagctgcctagcgaagagggcccaggggaggccctgatgctgggggctgaggtccctgaccctgagccactgccagctctgcccccgcaagccccgctgcccctgcccacccagccaccatccccattccatcacctggacttcagccacagcctgagctttgggggcagggaggacgagggtcccccgggctaccccgaacccctggcgccggggcatggctccccattccccagcctgtccaagaaggatctggacctcatgctcctggacgactcactgctaccgctggcctctgatccacttctgtccaccatgtcccccgaggcctccaaggccagcagccgccggagcagcttcagcatggaggagggcgatgtgctgtgaccctggctgcccctgtgccagggaacaggggccggcctgggggctgggagggccaggggcacctccctcccacccttcaggctgcactgtgtgtgaagtagccacctgccctgcctccctcctccccgttggcccctgtttggacttagtgcctgtctggcagcctgtggggtcaggagaagcacccccagggcagccctcttgactggcgcagtgggaagaggccttcagcccctctcccggagatggaatcgcggggcagggaggggcagggtgttctagaggtgagaagagggcctggtggagattccctgtcttctgagcccgagcccctcattaccagtgaaggacatgcttgaggggttcgggaagctcctcatctgaggcaactggtcctgggggtgctcaggcctgcctttttgggactcagatggcaggaggtccaccccgcagcctggtcctcggctctcccacaggtgggcaccccccactttggtgctaatagctctccaccaggtggtgtgagcgcgggggctgccagaagcgggaggggtcactgccggaagagcagctgccctccgacccctcactttgtgcctttagtaaacactgtgctttgta

SEQ ID NO: 65588 - DNA, 2188 bp, Artificial Sequence
  derived and/or modified sequence
gaggagaaagtagagaatgatgcctccgcaccctgtgaacttccaacaagggaaggtgacatgaaaggagctcagacaatttctgtccagcaacatgacagcaagctcaggctgggagccagcgccggcagccaccatggcgtcacgcatagggttgcgcatgcagctcatgcgggagcaggcgcagcaggaggagcagcgggagcgcatgcagcaacaggctgtcatgcattacatgcagcagcagcagcagcagcaacagcagcagctcggagggccgcccaccccggccatcaatacccccgtccacttccagtcgccaccacctgtgcctggggaggtgttgaaggtgcagtcctacctggagaatcccacatcctaccatctgcagcagtcgcagcatcagaaggtgcgggagtacctgtccgagacctatgggaacaagtttgctgcccacatcagcccagcccagggctctccgaaacccccaccagccgcctccccaggggtgcgagctggacacgtgctgtcctcctccgctggcaacagtgctcccaatagccccatggccatgctgcacattggctccaaccctgagagggagttggatgatgtcattgacaacattatgcgtctggacgatgtccttggctacatcaatcctgaaatgcagatgcccaacacgctacccctgtccagcagccacctgaatgtgtacagcagcgacccccaggtcacagcctccctggtgggcgtcaccagcagctcctgccctgcggacctgacccagaagcgagagctcacagatgctgagagcagggccctggccaaggagcggcagaagaaagacaatcacaacttaattgaaaggagacgaaggttcaacatcaatgaccgcatcaaggagttgggaatgctgatccccaaggccaatgacctggacgtgcgctggaacaagggcaccatcctcaaggcctctgtggattacatccggaggatgcagaaggacctgcaaaagtccagggagctggagaaccactctcgccgcctggagatgaccaacaagcagctctggctccgtatccaggagctggagatgcaggctcgagtgcacggcctccctaccacctccccgtccggcatgaacatggctgagctggcccagcaggtggtgaagcaggagctgcctagcgaagagggcccaggggaggccctgatgctgggggctgaggtccctgaccctgagccactgccagctctgcccccgcaagccccgctgcccctgcccacccagccaccatccccattccatcacctggacttcagccacagcctgagctttgggggcagggaggacgagggtcccccgggctaccccgaacccctggcgccggggcatggctccccattccccagcctgtccaagaaggatctggacctcatgctcctggacgactcactgctaccgctggcctctgatccacttctgtccaccatgtcccccgaggcctccaaggccagcagccgccggagcagcttcagcatggaggagggcgatgtgctgtgaccctggctgcccctgtgccagggaacaggggccggcctgggggctgggagggccaggggcacctccctcccacccttcaggctgcactgtgtgtgaagtagccacctgccctgcctccctcctccccgttggcccctgtttggacttagtgcctgtctggcagcctgtggggtcaggagaagcacccccagggcagccctcttgactggcgcagtgggaagaggccttcagcccctctcccggagatggaatcgcggggcagggaggggcagggtgttctagaggtgagaagagggcctggtggagattccctgtcttctgagcccgagcccctcattaccagtgaaggacatgcttgaggggttcgggaagctcctcatctgaggcaactggtcctgggggtgctcaggcctgcctttttgggactcagatggcaggaggtccaccccgcagcctggtcctcggctctcccacaggtgggcaccccccactttggtgctaatagctctccaccaggtggtgtgagcgcgggggctgccagaagcgggaggggtcactgccggaagagcagctgccctccgacccctcactttgtgcctttagtaaacactgtgctttgta

SEQ ID NO: 65589 - DNA, 2331 bp, Artificial Sequence
  derived and/or modified sequence
gtggagtgacagccggagcccgggcgccgggcgcggggctcggtgacagcggaggcggcggcccgggcgggacgcagggagcggccgcggcgccgacggcggcgggaagggcggacggggcgggcctccctggtggcacggggccggagcaggccgggagcaggtggcgggcacagcttgcgggccaggcacccgaacttgcgacaagttgccggagccgcggggcgcgggcggcggacagattgaccttcagagcgagggagccagcgccggcagccaccatggcgtcacgcatagggttgcgcatgcagctcatgcgggagcaggcgcagcaggaggagcagcgggagcgcatgcagcaacaggctgtcatgcattacatgcagcagcagcagcagcagcaacagcagcagctcggagggccgcccaccccggccatcaatacccccgtccacttccagtcgccaccacctgtgcctggggaggtgttgaaggtgcagtcctacctggagaatcccacatcctaccatctgcagcagtcgcagcatcagaaggtgcgggagtacctgtccgagacctatgggaacaagtttgctgcccacatcagcccagcccagggctctccgaaacccccaccagccgcctccccaggggtgcgagctggacacgtgctgtcctcctccgctggcaacagtgctcccaatagccccatggccatgctgcacattggctccaaccctgagagggagttggatgatgtcattgacaacattatgcgtctggacgatgtccttggctacatcaatcctgaaatgcagatgcccaacacgctacccctgtccagcagccacctgaatgtgtacagcagcgacccccaggtcacagcctccctggtgggcgtcaccagcagctcctgccctgcggacctgacccagaagcgagagctcacagatgctgagagcagggccctggccaaggagcggcagaagaaagacaatcacaacttaattgaaaggagacgaaggttcaacatcaatgaccgcatcaaggagttgggaatgctgatccccaaggccaatgacctggacgtgcgctggaacaagggcaccatcctcaaggcctctgtggattacatccggaggatgcagaaggacctgcaaaagtccagggagctggagaaccactctcgccgcctggagatgaccaacaagcagctctggctccgtatccaggagctggagatgcaggctcgagtgcacggcctccctaccacctccccgtccggcatgaacatggctgagctggcccagcaggtggtgaagcaggagctgcctagcgaagagggcccaggggaggccctgatgctgggggctgaggtccctgaccctgagccactgccagctctgcccccgcaagccccgctgcccctgcccacccagccaccatccccattccatcacctggacttcagccacagcctgagctttgggggcagggaggacgagggtcccccgggctaccccgaacccctggcgccggggcatggctccccattccccagcctgtccaagaaggatctggacctcatgctcctggacgactcactgctaccgctggcctctgatccacttctgtccaccatgtcccccgaggcctccaaggccagcagccgccggagcagcttcagcatggaggagggcgatgtgctgtgaccctggctgcccctgtgccagggaacaggggccggcctgggggctgggagggccaggggcacctccctcccacccttcaggctgcactgtgtgtgaagtagccacctgccctgcctccctcctccccgttggcccctgtttggacttagtgcctgtctggcagcctgtggggtcaggagaagcacccccagggcagccctcttgactggcgcagtgggaagaggccttcagcccctctcccggagatggaatcgcggggcagggaggggcagggtgttctagaggtgagaagagggcctggtggagattccctgtcttctgagcccgagcccctcattaccagtgaaggacatgcttgaggggttcgggaagctcctcatctgaggcaactggtcctgggggtgctcaggcctgcctttttgggactcagatggcaggaggtccaccccgcagcctggtcctcggctctcccacaggtgggcaccccccactttggtgctaatagctctccaccaggtggtgtgagcgcgggggctgccagaagcgggaggggtcactgccggaagagcagctgccctccgacccctcactttgtgcctttagtaaacactgtgctttg

SEQ ID NO: 65590 - DNA, 2595 bp, Artificial Sequence
  derived and/or modified sequence
agatgcggatgcgctcggttagaacgcagttcttggtgccacgactgggagacagtcctcaggccctcccctcagggagctcactgtccggggagggacagccagcaatagttcctggccggccaggagaggcagaggcagaggaagggaagggtcagctgccttgaggtccctgcctgctaacctgacggtatgctttcaccatgccggtgaccccagccccaggaccacgagcaactcgcctggctcccttctctccgtctgcctcctggccgcggggcccggagagctgggagccagagggtgtaaatgaagggcagagctgtttgggtgactccatgctctgcttctccccgagggaagccaatggtgcttaccatttacaaggcttgttacagctgcagggttattttgtcctcaactcagctctgggagacggagccaaatggggacccaggtatcttggttccgggtgccctggaaggagttcaggggatagggcaggggacaccctaggtgggcactgaatctagggagagccaactgggcttttacgggctaatggcctggtgactcacagtcagaggtgggcagggagtgggccagggcaggcaggagcccttccagggtcccacgtgcgctgtcacaggcctcctcagcctgtttctggaaagctgagaagtaggtggaaggggactcccacccctcaagtctggctgccctttgagggtctagctcttggccctgagccctcctggggctctgtttatgactgtaattgcatcattagccagagttaatagagttacttagcacctgcccccacagggagtagcccagccaccccctgggttctgtctcttccttttcaaagtcaactcggtttctgcaggcaacaggggtttccccaaccacagctgtcatgaaaaccaggttgggcctttgtcctggggatggagggcagtcagcacttggggcctggcttggggctgccctggagatgaccatggaaattgggttggcctcctctgatcggagggtgggagttcagggttcccagagctgccagaaatgttcacgtcccaggacgcagtgaacatatatgcatgtacagtgtggatcctcatctgagaggagggagatgaaaacacacccacctcacaggctgttgtgaggactaagggtgcggcagtgcctggtacatgggagccagcgccggcagccaccatggcgtcacgcatagggttgcgcatgcagctcatgcgggagcaggcgcagcaggaggagcagcgggagcgcatgcagcaacaggctgtcatgcattacatgcagcagcagcagcagcagcaacagcagcagctcggagggccgcccaccccggccatcaatacccccgtccacttccagtcgccaccacctgtgcctggggaggtgttgaaggtgcagtcctacctggagaatcccacatcctaccatctgcagcagtcgcagcatcagaaggtgcgggagtacctgtccgagacctatgggaacaagtttgctgcccacatcagcccagcccagggctctccgaaacccccaccagccgcctccccaggggtgcgagctggacacgtgctgtcctcctccgctggcaacagtgctcccaatagccccatggccatgctgcacattggctccaaccctgagagggagttggatgatgtcattgacaacattatgcgtctggacgatgtccttggctacatcaatcctgaaatgcagatgcccaacacgctacccctgtccagcagccacctgaatgtgtacagcagcgacccccaggtcacagcctccctggtgggcgtcaccagcagctcctgccctgcggacctgacccagaagcgagagctcacagatgctgagagcagggccctggccaaggagcggcagaagaaagacaatcacaacttaattgaaaggagacgaaggttcaacatcaatgaccgcatcaaggagttgggaatgctgatccccaaggccaatgacctgtgagcaggtttctgagggggagggtgatgggtctgggtgggcagcagctgacaagtattatctgccctcagccccatgctagttactaggatgggaggagaattccttctagaagttcatctatttgagaaaagatctctccctctcccaaatcaggaaagaatcaggaaagctcaagacagatgagtttctgtcctggaagtgaggctgaggtcaagggaggcttcttggaggagcagtcatgctgagaaagttttcttaaggccattgggctggcagacaagaggccgggctcacgcctataatcccagcactgtgggaagctgaggcaggcagatcacttgaggtcatgagttcaagaccagcctggccaacatggcgaaaccccatctctactaaaaatacaaaacttagctgggcacagtggtgtgtgcctacagtgccagctactagggaggctgagacaggagaattgattgaactcaggaggtggaggtagcagtgagccgagatctcgctactgcactgcattccagcctgggcaacagaacgagactccatctc

SEQ ID NO: 65591 - DNA, 2187 bp, Artificial Sequence
  derived and/or modified sequence
gaggagaaagtagagaatgatgcctccgcaccctgtgaacttccaacaagggaaggtgacatgaaaggagctcagacaatttctgtccagcaacatgacagcaagctcaggctgggagccagcgccggcagccaccatggcgtcacgcatagggttgcgcatgcagctcatgcgggagcaggcgcagcaggaggagcagcgggagcgcatgcagcaacaggctgtcatgcattacatgcagcagcagcagcagcagcaacagcagcagctcggagggccgcccaccccggccatcaatacccccgtccacttccagtcgccaccacctgtgcctggggaggtgttgaaggtgcagtcctacctggagaatcccacatcctaccatctgcagcagtcgcagcatcagaaggtgcgggagtacctgtccgagacctatgggaacaagtttgctgcccacatcagcccagcccagggctctccgaaacccccaccagccgcctccccaggggtgcgagctggacacgtgctgtcctcctccgctggcaacagtgctcccaatagccccatggccatgctgcacattggctccaaccctgagagggagttggatgatgtcattgacaacattatgcgtctggacgatgtccttggctacatcaatcctgaaatgcagatgcccaacacgctacccctgtccagcagccacctgaatgtgtacagcagcgacccccaggtcacagcctccctggtgggcgtcaccagcagctcctgccctgcggacctgacccagaagcgagagctcacagatgctgagagcagggccctggccaaggagcggcagaagaaagacaatcacaacttaattgaaaggagacgaaggttcaacatcaatgaccgcatcaaggagttgggaatgctgatccccaaggccaatgacctggacgtgcgctggaacaagggcaccatcctcaaggcctctgtggattacatccggaggatgcagaaggacctgcaaaagtccagggagctggagaaccactctcgccgcctggagatgaccaacaagcagctctggctccgtatccaggagctggagatgcaggctcgagtgcacggcctccctaccacctccccgtccggcatgaacatggctgagctggcccagcaggtggtgaagcaggagctgcctagcgaagagggcccaggggaggccctgatgctgggggctgaggtccctgaccctgagccactgccagctctgcccccgcaagccccgctgcccctgcccacccagccaccatccccattccatcacctggacttcagccacagcctgagctttgggggcagggaggacgagggtcccccgggctaccccgaacccctggcgccggggcatggctccccattccccagcctgtccaagaaggatctggacctcatgctcctggacgactcactgctaccgctggcctctgatccacttctgtccaccatgtcccccgaggcctccaaggccagcagccgccggagcagcttcagcatggaggagggcgatgtgctgtgaccctggctgcccctgtgccagggaacaggggccggcctgggggctgggagggccaggggcacctccctcccacccttcaggctgcactgtgtgtgaagtagccacctgccctgcctccctcctccccgttggcccctgtttggacttagtgcctgtctggcagcctgtggggtcaggagaagcacccccagggcagccctcttgactggcgcagtgggaagaggccttcagcccctctcccggagatggaatcgcggggcagggaggggcagggtgttctagaggtgagaagagggcctggtggagattccctgtcttctgagcccgagcccctcattaccagtgaaggacatgcttgaggggttcgggaagctcctcatctgaggcaactggtcctgggggtgctcaggcctgcctttttgggactcagatggcaggaggtccaccccgcagcctggtcctcggctctcccacaggtgggcaccccccactttggtgctaatagctctccaccaggtggtgtgagcgcgggggctgccagaagcgggaggggtcactgccggaagagcagctgccctccgacccctcactttgtgcctttagtaaacactgtgctttgt

SEQ ID NO: 65592 - DNA, 1022 bp, Artificial Sequence
  derived and/or modified sequence
tgttgggtaggctgcggtgtgggactgtgccgtcggggcgcagttccctctgtgctgtgagtaatcctcggccgcatttgcagctcccaggggattgtgcaacttcctctccagctgaggtgcagggggctgggtgagaaacagcagccgccggggaaatgaggaaactgagcccggccctggggctggggtgcggccctgggctccggcccctggaggagctgagcattccaggggcctccttccagggggctgccctctcgaagggagccagcgccggcagccaccatggcgtcacgcatagggttgcgcatgcagctcatgcgggagcaggcgcagcaggaggagcagcgggagcgcatgcagcaacaggctgtcatgcattacatgcagcagcagcagcagcagcaacagcagcagctcggagggccgcccaccccggccatcaatacccccgtccacttccagtcgccaccacctgtgcctggggaggtgttgaaggtgcagtcctacctggagaatcccacatcctaccatctgcagcagtcgcagcatcagaaggtgcgggagtacctgtccgagacctatgggaacaagtttgctgcccacatcagcccagcccagggctctccgaaacccccaccagccgcctccccaggggtgcgagctggacacgtgctgtcctcctccgctggcaacagtgctcccaatagccccatggccatgctgcacattggctccaaccctgagagggagttggatgatgtcattgacaacattatgcgtctggacgatgtccttggctacatcaatcctgaaatgcagatgcccaacacgctacccctgtccagcagccacctgaatgtgtacagcagcgacccccaggtcacagcctccctggtgggcgtcaccagcagctcctgccctgcggacctgacccagaagcgagagctcacagatgctgagagcagggccctggccaaggagcggcagaagaaagacaatcacaacttaattgaaag

SEQ ID NO: 65593 - DNA, 984 bp, Artificial Sequence
  derived and/or modified sequence
ggtgtgagctgacgagagcttcaggtgggagcctctcccggcagtgaatctgagggttgggagggatttccggacccagagggaagatattttggggccgagggcctttccagaacccatgaaatcacacaccctgctgcgaccagactgaccctccctagttgatggttcttttttggacatcctaggcctgcttgggattctggccccatgatttagggtttctttggagcccatctgagcctggggggccctgtggtggtggaagaggtccagcctgcggtggtgaaagagggagccagcgccggcagccaccatggcgtcacgcatagggttgcgcatgcagctcatgcgggagcaggcgcagcaggaggagcagcgggagcgcatgcagcaacaggctgtcatgcattacatgcagcagcagcagcagcagcaacagcagcagctcggagggccgcccaccccggccatcaatacccccgtccacttccagtcgccaccacctgtgcctggggaggtgttgaaggtgcagtcctacctggagaatcccacatcctaccatctgcagcagtcgcagcatcagaaggtgcgggagtacctgtccgagacctatgggaacaagtttgctgcccacatcagcccagcccagggctctccgaaacccccaccagccgcctccccaggggtgcgagctggacacgtgctgtcctcctccgctggcaacagtgctcccaatagccccatggccatgctgcacattggctccaaccctgagagggagttggatgatgtcattgacaacattatgcgtctggacgatgtccttggctacatcaatcctgaaatgcagatgcccaacacgctacccctgtccagcagccacctgaatgtgtacagcagcgacccccaggtcacagcctccctggtgggcgtcaccagcagctcctgccctgcggacctgacccagaagcgagagctcac

SEQ ID NO: 65594 - DNA, 340 bp, Artificial Sequence
  derived and/or modified sequence
gttgatgtctgcttttcagtgtactgctgcctctctctgctctcagttcccctgaacatgtctgaagtgggccggtctagctgactcgagggacccatgtcacagggagccagcgccggcagccaccatggcgtcacgcatagggttgcgcatgcagctcatgcgggagcaggcgcagcaggaggagcagcgggagcgcatgcagcaacaggctgtcatgcattacatgcagcagcagcagcagcagcaacagcagcagctcggagggccgcccaccccggccatcaatacccccgtccacttccagtcgccaccacctgtgcctggggaggtgttgaag

SEQ ID NO: 65595 - DNA, 377 bp, Artificial Sequence
  derived and/or modified sequence
ttgaggtccctgcctgctaacctgacgtgtggatcctcatctgagaggagggagatgaaaacacacccacctcacaggctgttgtgaggactaagggtgcggcagtgcctggtacatgggagccagcgccggcagccaccatggcgtcacgcatagggttgcgcatgcagctcatgcgggagcaggcgcagcaggaggagcagcgggagcgcatgcagcaacaggctgtcatgcattacatgcagcagcagcagcagcagcaacagcagcagctcggagggccgcccaccccggccatcaatacccccgtccacttccagtcgccaccacctgtgcctggggaggtgttgaaggtgcagtcctacctggagaatccc

SEQ ID NO: 65596 - DNA, 281 bp, Artificial Sequence
  derived and/or modified sequence
ggccgggcgggcatgggccttcccggcccggagctgggagtcgaaggggcgggaggcgtgatggtgaactcgcaagaagtttgagggacgcgcgggccccgcgcccactccccctccaccggacacggctggggccggcgatgcctgagagggggtcggagggagccagcgccggcagccaccatggcgtcacgcatagggttgcgcatgcagctcatgcgggagcaggcgcagcaggaggagcagcgggagcgcatgcagcaacaggctgtcatgcatta

SEQ ID NO: 65597 - DNA, 168 bp, Artificial Sequence
  derived and/or modified sequence
agctccagccgtcgttctctcgcctgtctgttctggggacggttcagcgcggagcttctgcactcaacttgagcgcagtttttggcttagagctcgctggggaagtgcagggagccagcgccggcagccaccatggcgtcacgcatagggttgcgcatgcagctcatg

SEQ ID NO: 65598 - DNA, 365 bp, Artificial Sequence
  derived and/or modified sequence
ggtgtgagctgacgagagcttcaggcctgcttgggattctggccccatgatttagggtttctttggagcccatctgagcctggggggccctgtggtggtggaagaggtccagcctgcggtggtgaaagagggagccagcgccggcagccaccatggcgtcacgcatagggttgcgcatgcagctcatgcgggagcaggcgcagcaggaggagcagcgggagcgcatgcagcaacaggctgtcatgcattacatgcagcagcagcagcagcagcaacagcagcagctcggagggccgcccaccccggccatcaatacccccgtccacttccagtcgccaccacctgtgcctggggaggtgttgaag

SEQ ID NO: 65599 - DNA, 223 bp, Artificial Sequence
  derived and/or modified sequence
gcagttcttggtgccacgactgggagacagtcctcaggccctcccctcagggagctcactgtccggggagggacagccagcaatagttcctggccggccaggagaggcagaggcagaggaagggaagggtcagctgccttgaggtccctgcctgctaacctgacgggagccagcgccggcagccaccatggcgtcacgcatagggttgcgcatgcagctcatg

SEQ ID NO: 65600 - DNA, 1689 bp, Artificial Sequence
  derived and/or modified sequence
atgagcgaggaggacagaaccttcagcttcggccccggcaccagaaagctgggcttcatgagccagctgagccccgcctgcagcgtgaccctgggcaagagcctgcccctgagcggcctgggcgtgttcagcagcaagatggacgccgtgcccgtgatcctggccagcccctgccagcccctgtgcttcgaggaggacacctgcctgatctacctgctgcccctgctgatccacagagagcccgcccccgccgccaccatggccagcagaatcggcctgagaatgcagctgatgagagagcaggcccagcaggaggagcagagagagagaatgcagcagcaggccgtgatgcactacatgcagcagcagcagcagcagcagcagcagcagctgggcggcccccccacccccgccatcaacacccccgtgcacttccagagccccccccccgtgcccggcgaggtgctgaaggtgcagagctacctggagaaccccaccagctaccacctgcagcagagccagcaccagaaggtgagagagtacctgagcgagacctacggcaacaagttcgccgcccacatcagccccgcccagggcagccccaagcccccccccgccgccagccccggcgtgagagccggccacgtgctgagcagcagcgccggcaacagcgcccccaacagccccatggccatgctgcacatcggcagcaaccccgagagagagctggacgacgtgatcgacaacatcatgagactggacgacgtgctgggctacatcaaccccgagatgcagatgcccaacaccctgcccctgagcagcagccacctgaacgtgtacagcagcgacccccaggtgaccgccagcctggtgggcgtgaccagcagcagctgccccgccgacctgacccagaagagagagctgaccgacgccgagagcagagccctggccaaggagagacagaagaaggacaaccacaacctgatcgagagaagaagaagattcaacatcaacgacagaatcaaggagctgggcatgctgatccccaaggccaacgacctggacgtgagatggaacaagggcaccatcctgaaggccagcgtggactacatcagaagaatgcagaaggacctgcagaagagcagagagctggagaaccacagcagaagactggagatgaccaacaagcagctgtggctgagaatccaggagctggagatgcaggccagagtgcacggcctgcccaccaccagccccagcggcatgaacatggccgagctggcccagcaggtggtgaagcaggagctgcccagcgaggagggccccggcgaggccctgatgctgggcgccgaggtgcccgaccccgagcccctgcccgccctgcccccccaggcccccctgcccctgcccacccagccccccagccccttccaccacctggacttcagccacagcctgagcttcggcggcagagaggacgagggcccccccggctaccccgagcccctggcccccggccacggcagccccttccccagcctgagcaagaaggacctggacctgatgctgctggacgacagcctgctgcccctggccagcgaccccctgctgagcaccatgagccccgaggccagcaaggccagcagcagaagaagcagcttcagcatggaggagggcgacgtgctgtag

SEQ ID NO: 65601 - DNA, 1473 bp, Artificial Sequence
  derived and/or modified sequence
atgaccgccagcagcggctgggagcccgcccccgccgccaccatggccagcagaatcggcctgagaatgcagctgatgagagagcaggcccagcaggaggagcagagagagagaatgcagcagcaggccgtgatgcactacatgcagcagcagcagcagcagcagcagcagcagctgggcggcccccccacccccgccatcaacacccccgtgcacttccagagccccccccccgtgcccggcgaggtgctgaaggtgcagagctacctggagaaccccaccagctaccacctgcagcagagccagcaccagaaggtgagagagtacctgagcgagacctacggcaacaagttcgccgcccacatcagccccgcccagggcagccccaagcccccccccgccgccagccccggcgtgagagccggccacgtgctgagcagcagcgccggcaacagcgcccccaacagccccatggccatgctgcacatcggcagcaaccccgagagagagctggacgacgtgatcgacaacatcatgagactggacgacgtgctgggctacatcaaccccgagatgcagatgcccaacaccctgcccctgagcagcagccacctgaacgtgtacagcagcgacccccaggtgaccgccagcctggtgggcgtgaccagcagcagctgccccgccgacctgacccagaagagagagctgaccgacgccgagagcagagccctggccaaggagagacagaagaaggacaaccacaacctgatcgagagaagaagaagattcaacatcaacgacagaatcaaggagctgggcatgctgatccccaaggccaacgacctggacgtgagatggaacaagggcaccatcctgaaggccagcgtggactacatcagaagaatgcagaaggacctgcagaagagcagagagctggagaaccacagcagaagactggagatgaccaacaagcagctgtggctgagaatccaggagctggagatgcaggccagagtgcacggcctgcccaccaccagccccagcggcatgaacatggccgagctggcccagcaggtggtgaagcaggagctgcccagcgaggagggccccggcgaggccctgatgctgggcgccgaggtgcccgaccccgagcccctgcccgccctgcccccccaggcccccctgcccctgcccacccagccccccagccccttccaccacctggacttcagccacagcctgagcttcggcggcagagaggacgagggcccccccggctaccccgagcccctggcccccggccacggcagccccttccccagcctgagcaagaaggacctggacctgatgctgctggacgacagcctgctgcccctggccagcgaccccctgctgagcaccatgagccccgaggccagcaaggccagcagcagaagaagcagcttcagcatggaggagggcgacgtgctgtag

SEQ ID NO: 65602 - DNA, 39 bp, Artificial Sequence
  derived and/or modified sequence
atggccagcagaatcggcctgagaatgcagctgatgtag

SEQ ID NO: 65603 - protein, 1393 aa, Artificial Sequence
  derived and/or modified sequence
MVEPGQDLLLAALSESGISPNDLFDIDGGDAGLATPMPTPSVQQSVPLSALELGLETEAAVPVKQEPETVPTPALLNVRQQPPSTTTFVLNQINHLPPLGSTIVMTKTPPVTTNRQTITLTKFIQTTASTRPSVSAPTVRNAMTSAPSKDQVQLKDLLKNNSLNELMKLKPPANIAQPVATAATDVSNGTVKKESSNKEGARMWINDMKMRSFSPTMKVPVVKEDDEPEEEDEEEMGHAETYAEYMPIKLKIGLRHPDAVVETSSLSSVTPPDVWYKTSISEETIDNGWLSALQLEAITYAAQQHETFLPNGDRAGFLIGDGAGVGKGRTIAGIIYENYLLSRKRALWFSVSNDLKYDAERDLRDIGAKNILVHSLNKFKYGKISSKHNGSVKKGVIFATYSSLIGESQSGGKYKTRLKQLLHWCGDDFDGVIVFDECHKAKNLCPVGSSKPTKTGLAVLELQNKLPKARVVYASATGASEPRNMAYMNRLGIWGEGTPFREFSDFIQAVERRGVGAMEIVAMDMKLRGMYIARQLSFTGVTFKIEEVLLSQSYVKMYNKAVKLWVIARERFQQAADLIDAEQRMKKSMWGQFWSAHQRFFKYLCIASKVKRVVQLAREEIKNGKCVVIGLQSTGEARTLEALEEGGGELNDFVSTAKGVLQSLIEKHFPAPDRKKLYSLLGIDLTAPSNNSSPRDSPCKENKIKKRKGEEITREAKKARKVGGLTGSSSDDSGSESDASDNEESDYESSKNMSSGDDDDFNPFLDESNEDDENDPWLIRKDHKKNKEKKKKKSIDPDSIQSALLASGLGSKRPSFSSTPVISPAPNSTPANSNTNSNSSLITSQDAVERAQQMKKDLLDKLEKLAEDLPPNTLDELIDELGGPENVAEMTGRKGRVVSNDDGSISYESRSELDVPVEILNITEKQRFMDGDKNIAIISEAASSGISLQADRRAKNQRRRVHMTLELPWSADRAIQQFGRTHRSNQVTAPEYVFLISELAGEQRFASIVAKRLESLGALTHGDRRATESRDLSRFNFDNKYGRNALEIVMKSIVNLDSPMVSPPPDYPGEFFKDVRQGLIGVGLINVEDRSGILTLDKDYNNIGKFLNRILGMEVHQQNALFQYFADTLTAVVQNAKKNGRYDMGILDLGSGDEKVRKSDVKKFLTPGYSTSGHVELYTISVERGMSWEEATKIWAELTGPDDGFYLSLQIRNNKKTAILVKEVNPKKKLFLVYRPNTGKQLKLEIYADLKKKYKKVVSDDALMHWLDQYNSSADTCTHAYWRGNCKKASLGLVCEIGLRCRTYYVLCGSVLSVWTKVEGVLASVSGTNVKMQIVRLRTEDGQRIVGLIIPANCVSPLVNLLSTSDQSQQLAVQQKQLWQQHHPQSITNLSNA

SEQ ID NO: 65604 - DNA, 4182 bp, Artificial Sequence
  derived and/or modified sequence
atggtggagcccggccaggacctgctgctggccgccctgagcgagagcggcatcagccccaacgacctgttcgacatcgacggcggcgacgccggcctggccacccccatgcccacccccagcgtgcagcagagcgtgcccctgagcgccctggagctgggcctggagaccgaggccgccgtgcccgtgaagcaggagcccgagaccgtgcccacccccgccctgctgaacgtgagacagcagccccccagcaccaccaccttcgtgctgaaccagatcaaccacctgccccccctgggcagcaccatcgtgatgaccaagaccccccccgtgaccaccaacagacagaccatcaccctgaccaagttcatccagaccaccgccagcaccagacccagcgtgagcgcccccaccgtgagaaacgccatgaccagcgcccccagcaaggaccaggtgcagctgaaggacctgctgaagaacaacagcctgaacgagctgatgaagctgaagccccccgccaacatcgcccagcccgtggccaccgccgccaccgacgtgagcaacggcaccgtgaagaaggagagcagcaacaaggagggcgccagaatgtggatcaacgacatgaagatgagaagcttcagccccaccatgaaggtgcccgtggtgaaggaggacgacgagcccgaggaggaggacgaggaggagatgggccacgccgagacctacgccgagtacatgcccatcaagctgaagatcggcctgagacaccccgacgccgtggtggagaccagcagcctgagcagcgtgaccccccccgacgtgtggtacaagaccagcatcagcgaggagaccatcgacaacggctggctgagcgccctgcagctggaggccatcacctacgccgcccagcagcacgagaccttcctgcccaacggcgacagagccggcttcctgatcggcgacggcgccggcgtgggcaagggcagaaccatcgccggcatcatctacgagaactacctgctgagcagaaagagagccctgtggttcagcgtgagcaacgacctgaagtacgacgccgagagagacctgagagacatcggcgccaagaacatcctggtgcacagcctgaacaagttcaagtacggcaagatcagcagcaagcacaacggcagcgtgaagaagggcgtgatcttcgccacctacagcagcctgatcggcgagagccagagcggcggcaagtacaagaccagactgaagcagctgctgcactggtgcggcgacgacttcgacggcgtgatcgtgttcgacgagtgccacaaggccaagaacctgtgccccgtgggcagcagcaagcccaccaagaccggcctggccgtgctggagctgcagaacaagctgcccaaggccagagtggtgtacgccagcgccaccggcgccagcgagcccagaaacatggcctacatgaacagactgggcatctggggcgagggcacccccttcagagagttcagcgacttcatccaggccgtggagagaagaggcgtgggcgccatggagatcgtggccatggacatgaagctgagaggcatgtacatcgccagacagctgagcttcaccggcgtgaccttcaagatcgaggaggtgctgctgagccagagctacgtgaagatgtacaacaaggccgtgaagctgtgggtgatcgccagagagagattccagcaggccgccgacctgatcgacgccgagcagagaatgaagaagagcatgtggggccagttctggagcgcccaccagagattcttcaagtacctgtgcatcgccagcaaggtgaagagagtggtgcagctggccagagaggagatcaagaacggcaagtgcgtggtgatcggcctgcagagcaccggcgaggccagaaccctggaggccctggaggagggcggcggcgagctgaacgacttcgtgagcaccgccaagggcgtgctgcagagcctgatcgagaagcacttccccgcccccgacagaaagaagctgtacagcctgctgggcatcgacctgaccgcccccagcaacaacagcagccccagagacagcccctgcaaggagaacaagatcaagaagagaaagggcgaggagatcaccagagaggccaagaaggccagaaaggtgggcggcctgaccggcagcagcagcgacgacagcggcagcgagagcgacgccagcgacaacgaggagagcgactacgagagcagcaagaacatgagcagcggcgacgacgacgacttcaaccccttcctggacgagagcaacgaggacgacgagaacgacccctggctgatcagaaaggaccacaagaagaacaaggagaagaagaagaagaagagcatcgaccccgacagcatccagagcgccctgctggccagcggcctgggcagcaagagacccagcttcagcagcacccccgtgatcagccccgcccccaacagcacccccgccaacagcaacaccaacagcaacagcagcctgatcaccagccaggacgccgtggagagagcccagcagatgaagaaggacctgctggacaagctggagaagctggccgaggacctgccccccaacaccctggacgagctgatcgacgagctgggcggccccgagaacgtggccgagatgaccggcagaaagggcagagtggtgagcaacgacgacggcagcatcagctacgagagcagaagcgagctggacgtgcccgtggagatcctgaacatcaccgagaagcagagattcatggacggcgacaagaacatcgccatcatcagcgaggccgccagcagcggcatcagcctgcaggccgacagaagagccaagaaccagagaagaagagtgcacatgaccctggagctgccctggagcgccgacagagccatccagcagttcggcagaacccacagaagcaaccaggtgaccgcccccgagtacgtgttcctgatcagcgagctggccggcgagcagagattcgccagcatcgtggccaagagactggagagcctgggcgccctgacccacggcgacagaagagccaccgagagcagagacctgagcagattcaacttcgacaacaagtacggcagaaacgccctggagatcgtgatgaagagcatcgtgaacctggacagccccatggtgagccccccccccgactaccccggcgagttcttcaaggacgtgagacagggcctgatcggcgtgggcctgatcaacgtggaggacagaagcggcatcctgaccctggacaaggactacaacaacatcggcaagttcctgaacagaatcctgggcatggaggtgcaccagcagaacgccctgttccagtacttcgccgacaccctgaccgccgtggtgcagaacgccaagaagaacggcagatacgacatgggcatcctggacctgggcagcggcgacgagaaggtgagaaagagcgacgtgaagaagttcctgacccccggctacagcaccagcggccacgtggagctgtacaccatcagcgtggagagaggcatgagctgggaggaggccaccaagatctgggccgagctgaccggccccgacgacggcttctacctgagcctgcagatcagaaacaacaagaagaccgccatcctggtgaaggaggtgaaccccaagaagaagctgttcctggtgtacagacccaacaccggcaagcagctgaagctggagatctacgccgacctgaagaagaagtacaagaaggtggtgagcgacgacgccctgatgcactggctggaccagtacaacagcagcgccgacacctgcacccacgcctactggagaggcaactgcaagaaggccagcctgggcctggtgtgcgagatcggcctgagatgcagaacctactacgtgctgtgcggcagcgtgctgagcgtgtggaccaaggtggagggcgtgctggccagcgtgagcggcaccaacgtgaagatgcagatcgtgagactgagaaccgaggacggccagagaatcgtgggcctgatcatccccgccaactgcgtgagccccctggtgaacctgctgagcaccagcgaccagagccagcagctggccgtgcagcagaagcagctgtggcagcagcaccacccccagagcatcaccaacctgagcaacgcctag

SEQ ID NO: 65605 - DNA, 4182 bp, Artificial Sequence
  derived and/or modified sequence
atggtcgagcccgggcaggacctgctgttggctgccctgtctgagtctggaataagccccaatgacctgttcgatatcgacggaggagatgccggattggccacgcccatgccaacaccctcagtccagcagagcgtcccattatcagccctggagttgggcttagaaaccgaagcagcagttcctgtgaaacaggagccggagactgtgccgactcctgccttgctcaacgtccggcagcagcccccctctacaacgacgttcgtacttaaccagatcaaccacctgcctccacttggctcgaccatcgttatgacaaagactccaccagtgactactaatcgccaaactataaccttgaccaaattcattcagaccacagcttctactcgcccaagcgttagcgcacctactgtcagaaacgccatgacttccgccccctctaaggatcaggttcagctgaaagatcttttaaagaataacagtttgaatgagctgatgaaactcaaaccaccagctaatatagcccaacctgtggctacagctgctacagatgtcagcaacgggactgtgaaaaaagaatccagcaacaaagagggagccaggatgtggatcaatgacatgaagatgcgatcattcagccctaccatgaaagtgcctgtggtgaaagaagacgatgaacctgaggaggaggacgaagaagagatgggccatgcagagacatatgccgaatatatgcctattaagttgaagataggccttagacacccggatgccgttgtcgagacctccagcttaagttccgtgacaccaccagatgtctggtataagacttcgattagcgaggaaaccatcgataacggctggctctcggctctgcagctcgaagcaattacctacgctgcccagcagcacgagacgtttctgccaaacggcgaccgagcaggcttcctcatcggggacggagccggcgtgggcaagggtagaaccatcgcaggtattatctatgagaattacttactgagtcgaaagcgcgctctctggttcagcgtatctaacgatctgaaatatgatgcagagagggacctccgggacattggagcaaagaacattctggttcactcactgaataaatttaaatacggtaagatctcaagcaaacataacgggtcagtgaagaagggcgtgatctttgcaacttacagctctctgattggcgagtcccagtcgggcgggaagtacaaaaccagactaaaacagctgctgcattggtgcggagatgacttcgatggggtgattgtgtttgatgagtgtcacaaggcaaagaacctttgtcccgtgggcagttccaagcctaccaagaccggtctcgccgtcctggagttgcagaataagctgcccaaggcccgcgtagtgtacgcatcagccactggagcatccgaacctcgaaatatggcttacatgaacaggcttggaatatggggagaggggaccccattccgagaattttctgactttatccaggcagtggagcgcaggggagttggggccatggaaatcgtggcaatggatatgaagctgcggggcatgtacatcgcacgacagttgtcttttacaggggtcaccttcaagatcgaagaggttttactgtcgcaaagctatgtcaagatgtataacaaggcagtcaagctatgggtgatcgcccgtgagaggtttcagcaggctgccgatctgattgacgctgagcaacggatgaaaaagagcatgtgggggcagttttggtccgctcatcagcgctttttcaagtatctatgcatagccagtaaggtgaaacgggtggtgcagttggcaagggaagagattaaaaacgggaaatgtgtggttataggcctgcagtccactggagaagcgcgtaccttggaagctctcgaagaggggggtggggaactcaatgattttgtgagcacagcaaaaggtgtcctacagtctctgatcgagaagcattttcccgcaccggaccgcaaaaagctgtattctttgctcggcattgacctaacagcccccagcaataactcaagcccacgagattccccatgtaaggagaacaagatcaaaaagagaaaaggtgaagaaatcaccagggaagccaagaaggcccggaaagttggagggctgaccggctcgtccagcgacgacagcggcagtgagtcagacgccagcgataacgaggagtccgactacgaaagcagcaaaaacatgtccagtggcgatgacgacgatttcaacccgttcttggacgagagtaacgaagacgacgagaatgatccctggctcattagaaaggatcacaagaaaaacaaggagaagaaaaagaagaagtcaatcgacccagattccatccagtcagccctattggctagcggcctggggagcaagagaccctcttttagcagcactccagtgatctccccagcaccgaatagcacaccggctaatagtaatacgaatagcaattctagccttattacatctcaggacgcagttgaaagagcccaacaaatgaagaaggacctgctcgacaagttggagaaactggcagaggatctcccacctaacaccctcgatgaactgatagatgagctcggggggcccgagaatgtcgcagagatgacggggagaaagggaagagttgtcagcaatgatgacggctcgataagctatgagtcccggtccgaactcgacgtgcctgttgaaatactcaacatcacagagaagcagagattcatggacggcgataagaatattgcaatcatctccgaagcagcttcatcaggcatctcattgcaggccgataggagggccaaaaaccagcgacgccgagtccacatgacactggagctgccttggtccgccgatcgggccattcagcagtttggcaggacacatcgatcaaatcaggttacagcccccgaatacgtgttcctgataagtgaacttgcaggggagcaaagatttgcatctatcgtggccaagcgacttgagtcactcggagctctgactcacggcgatcggagagcaacggaaagtcgtgatctgtctcgttttaactttgataacaaatatggaaggaacgctcttgagatcgtgatgaagagtatcgtgaacctcgactcacccatggtgtcacctccgcctgactatcccggcgaattctttaaggacgtgcgacagggccttatcggggtgggacttattaacgtggaggacagatcaggtattcttacattggacaaggattacaacaacatcggaaagttcctcaaccggatcctcggtatggaggttcaccagcagaatgctctgttccaatacttcgctgatactttaacagccgtagtgcaaaacgcaaaaaagaacggacggtacgatatgggaatcttagatctgggctctggtgacgagaaggtgcggaaatctgatgtcaagaagttccttacacccggttactctacatcaggccacgtggagctttatacaattagtgtggagagaggaatgtcctgggaagaggcaactaaaatttgggctgagttaactgggccagacgacgggttctatcttagcctgcagatcaggaataacaaaaaaaccgctatactggttaaggaggttaatcctaagaaaaaactgttcttggtgtatcgcccaaatacgggaaagcaattgaagctcgagatctacgccgacctgaaaaaaaagtacaagaaggtcgtgtcggatgacgcgctgatgcactggctggaccagtacaattcttcagccgatacctgcacgcacgcttattggagagggaattgtaaaaaggcatcccttgggctggtgtgtgagatcggcctccgttgcagaacctattacgtgctgtgcggctccgtgctgagcgtgtggaccaaggtggagggcgtactagcatcggtcagcggtactaatgttaagatgcaaatcgtgcgcctacgcactgaggatgggcaaagaattgtgggcctgattatccctgccaattgtgtaagtcctcttgtgaatttgctgagtaccagcgaccagtcccagcaacttgccgtccagcagaaacagttatggcagcaacaccatccgcagagtatcacaaacttatctaacgcttag

SEQ ID NO: 65606 - DNA, 4182 bp, Artificial Sequence
  derived and/or modified sequence
atggtggagcccggccaggacctgctgctggccgccctgtctgagagcggcatcagccccaatgacctgtttgatattgatggaggagatgctggcctggccacccccatgcccaccccatctgtgcagcagagcgtgcccctgagcgccctggagctgggcctggagacagaagctgctgtgcctgtgaagcaggagcctgagaccgtgcccaccccagccctgctgaatgtgcggcagcagccccccagcaccaccacctttgtgctgaaccagatcaaccacctgccccccctgggcagcaccatcgtgatgaccaagaccccacctgtgaccaccaaccggcagaccatcaccctgaccaagttcatccagaccacagccagcacccggcccagcgtgtctgcccccaccgtgagaaatgccatgaccagcgcccccagcaaggaccaggtgcagctgaaggacctgctgaagaacaacagcctgaatgagctgatgaagctgaagcccccagccaacatcgcccagcctgtggccacagctgccacagatgtgtccaatggcaccgtgaagaaggagagcagcaacaaggagggcgccaggatgtggatcaatgacatgaagatgaggagcttcagccccaccatgaaggtgcctgtggtgaaggaggatgatgagcctgaggaggaggatgaggaggagatgggccatgctgagacctatgcagagtacatgcccatcaagctgaagattggcctgcggcacccagatgctgtggtggagaccagcagcctgagctctgtgaccccaccagatgtgtggtacaagaccagcatcagcgaggagaccatcgacaatggctggctgagcgccctgcagctggaggccatcacctatgctgcccagcagcacgagaccttcctgcccaatggagacagagctggcttcctgattggagatggagctggggtgggcaaaggaagaaccatcgccggcatcatctatgagaactacctgctgagcaggaagagggccctgtggttctctgtgtccaatgacctgaagtatgatgctgagcgggacctgcgggacatcggggccaagaacatcctggtgcacagcctgaacaagttcaagtatggcaagatcagcagcaagcacaatggatctgtgaagaagggcgtcatctttgccacctacagcagcctgattggagagagccagagcggcggcaagtacaagacccggctgaagcagctgctgcactggtgtggagatgactttgatggagtgattgtgtttgatgagtgccacaaggccaagaacctgtgccctgtgggcagcagcaagcccaccaagacaggcctggccgtgctggagctgcagaacaagctgcccaaggcccgggtggtgtatgccagcgccactggagccagcgagcccaggaacatggcctacatgaaccggctgggcatctggggcgagggcacccccttccgggagttcagtgacttcatccaggccgtggagcggcggggcgtgggcgccatggagatcgtggccatggacatgaagctgcggggcatgtacatcgcccggcagctgtccttcaccggggtgaccttcaagattgaggaggtgctgctgagccagagctatgtgaagatgtacaacaaggctgtgaagctgtgggtgattgcccgggagcgcttccagcaggccgctgacctgattgatgctgagcagaggatgaagaagtccatgtggggccagttctggagcgcccaccagcgcttcttcaagtacctgtgcatcgccagcaaggtgaagagggtggtgcagctggcccgggaggagatcaagaatggaaaatgtgtggtgattggcctgcagagcactggagaggcccggaccctggaggccctggaggagggcggcggggagctgaatgactttgtgtccacagccaagggcgtgctgcagagcctgattgagaagcacttccctgccccagacaggaagaagctgtacagcctgctgggcatcgacctgacagcccccagcaacaacagcagcccccgggacagcccctgcaaggagaacaagatcaagaagaggaagggggaggagatcacccgggaggccaagaaggccaggaaggtgggcggcctgaccggcagcagcagtgatgattctggcagcgagagtgatgccagtgacaatgaggagagtgactatgagagcagcaagaacatgagcagtggagatgatgatgacttcaaccccttcctggatgagagcaatgaagatgatgaaaatgacccctggctgatcaggaaggaccacaagaagaacaaggagaagaagaagaagaagagcattgatcctgacagcatccagagcgccctgctggccagcggcctgggcagcaagaggcccagcttcagcagcacccctgtgatcagccctgcccccaacagcaccccagccaacagcaacaccaacagcaacagcagcctcatcaccagccaggatgctgtggagcgggcccagcagatgaagaaggacctgctggacaagctggagaagctggccgaggacctgccccccaacaccctggatgagctgattgatgagctgggcggcccagaaaatgtggccgagatgactggaaggaagggccgggtggtgtccaatgatgatggcagcatctcctatgagagccgctctgagctggatgtgcctgtggagatcctgaacatcacagagaagcagcgcttcatggatggagacaagaacatcgccatcatcagcgaggccgccagcagcggcatcagcctgcaggccgaccggcgggccaagaaccagaggagaagagtgcacatgaccctggagctgccctggagcgctgaccgggccatccagcagtttggccgcacccacaggagcaaccaggtgacagccccagaatatgtgttcctgatcagcgagctggccggggagcagagatttgccagcatcgtggccaagaggctggagagcctgggcgccctgacccatggagaccggcgggccacagagagccgggacctgagccgcttcaactttgacaacaagtatggaagaaatgccctggagatcgtgatgaagagcatcgtgaacctggacagccccatggtgtccccacctccagactacccaggagagttcttcaaggatgtgcggcagggcctcatcggcgtgggcctcatcaacgtggaggacagaagtggcatcctgaccctggacaaggactacaacaacatcggcaagttcctgaaccgcatcctgggcatggaggtgcaccagcagaatgccctcttccagtactttgctgacaccctgacagctgtggtgcagaatgccaagaagaatggccgctatgacatgggcatcctggacctgggcagcggagatgagaaggtgaggaagagtgatgtgaagaagttcctgaccccaggctacagcaccagcggccacgtggagctgtacaccatctctgtggagcggggcatgtcctgggaggaggccaccaagatctgggccgagctgactggaccagatgatggcttctacctgagcctgcagatccggaacaacaagaagacagccatcctggtgaaggaggtgaaccccaagaagaagctgttcctggtgtaccggcccaacacaggcaagcagctgaagctggagatctatgctgacctgaagaagaagtacaagaaggtggtgtctgatgatgccctgatgcactggctggaccagtacaacagcagcgctgacacctgcacccacgcctactggaggggcaactgcaagaaggccagcctgggcctggtgtgtgaaattggcctgcgctgcaggacctactacgtgctgtgtggctctgtgctgtctgtgtggaccaaggtggagggcgtgctggcctctgtgtctggcaccaacgtgaagatgcagatcgtgcggctgaggacagaagatggccagagaattgtgggcctcatcatcccagccaactgtgtgagccccctggtgaacctgctgagcaccagtgaccagagccagcagctggccgtgcagcagaagcagctgtggcagcagcaccacccccagagcatcaccaacctgagcaatgcctag

SEQ ID NO: 65607 - DNA, 4182 bp, Artificial Sequence
  derived and/or modified sequence
atggtggagcccggccaggacctgctgctggccgccctgagcgagtccggaattagcccaaatgatctattcgatatcgacgggggagacgccggtctcgccacacctatgcctacaccttcagtacagcagtctgtgccccttagcgcactggagcttgggctcgaaaccgaagccgccgtccccgtcaaacaggagcccgaaaccgtccccacgcctgccttactaaatgtccgccagcaacccccaagcactaccacttttgtgctgaaccagataaatcacctccctccgctcggcagcaccatagttatgacaaaaacacctccggtcaccactaatcgccagaccattactctcacaaaattcatccagacaactgcttccacacggccgtctgtgagtgcccccaccgtccgaaacgccatgacttctgccccctcaaaggaccaagtacaactgaaagatttactgaagaacaattcgctaaatgaactcatgaaactgaagccaccagccaacattgctcagcccgtagccacagccgccaccgatgtttcaaatggaactgtaaagaaagagtcatccaataaagagggcgccaggatgtggattaatgacatgaagatgcgcagcttttctcccaccatgaaggtgcctgtggtgaaggaagacgacgagccggaggaagaagacgaagaagaaatgggccatgccgagacctatgcagagtacatgcccataaaactgaagataggtctgcggcacccagatgcagtagttgagacctcgtcgctgtcttcagtgactcccccagacgtctggtacaagacatcaatttcagaggaaaccatcgataatggctggctgtccgctctgcagcttgaggcaataacctatgccgcgcagcagcatgaaacattcctcccaaacggcgaccgggcagggttcctgatcggcgatggtgctggtgtcggcaaggggcgaaccatcgctggcatcatatatgaaaactacctgctctcccggaagcgagccctgtggttcagtgtgtctaatgacctcaaatatgacgccgagcgcgacctccgcgatattggtgcaaaaaatattttggtgcactccctgaataagttcaagtatggaaagatctcttctaagcacaatggttctgtcaaaaaaggggtgatttttgcaacatatagcagtctgattggtgagagccagtcgggcggaaagtacaagacacgcctcaaacaactcctccactggtgtggagatgactttgatggcgtgatagtgttcgacgaatgtcataaggccaaaaatctttgcccagtcggcagtagcaaacccaccaagactgggctggccgtgctcgaactccagaacaagctgcctaaggctagggtggtgtacgccagtgccaccggtgcatcagagccccgaaatatggcctatatgaaccggctcgggatctggggggagggaacacctttcagggagttttccgacttcattcaggccgtcgaacgacgcggcgtcggagccatggagatcgttgcgatggacatgaaactgcgaggaatgtacattgcccggcagctctctttcaccggggttacattcaaaattgaagaagtgttgctgagtcagagctacgtgaaaatgtataataaggccgtgaaattatgggtcatagctcgtgaaaggtttcagcaggccgctgacttaattgacgctgagcagaggatgaaaaagagtatgtggggccagttctggagtgctcatcagaggttcttcaaatacttgtgtatcgcgtcgaaggtgaaacgggtcgtacagctggctcgcgaggaaattaagaacggcaaatgtgtcgtcatcggcctgcaatccactggtgaggctaggacattggaagccctggaggaaggtggcggagagctgaacgactttgtttcaacagcaaaaggtgtgctccaatcattgatagagaagcacttcccagcgccagaccggaagaagctgtatagcctcctgggaatagacttgactgctccctctaacaattcctcacctcgagacagcccctgcaaggagaacaagattaagaagaggaagggcgaggaaattactcgcgaggccaagaaggctcgcaaggtcggagggcttaccggatcctcaagcgacgatagcgggagtgaaagcgatgcatcagacaacgaggaaagtgactatgagtcttccaaaaacatgtcttccggggacgatgatgatttcaatcccttcctggatgaaagcaacgaagatgacgaaaacgacccatggttgatccggaaagatcataagaagaacaaagagaagaaaaaaaagaaatctatcgacccggactcaattcagtccgctctcctggccagcggcttgggctccaaacggccgtcattctcaagcacccccgtcatcagccccgctccgaacagtacgcctgctaatagcaatacaaactctaactcaagcctcatcaccagtcaagatgcagtagaacgtgcacaacagatgaaaaaggacctactcgataaacttgaaaagctggccgaagacctgcctcccaataccttggacgaactcatcgacgagttaggaggccccgagaacgtagccgagatgacggggagaaagggcagggttgtctcgaatgacgatggtagtatatcttatgagagcaggtccgaactggatgtccccgtcgagatactgaacatcaccgagaaacagcggtttatggacggcgataagaatattgccattatcagcgaagcggccagttcaggtattagtctacaagccgatagaagagccaagaaccagagaaggagggttcacatgaccctcgaacttccatggtccgctgatcgcgcaatacaacagttcggacgcactcaccggtctaatcaggtgactgctcccgagtacgtctttctgatttcagagctggcaggcgaacaacgattcgcgagcatagtcgcaaaaaggctggagagcctgggtgctttgacacatggggaccgccgcgcgaccgagagccgcgacctgtcacggtttaatttcgacaataaatatggcagaaatgccctggaaatcgtgatgaagtctatcgtgaatttggatagtcccatggtgtccccgcctcctgattatccaggggaattcttcaaagacgtccgccagggactaatcggcgtcggactcatcaatgtggaagataggtccggtatactcacactggacaaggattataacaacattggcaaattcctgaatcgtattttagggatggaggttcatcaacagaacgccctcttccagtatttcgctgatacgctgactgcggtggtgcagaacgctaaaaagaacggaaggtacgatatgggcatcctggatttgggctcaggcgacgagaaggtacgaaagagcgatgtaaagaaatttctgacacccggatactctactagtgggcacgtcgagctctacacaatttctgtggagcgcggaatgtcctgggaagaggccacaaagatctgggctgaactaaccggccctgacgatggattctacctctccttgcagataagaaataataagaaaactgccatcctagttaaagaagtcaacccaaagaaaaaactgtttttagtgtatcgtcccaatactggaaagcaactcaaactggaaatttacgcggatctaaagaagaaatacaagaaggtggtaagcgatgatgcccttatgcactggctagatcagtacaattcatcagcagatacctgtactcacgcttattggcgcggaaactgtaaaaaagcctctttggggttggtctgcgagattgggctgagatgtaggacttactatgtgctctgcggcagcgtgctatcagtgtggaccaaggtcgaaggggtcctggccagtgtttctggtacaaatgtcaaaatgcaaatcgtcagactgcggaccgaggacggccagcggatagtgggcctcattattcctgcgaactgcgtctctccacttgtgaacctgttatctacaagtgatcagtcgcagcagctggccgtgcagcagaagcaactgtggcagcagcatcacccacagtctatcactaatctttctaatgcctag

SEQ ID NO: 65608 - DNA, 4181 bp, Artificial Sequence
  derived and/or modified sequence
atggtagagccagggcaggatcttctgttagctgctctgagcgaaagtggaatcagccctaacgatctgtttgatattgacggcggtgacgctggccttgcaactcccatgccaacccccagcgtccagcagtctgtccctctgtcagcactggaactgggcctcgagaccgaggcagccgttcctgtgaagcaggagccagagactgtgcctacgcccgctcttctgaacgtgagacagcagccgccatcaactactaccttcgttctcaaccagatcaatcacctgcctccccttggcagcacaattgtcatgaccaagactccaccagttacaaccaatagacagacaataaccttgacaaagtttatccagaccactgcaagcacccggcctagcgtctctgctcctacagttcgcaacgccatgaccagtgcccctagtaaggatcaggttcaactcaaagaccttctaaagaacaactcacttaatgaactgatgaaactcaagccccctgctaacattgcccaaccggtggcgacagccgctacagatgtttctaatggaactgttaaaaaggagtctagcaataaggagggtgcgagaatgtggattaacgatatgaaaatgcggtctttctctcccactatgaaggttcccgtggttaaagaggacgacgagccagaagaggaggacgaggaagagatgggccacgcagagacatacgcagagtacatgcctattaagctgaaaataggcctgcggcaccccgatgccgtggtggagacctcgtctctctcctctgtcacaccccctgatgtttggtataaaacatccattagcgaggagacgattgacaatggctggctgtccgccctccagctggaagctatcacatacgctgcccaacagcatgagacctttcttccaaatggagatagagccggatttctgataggggacggcgctggcgtgggaaagggacggacaattgcaggcataatttatgagaattatcttctgtccagaaaaagggcactgtggttcagcgtaagcaatgatctgaaatacgacgcagagcgagatttacgagatatcggtgccaagaacatattagtgcactcgctaaacaaattcaagtatggaaagataagtagtaagcataatgggtccgtaaagaaaggcgtgatttttgccacctattcctccctcattggtgagtcccagagtgggggaaagtataagacaagactaaaacagttactgcattggtgcggcgacgacttcgatggcgtgatagtgtttgacgagtgccacaaagcgaaaaacctttgtccagttggatctagcaaaccaactaagactggcttggccgtgctggagctgcagaataagttacctaaagcccgtgtggtctacgccagtgcaaccggagccagtgagcctcgtaacatggcatacatgaatagattggggatttggggcgagggtactccatttagggagttctctgactttatccaggcggtagaaagaagaggcgttggcgctatggaaatcgtcgccatggacatgaagctcaggggcatgtatattgcccgtcagttatcctttaccggagtgactttcaagatagaggaggtcttactgtcccagtcttatgtgaagatgtataataaagctgtcaaactgtgggtcatcgccagggaacgctttcagcaggccgctgatctgatcgacgccgagcagcggatgaaaaaatctatgtggggccagttttggtccgctcatcagaggttcttcaagtacctttgtattgccagcaaagtgaaaagggtggttcagttggctagggaagagatcaaaaacggcaagtgtgtagtgattggactccagtcgacaggtgaggcgagaaccctggaggccttagaggaaggtgggggagaactgaacgacttcgtgtccactgccaagggagtgctccagtccctgattgaaaagcacttccccgcacctgatcgaaagaagctctattccctactcggtattgacctgacagctcctagtaacaatagttcccccagagatagtccctgtaaggagaataagataaaaaagcggaaaggggaagagattacacgggaggccaagaaagctagaaaagtgggcggactcacgggctcatcatctgatgatagtggctcggagagtgatgcaagcgataacgaagagtcagattacgaatcctcgaagaatatgagctcaggcgacgacgatgatttcaacccatttctggatgagagcaatgaggacgatgaaaatgatccatggctgattcggaaggatcataagaaaaataaggagaaaaagaaaaaaaagtcaatcgacccggacagtatccagagcgctctactggcctctggcctgggaagcaagagaccttcattctcttccacacctgtgatcagtcctgccccaaactctacccctgctaacagcaacacaaacagtaactcctcactgattacctctcaagacgccgtcgaacgcgcacagcagatgaaaaaggatctcctggataagctggagaagcttgccgaggacttacctccgaacacgctagacgaacttattgacgaactcggagggcctgaaaatgtggcggagatgactggccgtaaaggcagggttgtcagcaatgatgatgggagcataagttacgagtcacgaagcgaactcgatgtccccgtggagatccttaatataaccgagaagcagcgctttatggacggcgacaaaaacatcgctattatctcagaggcggcttcaagtggaatctccctgcaggccgaccgcagggcaaaaaatcagcgtcggcgtgtgcatatgaccttagagctgccatggtctgccgacagggcgatccagcagtttgggcgtacccacagatcgaatcaagtgactgctccagaatatgtatttctgatctcagaactggccggagaacagaggttcgcttccattgtcgctaagagacttgaaagcctgggcgcactcacccacggtgacaggagagcaactgagtcccgcgatctatccaggtttaactttgacaacaagtatggtagaaacgccctcgaaattgtgatgaaatccatcgtaaatctggatagcccaatggtgagccccccaccagattacccaggcgaatttttcaaggacgtgcggcaaggattaattggtgtgggtctcataaatgtcgaagacaggagcggaattctcacgttagacaaggactacaacaatatagggaaattcctgaatagaatactgggcatggaagtgcaccaacagaatgccctttttcagtatttcgctgatacattaactgccgttgttcagaatgctaaaaaaaatgggcgatatgacatgggcatattggacttggggtcaggagacgaaaaggtgaggaaatcagacgtcaaaaaatttttaacccctgggtacagtacatccggccacgtggaactctacactatcagcgttgagaggggcatgagctgggaggaggctactaaaatttgggccgaattaaccggccctgacgatggattctaccttagcctgcagatcaggaacaataagaaaactgccatcctcgtgaaggaagtgaatcctaagaaaaagttatttctggtctacagaccgaacaccggaaagcagctgaagttggaaatttatgccgacctgaagaaaaaatataagaaggtggtctctgatgatgccttaatgcactggttggatcagtacaactcatcagccgatacctgcacccatgcttattggcgcggaaactgcaagaaggcctcgctggggctggtttgcgagatcgggctgagatgccggacttattacgtcctttgtggctccgtgctgtctgtttggaccaaagttgaaggagtactggcatccgtttccggaacaaatgtgaaaatgcagatagtcagactccggaccgaagacgggcaacggatagtgggccttatcataccagccaattgtgtgtcgccgctggtcaacctgctgtccacctcagaccaaagtcagcagcttgcagtgcagcaaaagcagttatggcagcaacatcacccccaatcaatcacaaacctcagcaatgctta

SEQ ID NO: 65609 - DNA, 10981 bp, Artificial Sequence
  derived and/or modified sequence
atggtggagccagggcaagatttactgcttgctgctttgagtgagagtggaattagtccgaatgacctctttgatattgatggtggagatgcagggcttgcaactccaatgcctaccccgtcagttcagcagtcagtgccacttagtgcattagaactaggtttggagaccgaagcagcagttcctgttaaacaagaaccagagactgtacctactccagcactattaaatgtgaggcagcagcctccatctactacaacatttgtgctgaatcaaataaatcatcttccacccttgggatctacaattgtaatgactaaaacaccacctgtaacaaccaacaggcaaaccatcactttaactaagtttatccagactactgcaagcacacgcccgtcagtctcagcaccaacagtacgaaatgccatgacctctgcaccttcaaaagaccaagttcagcttaaagatctactgaaaaataatagtcttaatgaactgatgaaactaaagccacctgctaatattgctcagccagtagcaacagcagctactgatgtaagcaatggtacagtaaagaaagagtcttctaataaagaaggagctagaatgtggataaacgacatgaagatgaggagtttttccccaaccatgaaggttcctgttgtaaaagaagatgatgaaccagaggaagaagatgaagaagaaatgggtcatgcagaaacctatgcagaatacatgccaataaaattaaaaattggcctacgtcatccagatgctgtagtggaaaccagctctttatccagtgttactcctcctgatgtttggtacaaaacatccatttctgaggaaaccattgataatggctggttatcagcattgcagcttgaggcaattacatatgcagcccagcaacatgaaactttcctacctaatggagatcgtgctggcttcttaataggtgatggtgccggtgtaggaaaaggaaggacgatagcaggaatcatctatgaaaattatttgttgagtagaaaacgagcattgtggtttagtgtttcaaatgacttaaagtatgatgctgaaagagatttaagggatattggagcaaaaaacattttggttcattcgttaaataagtttaaatacggaaaaatttcttccaaacataatgggagtgtgaaaaagggtgttatttttgctacttactcttcacttattggtgaaagccagtctggcggcaagtataaaactaggttaaaacaacttctgcattggtgcggtgatgacttcgatggagtgatagtgtttgatgagtgtcataaagccaaaaacttatgtcctgttggttcttcaaagccaaccaagacaggcttagcagttttagagcttcagaacaaattgccaaaagccagagttgtttatgctagtgcaactggtgcttctgaaccacgcaacatggcctatatgaaccgtcttggcatatggggtgagggtactccatttagagaattcagtgattttattcaagcagtagaacggagaggagttggtgccatggaaatagttgctatggatatgaagcttagaggaatgtacattgctcgacaactgagctttactggagtgaccttcaaaattgaggaagttcttctttctcagagctacgttaaaatgtataacaaagctgtcaagctgtgggtcatcgccagagagcggtttcagcaagctgcagatctgattgatgctgagcaacgaatgaagaagtccatgtggggtcagttctggtctgctcaccagaggttcttcaaatacttatgcatagcatccaaagttaaaagggttgtgcaactagctcgagaggaaatcaagaatggaaaatgtgttgtaattggtctgcagtctacaggagaagctagaacattagaagctttggaagagggcgggggagaattgaatgattttgtttcaactgccaaaggtgtgttgcagtcactcattgaaaaacattttcctgctccagacaggaaaaaactttatagtttactaggaatcgatttgacagctccaagtaacaacagttcgccaagagatagtccttgtaaagaaaataaaataaagaagcggaaaggtgaagaaataactcgagaagccaaaaaagcacgaaaagtaggtggccttactggtagcagttctgacgacagtggaagtgaatctgatgcctctgataatgaagaaagtgactatgagagctctaaaaacatgagttctggagatgatgacgatttcaacccatttttagatgagtctaatgaggatgatgaaaatgatccctggttaattagaaaagaccacaagaaaaacaaagagaaaaaaaagaagaaaagtatagatccagattctattcaaagtgccttattagcatcaggtcttggatcaaaacgacctagtttttcatctacaccagttatctcacctgctcctaacagtacaccagctaacagtaacaccaacagtaacagtagccttataacaagtcaggatgctgtggaaagggctcagcagatgaagaaagacctgcttgataagctagaaaaattagctgaagacctcccccctaataccctggatgaacttatcgatgaacttggtggccctgagaacgttgctgagatgactggccgcaagggacgggttgtgagcaatgatgatggaagcatatcttatgagtcaagatctgaacttgatgtgcctgtggaaatactaaacatcacagaaaaacaacgatttatggatggagataagaatattgctatcatctcagaagctgccagctcgggtatttcattacaagcagataggagagctaaaaatcaaaggcgaagagttcatatgactttagaattaccttggagcgctgatagagcaattcaacagttcggacgtactcatagatcaaaccaagttactgctcctgagtatgtctttctgatatctgaactggcaggagaacaaagatttgcatctattgttgctaaaagacttgagagtttgggggcacttacacatggtgatagaagggcaacagaatctagagatctgagcaggttcaactttgataataagtatggaagaaatgctttagaaattgtcatgaaatccattgtaaacttggattctcctatggtatcaccacctccagactatcctggagaattttttaaagatgttcgacaaggactgataggcgttggcctgataaatgtagaagatcgctcgggaattcttactctcgataaagattataacaacataggaaaattcttaaatagaattttaggcatggaggtgcatcagcagaatgcgttatttcagtattttgcggacacacttactgcagttgttcaaaatgccaaaaaaaatggaagatatgatatgggaatcttagatcttggttctggagatgaaaaagtgcggaaaagtgatgttaaaaagtttctgactccaggatattcaacctctggccacgtagaattatacacaattagtgtagagaggggaatgtcatgggaggaagctaccaagatttgggctgagctgacaggaccagacgatggcttttacttgtcattgcaaataaggaacaacaagaaaactgccatcttagttaaagaagtgaatcctaaaaagaaacttttcttagtttatcgaccaaatactgggaagcagctcaaattagaaatttatgctgatctaaaaaagaaatataagaaggtcgtctcagatgatgccctgatgcactggttagatcagtataattcatctgcagatacttgtactcatgcttattggcgcggcaattgcaaaaaagcaagcttggggctagtttgtgaaataggtcttcgttgccgtacatattatgtattatgtggttcagtgctgagtgtctggacaaaagttgagggtgttctagcatctgtcagtggcacaaacgtgaagatgcagatcgtgcggctaagaacggaagatgggcaacggattgtaggtttgatcattccggcaaattgtgtgtctcctcttgtaaatctcctatcaacttcagaccagtctcaacagcttgcggtccaacagaaacagctatggcaacagcatcaccctcagagcatcaccaacttgagcaacgcatgaagaacagacaggtttcaacatggatggatctgaaatgctgttgaagcatatcatttgcataaaaatcagggacagtttccaaagaattatatatttttttcagttgtgctctctagttagtttttttgggagtaaggacaaacctggaatagatagcaaaactgaaaatcagcagtgctgatggtggtacatatgtctttcctttagcttctcccctgataattcccatctgcttttacttcgggtgagcagagggggatgtgtgtgtgcgtgtgtgtcagtctgtttgtgagtgtgttaaaggctacagaccacagttggtttaaaatgcttggaacttcccaaactggctttactttatgtttatacagtgctcagggttaacgcagtacatccatgccattgctgtgggaggtatccccggatgcatgtgttttgagtctataaatatagaaaatatatattggtttctttttccaacttaataggtttattaaagcatgaaatgaaaggttgcatatcatgcattcaggttattttctaatttttgttctgacagtgcatgtctttggaagcatgctgaaacaagattaacacaggagtcgagtaacagagagaaacatttgttagatgtacagcattggttattgcatttttatagtgtttatacctgggtattgcttcaaaccctgcagacccctccttccccttctccctgccctgggtttctggtcaaggtaatgaatacatacatttttctgtgataaaactcttaaaagttaattttaatgtattaatagtattcctaatgtgtgctgcagaaatggctatgagcctcttaaatttacatttgcaacttaaaggtagttttagaaggaagtacaaattggctttcatcttgcaaacaatcgttttttacttcattatcttaatttgctttgtcactcataaaaaggaaaccatacctgagttgtagacaatgaggaaacacttgaggcttctgctgtgtgttcttttgttattgttgttattgttgttactcagtaacttgaatattgtttaatgtgttgtaagacgtagagtttatctcaagctgttaaaaatggtaatgtacaaatgtgaatagacacttatctatataatatgggtaagttttgtttcgcctataatagatgtttataaaaacaagtgaggggacagttggtctttttatcttttctttctttttctttcttttctttttttctttttttttttttttttttttttttttgcttccacaggttgcactattgaaaaatcgagattgtataaacctggtaaaaagctgcaagatgccaaaatcttgtagatgtcaaataaaaagttattatactaacaagaagtggactcttgtttaggccctcactggtgaccttcagaagtagtctgtgacggggactcagcagaatttgtgtgttgtctcagcattccaggtagccttatagtttggcttaaaacttatccctaaaatgtaagatggcattgagggaaagggtataatgatagtacttctgaatgttttttaagttgaattgtttgtaaacttcttgcagaattgggtgagatgtgtgttaaaactgacaaacctggctgaaagcttagggcgttcatcctcttgtgtctcctttagcctgagtttggttatgtcaagcttaccgtaagttttcttaggatttatttattcttggtgcctaaaagaataaattgaaagtactttctgttctttggcacattttgcccagcggatgcaacttctatcctcagtccagttcatatatctcaggcagtgatccattttgtatcagccagtttcccttgttagggccgctagacccggctggcagccaagagcagcactctccccaccttcagcagaacttctcagctcatgtgtgtgtttttaaaagcagtaggcagcttccatcagcaatggaagtgtcccccactccagtggtggaggtgcagtcgctggacctgaggaagtggggaagcattacaaaccctcctgcagtaagaatggcagagttgggaaggatcttctctcgcaggctgttggcccaactcctcttttctgtgtatgagggcatcttagttttttatggcgttttcaaagcagcatatgaggattcttagcatgcagctaagtgacaacccccatggcctatgatgtaatgtttgctctggactagccatcttgataaataggagtgtatgtatcttaggttctttgtagaacagctatttttttttctcattaaaaaggcctctgaaagccctctcaaaatggacctcacaaaggcaaccagtgtgaatggatgggagctggggtgctgcatgcccaggctggtcatggtgtgtgcagcacccagagagttgcacccaccccttcttcaggtggacatccgacctttacactgtggtcttgcaaaaatcagcgagttagtttggccgccctgtgaagcttcagcattcaaggtcctcttctgttaaaacccaactcgtagccgggcgtggtggctcactcctataatcccagcacttcgggaggccaaggcaggtgcatcacttgaggccaggagttcgagaccagcctggtccacatggcaaaaccccatctgtaccaaaaaatacaaaaaatttgccgctgacttctgtaaaataggtccattcattgcaggatctaaatgccacacctgaattcagaggccttgtttaattaaccccatgtccactttgcctctgcaatgcctttttctttttagcaatatggctctgagcacaaagatttggttggaaatcatgttcgtgttttcagagtttacagcgtcaattgtactgaaaaccacttccagagtctaaagcagctcagatgttatctctgggggaattagtgttcccctcatttagcaacctccataccacaaggtctctgtctgtagttactgggattatccagatacactatcaatgatacaaattcataggagtattaatgcatttctttaaacacaacttgattaagaagcaaatatgttaagcagttttctttttctgctgctaaattacagttagacacttcagtatcttctctttacatgtgtatataaattagtaagaacctgcatccaaagcaatgtagtgtgtgtatgtatctatatatatttattctaactcagcacttcagaagcctttttgagttacaacaatattttagtttgcctcatctgtagaggtaaaatttctatattaccaagctccagaggaatatgatattttacaggcacaattttctggctgtagtccctggggcattcatttgctggcctccatgggatgctgttagaacaattgttagccggcaagagaagaaaggctaccaggacagcatttataattgtagaatgggagccttcttccctctcccctccactttcattttagcatgagataaaaaaatagattggaaatgattgttgcatctcacttcatggaagtaggggcagaagttccctctggatccttttcttgacaagcagtcaagaggaaggtccccatacacatgtacctgtgtgatacttggtagtttctaagaatggtgctacataagcgttgctgttaggctgggatcctattaatgaacgtttgattagttcaggcctcccaatggcaaaggcagacaccgtggagatggacatttactgactccccttctgtgtggcttcggtctccctggctaacaccacacctgtgcgtactgcgctcggcccactttgctgcagaaacgtagcaagcgtttcatgtcagggctacagctgagagcaaaaactgcaaaaaaaaaaaaaaatgtctcattgaatgccagttgtctgatacaaatgcagtgtcttttaagtgacagaaacacacctaaatacctgcaactcaagctcgctagcattttttttttgagtacttgagataaaatccaaaacccaccctctaattttgtgctgtatttatatatatgtacataaatgtatatatagagaaatgttgagttcttctggattctgaatgtaaataattcttgtaaattgggactctgcccacctgtttctcccttttccctcttcccttcagctctatttattcttttcttgactttcccatatggggcatcttatgacttttttttttttttttttttaagaaaagtatggaaaacttttcatttagaaaagtatttgttcctgtattttagaattcagttttgcatctttgctgtagaattcctgttttgtgttaatgttttttactatgtcttattgtgttgtgtgcaatgcattgtactggggggatgcacttgagtgccatttctgatactgtcattgtatgactgctgatgctcgtttatgttgttctttggaagctatagtgagcctgatgttttcacattttaaaaaatgcttcctgagacttctttaagctcctctaacttcttcagtgcatttgggatcaaacttagctcttagatcagcaaacctgacttgcttctacttttgcaatttttcaggccttaccatatttcttatctctgtcttcccacctgataggaaaatcttgcagatttgaaacagtggtttctggcctgctgctgcagcaaattccctatgtttatttaagaagtcgggcctatgcttttaacctacaaatgatgagtaatttacttgcaatgaacacaggtagcctgctgctgtttataacctgttgaggatatttatagcaggcaggaggcaggcctagtgtgttattgacaggtgactttagagaatgtacattggccgggtgcggtggctcacgcctgtaatcccagcactttgggaggccgaggcgggcggatcatgaggtcaggagattgagaccatctcctggctaacacggtgaaaccccgtctctactaaaaatacaaaaaaaaaaaaaacttagccaggcgtggtggcgggtgcctgtagtcccagctactcaggaggctgaggcaggagaatggcatgaacctgggaggcagagcttgcagtgagcccagatcgcgccactgcactccagcctgggcaacagaccgagactccgtctcgaaaaaaaaaaaagagagagaatgtacattaaggaacaattgtcctccaaaagagagccaagcaactgctctggagcctcctaggctgactctgctggagggtgagacaagcagattcccattgcagcactggtccctggggtaccctgaacggctgtgctctccacccttgtatcggtgagtggatcttgtctacatcagccgtaagcctagaagcagagcgggatcgaggcgtttttaataattcgagttgggaagacccggatggttcatcaaaatgatggtgttgagcacccgggaggcagacattgggtatttgttcacaattttgcacctgtaagaaaatgttcctttataactttcaaggattgccgtgagcgtctttggggccttttcattcatgtacaagtttcattcattactattcaacttggtagacttggtgaaaaatgtaaaagcattctgtatttggatcagtcttgggaactaaatttgtcgtgaattggggcctgtcacagattgcctccagtgtgcatcctccacgcagaccctccttgctcagtctccctctggcgcccatggggaagccgtgctgtggttggcagtgcggccatctgggctgccgcaacgtggcagggcaccgtccagcaagactgccccttagtgcagggctaagcaaggaaaagaagaagcccaaaaaggcgggttctttttgatacttgtaattcaggcgtcctccagagtgaaggccactctgcaggcccctggtgagaacctgtctggcttttccactgcgggcccctaaccagtaccctgcccttgtggcccatttgtgcctgggcagatgtttctggccagcagacactgaaggcctttttgctgtgacagtatttatggcactgaagaggataaagaagcttgagccctctttctgactcccactttatggggcagagagagctttttttctacatagcacattgcagtctcaccgctatcagaaaaatatcctgttcatggtttatactgaatttgcaaactactgatatgatttttcaataaccacttgtatcttccatcatccatgagaggtgggaagaggtacactgtatctctgcaataaaactttggccaggttctacctcctctgagcaaaggatacttttctatgtaggtgtagatggttctcctttactaatctgacatggtgcatctggagacaacatctgatgggatccaaagacaacttgaaacaaaggtggatgtcagctcttggtgtgttttcatttggttctcttttttaaatctcccttttgttatcgctcctgttgtagcgtgtccatcagtgtgtgaagggtgcgccctgttccaatgatactgcattgctgcatccagcctttcgtgggagcacggtaccaagcgtccggaattgattatcccaatcatttttgatatgtaactgaaaaatttggtctcatgcaataaaaatgtactggctgcattttagcaaggtttatttactcttgcaagtaaaaacgatcaaccgtgaagcgtaacaaattctgtatttagtttttttttctgttgtggtggtttttgttttgttttttgtttttgtaagattctaaataaattaaatacgagtca

SEQ ID NO: 65610 - protein, 515 aa, Artificial Sequence
  derived and/or modified sequence
MAELEHLGGKRAESARMRRAEQLRRWRGSLTEQEPAERRGAGRQPLTRRGSPRVRFEDGAVFLAACSSGDTDEVRKLLARGADINTVNVDGLTALHQACIDENLDMVKFLVENRANVNQQDNEGWTPLHAAASCGYLNIAEYFINHGASVGIVNSEGEVPSDLAEEPAMKDLLLEQVKKQGVDLEQSRKEEEQQMLQDARQWLNSGKIEDVRQARSGATALHVAAAKGYSEVLRLLIQAGYELNVQDYDGWTPLHAAAHWGVKEACSILAEALCDMDIRNKLGQTPFDVADEGLVEHLELLQKKQNVLRSEKETRNKLIESDLNSKIQSGFFKNKEKMLYEEETPKSQEMEEENKESSSSSSEEEEGEDEASESETEKEADKKPEAFVNHSNSESKSSITEQIPAPAQNTFSASSARRFSSGLFNKPEEPKDESPSSWRLGLRKTGSHNMLSEVANSREPIRDRGSSIYRSSSSPRISALLDNKDKVQFGRVWGNSKAVFFFHENSILGTNENIF

SEQ ID NO: 65611 - DNA, 1548 bp, Artificial Sequence
  derived and/or modified sequence
atggccgagttggagcatcttgggggcaagagggctgaaagtgctaggatgagacgggcagagcagctgagaagatggcgcggatctctgactgagcaagaacccgcagagaggagaggggctggcagacagcccctcacgcgccggggcagcccaagggtgcgatttgaagacggagccgtgttcctggcagcctgctcctctggagacacagacgaagttcggaaactcctcgctcgaggagccgatatcaacacagttaatgtagacggccttacggcactacaccaggcatgcattgatgagaacttggatatggtaaaattccttgttgagaatcgcgccaatgttaaccagcaagataacgagggctggacccccttacacgcagcagcctcctgtggatatctcaacattgcggagtactttatcaaccacggcgcctcggtgggaattgttaattctgaaggcgaggtaccctccgatctagcagaggagccagccatgaaggacctccttctggaacaggtgaaaaagcaaggagtcgatctggagcaaagtaggaaagaggaggaacagcagatgctgcaggatgccagacagtggttaaatagtgggaagatcgaagacgttcgacaggcccgaagcggcgccacagcgttacatgtggccgccgcaaaagggtatagcgaagtactgcgtctgctcatccaggcaggttacgagctcaatgtacaagattacgacggatggacccccctgcatgcagccgcacattggggtgtgaaggaggcgtgtagtattctcgcagaggctttgtgtgacatggatattaggaacaagctggggcagactcctttcgatgttgcagacgaaggcttggtagagcacctggagttactgcagaagaaacagaacgtgttgaggtctgagaaggaaactagaaataagcttatcgagagtgatctcaattcgaaaattcagagcggcttcttcaagaacaaagagaagatgctgtacgaagaagagacaccaaaatctcaggagatggaggaggagaacaaggagtcttccagctcctcaagcgaagaggaggagggtgaggacgaagcctcagagagcgagaccgaaaaagaagctgataaaaagccagaggcctttgtcaaccactcgaacagcgagagtaagagcagtattacagagcaaatcccggcaccagctcagaatacattctccgctagctcagccaggagattttcttctgggttatttaataaacctgaagagccaaaggacgaaagtcctagtagctggaggctgggccttcgtaagaccggcagccataacatgttgagcgaagtggctaacagtagagagcccattcgtgataggggcagcagcatttatcgatccagcagctctccccggatcagcgcattgctggacaacaaagacaaggtacagttcggtagagtgtgggggaatagtaaggccgtgttttttttccatgaaaactctattctgggcacaaacgaaaacattttttag

SEQ ID NO: 65612 - DNA, 1548 bp, Artificial Sequence
  derived and/or modified sequence
atggccgagctggagcacctgggcggcaagagagctgagagcgccaggatgagaagagctgagcagctgcggcgctggaggggcagcctgacagagcaggagcctgctgagaggagaggagctggccggcagcccctgacccggcggggcagcccccgggtgcgctttgaagatggagctgtgttcctggccgcctgcagcagcggggacacagatgaggtgaggaagctgctggcccggggagctgacatcaacacagtgaatgtggatggcctgacagccctgcaccaggcctgcattgatgagaacctggacatggtgaagttcctggtggagaacagagccaacgtgaaccagcaggacaatgaaggctggacccccctgcacgccgccgccagctgtggctacctgaacattgctgagtacttcatcaaccacggggcctctgtgggcatcgtgaacagcgagggggaggtgcccagcgacctggccgaggagcccgccatgaaggacctgctgctggagcaggtgaagaagcagggcgtggacctggagcagagcaggaaggaggaggagcagcagatgctgcaggatgcccggcagtggctgaacagcggcaagattgaagatgtgcggcaggcccggagcggggccacagccctgcacgtggccgccgccaagggctacagcgaggtgctgcggctgctgatccaggccggctatgagctgaatgtgcaggactatgatggctggacccccctgcacgccgccgcccactggggcgtgaaggaggcctgcagcatcctggccgaggccctgtgtgacatggacatccggaacaagctgggccagaccccatttgatgtggctgatgagggcctggtggagcacctggagctgctgcagaagaagcagaatgtgctgcggtctgagaaggagaccaggaacaagctgattgaaagtgacctgaacagcaagatccagagcggcttcttcaagaacaaggagaagatgctgtatgaggaggagacccccaagagccaggagatggaggaggagaacaaggagagcagcagcagcagcagcgaggaggaggagggggaggatgaggccagcgagagcgagacagagaaggaggccgacaagaagccagaggcctttgtgaaccacagcaacagcgagagcaagagcagcatcacagagcagatcccagccccagcccagaacaccttcagcgccagcagcgcccggcgcttcagcagcggcctcttcaacaagccagaggagcccaaggatgagagccccagctcctggaggctgggcctgaggaagacaggcagccacaacatgctgtctgaggtggccaacagccgggagcccatccgggaccggggcagcagcatctaccgcagcagcagcagcccccgcatcagcgccctgctggacaacaaggacaaggtgcagtttggccgggtgtggggcaacagcaaggctgtgttcttcttccacgagaacagcatcctgggcaccaatgaaaacatcttctag

SEQ ID NO: 65613 - DNA, 1548 bp, Artificial Sequence
  derived and/or modified sequence
atggccgagctggagcacctgggcggcaagcgggccgagagcgccaggatgcgcagggctgagcagctcaggaggtggaggggctccctgaccgagcaggaaccagcagagagaagaggggcgggccgacaacctctgacacgccggggatccccccgtgtgaggttcgaggacggtgccgtgtttctggccgcatgctctagcggagacacagacgaagtaagaaaactgctggcgaggggagcagatatcaacaccgtgaatgttgacggcctgaccgcccttcatcaggcatgcatcgacgagaatctggacatggttaagtttcttgtcgaaaaccgggccaatgtgaaccagcaggataatgagggctggacgccactgcacgccgcggctagctgcggatatttgaatatcgccgaatatttcattaaccacggtgctagtgttggtattgtgaactcagagggcgaggtgccaagtgaccttgcagaggagccagctatgaaagacctccttctagagcaggtgaagaagcagggcgtcgacctcgagcagagccggaaggaggaggagcagcaaatgcttcaggacgcccgccagtggctgaatagcggcaagatcgaagacgtccggcaggcacgctccggagccacagccttacacgttgcggcagccaagggctactccgaggtgctcagactcctgattcaagctggttatgaattgaacgtgcaggactacgatggttggacgccactccacgccgcagcacattggggagtgaaggaggcttgctccatacttgccgaggccctttgtgacatggatattaggaacaagctcggccagaccccctttgatgtggcggacgaggggctcgtggagcatctcgaacttctgcagaaaaagcaaaatgtgctcaggagcgagaaggagactaggaacaagctcatagaatcagacttgaacagtaagatccaaagtggttttttcaagaataaggagaagatgctttatgaagaggagaccccaaaatcccaggaaatggaagaggaaaataaagagagctcctcatcctccagcgaggaggaagagggcgaggacgaggcctccgagtcggaaaccgaaaaggaggctgataagaagccagaggcatttgttaaccacagtaattctgaatccaagtcctctattaccgaacagatcccggcaccagcccagaacactttctcagccagttccgctcgccgtttctcatcgggattattcaataaaccggaggaacccaaagacgagagcccatcaagttggcggctgggcctgcgcaaaaccggttctcacaacatgctctccgaggttgccaacagtcgtgagcctatccgggaccgcggctcgtctatatatcgcagcagctcctctccccgtatttctgccctactggacaacaaagataaagtgcaatttggaagggtatggggtaatagtaaggccgtgttcttctttcacgagaattcaatattaggaaccaacgagaatattttttag

SEQ ID NO: 65614 - DNA, 1548 bp, Artificial Sequence
  derived and/or modified sequence
atggcagaactggagcatctcggcggaaaacgcgctgagtcagcgcgtatgcgcagagccgagcagctgcgcaggtggcgcggatcccttacagagcaggaacctgctgaaaggagaggagccggacgtcaacctcttacacggagaggtagcccaagagtgcgctttgaagacggggcagtgtttttggccgcttgtagtagtggcgataccgatgaggtcagaaaacttctcgcaaggggtgctgacataaatactgtgaatgtagacggtctgaccgccctgcaccaagcctgcatagacgagaacttggatatggtaaagtttttagtggagaatcgcgctaatgttaatcaacaggacaatgaaggatggaccccactgcacgctgcagcctcgtgtggatacttaaacatagccgagtattttatcaatcacggagcttcagtgggcattgtgaactccgagggagaagttccttcagacctagcagaggagcccgcaatgaaggatttactgctagagcaagtcaagaaacaaggagtggacctagaacagtctcggaaggaggaggagcagcagatgctccaggatgcccgacagtggctgaattccgggaagatcgaggacgtaaggcaagcacggtcaggagctaccgccctgcacgtcgcggctgcaaaagggtactccgaagtgctgagactgcttatacaggccggttacgaattaaacgtgcaagactacgatggttggactcccttgcatgcagcggcacactggggagtgaaagaggcgtgctccatcctggctgaagcgctgtgcgacatggatatacgcaacaagcttggtcagacccctttcgatgtggccgacgagggtctggtggaacatttggaattactccagaaaaaacagaatgtccttcgcagtgagaaggagacaagaaacaaacttatcgaatccgatttaaacagtaagatccagtccggatttttcaaaaacaaagagaagatgttgtacgaggaagaaacccccaaatcgcaagagatggaggaagaaaacaaggaatcgtcatcaagctcttccgaggaagaagaaggcgaagatgaagcatcagaatcagaaacagaaaaggaggccgataaaaaaccggaggccttcgtgaaccattctaactctgaaagcaaaagcagtattaccgagcagataccagctcccgctcaaaatacttttagcgccagctctgccaggaggttctcctcagggctcttcaacaagccggaagagcctaaggacgagagtccttcctcctggcgcctgggcttgcgtaaaacaggttctcataatatgttgtccgaagtcgccaatagcagggagcccattagagacagaggcagcagcatttatcgctcgagcagcagcccgaggatcagtgccttgctagacaacaaagataaggttcaattcggcagggtctggggcaattctaaagccgttttcttctttcatgagaacagcattctcggaactaacgaaaacatcttctag

SEQ ID NO: 65615 - DNA, 1808 bp, Artificial Sequence
  derived and/or modified sequence
aaagatggcggcgcgagggtctccgccctctgctccgggctgaagcgctctgagagaggcggcagcggcaactcgagccccaacagtaatttagtgttggtagttttggcagcagctgccgaggccggagcaatggcggaactggagcacctaggagggaagcgggcagagtcggcgcgaatgcggcgggcagagcagcttcggcgctggcggggctcgctgacagagcaggagcctgcggagcgacgaggcgcggggcggcagccgctgaccaggcgcgggagccccagggtccgcttcgaggacggtgctgtctttctggccgcctgctctagcggggacaccgacgaggtgagaaagcttctggcaagaggtgctgatatcaacacggtcaacgtggacggcttgacagccctgcaccaggcatgtattgatgaaaatttggacatggtgaagtttctggtggagaacagagccaatgtaaaccagcaagacaacgagggctggacaccccttcatgcagcagcttcctgtggctatctcaacatagcagagtatttcattaatcacggagccagtgtaggtattgtcaatagtgaaggtgaagttccctctgaccttgcagaagagccagccatgaaggatcttcttctggagcaagtaaagaagcaaggagttgatctagagcagtcaagaaaagaagaagagcagcagatgttgcaggatgcccgccagtggctcaacagtgggaaaatagaggatgtgaggcaggctcgctcaggggctacagcccttcatgtggctgctgccaagggctactctgaagtcctcagacttttaattcaggctggctatgaactcaatgttcaggattatgatggctggactcccctccatgctgctgcacactggggagtgaaggaggcttgctccatcctggcagaagcactttgtgacatggatattcgaaataaactgggccagacaccatttgatgtggctgatgagggtctcgtggagcatttggagttgctccagaagaagcagaatgtgcttcgaagtgaaaaggagacacggaataaactcattgagtcagatctgaacagcaagattcagagtgggttctttaagaacaaagagaagatgctctatgaggaggagacacctaagtcccaagaaatggaggaagaaaataaagaatctagtagctccagctcagaggaggaggaaggtgaagatgaagcttctgagtcagaaactgagaaggaggcagataaaaagccagaagcctttgtcaatcattccaactctgaaagcaagagtagtatcacagagcagataccagcaccagctcaaaataccttctctgcctcttctgctaggaggttctcttctggcctttttaacaagccagaagagcccaaagatgaatctccttcttcatggagattgggactgagaaaaactggcagccacaacatgctgagtgaggtggccaattccagggaacctataagggaccgaggctcttccatctatcgctcctcttcaagccctcggatttctgctctactggacaacaaagataaggtgcagtttgggagggtatgggggaattccaaggcagttttttttttccatgaaaattcaatcttaggaacaaatgaaaatattttctagtccttaagttgattttggaaatgcaaagtctttaaagagagagaggcacactgatagtttattcaagtagctatttgcttgctattgtttgcttgaccaaaaaagaaaataaaaaagctttaaaaata

SEQ ID NO: 65616 - DNA, 1548 bp, Artificial Sequence
  derived and/or modified sequence
atggccgagctggagcacctgggcggcaagagagccgagagcgccagaatgagaagagccgagcagctgagaagatggagaggcagcctgaccgagcaggagcccgccgagagaagaggcgccggcagacagcccctgaccagaagaggcagccccagagtgagattcgaggacggcgccgtgttcctggccgcctgcagcagcggcgacaccgacgaggtgagaaagctgctggccagaggcgccgacatcaacaccgtgaacgtggacggcctgaccgccctgcaccaggcctgcatcgacgagaacctggacatggtgaagttcctggtggagaacagagccaacgtgaaccagcaggacaacgagggctggacccccctgcacgccgccgccagctgcggctacctgaacatcgccgagtacttcatcaaccacggcgccagcgtgggcatcgtgaacagcgagggcgaggtgcccagcgacctggccgaggagcccgccatgaaggacctgctgctggagcaggtgaagaagcagggcgtggacctggagcagagcagaaaggaggaggagcagcagatgctgcaggacgccagacagtggctgaacagcggcaagatcgaggacgtgagacaggccagaagcggcgccaccgccctgcacgtggccgccgccaagggctacagcgaggtgctgagactgctgatccaggccggctacgagctgaacgtgcaggactacgacggctggacccccctgcacgccgccgcccactggggcgtgaaggaggcctgcagcatcctggccgaggccctgtgcgacatggacatcagaaacaagctgggccagacccccttcgacgtggccgacgagggcctggtggagcacctggagctgctgcagaagaagcagaacgtgctgagaagcgagaaggagaccagaaacaagctgatcgagagcgacctgaacagcaagatccagagcggcttcttcaagaacaaggagaagatgctgtacgaggaggagacccccaagagccaggagatggaggaggagaacaaggagagcagcagcagcagcagcgaggaggaggagggcgaggacgaggccagcgagagcgagaccgagaaggaggccgacaagaagcccgaggccttcgtgaaccacagcaacagcgagagcaagagcagcatcaccgagcagatccccgcccccgcccagaacaccttcagcgccagcagcgccagaagattcagcagcggcctgttcaacaagcccgaggagcccaaggacgagagccccagcagctggagactgggcctgagaaagaccggcagccacaacatgctgagcgaggtggccaacagcagagagcccatcagagacagaggcagcagcatctacagaagcagcagcagccccagaatcagcgccctgctggacaacaaggacaaggtgcagttcggcagagtgtggggcaacagcaaggccgtgttcttcttccacgagaacagcatcctgggcaccaacgagaacatcttctag

SEQ ID NO: 65617 - protein, 386 aa, Artificial Sequence
  derived and/or modified sequence
MAELEHLGGKRAESARMRRAEQLRRWRGSLTEQEPAERRGAGRQPLTRRGSPRVRFEDGAVFLAACSSGDTDEVRKLLARGADINTVNVDGLTALHQACIDENLDMVKFLVENRANVNQQDNEGWTPLHAAASCGYLNIAEYFINHGASVGIVNSEGEVPSDLAEEPAMKDLLLEQVKKQGVDLEQSRKEEEQQMLQDARQWLNSGKIEDVRQARSGATALHVAAAKGYSEVLRLLIQAGYELNVQDYDGWTPLHAAAHWGVKEACSILAEALCDMDIRNKLGQTPFDVADEGLVEHLELLQKKQNVLRSEKETRNKLIESDLNSKIQSGFFKNKEKMLYEEETPKSQEMEEENKESSSSSSEEEEGEDEASESETEKEAVLFWPF

SEQ ID NO: 65618 - DNA, 1161 bp, Artificial Sequence
  derived and/or modified sequence
atggccgaacttgaacacttgggtggaaagagggccgagagtgcccgcatgcgtcgcgcagagcagctccgtaggtggcgaggcagcctgactgagcaagaaccagcagagcgccgtggagccggtcgtcagccgctaacaaggcgaggaagcccaagagttcggttcgaagacggagccgtctttcttgctgcctgttcctcgggggataccgacgaagtgcgcaagctcctggcgcgaggggccgacataaacacagtgaatgttgacggcctgaccgccctacaccaggcctgtatcgacgagaacctagatatggtaaagttcctcgtagagaaccgggcaaacgtgaatcaacaagacaacgaagggtggactcctttacacgctgccgcctcttgcggctatttaaacatagcagagtactttattaatcatggtgcttctgtgggaattgtcaattccgaaggagaggtgcccagcgatttagccgaggagcctgctatgaaagatcttcttcttgagcaggttaaaaaacagggagtggatctggagcagtcacgaaaagaagaggaacagcagatgctgcaggatgctcgccagtggctcaactctggaaagatcgaggacgtgagacaggctcgcagtggggctaccgccttgcatgttgccgccgccaaagggtatagcgaggtcctgagactgctcattcaggctgggtatgagctgaatgtgcaggactatgacggctggacacccctgcacgcggccgcccattggggtgtgaaggaggcctgctccatcctcgcagaagctctttgtgacatggacattcgcaataaattgggacagaccccattcgacgtggcagacgagggactggtggagcatctggagctcttgcaaaagaagcagaacgttctgcggagcgagaaggagacgagaaataagctcattgaatcggatcttaactccaaaatacagtctggtttcttcaagaataaagaaaagatgttatatgaggaagaaaccccgaaaagtcaagaaatggaggaggagaacaaggaaagctcttcgtcatcttcagaagaggaagaaggtgaggatgaggcgagtgagtccgagactgaaaaggaggccgtcttgttctggcccttctag

SEQ ID NO: 65619 - DNA, 1161 bp, Artificial Sequence
  derived and/or modified sequence
atggccgagctggagcacctgggcggcaagagagctgagagcgccaggatgagaagagctgagcagctgcggcgctggaggggcagcctgacagagcaggagcctgctgagaggagaggagctggccggcagcccctgacccggcggggcagcccccgggtgcgctttgaagatggagctgtgttcctggccgcctgcagcagcggggacacagatgaggtgaggaagctgctggcccggggagctgacatcaacacagtgaatgtggatggcctgacagccctgcaccaggcctgcattgatgagaacctggacatggtgaagttcctggtggagaacagagccaacgtgaaccagcaggacaatgaaggctggacccccctgcacgccgccgccagctgtggctacctgaacattgctgagtacttcatcaaccacggggcctctgtgggcatcgtgaacagcgagggggaggtgcccagcgacctggccgaggagcccgccatgaaggacctgctgctggagcaggtgaagaagcagggcgtggacctggagcagagcaggaaggaggaggagcagcagatgctgcaggatgcccggcagtggctgaacagcggcaagattgaagatgtgcggcaggcccggagcggggccacagccctgcacgtggccgccgccaagggctacagcgaggtgctgcggctgctgatccaggccggctatgagctgaatgtgcaggactatgatggctggacccccctgcacgccgccgcccactggggcgtgaaggaggcctgcagcatcctggccgaggccctgtgtgacatggacatccggaacaagctgggccagaccccatttgatgtggctgatgagggcctggtggagcacctggagctgctgcagaagaagcagaatgtgctgcggtctgagaaggagaccaggaacaagctgattgaaagtgacctgaacagcaagatccagagcggcttcttcaagaacaaggagaagatgctgtatgaggaggagacccccaagagccaggagatggaggaggagaacaaggagagcagcagcagcagcagcgaggaggaggagggggaggatgaggccagcgagagcgagacagagaaggaggccgtgctcttctggcccttctag

SEQ ID NO: 65620 - DNA, 1161 bp, Artificial Sequence
  derived and/or modified sequence
atggccgagctggagcacctgggcggcaagcgggccgagagcgcccgtatgcgccgcgccgagcaactccggaggtggcgagggagcttaacagagcaggagcctgccgagaggcgaggggcaggcaggcagccacttacgaggcgcgggtcaccaagagtgcggttcgaagatggggctgtgttcctggcagcttgctcaagcggtgacactgatgaagttcgtaaactgctcgcccgcggcgcagatattaatacagtcaatgttgatgggctgacagcacttcaccaggcctgtattgacgagaatttggatatggtcaaattcctcgtggaaaatcgggctaatgtcaaccagcaggataatgagggttggactcctttgcatgctgctgcaagctgcggttacctgaatattgcggaatactttatcaatcacggcgcctctgtgggcatcgtgaattctgaaggagaagttccaagcgaccttgcggaagagcctgcaatgaaagatctcctcttggaacaggtcaagaaacagggagtggacctggaacagtcccggaaagaagaagaacagcagatgctgcaggatgccaggcagtggcttaacagtgggaaaatagaggacgtgcggcaagcccgatccggcgcgactgccctgcacgttgccgcggcaaaaggctacagtgaggtgctgcggcttctcattcaagccgggtatgaactgaacgtgcaggactatgatgggtggactccactccacgccgctgcccattggggcgtgaaagaggcctgttccatcctggccgaggctttatgtgatatggacatccgaaataaacttggacagactccattcgacgtggccgacgaagggctggttgaacatcttgagcttttgcaaaagaagcaaaacgtgcttagaagcgaaaaagagacccgaaataaactcatcgagagcgacctcaatagtaagatccagtcaggattcttcaagaataaagagaagatgctgtacgaggaagaaactcctaaatcacaggaaatggaagaagagaataaagaaagttcctcatctagttctgaggaggaagagggtgaagacgaggcctcagaatctgagacagagaaggaagcagtccttttctggcccttctag

SEQ ID NO: 65621 - DNA, 1161 bp, Artificial Sequence
  derived and/or modified sequence
atggctgaacttgaacacctagggggaaagcgggctgaaagcgctcggatgagacgagccgaacagctgcgcaggtggagaggaagcctgaccgaacaagagcccgcagagcgcagaggagctgggagacagcctcttacaaggcgtggcagcccaagggtacggtttgaagatggggcagtgtttctcgctgcatgctctagcggcgatactgatgaggtcaggaagctcttggctcgcggagctgatattaataccgtgaatgttgacggcctgactgctctgcaccaggcatgcattgatgaaaatctggatatggtcaagttcctggtagagaaccgcgctaatgtcaatcagcaggacaacgagggttggacacctctgcacgcagctgccagttgtgggtatcttaacattgcagaatactttattaatcatggcgcaagcgtgggcattgtaaattccgagggcgaagtccccagtgatcttgccgaagaaccggctatgaaggacctgttactggagcaagtgaaaaagcagggagtggacttagagcagtcacgcaaggaggaggaacagcaaatgctccaggacgctcggcaatggctgaatagtggcaaaatcgaggacgtgcgccaggcccgaagcggcgcaacggccctgcatgttgcagctgccaaaggatactctgaggtgctccggcttctcatccaggccggttatgagttgaacgttcaggactatgatgggtggacacctctgcatgctgctgcacattggggcgtaaaagaagcctgctccatccttgccgaagcgctctgcgatatggatataaggaacaagcttggccagacaccatttgacgtcgccgacgagggcctcgtggaacatctggagctcctgcagaagaagcagaacgttctgaggtcagagaaggagacgcgcaacaagttgatagagtctgacctcaattcaaagattcagtctggtttcttcaagaataaagagaaaatgttgtacgaagaggaaaccccgaagagccaggagatggaagaggagaataaagagtcttctagctcttccagcgaggaggaagaaggcgaagatgaggcaagcgaatccgagactgagaaggaggcagtgctcttttggcccttttag

SEQ ID NO: 65622 - DNA, 1687 bp, Artificial Sequence
  derived and/or modified sequence
cggcgcgagggtctccgccctctgctccgggctgaagcgctctgagagaggcggcagcggcaactcgagccccaacagtaatttagtgttggtagttttggcagcagctgccgaggccggagcaatggcggaactggagcacctaggagggaagcgggcagagtcggcgcgaatgcggcgggcagagcagcttcggcgctggcggggctcgctgacagagcaggagcctgcggagcgacgaggcgcggggcggcagccgctgaccaggcgcgggagccccagggtccgcttcgaggacggtgctgtctttctggccgcctgctctagcggggacaccgacgaggtgagaaagcttctggcaagaggtgctgatatcaacacggtcaacgtggacggcttgacagccctgcaccaggcatgtattgatgaaaatttggacatggtgaagtttctggtggagaacagagccaatgtaaaccagcaagacaacgagggctggacaccccttcatgcagcagcttcctgtggctatctcaacatagcagagtatttcattaatcacggagccagtgtaggtattgtcaatagtgaaggtgaagttccctctgaccttgcagaagagccagccatgaaggatcttcttctggagcaagtaaagaagcaaggagttgatctagagcagtcaagaaaagaagaagagcagcagatgttgcaggatgcccgccagtggctcaacagtgggaaaatagaggatgtgaggcaggctcgctcaggggctacagcccttcatgtggctgctgccaagggctactctgaagtcctcagacttttaattcaggctggctatgaactcaatgttcaggattatgatggctggactcccctccatgctgctgcacactggggagtgaaggaggcttgctccatcctggcagaagcactttgtgacatggatattcgaaataaactgggccagacaccatttgatgtggctgatgagggtctcgtggagcatttggagttgctccagaagaagcagaatgtgcttcgaagtgaaaaggagacacggaataaactcattgagtcagatctgaacagcaagattcagagtgggttctttaagaacaaagagaagatgctctatgaggaggagacacctaagtcccaagaaatggaggaagaaaataaagaatctagtagctccagctcagaggaggaggaaggtgaagatgaagcttctgagtcagaaactgagaaggaggcagttctcttctggcctttttaacaagccagaagagcccaaagatgaatctccttcttcatggagattgggactgagaaaaactggcagccacaacatgctgagtgaggtggccaattccagggaacctataagggaccgaggctcttccatctatcgctcctcttcaagccctcggatttctgctctactggacaacaaagataaggtgcagtttgggagggtatgggggaattccaaggcagttttttttttccatgaaaattcaatcttaggaacaaatgaaaatattttctagtccttaagttgattttggaaatgcaaagtctttaaagagagagaggcacactgatagtttattcaagtagctatttgcttgctattgtttgcttgaccaaaaaagaaaataaaaaagctttaaaaata

SEQ ID NO: 65623 - DNA, 1161 bp, Artificial Sequence
  derived and/or modified sequence
atggccgagctggagcacctgggcggcaagagagccgagagcgccagaatgagaagagccgagcagctgagaagatggagaggcagcctgaccgagcaggagcccgccgagagaagaggcgccggcagacagcccctgaccagaagaggcagccccagagtgagattcgaggacggcgccgtgttcctggccgcctgcagcagcggcgacaccgacgaggtgagaaagctgctggccagaggcgccgacatcaacaccgtgaacgtggacggcctgaccgccctgcaccaggcctgcatcgacgagaacctggacatggtgaagttcctggtggagaacagagccaacgtgaaccagcaggacaacgagggctggacccccctgcacgccgccgccagctgcggctacctgaacatcgccgagtacttcatcaaccacggcgccagcgtgggcatcgtgaacagcgagggcgaggtgcccagcgacctggccgaggagcccgccatgaaggacctgctgctggagcaggtgaagaagcagggcgtggacctggagcagagcagaaaggaggaggagcagcagatgctgcaggacgccagacagtggctgaacagcggcaagatcgaggacgtgagacaggccagaagcggcgccaccgccctgcacgtggccgccgccaagggctacagcgaggtgctgagactgctgatccaggccggctacgagctgaacgtgcaggactacgacggctggacccccctgcacgccgccgcccactggggcgtgaaggaggcctgcagcatcctggccgaggccctgtgcgacatggacatcagaaacaagctgggccagacccccttcgacgtggccgacgagggcctggtggagcacctggagctgctgcagaagaagcagaacgtgctgagaagcgagaaggagaccagaaacaagctgatcgagagcgacctgaacagcaagatccagagcggcttcttcaagaacaaggagaagatgctgtacgaggaggagacccccaagagccaggagatggaggaggagaacaaggagagcagcagcagcagcagcgaggaggaggagggcgaggacgaggccagcgagagcgagaccgagaaggaggccgtgctgttctggcccttctag

SEQ ID NO: 65624 - protein, 210 aa, Artificial Sequence
  derived and/or modified sequence
MAPWGKRLAGVRGVLLDISGVLYDSGAGGGTAIAGSVEAVARLKRSRLKVRFCTNESQKSRAELVGQLQRLGFDISEQEVTAPAPAACQILKEQGLRPYLLIHDGVRSEFDQIDTSNPNCVVIADAGESFSYQNMNNAFQVLMELEKPVLISLGKGRYYKETSGLMLDVGPYMKALEYACGIKAEVVGKPSPEFFKSALQAIGVEAHQAQ

SEQ ID NO: 65625 - DNA, 633 bp, Artificial Sequence
  derived and/or modified sequence
atggccccctggggcaagagactggccggcgtgagaggcgtgctgctggacatcagcggcgtgctgtacgacagcggcgccggcggcggcaccgccatcgccggcagcgtggaggccgtggccagactgaagagaagcagactgaaggtgagattctgcaccaacgagagccagaagagcagagccgagctggtgggccagctgcagagactgggcttcgacatcagcgagcaggaggtgaccgcccccgcccccgccgcctgccagatcctgaaggagcagggcctgagaccctacctgctgatccacgacggcgtgagaagcgagttcgaccagatcgacaccagcaaccccaactgcgtggtgatcgccgacgccggcgagagcttcagctaccagaacatgaacaacgccttccaggtgctgatggagctggagaagcccgtgctgatcagcctgggcaagggcagatactacaaggagaccagcggcctgatgctggacgtgggcccctacatgaaggccctggagtacgcctgcggcatcaaggccgaggtggtgggcaagcccagccccgagttcttcaagagcgccctgcaggccatcggcgtggaggcccaccaggcccagtag

SEQ ID NO: 65626 - DNA, 633 bp, Artificial Sequence
  derived and/or modified sequence
atggccccttggggcaaacggctggctggcgtgaggggggttttattggatatttcaggagtgctttatgattccggggccggcggtgggactgctattgcagggtctgttgaagccgtggctcgcctcaagagatccaggctcaaagtgcgcttctgcacaaatgaaagtcagaaatctcgcgccgagctcgtgggccagctgcagcggctggggttcgacatctctgagcaagaggtcacagctcctgcgccagccgcttgtcagatactgaaggaacagggtttgcgcccctacttgctcatccacgatggcgttaggagtgagtttgaccaaatagacacatcaaaccctaattgtgtggtgattgccgatgcaggagaaagcttttcgtaccaaaatatgaacaatgccttccaggtgctcatggagctggagaaaccagttctgatctcactcggtaaaggtaggtattacaaagaaaccagcggtctgatgctggatgttggcccctatatgaaagctcttgagtacgcttgtggcatcaaagccgaggtcgtgggcaagcccagcccagagttttttaagtctgctttgcaagctatcggagtggaggcccatcaggcccaatag

SEQ ID NO: 65627 - DNA, 1522 bp, Artificial Sequence
  derived and/or modified sequence
gaggagcagggccgggcgccatggcaccgtggggcaagcggctggctggcgtgcgcggggtgctgcttgacatctcgggcgtgctgtacgacagcggcgcgggcggcggcacggccatcgccggctcggtggaggcggtggccagactgaagcgttcccggctgaaggtgaggttctgcaccaacgagtcgcagaagtcccgggcagagctggtggggcagcttcagaggctgggatttgacatctctgagcaggaggtgaccgccccggcaccagctgcctgccagatcctgaaggagcaaggcctgcgaccatacctgctcatccatgacggagtccgctcagaatttgatcagatcgacacatccaacccaaactgtgtggtaattgcagacgcaggagaaagcttttcttatcaaaacatgaataacgccttccaggtgctcatggagctggaaaaacctgtgctcatatcactgggaaaagggcgttactacaaggagacctctggcctgatgctggacgttggtccctacatgaaggcgcttgagtatgcctgtggcatcaaagccgaggtggtggggaagccttctcctgagtttttcaagtctgccctgcaagcgataggagtggaagcccaccaggcccagtgacgagcaccatccggaagtgaaggctgatgggtacgtggacaacctcgcagaggcagtggacctgctgctgcagcacgccgacaagtgatggcctcctgggagagccccgcctcctccacccctgcctctcctccacccctgcctcccctccacccctgcctctcctccacccgcccaggagagccccacctcctccacccctgcctctcctccacccctgcctcccctccacctgccccagtgcccagaccaaccaaggccctgacagccctgccttctgccctctgccctgcatgggcaggcatttgttccctacctgggtggcctgctcccctgcctgggccctgacttcagctccctgtagtgaagtccaggagggtgggacaggcctgtcaggcctctgggaatctcccaaatcccagaactcaccactcaccatgggcctttaaatgcagtaaactccacctaaccagattcaggggcactatgcccactgcctcctcttcagactctttgcatttcagtgaagagcctggaagaaacccaggggcctcctatgcacagatcttgcagcccagaaccaagtcagcctccctgcgactgcccaggcacactgcccaccaccccacccccgaaacaatgccagcccgctgctttttctatcctcccagtcacctttgcagacaaagaccaggggcagctcccgagggcactgtgaaggctcccatgccacacagtgagaactgtagcctctgcgtccaaggcacacagggtactttctggacccactgctggacagacttgaaggtgtcatgcccggtgtgtgcaggaggaaactaacagttcagtaaactctgccttgaccagca

SEQ ID NO: 65628 - DNA, 633 bp, Artificial Sequence
  derived and/or modified sequence
atggccccctggggcaagaggctggccggcgtgcggggcgtgctgctggacatctctggagtgctgtatgattctggagctgggggcggcacagccatcgccggctctgtggaggccgtggcccggctgaagaggagccggctgaaggtgcgcttctgcaccaatgaaagccagaagagcagagctgagctggtgggccagctgcagaggctgggctttgacatcagcgagcaggaggtgacagccccagccccagctgcctgccagatcctgaaggagcagggcctgcggccctacctgctgattcatgatggagtgcgctcagaatttgaccagattgacaccagcaaccccaactgtgtggtgattgctgatgctggggagagcttctcctaccagaacatgaacaatgccttccaggtgctgatggagctggagaagcctgtgctgatcagcctgggcaagggccgctactacaaggagaccagcggcctgatgctggatgtgggcccctacatgaaggccctggagtatgcctgtggcatcaaggccgaggtggtgggcaagcccagccctgagttcttcaagagcgccctgcaggccatcggcgtggaggcccaccaggcccagtag

SEQ ID NO: 65629 - DNA, 633 bp, Artificial Sequence
  derived and/or modified sequence
atggccccctggggcaagcggctggccggcgtgcggggcgtgctgcttgatattagtggtgtgctgtacgatagcggagcaggcggcgggaccgctatcgcagggtcagtggaagcagtcgctagactgaagcggagtcggctgaaagtgcggttttgtactaacgaaagccagaagtcaagggcggagctggtggggcagttgcagcggctaggatttgatataagcgaacaggaggtgacagcccctgctcccgctgcctgtcagatactcaaagagcaaggattgcgaccttatctgttgatccatgatggggtccgctccgaatttgaccagatagacacttctaacccaaactgtgtggtcatcgcggacgcgggagaaagcttttcttaccagaatatgaataacgcgttccaggtgttaatggaactcgagaagcccgtccttatctcactgggcaaaggtcggtactataaagagacgagcggtttgatgctggacgtgggcccatatatgaaggccctggagtatgcatgtgggatcaaagccgaggttgtcggtaaaccatcccccgagttcttcaagtcagccctgcaagcgataggggtcgaggcccaccaagcccaatag

SEQ ID NO: 65630 - DNA, 633 bp, Artificial Sequence
  derived and/or modified sequence
atggcgccatggggcaagcggctggctggggtgcgtggagtgcttctcgacatttccggcgttctttacgattcaggcgcaggcggagggactgctatcgccggtagtgttgaggccgtggccagactgaaacgaagcaggctgaaagttagattttgtacgaatgaaagccaaaaatccagggccgaacttgtgggacagctacagaggctcgggttcgatatctcggaacaagaagtcacagcaccagcccctgccgcttgccagatactaaaggagcaaggattgcgaccatatctgctcattcacgacggggtgcggagcgagttcgaccaaattgatacttctaaccccaattgcgtcgtgattgctgacgccggagaatccttttcatatcagaacatgaataatgcgtttcaggtgctcatggagctggagaagcccgttttgattagcttgggcaagggtaggtactataaagagacatccgggcttatgctggatgtgggcccatacatgaaggccctcgaatatgcctgcggcatcaaagccgaagtggtcggaaagccctccccggagttcttcaagtccgcacttcaggctataggtgtggaagcccaccaagctcaatag

SEQ ID NO: 65631 - protein, 1250 aa, Artificial Sequence
  derived and/or modified sequence
MKPPQQSLYLLVDSVDEGCNITEGEQTSTSLSGTVAALLAGHHEFFPPWLLLLCSARKQSKAVTKMFTGFRKISLDDLRKAYIVKDVQQYILHRLDQEEALRQHLTKETAEMLNQLHIKSSGCFLYLERVLDGVVENFIMLREIRDIPGTLNGLYLWLCQRLFVRKQFAKVQPILNVILAACRPLTITELYHAVWTKNMSLTLEDFQRKLDILSKLLVDGLGNTKILFHYSFAEWLLDVKHCTQKYLCNAAEGHRMLAMSYTCQAKNLTPLEAQEFALHLINSNLQLETAELALWMIWNGTPVRDSLSTLIPKEQEVLQLLVKAGAHVNSEDDRTSCIVRQALEREDSIRTLLDNGASVNQCDSNGRTLLANAAYSGSLDVVNLLVSRGADLEIEDAHGHTPLTLAARQGHTKVVNCLIGCGANINHTDQDGWTALRSAAWGGHTEVVSALLYAGVKVDCADADSRTALRAAAWGGHEDIVLNLLQHGAEVNKADNEGRTALIAAAYMGHREIVEHLLDHGAEVNHEDVDGRTALSVAALCVPASKGHASVVSLLIDRGAEVDHCDKDGMTPLLVAAYEGHVDVVDLLLEGGADVDHTDNNGRTPLLAAASMGHASVVNTLLFWGAAVDSIDSEGRTVLSIASAQGNVEVVRTLLDRGLDENHRDDAGWTPLHMAAFEGHRLICEALIEQGARTNEIDNDGRIPFILASQEGHYDCVQILLENKSNIDQRGYDGRNALRVAALEGHRDIVELLFSHGADVNCKDADGRPTLYILALENQLTMAEYFLENGANVEASDAEGRTALHVSCWQGHMEMVQVLIAYHADVNAADNEKRSALQSAAWQGHVKVVQLLIEHGAVVDHTCNQGATALCIAAQEGHIDVVQVLLEHGADPNHADQFGRTAMRVAAKNGHSQIIKLLEKYGASSLNGCSPSPVHTMEQKPLQSLSSKVQSLTIKSNSSGSTGGGDMQPSLRGLPNGPTHAFSSPSESPDSTVDRQKSSLSNNSLKSSKNSSLRTTSSTATAQTVPIDSFHNLSFTEQIQQHSLPRSRSRQSIVSPSSTTQSLGQSHNSPSSEFEWSQVKPSLKSTKASKGGKSENSAKSGSAGKKAKQSNSSQPKVLEYEMTQFDRRGPIAKSGTAAPPKQMPAESQCKIMIPSAQQEIGRSQQQFLIHQQSGEQKKRNGIMTNPNYHLQSNQVFLGRVSVPRTMQDRGHQEVLEGYPSSETELSLKQALKLQIEGSDPSFNYKKETPL

SEQ ID NO: 65632 - DNA, 3753 bp, Artificial Sequence
  derived and/or modified sequence
atgaagcccccccagcagagcctgtacctgctggtggacagcgtggacgagggctgcaacatcaccgagggcgagcagaccagcaccagcctgagcggcaccgtggccgccctgctggccggccaccacgagttcttccccccctggctgctgctgctgtgcagcgccagaaagcagagcaaggccgtgaccaagatgttcaccggcttcagaaagatcagcctggacgacctgagaaaggcctacatcgtgaaggacgtgcagcagtacatcctgcacagactggaccaggaggaggccctgagacagcacctgaccaaggagaccgccgagatgctgaaccagctgcacatcaagagcagcggctgcttcctgtacctggagagagtgctggacggcgtggtggagaacttcatcatgctgagagagatcagagacatccccggcaccctgaacggcctgtacctgtggctgtgccagagactgttcgtgagaaagcagttcgccaaggtgcagcccatcctgaacgtgatcctggccgcctgcagacccctgaccatcaccgagctgtaccacgccgtgtggaccaagaacatgagcctgaccctggaggacttccagagaaagctggacatcctgagcaagctgctggtggacggcctgggcaacaccaagatcctgttccactacagcttcgccgagtggctgctggacgtgaagcactgcacccagaagtacctgtgcaacgccgccgagggccacagaatgctggccatgagctacacctgccaggccaagaacctgacccccctggaggcccaggagttcgccctgcacctgatcaacagcaacctgcagctggagaccgccgagctggccctgtggatgatctggaacggcacccccgtgagagacagcctgagcaccctgatccccaaggagcaggaggtgctgcagctgctggtgaaggccggcgcccacgtgaacagcgaggacgacagaaccagctgcatcgtgagacaggccctggagagagaggacagcatcagaaccctgctggacaacggcgccagcgtgaaccagtgcgacagcaacggcagaaccctgctggccaacgccgcctacagcggcagcctggacgtggtgaacctgctggtgagcagaggcgccgacctggagatcgaggacgcccacggccacacccccctgaccctggccgccagacagggccacaccaaggtggtgaactgcctgatcggctgcggcgccaacatcaaccacaccgaccaggacggctggaccgccctgagaagcgccgcctggggcggccacaccgaggtggtgagcgccctgctgtacgccggcgtgaaggtggactgcgccgacgccgacagcagaaccgccctgagagccgccgcctggggcggccacgaggacatcgtgctgaacctgctgcagcacggcgccgaggtgaacaaggccgacaacgagggcagaaccgccctgatcgccgccgcctacatgggccacagagagatcgtggagcacctgctggaccacggcgccgaggtgaaccacgaggacgtggacggcagaaccgccctgagcgtggccgccctgtgcgtgcccgccagcaagggccacgccagcgtggtgagcctgctgatcgacagaggcgccgaggtggaccactgcgacaaggacggcatgacccccctgctggtggccgcctacgagggccacgtggacgtggtggacctgctgctggagggcggcgccgacgtggaccacaccgacaacaacggcagaacccccctgctggccgccgccagcatgggccacgccagcgtggtgaacaccctgctgttctggggcgccgccgtggacagcatcgacagcgagggcagaaccgtgctgagcatcgccagcgcccagggcaacgtggaggtggtgagaaccctgctggacagaggcctggacgagaaccacagagacgacgccggctggacccccctgcacatggccgccttcgagggccacagactgatctgcgaggccctgatcgagcagggcgccagaaccaacgagatcgacaacgacggcagaatccccttcatcctggccagccaggagggccactacgactgcgtgcagatcctgctggagaacaagagcaacatcgaccagagaggctacgacggcagaaacgccctgagagtggccgccctggagggccacagagacatcgtggagctgctgttcagccacggcgccgacgtgaactgcaaggacgccgacggcagacccaccctgtacatcctggccctggagaaccagctgaccatggccgagtacttcctggagaacggcgccaacgtggaggccagcgacgccgagggcagaaccgccctgcacgtgagctgctggcagggccacatggagatggtgcaggtgctgatcgcctaccacgccgacgtgaacgccgccgacaacgagaagagaagcgccctgcagagcgccgcctggcagggccacgtgaaggtggtgcagctgctgatcgagcacggcgccgtggtggaccacacctgcaaccagggcgccaccgccctgtgcatcgccgcccaggagggccacatcgacgtggtgcaggtgctgctggagcacggcgccgaccccaaccacgccgaccagttcggcagaaccgccatgagagtggccgccaagaacggccacagccagatcatcaagctgctggagaagtacggcgccagcagcctgaacggctgcagccccagccccgtgcacaccatggagcagaagcccctgcagagcctgagcagcaaggtgcagagcctgaccatcaagagcaacagcagcggcagcaccggcggcggcgacatgcagcccagcctgagaggcctgcccaacggccccacccacgccttcagcagccccagcgagagccccgacagcaccgtggacagacagaagagcagcctgagcaacaacagcctgaagagcagcaagaacagcagcctgagaaccaccagcagcaccgccaccgcccagaccgtgcccatcgacagcttccacaacctgagcttcaccgagcagatccagcagcacagcctgcccagaagcagaagcagacagagcatcgtgagccccagcagcaccacccagagcctgggccagagccacaacagccccagcagcgagttcgagtggagccaggtgaagcccagcctgaagagcaccaaggccagcaagggcggcaagagcgagaacagcgccaagagcggcagcgccggcaagaaggccaagcagagcaacagcagccagcccaaggtgctggagtacgagatgacccagttcgacagaagaggccccatcgccaagagcggcaccgccgccccccccaagcagatgcccgccgagagccagtgcaagatcatgatccccagcgcccagcaggagatcggcagaagccagcagcagttcctgatccaccagcagagcggcgagcagaagaagagaaacggcatcatgaccaaccccaactaccacctgcagagcaaccaggtgttcctgggcagagtgagcgtgcccagaaccatgcaggacagaggccaccaggaggtgctggagggctaccccagcagcgagaccgagctgagcctgaagcaggccctgaagctgcagatcgagggcagcgaccccagcttcaactacaagaaggagacccccctgtag

SEQ ID NO: 65633 - DNA, 3753 bp, Artificial Sequence
  derived and/or modified sequence
atgaagccgccacagcagagcctgtacctgctggtcgattcagtagatgaagggtgtaatatcaccgaaggcgagcagacttccacatctctatctggcaccgtagcagcgctgctcgcagggcaccatgagttttttcccccctggctgctgctcctttgctccgcccgtaaacagtcaaaagctgtcaccaagatgttcacaggatttcgtaaaatctctctggatgatctacggaaagcatatattgtgaaggatgtgcaacaatatattctgcacagactggatcaggaagaagccctgcgtcaacatctaactaaggaaactgcagaaatgttgaatcaactgcacatcaaatcttcagggtgtttcctttatctagagcgcgtgttggacggcgtcgtggagaattttatcatgctgcgggaaattcgggacattcctgggactcttaatgggctgtacttatggctctgccaacggctgtttgtgaggaagcagttcgctaaggtccagccaatcctgaatgtgattttagctgcatgccgcccgttgacgattaccgagctgtatcatgctgtctggactaagaacatgtccttaacgctggaggattttcagcggaagctcgatatcttgagtaagctgttggttgacgggcttggcaataccaagatcctgttccattattcctttgctgaatggctattggacgttaagcactgcacacagaagtacctgtgtaacgcagccgaaggacataggatgctagccatgtcctatacctgtcaggcgaagaatctaacacccttggaggcacaggagtttgctctgcacctgattaattccaacctgcaacttgaaacagctgagttggcgttgtggatgatttggaacggcactccggtgagggattctctgtcaacgctcatccctaaagaacaagaagttctgcagctgctcgttaaagccggggctcacgtaaacagcgaggacgatcgcacctcttgcatcgttaggcaggctttggagcgggaggatagcatccgcaccctgctcgacaacggggcaagcgtgaaccagtgtgacagcaacgggcggaccctgctcgcaaacgctgcctactccgggtcactcgacgtcgttaatctcctggtctcccggggggcagacctggagattgaagatgcccatggccacacaccacttacgttggctgctaggcaaggccacactaaagttgttaactgccttatcggctgtggtgcaaacatcaaccatacagatcaggacgggtggactgctttacgcagtgcggcttggggaggacacacggaggttgtgtctgccttgctttacgccggcgtgaaggtagattgtgccgacgctgactcccggacagcgcttagggctgcagcgtgggggggccacgaagacattgtcctgaacttactccaacacggtgcagaagtaaataaagctgataacgagggaagaacggccctgattgccgctgcctacatgggccaccgtgagattgttgaacaccttctggatcacggggcggaggttaatcatgaggacgtggacggccggactgcactgtcagtggcagctctgtgcgtgcccgccagcaaagggcacgcgtccgttgtgtcattgttgatcgacaggggcgctgaagttgaccattgtgataaagatggcatgactccgctgctggtggcagcctacgaaggacacgtcgacgtcgttgatctgctacttgagggcggtgcggacgtcgatcacaccgacaataacgggagaacacccctgctcgctgccgcttccatgggtcatgcatctgtggtgaacacccttctgttttggggagctgctgttgatagcatcgattccgaggggaggactgtacttagcatcgcaagcgcgcaggggaatgtcgaggttgtcaggaccctactcgatcgtggactcgatgagaatcatcgcgatgacgcgggctggactccactgcatatggccgctttcgaggggcaccggctaatatgcgaagctctgatcgaacaaggagctcgtactaatgagatcgataacgacgggagaattcccttcatcttggcgagtcaagagggacactacgattgcgtccagatactgctcgagaacaaaagcaacatcgaccagcgtgggtacgacgggagaaatgccttgcgcgtcgctgctctggaggggcacagggacatcgttgaacttctgttcagccacggagccgacgtgaattgcaaggatgcagatggccggccgaccttgtatattttggctttggaaaatcaacttactatggctgagtacttcctggaaaacggcgcaaatgtggaggcatccgacgccgagggacgcaccgcactccatgtcagctgttggcagggccacatggaaatggtgcaggtgctgattgcatatcacgccgacgtgaacgccgcagataacgaaaagcgatctgctttgcaatccgccgcctggcagggacatgtcaaagtggtccagctcttgatagaacatggcgctgttgtcgaccacacatgcaatcagggagcaacagccctctgcatcgccgcccaagagggacatatcgatgttgtgcaggttcttttagagcacggcgccgacccgaaccacgcagaccagttcggcaggacagccatgcgtgtggcagcaaaaaatggacactcccagatcattaagctcctagaaaagtacggtgctagttcgctaaatggatgctcccctagtcccgtgcacactatggagcagaaaccattacaaagtctgagctccaaagtgcagtctctcacaataaagagtaattccagcggatccacaggtggtggcgacatgcagccttcgttgcgcggcctacctaacggccccacccacgccttttcctcaccctctgaatctcccgatagcaccgtggacagacaaaaatctagtctgagtaacaattctctcaaaagcagtaaaaactccagcttacggacaacctcctcaacagccactgcacagactgtacccatcgactctttccacaacctgagttttacagagcagatccagcagcacagtcttccccgaagccgcagtagacaatccattgtgtccccatcttctaccacacagtccctggggcagagccacaacagcccttcatcagagtttgagtggagccaggtgaaaccgtccctaaaatccacaaaggcgagcaagggaggcaaaagcgagaacagcgcgaaaagcggatcagccgggaaaaaggctaaacagtctaactctagtcaacctaaagtattagagtacgagatgacgcagttcgaccgtaggggtccaatcgccaaatcaggaacggccgcccctccaaagcaaatgccagccgaaagccagtgtaaaatcatgatccccagtgcgcagcaagagattgggaggtctcagcaacaattcttgatacatcagcaatccggggagcagaaaaaaaggaatgggatcatgacaaatcctaattaccacctccagtcaaatcaggtatttctcgggcgagtatccgtgccacgtaccatgcaggacaggggacatcaggaggttctggaaggatatccctcttcagaaaccgagctgagccttaaacaggctctcaagctacaaatagaggggtcagatccctccttcaactataagaaggaaacaccactttag

SEQ ID NO: 65634 - DNA, 3753 bp, Artificial Sequence
  derived and/or modified sequence
atgaagccaccccagcagagcctgtacctgctggtggacagcgtggatgagggctgcaacatcacagaaggagagcagaccagcaccagcctgagcggcaccgtggccgccctgctggccggccaccacgagttcttccccccctggctgctgctgctgtgcagcgccaggaagcagagcaaggctgtgaccaagatgttcaccggcttcaggaagatcagcctggatgacctgaggaaggcctacatcgtgaaggatgtgcagcagtacatcctgcaccggctggaccaggaggaggccctgcggcagcacctgaccaaggagacagctgagatgctgaaccagctgcacatcaagagcagcggctgcttcctgtacctggagcgggtgctggatggagtggtggagaacttcatcatgctgcgggagatccgggacatccctggcaccctgaatggcctgtacctgtggctgtgccagaggctgtttgtgaggaagcagtttgccaaggtgcagcccatcctgaatgtcatcctggccgcctgccggcccctgaccatcacagagctgtaccacgctgtgtggaccaagaacatgagcctgaccctggaggacttccagaggaagctggacatcctgagcaagctgctggtggatggcctgggcaacaccaagatcctcttccactacagctttgctgagtggctgctggatgtgaagcactgcacccagaagtacctgtgcaatgctgctgagggccacaggatgctggccatgagctacacctgccaggccaagaacctgacccccctggaggcccaggagtttgccctgcacctgatcaacagcaacctgcagctggagacagctgagctggccctgtggatgatctggaatggcacccctgtgcgggacagcctgagcaccctcatccccaaggagcaggaggtgctgcagctgctggtgaaggccggggcccacgtgaacagtgaagatgacaggaccagctgcatcgtgcggcaggccctggagcgggaggacagcatccgcaccctgctggacaatggagcctctgtgaaccagtgtgacagcaatggaagaaccctgctggccaatgctgcctacagcggcagcctggatgtggtgaacctgctggtgtccagaggagctgacctggagattgaagatgcccacggccacacccccctgaccctggccgcccggcagggccacaccaaggtggtgaactgcctgattggctgtggggccaacatcaaccacacagaccaggacggctggacagccctgcggtctgctgcctggggcggccacacagaggtggtgtctgccctgctgtatgctggggtgaaggtggactgtgctgatgctgacagcaggacagccctgcgggccgccgcctggggcggccacgaggacatcgtgctgaacctgctgcagcacggggctgaggtgaacaaggctgacaatgaaggaagaacagccctgattgctgctgcctacatgggccaccgggagatcgtggagcacctgctggaccacggggctgaggtgaaccatgaagatgtggatggccgcacagccctgtctgtggccgccctgtgtgtgcctgccagcaagggccacgcctctgtggtgtccctgctgattgacagaggagctgaggtggaccactgtgacaaggatggcatgacccccctgctggtggccgcctatgagggccacgtggatgtggtggacctgctgctggagggcggcgcagatgtggaccacacagacaacaatggaagaacacccctgctggccgccgcctccatgggccacgcctctgtggtgaacaccctgctcttctggggcgctgctgtggacagcattgattctgagggccgcacagtgctgagcatcgccagcgcccagggcaatgtggaggtggtgaggaccctgctggaccggggcctggatgagaaccacagagatgatgctggctggacccccctgcacatggccgcctttgagggccacaggctcatctgtgaggccctgattgagcagggcgcccggaccaatgaaattgacaatgatggccgcatccccttcatcctggccagccaggagggccactatgactgtgtgcagatcctgctggagaacaagagcaacatcgaccagaggggctatgatggaagaaatgccctgcgggtggccgccctggagggccaccgggacatcgtggagctgctcttcagccacggggctgatgtgaactgcaaggatgctgatggccggcccaccctgtacatcctggccctggagaaccagctgaccatggccgagtacttcctggagaatggagccaacgtggaggccagtgatgctgagggccgcacagccctgcacgtgtcctgctggcagggccacatggagatggtgcaggtgctgattgcctaccacgcagatgtgaatgctgctgacaatgagaagaggtctgccctgcagagcgctgcctggcagggccacgtgaaggtggtgcagctgctgattgaacatggagctgtggtggaccacacctgcaaccagggcgccacagccctgtgcatcgccgcccaggagggccacattgatgtggtgcaggtgctgctggagcacggggctgaccccaaccacgccgaccagtttggccgcacagccatgagggtggccgccaagaatggccacagccagatcatcaagctgctggagaagtatggagccagcagcctgaatggctgcagccccagccctgtgcacaccatggagcagaagcccctgcagagcctgagcagcaaggtgcagagcctgaccatcaagagcaacagcagcggcagcactggaggaggagacatgcagcccagcctgcggggcctgcccaacggccccacccacgccttcagcagccccagcgagagcccagacagcacagtggaccggcagaagagcagcctgagcaacaacagcctgaagagcagcaagaacagcagcctgcggaccaccagcagcacagccacagcccagacagtgcccatcgacagcttccacaacctgtccttcacagagcagatccagcagcacagcctgcccaggagccgcagccggcagagcatcgtgagccccagcagcaccacccagagcctgggccagagccacaacagccccagcagcgagtttgagtggagccaggtgaagcccagcctgaagagcaccaaggccagcaagggcggcaagtcagaaaattctgccaagagcggcagcgctgggaagaaggccaagcagagcaacagcagccagcccaaggtgctggagtatgagatgacccagtttgacagaagaggccccatcgccaagagcggcacagctgccccacccaagcagatgcctgctgagagccagtgcaagatcatgatccccagcgcccagcaggagatcggccgcagccagcagcagttcctgatccaccagcagagcggggagcagaagaagagaaatggcatcatgaccaaccccaactaccacctgcagagcaaccaggtgttcctgggccgggtgtctgtgcccaggaccatgcaggaccggggccaccaggaggtgctggagggctaccccagcagcgagacagagctgagcctgaagcaggccctgaagctgcagatcgagggcagtgaccccagcttcaactacaagaaggagacccccctgtag

SEQ ID NO: 65635 - DNA, 3753 bp, Artificial Sequence
  derived and/or modified sequence
atgaagcccccccagcagagcctgtacctgctggtggacagcgtggacgagggttgtaacattaccgagggtgaacagacctctactagcctgagtgggactgtggccgcccttctggccggccaccatgaatttttccctccttggctactgttgctttgctccgcccggaagcagtccaaggcagtcactaagatgtttaccggttttcggaagatctcactcgacgacctgaggaaggcctacatcgttaaggacgtgcagcagtatatactgcacagattggatcaggaggaggccctgcggcagcacctgactaaggagactgcagaaatgctaaatcagctgcacatcaagtcttccggctgtttcctctatttggaaagagtactggacggagtggtggagaactttatcatgttgagagaaatccgcgatatccctggaactctaaacggcctatacctttggctttgccagaggttgttcgtccgcaaacagtttgcgaaggttcagccgatactcaatgttatcttggctgcttgtcggcccctgacaatcacagagctctatcacgcagtgtggacaaagaatatgtctcttactctagaggacttccagagaaagctcgacattctgagcaagcttctcgtggatggcctcgggaataccaagattctgttccattatagtttcgcagaatggttgttggatgttaagcactgtacccagaaatacctgtgcaatgccgccgagggtcacagaatgcttgctatgtcctatacttgccaagctaagaacctgacgcccttggaagcccaggagtttgctttacatctaatcaactctaacctccagttagagacagccgagcttgcattgtggatgatctggaatggaacccctgtgagggactcgctttcaactcttatccccaaggagcaggaggtgctgcaactgctggtaaaagcgggcgctcacgttaatagcgaggacgaccgcacatcatgtattgtgaggcaggcccttgaaagagaagactccattcggacgttgctcgataatggcgcctcagtaaatcagtgtgacagcaacggccgcaccctcctcgccaatgccgcttactctggtagcttagatgttgtcaatctgctggtttctcgcggagctgaccttgagattgaagacgcgcacggccatacccccttgactcttgcagccaggcaggggcacaccaaggtggttaactgtttaatcggatgtggcgccaatattaatcatactgaccaagatggctggaccgccctccgatctgccgcctggggcggccacacagaagttgtcagtgcattgctgtatgctggagtaaaggttgattgcgcagacgcagattctcgaacagccctgagagcagcagcatggggaggacatgaggatatcgtgctcaacctccttcagcacggcgcagaggtgaataaagctgacaatgagggtcggacagccctgattgcagccgcatatatgggtcacagagaaattgtggaacacctgctcgatcacggagcagaagtgaaccatgaagatgttgacggcagaacggcattgtccgtcgcggccctctgtgtaccagcctctaaagggcacgccagcgtggtcagtctgctaattgaccgcggtgcagaagtggatcattgtgacaaggacgggatgacacctctgttagttgccgcatacgaaggccatgttgacgtggtggacctacttctggagggaggagctgatgtggaccacaccgacaataacgggagaaccccacttctggccgccgcctcaatggggcatgcctctgtagtgaacacactgctcttctggggcgccgccgtggacagtatcgatagcgagggccggaccgtcctctccatcgcaagcgcccaggggaatgtcgaggtagtgcgcacactgctcgaccgaggcttggatgaaaaccaccgggatgacgccggctggacgccacttcacatggctgcattcgaagggcatcgattgatttgcgaggcattgatcgagcaaggcgcacgtaccaacgagatcgataatgatgggaggattccatttattctcgcctctcaggagggtcattacgattgcgtgcagatccttctggagaacaaatccaatattgatcagagggggtacgatggccgcaacgcgttacgcgtggctgcattagagggccatcgcgatattgtcgagcttctgttctctcatggcgcagacgttaattgcaaagacgcggacggccggcccactttatatattctggcgcttgaaaatcagctaacaatggccgaatattttctcgaaaacggcgccaatgttgaggcaagcgatgcagaaggcagaacggccctccatgtttcctgttggcagggtcatatggaaatggtccaggttctcatcgcataccacgccgacgtcaacgccgctgacaacgaaaaaagatctgcactgcagtctgccgcttggcagggccacgtcaaagtggttcaattattgatcgagcatggagctgtggtagatcacacttgcaaccaaggcgccacagctctctgcattgcagcacaagaagggcacattgacgtagttcaggttctgctggaacacggggctgacccgaatcatgctgatcagtttggacgcactgcaatgcgggtcgccgccaagaatgggcactcgcagatcattaaacttctcgaaaagtacggcgcgagcagtttaaatggctgcagcccgtcccctgtccacacaatggaacagaaaccactgcagtcactcagctccaaagtccagtcacttacgataaaatccaacagctctggctccactggaggcggggacatgcaaccctccttacggggcctgcccaatggacctactcacgccttttccagcccttctgagtctcctgatagcactgttgaccggcagaaaagcagcctttctaacaacagccttaaaagctcaaaaaacagctccctccgcactacaagctctaccgcaactgcgcagaccgtgccgatcgactctttccacaacttaagttttactgagcaaattcagcaacactcgcttcctagatctaggagtagacaatccatcgtctctccttcgagcacgactcagagtcttggacagtcacataacagcccttcctccgagttcgagtggagccaagtgaaaccgtctttgaagagtaccaaagcctcaaaagggggaaaaagcgaaaactcagccaaaagcggctcggctgggaagaaggccaaacagagtaactcctcccagccaaaagtgttggagtacgaaatgacacagtttgataggcgcggacctatcgccaagtctggcactgctgctccccccaaacagatgcccgcggagagtcagtgcaagatcatgataccctccgcccagcaggagattgggaggagtcagcagcagtttctcattcaccagcaaagcggagagcagaagaagcgaaatggcatcatgacaaatccaaactaccatctgcagtccaatcaggtctttttaggccgggtatctgtgcctaggaccatgcaagaccgcggccatcaggaagtgttggaaggctacccctcctctgagaccgagttatcattgaaacaggctcttaaactgcagatagagggatcagatcctagtttcaactataagaaggagacccccttatag

SEQ ID NO: 65636 - DNA, 4212 bp, Artificial Sequence
  derived and/or modified sequence
agttactgccctgacggcggcggcggcggcggttggccggtgggggctggggcgagcacgaccgattctgctgggaaagctggaactggcagccgccgggggccaagaggaggatccggagctgggagcgtgccccgggcccggcggaggaggcggctgcagttggagtggagtcttgggagcgctgctggcagcgacttctcagcgaagcaagtgtctgagactgagagtccctaacagcggcagcggcggccacggcggcggctggggccgaggtgtgttctactccctcttctgggaatgaagcctccccagcaaagcctatacctgcttgttgattctgttgatgaagggtgtaacattactgaaggtgaacaaacgtctaccagcttatctgggactgttgcagcacttttagctggtcaccatgagttctttccaccatggctattgcttctctgttctgcccgaaagcagagtaaggctgttactaaaatgtttactggttttcgaaaaataagtttagatgaccttcggaaggcatatatcgtcaaggatgttcagcagtacattcttcatcgtttagatcaagaagaagctttgcgacaacacctcacaaaagaaactgcagagatgttaaatcaactgcacattaaaagcagtggatgctttctttacctagaacgagttttagatggagttgtagaaaattttattatgttaagagaaattcgtgacatcccaggaactctaaatggtttatatctctggctgtgccaaagactttttgtaagaaaacaatttgcaaaggttcagcctattttgaatgtgattcttgcagcctgccgacctttgaccataacggaattatatcacgcagtatggaccaaaaacatgtcgttaactttggaagattttcaacgcaagttagatatcctctccaaacttcttgttgatggactaggaaatacaaaaatactgtttcattatagttttgccgagtggcttctggatgtgaaacactgtactcagaagtatttatgtaatgcagcagaaggacacagaatgttggctatgagttatacctgtcaagccaagaatttaacaccattggaagcacaagaatttgcattgcacttaattaactcaaacttacaattagagacagcggagttagctctgtggatgatatggaatggtacacctgtcagagattccctttctactttgatacccaaggaacaagaagtgctacagctgttggttaaagctggggctcatgtcaacagtgaagacgatcgcacatcatgcatagttcgacaagccttagaaagagaggattccattcggacattattagataatggagcttcagtaaatcagtgtgattcaaatgggagaacattattggctaatgctgcatatagtggcagtcttgatgtagtcaatttacttgtctctaggggagcagatttagagatagaagatgctcatggacatacaccactcactctagcggctagacagggacataccaaggtggttaattgtttgattgggtgtggagcaaatattaatcatactgatcaagatggttggacagcattaagatctgctgcttggggtggccatactgaggtagtttctgcactactttatgctggcgtaaaagtggattgtgcagatgctgatagccgaacagctttgagagcagcagcatggggaggacacgaggatattgtactgaatttgctacaacatggcgctgaagtgaacaaagctgataatgaaggtagaactgctttgatagcagcagcatacatgggacatagagagattgtggaacacctactggaccatggagcagaagtaaatcatgaggatgttgatggcaggactgcactctctgtagctgcactttgtgtgcctgcaagtaaagggcacgcatcagttgttagccttttaattgatcgaggtgctgaagtagatcattgtgataaagatggcatgactccactgctggtagctgcctatgaaggacatgttgatgtggttgacttgcttctagaagggggagcagatgtagatcacacagataacaatggccgtacacccctcttagcagcagcgtctatgggtcatgcatcagttgtaaatacacttttgttttggggtgcagctgtggatagtattgatagtgaaggtaggacagtcctcagtatagcttcagcacaaggaaatgttgaggtggtacgtactctactggatagagggttagatgaaaatcacagagatgatgctggatggacacctttgcacatggcagcttttgaagggcacagattgatatgtgaagcacttattgaacaaggtgctagaacaaatgagattgacaatgatggacgaatccctttcatattagcttcacaagagggtcattatgattgtgttcaaatattactggaaaacaaatccaacattgatcaaagaggttatgatggaagaaatgcactgcgggttgctgcattagaagggcacagggacattgttgaattgctttttagccatggtgctgatgttaactgcaaagatgctgatggtcggcctacactttatatcttggccttagaaaatcagcttacaatggccgaatattttttagaaaatggtgcaaacgtagaagcaagtgatgctgaaggaaggacagcacttcatgtgtcttgttggcaaggccatatggaaatggtgcaggtcctgatagcataccatgctgacgtcaatgctgcagacaatgaaaagcgctctgctttgcagtctgcagcctggcagggccatgtaaaagtggttcagcttctgattgagcatggtgctgtagttgaccatacatgtaaccaaggtgcaactgcactctgtattgcagcccaggaagggcacattgatgttgttcaggtcttattagagcatggtgctgatccaaaccatgctgatcaatttggacgcactgctatgcgtgttgcagccaaaaatggacattctcagataattaaattattagaaaaatatggtgcatctagtttgaatggctgttccccatctcctgttcacacaatggagcaaaaacctctacagtcattgtcttcaaaagtgcagtcattaacaattaaatcaaatagctctggtagtactggtggaggggatatgcagccttcgttacgtggtttacctaatgggcctactcatgcttttagttctccttcagaatctccagattctacagttgaccggcagaagtcatcactgtcaaataattccctgaaaagctcaaaaaattcatctttgagaactacttcatctacagcaacggctcaaacagtgccaattgatagctttcataacttgtcatttacagaacaaattcagcagcattcattgccacgcagtagaagtcgacagtcaattgtttccccatcttccacaacacagtccttaggacagagtcataattcaccaagtagtgaatttgagtggagtcaagtaaagcccagtttgaagtcaactaaagcaagtaaaggggggaaatcagaaaattctgccaagtctggatcagctgggaaaaaagcgaaacaaagtaattcttcacagccaaaggttttagaatatgaaatgactcagtttgatagaagaggacctatagccaaatccgggactgctgcaccacctaaacaaatgccagcagaatctcaatgcaaaattatgataccttcagctcagcaggaaattggtcgatctcaacagcagtttcttattcaccaacaaagtggggaacagaagaagagaaatggaataatgacaaatccaaattatcatcttcagagcaaccaggtttttcttggtagggtttcagtcccacgaacaatgcaagatagagggcatcaggaagtgttggagggatacccttcctcagagacagaattaagccttaaacaagctctgaagcttcagattgaaggttctgaccctagcttcaactataaaaaggaaacaccattataaaagtttcctattctgtgaaacagaagacattgtgatggagtggttcttcagctactggatggaaacatatgcctgttgatttgctgaaaaaacaaaaaaaatgaagaatgtgatctctgcagtacagttaccttaattactgtaatgtgcctaaatagt

SEQ ID NO: 65637 - DNA, 3753 bp, Artificial Sequence
  derived and/or modified sequence
atgaaaccacctcagcagtcactgtatcttctagtggactctgttgacgagggctgcaacattacggagggagaacagacaagcacgagcctgagcggcactgttgcagctcttctcgccggtcaccacgagttctttccaccttggctgcttctcctgtgctccgccaggaaacaaagtaaagcggtcactaaaatgttcaccggtttcaggaaaatctccctggacgacttacggaaggcctacatcgtgaaagacgttcagcaatatattttgcatagactggaccaggaagaagccctccgacaacacctgaccaaagaaacggccgagatgctgaaccagctgcatatcaaatcctctgggtgcttcctgtacttggaacgggtgctggatggcgtggttgaaaattttatcatgctgagggaaattcgggacattcctggcaccttgaatggcctctacctgtggctctgtcagcggctcttcgttaggaagcagttcgccaaggtccagccaatccttaacgtgattcttgccgcatgcagacctcttaccattacagagctttaccacgctgtgtggaccaagaacatgagccttacactggaggatttccagcggaaacttgacatcctgtcaaaattgctcgtggatggactcggcaacactaagattctgttccattactcgttcgctgaatggctacttgatgtgaagcactgcactcaaaaatacttgtgtaatgcagctgagggacacagaatgctagcaatgtcttacacatgtcaggccaagaacctgaccccccttgaagcacaggaatttgcactgcacctcatcaactccaatctgcagttagagaccgccgagctcgctctttggatgatctggaatggaaccccggtccgtgacagcctatctactctgattccaaaggaacaagaggtgctgcaactcctggtgaaggccggtgcccacgtaaattctgaggatgatcggaccagctgtattgtgaggcaagcattggagcgcgaggactctattcggactttgcttgacaatggcgcaagtgttaatcagtgcgactccaatggaagaaccctgctagctaacgctgcttacagcggcagcctggatgtcgtcaacctcctcgtgtcaaggggcgctgacttggaaatcgaagacgctcatggacatactcctctgaccctggctgccaggcagggtcatacaaaggtggtgaactgcctcattggctgcggcgctaacatcaaccacacagatcaagatgggtggaccgccctgcggtcagcagcctggggcggtcacaccgaggtggtctctgccctgctgtacgcaggtgtgaaagtcgactgcgcggatgccgatagtaggaccgccttgcgcgctgccgcttgggggggacatgaggatatagtgctgaatctgcttcagcatggggctgaggtaaacaaggctgacaacgagggcagaacggccctaattgcggcagcttatatgggacaccgcgagatagtggagcatctcctggaccatggcgctgaggtcaatcatgaggatgtggacggcagaaccgctctatccgtggcagcgctgtgcgtccctgcttccaaaggacatgcgagtgtcgtgagtttgctgatcgacaggggggctgaagttgatcattgtgacaaagatggtatgactcccctgctagtcgccgcttatgagggccacgttgacgtagtcgacctactactggaggggggagccgatgtcgatcacacagacaacaacgggagaacacctctgctggccgctgcaagcatggggcacgcctctgtggtgaacacccttttgttctggggtgctgcggtggacagcatcgactccgagggcaggaccgttttgagtattgcttcggcccaggggaacgtggaagtggtgcgtacactactggaccgaggactggatgagaaccaccgggacgacgccggttggacgcccctgcatatggcagcctttgagggccaccgattgatctgtgaggcgctgattgaacaaggcgctcggaccaatgaaattgataatgatggcaggatcccgtttatccttgcctctcaggagggacattacgactgcgttcagatcctgttggagaacaagtcaaatatcgaccaacggggatacgacgggagaaatgcactgcgtgtagcagcactggaggggcatagggatatcgtagaactgctgttcagccacggagctgacgttaattgtaaagacgccgacgggagaccgaccctctacatcttagcacttgagaatcaactgaccatggctgagtatttcctcgaaaatggcgctaacgtcgaggcatccgatgctgagggaaggaccgccttgcacgttagttgttggcaagggcatatggaaatggttcaggtcctgatagcctatcacgcagacgtaaacgctgccgacaatgagaaacgatcagctctgcaatctgcagcatggcaggggcacgtcaaagtggtacagctgttgatcgaacacggtgccgttgtggaccatacatgtaatcagggagcaacggcactctgtattgccgctcaagagggccacattgatgtagtacaggtgctgcttgagcacggcgctgacccaaaccacgcggaccagttcggacggactgctatgcgggtagccgcaaagaacgggcattcccagatcataaagctgctggaaaagtacggcgcttcctcattaaacggctgttcaccatcccccgtccatacaatggagcagaaacctctgcaatctttgtccagtaaggtacagtctttgaccatcaaatcaaactcctccggctcaacagggggaggggatatgcagccttcactgcgaggcttgccaaatggccctacccatgccttctcaagcccatcagagagcccggacagtacagtcgaccggcagaaaagtagcctctctaataattccctaaaaagctcaaaaaattccagtctaaggacaacaagctctactgctaccgcacagactgtgcctattgactcattccacaacctgagttttactgagcagatccagcaacacagcctcccccgttcacgatcccgccagagcattgtctctccttcctcaactacacaaagtctgggacaatctcacaatagtccatcttcagaattcgaatggtcccaagtgaagccgagcctgaagtctacgaaggcctccaaggggggaaagagtgagaacagcgctaaatcaggcagtgccggtaagaaggctaagcaaagtaacagttctcagcccaaggtgctagaatacgagatgacacaatttgaccgaaggggcccaattgctaagagtggcacagcagctccccctaaacagatgcctgccgagagtcaatgtaagatcatgattccaagtgcccagcaagaaatcggacggtctcagcaacagttccttatacatcagcagtccggcgaacaaaagaaacgaaatggtatcatgaccaaccctaattatcacttgcagtcaaaccaggtattcctggggagggtctcagttccgaggaccatgcaggatagggggcatcaagaagtgctagaagggtatccctcatccgagacagaactgtcactgaagcaggctctgaagctccagattgagggcagcgaccccagctttaattataagaaggagacacctctatag

SEQ ID NO: 65638 - protein, 554 aa, Artificial Sequence
  derived and/or modified sequence
MPLPWSLALPLLLSWVAGGFGNAASARHHGLLASARQPGVCHYGTKLACCYGWRRNSKGVCEATCEPGCKFGECVGPNKCRCFPGYTGKTCSQDVNECGMKPRPCQHRCVNTHGSYKCFCLSGHMLMPDATCVNSRTCAMINCQYSCEDTEEGPQCLCPSSGLRLAPNGRDCLDIDECASGKVICPYNRRCVNTFGSYYCKCHIGFELQYISGRYDCIDINECTMDSHTCSHHANCFNTQGSFKCKCKQGYKGNGLRCSAIPENSVKEVLRAPGTIKDRIKKLLAHKNSMKKKAKIKNVTPEPTRTPTPKVNLQPFNYEEIVSRGGNSHGGKKGNEEKMKEGLEDEKREEKALKNDIEERSLRGDVFFPKVNEAGEFGLILVQRKALTSKLEHKADLNISVDCSFNHGICDWKQDREDDFDWNPADRDNAIGFYMAVPALAGHKKDIGRLKLLLPDLQPQSNFCLLFDYRLAGDKVGKLRVFVKNSNNALAWEKTTSEDEKWKTGKIQLYQGTDATKSIIFEAERGKGKTGEIAVDGVLLVSGLCPDSLLSVDD

SEQ ID NO: 65639 - DNA, 1665 bp, Artificial Sequence
  derived and/or modified sequence
atgccgctcccttggtcccttgccttgcccctcctactgagctgggtggcgggggggttcggcaacgccgcttctgccagacatcacggactccttgcaagcgcaagacaacctggtgtatgtcactacgggactaaactggcctgctgctatggttggcgtcggaactctaaaggcgtgtgtgaagcaacgtgtgaaccaggttgcaaattcggtgagtgcgtcggccccaataaatgtcggtgctttccaggctacaccggaaagacttgcagtcaggatgtgaacgagtgcggaatgaaaccaagaccatgtcagcatcgttgtgtgaatacccatggtagctataagtgcttctgtctgagcggccatatgctgatgccagatgctacctgcgtgaatagtcggacctgcgcaatgatcaattgtcagtactcatgcgaggatacggaagaagggcctcagtgcctctgtccgtcatctgggttaagactggcccctaatggcagagactgcttggacattgacgagtgtgctagcggcaaagtcatctgcccatataatagacgatgcgtgaatacttttgggtcttattattgcaagtgccacatcggattcgaactccaatatatctctggccggtatgactgtattgacattaacgagtgtaccatggatagccacacttgttcccaccatgctaactgtttcaacactcagggcagtttcaagtgtaagtgtaagcaggggtacaagggcaatgggctcagatgcagtgcaatccctgagaactccgtgaaggaggtgctacgtgcaccaggcacaatcaaagatcgaattaaaaagttgttggcgcacaagaacagcatgaaaaagaaggccaagattaaaaacgtgaccccagagccaaccaggactccgaccccgaaagtgaacttgcagccctttaattatgaggagatagtctccagagggggaaattctcacggcgggaagaagggtaatgaggagaaaatgaaggagggcctggaggatgagaagagggaagaaaaggcattaaaaaacgacatagaggagcgaagtttgcgcggagacgtgttcttccctaaagtaaatgaggccggagaattcgggctgatactggtgcagagaaaggctctcacctccaaacttgagcacaaggcggatctgaatatcagcgtggattgctctttcaaccacggtatttgcgactggaaacaggatcgggaggatgattttgattggaaccctgccgatcgcgataacgccattggtttctatatggctgtcccagccctcgccgggcacaagaaggatattggccggctgaagctcctgctacccgacttgcagccccagtccaatttttgcctcctgttcgactataggctggctggcgacaaggtgggaaagctgagagtgtttgtcaaaaacagcaacaacgccctggcatgggagaaaacaacctctgaggatgaaaaatggaagacagggaagattcagctataccaaggcaccgatgccactaaatctatcatatttgaagctgaaaggggaaaaggtaagaccggggagatcgccgtggacggtgtcctgctggtttctggtctttgcccggacagcctgttgtccgtagatgattag

SEQ ID NO: 65640 - DNA, 1665 bp, Artificial Sequence
  derived and/or modified sequence
atgcccctgccctggagcctggccctgcccctgctgctgtcctgggtggccggcggctttggaaatgctgccagcgcccggcaccacggcctgctggccagcgcccggcagcccggggtgtgccactacggcaccaagctggcctgctgctacggctggaggaggaacagcaagggcgtgtgtgaggccacctgtgagcccggctgcaagtttggagaatgtgtgggccccaacaagtgccgctgcttccctggctacacaggcaagacctgcagccaggatgtgaatgaatgtggcatgaagccccggccctgccagcaccgctgtgtgaacacccacggcagctacaagtgcttctgcctgagcggccacatgctgatgccagatgccacctgtgtgaacagcaggacctgtgccatgatcaactgccagtacagctgtgaggacacagaggagggcccccagtgcctgtgccccagcagcggcctgcggctggcccccaacggccgggactgcctggacattgatgaatgtgccagcggcaaggtgatctgcccctacaacagaagatgtgtgaacaccttcggcagctactactgcaagtgccacatcggctttgagctgcagtacatcagcggccgctatgactgcatcgacatcaatgaatgtaccatggacagccacacctgcagccaccacgccaactgcttcaacacccagggcagcttcaagtgcaagtgcaagcagggctacaagggaaatggcctgcgctgcagcgccatcccagaaaattctgtgaaggaggtgctgcgggcccctggcaccatcaaggaccgcatcaagaagctgctggcccacaagaacagcatgaagaagaaggccaagatcaagaatgtgaccccagagcccaccaggacccccacccccaaggtgaacctgcagcccttcaactatgaggagatcgtgtccagaggaggcaacagccatggaggcaagaagggaaatgaggagaagatgaaggagggcctggaggatgagaagcgggaggagaaggccctgaagaatgacatcgaggagaggagcctgcggggagatgtgttcttccccaaggtgaatgaggccggggagtttggcctcatcctggtgcagaggaaggccctgaccagcaagctggagcacaaggctgacctgaacatctctgtggactgcagcttcaaccacggcatctgtgactggaagcaggacagagaagatgactttgactggaacccagctgaccgggacaatgccatcggcttctacatggctgtgcctgccctggccggccacaagaaggacatcggccgcctgaagctgctgctgcctgacctgcagccccagagcaacttctgcctgctgtttgactaccgcctggccggggacaaggtgggcaagctgcgggtgtttgtgaagaacagcaacaatgccctggcctgggagaagaccaccagtgaagatgagaagtggaagacaggcaagatccagctgtaccagggcacagatgccaccaagagcatcatctttgaagctgagcggggcaagggcaagacaggagaaattgctgtggatggagtgctgctggtgtctggcctgtgcccagacagcctgctgtctgtggatgactag

SEQ ID NO: 65641 - DNA, 1665 bp, Artificial Sequence
  derived and/or modified sequence
atgcccctgccctggagcctggccctgcccctgctgctgagctgggtcgctgggggattcgggaatgcagccagtgctcgacaccacggcctccttgcttctgccaggcagcctggtgtgtgccactacggtaccaagctcgcctgttgctacggttggcgacgtaacagcaagggtgtctgcgaggccacgtgcgaacccgggtgtaagtttggtgagtgtgttggtcccaataaatgcaggtgcttccctggttacacggggaaaacatgtagtcaggatgtaaacgaatgtggcatgaagccacggccttgtcagcatagatgcgtcaacactcacgggagttacaaatgcttctgcctttcagggcacatgttgatgccggacgcaacctgcgtgaactctcggacctgcgcgatgatcaattgccaatacagttgtgaggatactgaggaaggaccgcagtgcctctgcccgagcagcggcctgcgtcttgctcccaacgggagggattgcttagacatcgatgagtgcgcttcggggaaggtgatctgtccctataaccgccgttgtgtgaataccttcggatcgtattactgtaaatgccacataggatttgagctacagtacatctccggcaggtacgattgtattgatataaatgagtgcacgatggatagtcacacatgctcgcatcacgccaactgtttcaacacacaaggctctttcaagtgtaagtgcaagcagggctacaaggggaacggattaagatgctcagcgatccctgagaactctgttaaggaagtcctcagagcccctgggactattaaagacagaattaaaaaacttctcgcacacaagaactccatgaagaagaaagccaagattaagaacgtcacccctgagccaacgaggacccctaccccaaaggtcaacctacagccctttaactatgaggaaattgtgtcacgcgggggtaattcacatggggggaaaaagggcaacgaagagaaaatgaaggaaggcttagaggacgagaagcgcgaggagaaggcattaaaaaacgacatcgaagaaaggagcctgcggggggacgtgttcttccccaaagtgaacgaagcaggagaattcggacttatcctggtgcagcggaaggcactgacttcaaagctcgagcataaggccgatcttaatattagtgtcgattgcagctttaaccacgggatttgcgattggaaacaggacagggaggatgacttcgattggaatcccgctgaccgggacaatgccattggtttttacatggcagtcccggcactggcgggccataaaaaggatattgggagactgaagctgttgctgcccgacctccagccccagtcgaacttctgtctgctgtttgattatcgtttggcgggcgacaaggtaggtaagctgagagtcttcgtcaagaattctaataatgcactagcctgggaaaagacgacttccgaagatgagaagtggaagacagggaagattcaactttatcagggcactgacgctactaaatcaatcatttttgaggctgaaagaggcaaaggaaagaccggggagatcgctgtagatggagtactgctcgtgtccggcctctgtcccgattctctgttgtcggtcgatgactag

SEQ ID NO: 65642 - DNA, 1665 bp, Artificial Sequence
  derived and/or modified sequence
atgcctttgccatggtcgcttgctttgcccttgctgctatcgtgggttgccggagggtttggcaacgcagcctctgctaggcaccatggattgctggcgtctgcacggcagccaggcgtgtgtcactatgggaccaaactcgcctgctgttacggctggaggagaaactctaagggcgtgtgcgaggcaacttgcgaacctggttgtaaattcggggagtgtgttgggcctaataaatgccgctgtttcccaggctacacaggaaaaacatgctcacaagatgtgaacgagtgcgggatgaagccaagaccctgtcagcatcgctgcgtgaacactcatgggagctataagtgtttttgtctcagcggacatatgttgatgcctgacgcgacatgcgtgaattctcgcacatgtgctatgatcaactgccagtattcctgcgaagacacagaggaagggcctcagtgcttgtgcccctcgagcgggctgcggttggcgcctaatggaagggattgtctggacatcgatgagtgtgcctccggcaaagtcatttgcccctacaaccgcaggtgcgtgaacacgtttggcagctactactgcaaatgtcacattggtttcgaactacaatacatctcaggacgttacgactgcatcgacatcaacgagtgcaccatggatagccatacttgttcacatcacgctaattgttttaatacccaaggttcctttaaatgtaagtgtaaacagggttataaggggaatgggctgaggtgtagcgctatccccgagaactctgttaaggaagtccttagggcgcctggtaccatcaaagatcggatcaaaaaattgctcgcgcacaagaattcaatgaagaaaaaagccaaaatcaaaaacgttaccccagaacctacccgcactcctactcccaaagtcaacctccagccgtttaattacgaggaaatagtttctcgcggaggcaatagccacgggggaaagaaaggcaacgaagagaagatgaaggaaggactcgaggacgaaaagagagaggaaaaagcgctgaagaatgacatcgaagagaggtccctgcggggagacgtattttttccaaaggttaatgaagcgggagaattcggcctgatactggtacagagaaaagccctgacgtccaagttagagcataaagccgacctgaatataagcgtggattgctctttcaaccacggtatctgtgactggaaacaggacagagaggatgatttcgactggaatccggcagatcgagataacgccatcggcttttacatggctgtccccgctctggccggtcacaagaaggacattggaaggctgaaacttttgttaccagatctgcaaccccagtccaatttctgcctcctcttcgattacaggttagcaggagacaaggtggggaaactgagagtgtttgttaagaatagcaacaacgccctagcatgggagaagaccaccagcgaggacgaaaaatggaagactggtaagattcagctgtaccagggcactgacgccaccaagagcattatttttgaggcagaacgtggaaaaggcaagacgggtgaaatcgcggtggacggggtcctgctggtcagcggcctctgccctgatagcctgctgagtgtcgatgactag

SEQ ID NO: 65643 - DNA, 1665 bp, Artificial Sequence
  derived and/or modified sequence
atgcccctgccctggagcctggccctgcccctgctgctgagctgggtggccggcggcttcggcaacgccgccagcgccagacaccacggcctgctggccagcgccagacagcccggcgtgtgccactacggcaccaagctggcctgctgctacggctggagaagaaacagcaagggcgtgtgcgaggccacctgcgagcccggctgcaagttcggcgagtgcgtgggccccaacaagtgcagatgcttccccggctacaccggcaagacctgcagccaggacgtgaacgagtgcggcatgaagcccagaccctgccagcacagatgcgtgaacacccacggcagctacaagtgcttctgcctgagcggccacatgctgatgcccgacgccacctgcgtgaacagcagaacctgcgccatgatcaactgccagtacagctgcgaggacaccgaggagggcccccagtgcctgtgccccagcagcggcctgagactggcccccaacggcagagactgcctggacatcgacgagtgcgccagcggcaaggtgatctgcccctacaacagaagatgcgtgaacaccttcggcagctactactgcaagtgccacatcggcttcgagctgcagtacatcagcggcagatacgactgcatcgacatcaacgagtgcaccatggacagccacacctgcagccaccacgccaactgcttcaacacccagggcagcttcaagtgcaagtgcaagcagggctacaagggcaacggcctgagatgcagcgccatccccgagaacagcgtgaaggaggtgctgagagcccccggcaccatcaaggacagaatcaagaagctgctggcccacaagaacagcatgaagaagaaggccaagatcaagaacgtgacccccgagcccaccagaacccccacccccaaggtgaacctgcagcccttcaactacgaggagatcgtgagcagaggcggcaacagccacggcggcaagaagggcaacgaggagaagatgaaggagggcctggaggacgagaagagagaggagaaggccctgaagaacgacatcgaggagagaagcctgagaggcgacgtgttcttccccaaggtgaacgaggccggcgagttcggcctgatcctggtgcagagaaaggccctgaccagcaagctggagcacaaggccgacctgaacatcagcgtggactgcagcttcaaccacggcatctgcgactggaagcaggacagagaggacgacttcgactggaaccccgccgacagagacaacgccatcggcttctacatggccgtgcccgccctggccggccacaagaaggacatcggcagactgaagctgctgctgcccgacctgcagccccagagcaacttctgcctgctgttcgactacagactggccggcgacaaggtgggcaagctgagagtgttcgtgaagaacagcaacaacgccctggcctgggagaagaccaccagcgaggacgagaagtggaagaccggcaagatccagctgtaccagggcaccgacgccaccaagagcatcatcttcgaggccgagagaggcaagggcaagaccggcgagatcgccgtggacggcgtgctgctggtgagcggcctgtgccccgacagcctgctgagcgtggacgactag

SEQ ID NO: 65644 - DNA, 2385 bp, Artificial Sequence
  derived and/or modified sequence
ccgcagaggagcctcggccaggcttgccagggcgcccccagcccctccccaggccgcgagcgcccctgccgcggtgcctggcctcccctcccagactgcagggacagcacccggtaactgcgagtggagcggaggacccgagcggctgaggagagaggaggcggcggcttagctgctacggggtccggccggcgccctcccgaggggggctcaggaggaggaaggaggacccgtgcgagaatgcctctgccctggagccttgcgctcccgctgctgctctcctgggtggcaggtggtttcgggaacgcggccagtgcaaggcatcacgggttgttagcatcggcacgtcagcctggggtctgtcactatggaactaaactggcctgctgctacggctggagaagaaacagcaagggagtctgtgaagctacatgcgaacctggatgtaagtttggtgagtgcgtgggaccaaacaaatgcagatgctttccaggatacaccgggaaaacctgcagtcaagatgtgaatgagtgtggaatgaaaccccggccatgccaacacagatgtgtgaatacacacggaagctacaagtgcttttgcctcagtggccacatgctcatgccagatgctacgtgtgtgaactctaggacatgtgccatgataaactgtcagtacagctgtgaagacacagaagaagggccacagtgcctgtgtccatcctcaggactccgcctggccccaaatggaagagactgtctagatattgatgaatgtgcctctggtaaagtcatctgtccctacaatcgaagatgtgtgaacacatttggaagctactactgcaaatgtcacattggtttcgaactgcaatatatcagtggacgatatgactgtatagatataaatgaatgtactatggatagccatacgtgcagccaccatgccaattgcttcaatacccaagggtccttcaagtgtaaatgcaagcagggatataaaggcaatggacttcggtgttctgctatccctgaaaattctgtgaaggaagtcctcagagcacctggtaccatcaaagacagaatcaagaagttgcttgctcacaaaaacagcatgaaaaagaaggcaaaaattaaaaatgttaccccagaacccaccaggactcctacccctaaggtgaacttgcagcccttcaactatgaagagatagtttccagaggcgggaactctcatggaggtaaaaaagggaatgaagagaaaatgaaagaggggcttgaggatgagaaaagagaagagaaagccctgaagaatgacatagaggagcgaagcctgcgaggagatgtgtttttccctaaggtgaatgaagcaggtgaattcggcctgattctggtccaaaggaaagcgctaacttccaaactggaacataaagcagatttaaatatctcggttgactgcagcttcaatcatgggatctgtgactggaaacaggatagagaagatgattttgactggaatcctgctgatcgagataatgctattggcttctatatggcagttccggccttggcaggtcacaagaaagacattggccgattgaaacttctcctacctgacctgcaaccccaaagcaacttctgtttgctctttgattaccggctggccggagacaaagtcgggaaacttcgagtgtttgtgaaaaacagtaacaatgccctggcatgggagaagaccacgagtgaggatgaaaagtggaagacagggaaaattcagttgtatcaaggaactgatgctaccaaaagcatcatttttgaagcagaacgtggcaagggcaaaaccggcgaaatcgcagtggatggcgtcttgcttgtttcaggcttatgtccagatagccttttatctgtggatgactgaatgttactatctttatatttgactttgtatgtcagttccctggtttttttgatattgcatcataggacctctggcattttagaattactagctgaaaaattgtaatgtaccaacagaaatattattgtaagatgcctttcttgtataagatatgccaatatttgctttaaatatcatatcactgtatcttctcagtcatttctgaatctttccacattatattataaaatatggaaatgtcagtttatctcccctcctcagtatatctgatttgtataagtaagttgatgagcttctctctacaacatttctagaaaatagaaaaaaaagcacagagaaatgtttaactgtttgactcttatgatacttcttggaaactatgacatcaaagatagacttttgcctaagtggcttagctgggtctttcatagccaaacttgtatatttaaattctttgtaataataatatccaaatcatca

SEQ ID NO: 65645 - protein, 788 aa, Artificial Sequence
  derived and/or modified sequence
MHQLFRLVLGQKDLSRAGDLFSLDDSEIEDSLTEALEQIKIISSSSDYQTNNNDQAVVEICITRITTAIRETESIEKHAKALVGLWDSCLEHNLRPFGKDEDTPHAKIASDIMSCILQNYNRPPVMALAIPIAVKFLHRGNKELCRNMSNYLSLAAITKADLLADHTEVIVKSILQGNTMLLRVLPAVYEKQPQPINRHLTELLALMSQLEQPEQYHLLRLLHVAAKKKQLEVVQKCIPFLIGHLKDSTHNDIILNILIEIAVYEPVALNSFLPMLKEIGERFPYLTGQMARIYGAVGHVDEERARSCLTYLVSQLANMEHSFHHILLLEIKSITDTFSSILGPQSRDIFRMSNSFTAIAKLLTRQLENTKAGSGRRKISTEIEFPEKLEETKLIVTENEDHEKLQVKIQAFEDKINAGSNTPGSIRRYSLGQVSKEERKNIRFNRSKSLAFHTMLTKGVGSDDGEDENRGDIPASISLSEIDPLGQGNDKLPFKTDTERSQLGESSVSYPNIIHIDSENLSETVKENSQEETPETTASPIEYQDKLYLHLKKNLSKVKAYAMEIGKKIPVPDQCTIEDTVRSCVAKLFFTCSLKGHYCLYSKSSFILISQEPQPWIQIMFLFQQDLDQVQLHLEEVRFFDVFGFSETAGAWQCFMCNNPEKATVVNQDGQPLIEGKLKEKQVRWKFIKRWKTRYFTLAGNQLLFQKGKSKDDPDDCPIELSKVQSVKAVAKKRRDRSLPRAFEIFTDNKTYVFKAKDEKNAEEWLQCINVAVAQAKERESREVTTYL

SEQ ID NO: 65646 - DNA, 2367 bp, Artificial Sequence
  derived and/or modified sequence
atgcaccagctgttcagactggtgctgggccagaaggacctgagcagagccggcgacctgttcagcctggacgacagcgagatcgaggacagcctgaccgaggccctggagcagatcaagatcatcagcagcagcagcgactaccagaccaacaacaacgaccaggccgtggtggagatctgcatcaccagaatcaccaccgccatcagagagaccgagagcatcgagaagcacgccaaggccctggtgggcctgtgggacagctgcctggagcacaacctgagacccttcggcaaggacgaggacaccccccacgccaagatcgccagcgacatcatgagctgcatcctgcagaactacaacagaccccccgtgatggccctggccatccccatcgccgtgaagttcctgcacagaggcaacaaggagctgtgcagaaacatgagcaactacctgagcctggccgccatcaccaaggccgacctgctggccgaccacaccgaggtgatcgtgaagagcatcctgcagggcaacaccatgctgctgagagtgctgcccgccgtgtacgagaagcagccccagcccatcaacagacacctgaccgagctgctggccctgatgagccagctggagcagcccgagcagtaccacctgctgagactgctgcacgtggccgccaagaagaagcagctggaggtggtgcagaagtgcatccccttcctgatcggccacctgaaggacagcacccacaacgacatcatcctgaacatcctgatcgagatcgccgtgtacgagcccgtggccctgaacagcttcctgcccatgctgaaggagatcggcgagagattcccctacctgaccggccagatggccagaatctacggcgccgtgggccacgtggacgaggagagagccagaagctgcctgacctacctggtgagccagctggccaacatggagcacagcttccaccacatcctgctgctggagatcaagagcatcaccgacaccttcagcagcatcctgggcccccagagcagagacatcttcagaatgagcaacagcttcaccgccatcgccaagctgctgaccagacagctggagaacaccaaggccggcagcggcagaagaaagatcagcaccgagatcgagttccccgagaagctggaggagaccaagctgatcgtgaccgagaacgaggaccacgagaagctgcaggtgaagatccaggccttcgaggacaagatcaacgccggcagcaacacccccggcagcatcagaagatacagcctgggccaggtgagcaaggaggagagaaagaacatcagattcaacagaagcaagagcctggccttccacaccatgctgaccaagggcgtgggcagcgacgacggcgaggacgagaacagaggcgacatccccgccagcatcagcctgagcgagatcgaccccctgggccagggcaacgacaagctgcccttcaagaccgacaccgagagaagccagctgggcgagagcagcgtgagctaccccaacatcatccacatcgacagcgagaacctgagcgagaccgtgaaggagaacagccaggaggagacccccgagaccaccgccagccccatcgagtaccaggacaagctgtacctgcacctgaagaagaacctgagcaaggtgaaggcctacgccatggagatcggcaagaagatccccgtgcccgaccagtgcaccatcgaggacaccgtgagaagctgcgtggccaagctgttcttcacctgcagcctgaagggccactactgcctgtacagcaagagcagcttcatcctgatcagccaggagccccagccctggatccagatcatgttcctgttccagcaggacctggaccaggtgcagctgcacctggaggaggtgagattcttcgacgtgttcggcttcagcgagaccgccggcgcctggcagtgcttcatgtgcaacaaccccgagaaggccaccgtggtgaaccaggacggccagcccctgatcgagggcaagctgaaggagaagcaggtgagatggaagttcatcaagagatggaagaccagatacttcaccctggccggcaaccagctgctgttccagaagggcaagagcaaggacgaccccgacgactgccccatcgagctgagcaaggtgcagagcgtgaaggccgtggccaagaagagaagagacagaagcctgcccagagccttcgagatcttcaccgacaacaagacctacgtgttcaaggccaaggacgagaagaacgccgaggagtggctgcagtgcatcaacgtggccgtggcccaggccaaggagagagagagcagagaggtgaccacctacctgtag

SEQ ID NO: 65647 - DNA, 2367 bp, Artificial Sequence
  derived and/or modified sequence
atgcatcagctgttccggctggtgctggggcaaaaagatctcagtcgcgcaggagatctgttcagtctggatgatagcgagattgaggatagcctgacagaagccctggaacagattaagatcatcagctcttcttctgattatcagacaaacaacaacgaccaggctgtcgttgagatttgcatcacccgtattacaactgctatccgagagaccgaatctatagaaaagcatgccaaggctctagtcgggctgtgggatagttgcctggagcacaacctgcgacctttcggcaaggatgaagacactcctcacgctaaaattgccagcgacataatgtcttgcatccttcagaattataatcggcctcctgttatggcactagcaattccgatcgctgtgaaattcctacacaggggaaataaggaactctgtcggaatatgtcaaattacttatcgcttgcagcaatcactaaggctgacctcctagcagatcatacagaagtcatcgtgaagtctatcttgcagggaaacactatgcttctgcgcgtgttgcctgccgtgtacgagaaacagccgcagccaattaacagacacctgaccgaactcctggcgttgatgtcccagttggagcagcccgagcaatatcacctcctaagattgctccacgtggcagccaagaagaagcagctggaggtggtgcagaagtgcatcccatttctgattgggcatctcaaagacagtacacacaacgatattatattgaatatcttaatagagatcgcggtatacgagccagtcgccctcaattcgtttctgcccatgcttaaggaaataggagaacgatttccttaccttacggggcagatggcccgtatctacggagctgttggccacgtggacgaggagagggcgagatcctgtctgacatatcttgttagtcagcttgccaatatggaacacagctttcatcacatcctcttgctcgaaattaagtcaattactgacaccttttcgagtatcctagggcctcaatcccgcgatatctttagaatgagtaatagtttcactgcaatcgcaaaactcctcaccaggcaactggagaatactaaagccgggtctggcaggaggaaaatctccaccgaaatagaatttcccgagaaactcgaagagacgaagcttatagtcacagaaaacgaagaccacgagaaacttcaggtgaaaatacaggcctttgaggacaagattaatgccggctctaatacaccaggaagcatccgtaggtatagtcttgggcaagtctccaaagaggagcgtaaaaatatccggtttaacaggtccaaaagtcttgcctttcatactatgcttactaaaggcgtgggctcagacgacggagaagatgagaacaggggagatatcccggcatcaataagcctttctgaaatcgatccactcgggcagggcaacgacaagttgcccttcaaaactgacactgaaagatcccagctcggcgagtcatcagtgtcatatcctaacatcattcacatcgatagcgagaacctgtccgagactgttaaggagaactcccaggaagaaactcccgaaaccaccgccagtcccatcgagtatcaagacaagttgtatctgcacttaaaaaaaaatctctccaaggtaaaagcgtacgcaatggaaatcggcaagaagattcccgtgcctgaccagtgtacaatcgaagacacggttcgatcatgtgtggctaaacttttcttcacttgctccttaaaagggcattactgcctctacagtaagagttccttcatcctgataagtcaggagccccagccctggatccagatcatgttcctctttcagcaggacttggaccaggttcaattacatttggaagaagtgcggttctttgatgtgttcggcttctcggagaccgccggtgcctggcaatgcttcatgtgcaacaatccggagaaggccactgtggtgaaccaggacggacaaccattaattgagggaaagctcaaagagaagcaagtccggtggaagttcattaagaggtggaagacgagatactttactcttgcaggaaatcagttgcttttccaaaaaggtaaaagcaaggatgaccctgacgactgtcctattgaacttagcaaagttcaatcggtaaaggcggtggcgaagaagcgccgggatagatcacttccacgggcctttgagatctttacagacaacaagacttacgtgttcaaagccaaagacgaaaagaatgcagaggaatggctgcagtgtataaacgtcgccgtggcgcaggccaaagagagggaaagccgggaagtgactacctacttatag

SEQ ID NO: 65648 - DNA, 2367 bp, Artificial Sequence
  derived and/or modified sequence
atgcaccaactgttccggttagtcctaggtcagaaggaccttagtagagccggagacctgttctctctggacgactctgaaatcgaggactccctgacagaggccctggagcagattaagattattagttcctctagcgactaccagaccaataataatgaccaggccgtggtggaaatttgtatcacccgcattacaactgcaatcagggagacagaaagtattgagaagcacgctaaagccctcgttggtttgtgggattcctgcctcgagcataatctcagaccgtttggcaaagacgaggatacaccccatgcgaaaatcgcatccgatatcatgtcgtgcatcctgcagaactacaacagaccaccagtgatggcgctcgccatcccgattgcagtcaagtttttacaccgaggaaacaaagagctgtgtcgaaacatgtctaactacttgagcctcgcagcaatcactaaagcagatctattggccgatcatactgaggtaattgtgaagtcaattttgcagggaaacactatgctgctgagagtcctgcccgccgtttacgaaaaacagccccagcccatcaatcgccatctgacggagcttctggcactgatgtctcagctggaacagccagagcaataccatctcctgagactcctgcatgtagctgctaagaaaaagcagctggaagttgtgcagaagtgtatccccttcttaatcggccatctgaaagatagcacacacaatgacatcatcctgaacatcctgattgagatagctgtctacgagccagttgcactcaatagctttctccccatgcttaaagaaattggggagagattcccatacctcacaggccaaatggcccggatatacggagccgttggacacgtcgacgaggagagagccagatcctgcctgacatacttggtgtcacaactggccaatatggagcactcttttcaccatatactcctgctggagatcaagagcataactgatacattctcttccatccttggtccccagagtagggatatctttagaatgtccaacagcttcactgcgatcgcgaagttgctaactcgtcaacttgaaaatacaaaggcaggcagtgggaggcggaagatttctaccgaaattgaatttccagaaaaacttgaagagactaagctgattgtcaccgagaacgaggatcacgagaaacttcaggtaaagattcaagcctttgaagataaaattaatgccggtagcaacacacccggctcaatccgaaggtacagcttagggcaggtgagcaaagaggaacgcaagaacattagattcaaccgctccaaatccttagcatttcacaccatgcttacaaagggggtggggagcgacgatggggaggatgaaaacaggggagatatccccgcatcaatatccctgagcgaaattgatccactgggccagggtaacgacaaactgccctttaaaacagacacagagaggagtcagctgggggagtcttccgtgtcgtaccctaacattatccatattgactccgagaatctgtccgagacagtcaaagaaaattcacaggaggagaccccagaaacaacagcgtctccgatagagtaccaggataaactatacctccacctgaagaaaaacctctccaaggtgaaggcttatgccatggagatcgggaagaaaatacccgtcccagatcagtgtacgatcgaagacaccgtgcggagttgtgtggctaagctcttcttcacctgttccttgaagggtcattactgtctgtatagtaagagcagcttcatcttgatctctcaagagccacagccgtggatccagatcatgttcctgttccagcaggacctggatcaggtgcagctgcacttagaagaggtgcgttttttcgacgtctttggttttagcgaaacggccggtgcatggcagtgcttcatgtgcaacaatccagaaaaggccacggtggtcaaccaggatggccaacctctcatcgagggcaagttgaaagagaaacaggttcgatggaaattcattaaaagatggaaaactcgctatttcacactggccggaaaccagcttctatttcagaaagggaagtccaaagatgatcccgatgattgtccaatcgagctgagcaaagtccagtcagtcaaggccgtagctaaaaagcgacgcgaccgcagtctccccagggccttcgagatattcaccgacaacaagacctacgtttttaaagctaaggatgagaagaatgccgaggaatggctgcagtgcattaacgttgccgttgcccaggccaaagaacgggaatctcgtgaggtcaccacttatctgtag

SEQ ID NO: 65649 - DNA, 2367 bp, Artificial Sequence
  derived and/or modified sequence
atgcaccagctgttccggctggtgctgggccagaaggacctgagcagagctggggacctcttcagcctggatgacagcgagattgaggacagcctgacagaggccctggagcagatcaagatcatcagcagcagcagtgactaccagaccaacaacaatgaccaggccgtggtggagatctgcatcacccgcatcaccacagccatccgggagacagagagcattgagaagcacgccaaggccctggtgggcctgtgggacagctgcctggagcacaacctgcggccctttgggaaggatgaggacacccctcatgccaagatcgccagtgacatcatgagctgcatcctgcagaactacaacagacctcctgtgatggccctggccatccccatcgctgtgaagttcctgcaccggggcaacaaggagctgtgcaggaacatgagcaactacctgagcctggccgccatcaccaaggctgacctgctggccgaccacacagaggtgattgtgaagagcatcctgcagggcaacaccatgctgctgcgggtgctgcctgctgtgtatgagaagcagccccagcccatcaacagacacctgacagagctgctggccctgatgagccagctggagcagcctgagcagtaccacctgctgcggctgctgcacgtggccgccaagaagaagcagctggaggtggtgcagaagtgcatccccttcctgattggccacctgaaggacagcacccacaatgacatcatcctgaacatcctgattgaaattgctgtgtatgagcctgtggccctgaacagcttcctgcccatgctgaaggagattggagagcgcttcccctacctgaccggccagatggcccgcatctacggggctgtgggccacgtggatgaggagcgggcccggagctgcctgacctacctggtgtcccagctggccaacatggagcacagcttccaccacatcctgctgctggagatcaagagcatcacagacaccttcagcagcatcctgggcccccagagccgggacatcttcaggatgagcaacagcttcaccgccatcgccaagctgctgacccggcagctggagaacaccaaggccggcagcggccgcaggaagatcagcacagaaattgagttccctgagaagctggaggagaccaagctgattgtgacagaaaatgaagaccacgagaagctgcaggtgaagatccaggcctttgaggacaagatcaatgccggcagcaacaccccaggcagcatccgccgctacagcctgggccaggtgtccaaggaggagaggaagaacatccgcttcaacagaagcaagagcctggccttccacaccatgctgaccaagggcgtgggcagtgatgatggagaagatgagaacagaggagacatcccagccagcatcagcctgtctgaaattgaccccctgggccagggcaatgacaagctgcccttcaagacagacacagagaggagccagctgggggagagctctgtgtcctaccccaacatcatccacatcgacagcgagaacctgtctgagaccgtgaaggagaacagccaggaggagaccccagagaccacagccagccccatcgagtaccaggacaagctgtacctgcacctgaagaagaacctgagcaaggtgaaggcctatgccatggagatcggcaagaagatccctgtgcctgaccagtgcaccatcgaggacacagtgcgcagctgtgtggccaagctgttcttcacctgcagcctgaagggccactactgcctgtacagcaagagcagcttcatcctgatcagccaggagccccagccctggatccagatcatgttcctgttccagcaggacctggaccaggtgcagctgcacctggaggaggtgcgcttctttgatgtgtttggcttcagcgagacagctggggcctggcagtgcttcatgtgcaacaaccctgagaaggccaccgtggtgaaccaggacggccagcccctcatcgagggcaagctgaaggagaagcaggtgcgctggaagttcatcaagcgctggaagacccgctacttcaccctggccggcaaccagctgctcttccagaagggcaagagcaaggatgatcctgatgactgccccatcgagctgagcaaggtgcagagcgtgaaggctgtggccaagaagaggcgggacaggagcctgccccgggcctttgagatcttcacagacaacaagacctacgtgttcaaggccaaggatgagaagaatgctgaggagtggctgcagtgcatcaacgtggccgtggcccaggccaaggagcgggagagccgggaggtgaccacctacctgtag

SEQ ID NO: 65650 - DNA, 2367 bp, Artificial Sequence
  derived and/or modified sequence
atgcaccagctgttccggctggtgctgggccagaaggacctgagccgcgccggggacctgttttcgttggacgatagcgaaatcgaggattctttaacagaagccctcgaacaaattaaaatcatctcctcgtcatctgactaccagacaaacaataatgatcaggccgttgtggagatttgcataacaaggatcactaccgcgattagggaaaccgagagcattgagaaacatgccaaggccttagtcgggttatgggactcatgccttgaacataacctcagaccatttggcaaagatgaagacaccccacatgctaagattgccagcgacatcatgtcgtgcattctccagaattacaaccgcccacctgtgatggcgcttgccattcctattgcagtcaagttcctccacagaggtaacaaggaactatgccgaaacatgtccaactatctcagcctggccgccatcacgaaagccgatctgctcgccgatcacacagaagtgatcgtgaagtctattttacagggcaataccatgctgctgcgcgtactaccagctgtttacgaaaagcaacctcagcccatcaaccggcacctgacagagctactggctctgatgtcacagctggagcagcccgagcagtaccacttgttgcgcttgctgcatgtcgcagcgaagaaaaagcagctggaggttgttcagaagtgcattccttttctgataggccacctaaaggatagcactcataatgatattattctcaatatactgattgagatcgcggtatacgagcccgtcgctttaaactcattcctgccgatgttgaaagagatcggcgagaggtttccatacctgaccggtcaaatggcacgaatctatggtgctgtgggtcatgtagacgaagagcgggctcgctcttgtctgacctacctggtgtctcaactcgccaacatggaacattcttttcaccacatactattgttagaaatcaaaagtataactgatacttttagcagcatcctaggcccgcaatcccgagacatattcagaatgtctaacagctttaccgccattgcaaaactgttgacccgacagctggagaacaccaaggccggatccgggcggcggaagataagcactgagattgaattccccgagaagctggaggaaactaagttgatcgtgaccgagaatgaggaccacgagaaattgcaggtgaaaatacaggcttttgaagacaagattaatgcgggatccaatactcctgggtcaattcgcaggtattcacttgggcaagtgtcaaaggaagaaaggaagaacattcgcttcaacagatctaagtctctggccttccacaccatgcttaccaaaggcgtcggcagcgatgatggagaggacgagaatcggggggatattcctgctagtatctcgttaagtgaaatcgaccctctcggacaaggaaatgataaactgcccttcaaaaccgataccgaacgttctcagttaggcgagagtagcgtgtcctatccaaatataattcatattgattccgaaaacctttctgagaccgtgaaggaaaactcccaggaggagacccccgagacaactgcctctcctatcgaataccaggacaagctttatctccaccttaaaaagaatctgagcaaggttaaggcatacgctatggagataggcaagaagatacctgtgcctgatcagtgtactatagaagataccgtgcgaagctgcgtggcaaagctgttttttacatgctctctgaaaggccactattgcctctactccaaatctagtttcattctgatatcccaggaacctcagccttggatacagattatgtttcttttccagcaggacttagatcaggtccagctccatctcgaagaggttcgatttttcgacgtgtttggtttctctgagacagctggggcgtggcaatgcttcatgtgtaacaatcccgaaaaagccactgtggtgaatcaggacgggcagcccttgatcgaagggaagctgaaggaaaagcaggtgagatggaaatttattaagcggtggaagacccggtacttcacactcgctggcaaccagttgttgttccaaaagggcaaaagtaaggacgaccctgacgactgccctattgaactgagcaaggttcaatctgtgaaagccgttgccaagaagcggcgcgaccgcagtctgccccgggcattcgaaattttcacagacaacaaaacctacgtatttaaagccaaggatgagaagaatgccgaggaatggttacagtgtataaacgtggcggtcgcgcaggcgaaagagcgggagagtcgggaggtcacaacttatctgtag

SEQ ID NO: 65651 - DNA, 2367 bp, Artificial Sequence
  derived and/or modified sequence
atgcaccagctgttccggctggtgctgggccagaaggacctgagccgggccggggatctgttttcactggatgatagtgaaatagaggattcactgaccgaggctctggaacagattaagattatctctagctcaagcgactaccagactaataacaacgatcaggcagtggtcgagatttgcatcaccaggattacaacagctatccgggaaacagagtcaatcgaaaaacatgcaaaggcgctcgtcggactctgggattcctgtcttgaacacaatctcaggccgttcggaaaggatgaagacaccccacatgctaaaatagctagtgacatcatgtcatgtattttgcagaattataatcggcctcctgtcatggctctcgcaattccgatcgcagtgaagttcctgcatcgcgggaataaggaactgtgccgaaatatgagcaactacttgagcttagccgccattacaaaggccgacttgctggcagatcataccgaggttattgtcaagagtatcctgcagggtaataccatgctcctgcgcgtgcttccagccgtgtatgagaaacaacctcagccaattaaccgccacctcacagagctgctcgccttgatgtcacagctcgagcagcctgagcagtatcatctgcttcgcctcctccatgtcgcagctaaaaagaagcagcttgaagtggttcagaaatgtatccctttcctgataggccacctgaaagactcaacacataacgatatcattctaaacattctcatcgagatcgctgtttacgagcccgtggcattgaattctttcctgcctatgctgaaggaaatcggtgagcgctttccatacttgactggccaaatggctagaatttacggtgctgtcggacatgtcgacgaggagagggcccggtcatgtttaacgtacctagtgtcgcagttagccaatatggagcattcattccaccatattctgctcctggagattaagtcaattacagataccttttccagtattctcggcccgcaaagtcgggatattttccggatgagcaattcattcaccgccatcgcgaaacttcttacacggcagctcgaaaacaccaaggcaggctccggtagaagaaagatctccacagagattgagttcccggagaagttggaggaaacgaagctcattgttactgagaacgaggaccacgagaaactccaagtgaaaatccaggcctttgaggacaaaattaatgcgggtagtaatacaccaggctcgatacgcaggtacagccttggccaggtaagcaaagaagagaggaaaaatatacgctttaatcggtctaagtccctggctttccacaccatgctgactaagggcgtgggcagtgacgacggcgaagatgagaatcgcggggatatacctgccagcatctccctgagtgagatagatccgctgggccaggggaacgacaagctcccattcaagacagacaccgaacgctcacaactgggcgagagctcggtgtcctaccctaatataatccacattgatagcgagaacttatcggagaccgttaaggaaaactctcaggaggaaacccctgagaccaccgcttcacccatcgagtaccaagataaattgtatctccaccttaaaaaaaacctgtcaaaggtcaaggcatacgctatggaaatcggcaagaaaatcccagttcctgaccagtgcacgatcgaggatactgtcagaagctgtgttgctaagttattcttcacttgcagtctgaaagggcactactgtctgtattcaaagagcagcttcatacttatttcccaggagccccaaccttggatccagatcatgtttctgttccagcaggatctggaccaggtgcaattgcatctcgaagaggtgagattcttcgacgtgtttggcttttctgagaccgctggggcttggcaatgcttcatgtgtaacaatccagagaaggcaactgtagtcaatcaggatggacagccactgattgagggtaaactgaaggaaaaacaggtccgctggaagtttatcaaacgttggaaaacacgctatttcacactggcaggcaatcagctgctgtttcaaaaaggtaaatctaaggacgaccctgacgattgcccaattgagttatcaaaggtgcaatctgtcaaagctgtggctaagaagcgtagggacaggagcctgcctagagcttttgagatttttactgataacaagacttatgttttcaaggctaaggatgagaagaacgcagaagaatggttacagtgcataaacgtggccgtcgctcaagccaaagaaagggagagccgcgaagtgaccacgtatttgtag

SEQ ID NO: 65652 - DNA, 2367 bp, Artificial Sequence
  derived and/or modified sequence
atgcaccaactcttccgcctggtgctgggccagaaggatctgtcacgggcaggagacctctttagtctcgacgattctgagattgaagattctctgactgaagcactcgagcagataaagatcatcagttcctcctcagattaccagaccaacaataacgaccaggccgtcgtggagatctgcatcacccggattaccacagctatcagggaaacagagtcaatcgagaagcacgctaaagccttggttggcctgtgggacagttgcctggaacacaacctgaggccgtttggtaaggacgaggatacacctcacgctaagattgcaagcgacatcatgtcttgtattctgcagaactataaccgaccgccagtcatggcattggccattccaatcgcagtcaagttcttgcatagaggcaacaaagaactgtgcaggaacatgagtaactatctgtcactcgccgcaatcactaaggccgacctgctcgcagatcacacggaagtcatagtgaaaagcatccttcagggaaatacgatgctactccgggtgctgcccgctgtctatgagaagcagccacaacccatcaacagacaccttaccgaactcttagccttaatgtcccagctggagcagccagaacaataccacttgcttcgcctgcttcacgttgccgctaaaaaaaagcaactggaagttgtccagaaatgtattccatttttgatcggacacctaaaggacagcactcacaacgacattatcttgaatatcctgatagaaattgcggtatacgagcccgtggccctcaattccttcttgccaatgctgaaagaaataggcgagcggttcccatatctgacaggtcaaatggccaggatttacggcgcagtaggtcacgttgacgaggagcgagccaggtcatgcttgacttacctggtcagccagttggctaatatggagcattcctttcatcacatcctgcttctagaaattaaatccatcacagataccttctcttccattctagggcctcagtccagggacatttttagaatgtctaattcgtttaccgctattgctaagctcctgaccagacagctggagaatacgaaggctggcagcggccgtcgcaaaatcagcacggagatcgagttccccgaaaagctggaggaaaccaagctcatagtgactgagaacgaagatcatgagaaattgcaggtcaaaatacaggcattcgaagacaaaataaatgcaggatccaatacgcctggatctattcgccgatatagtctcggccaggtcagcaaagaggagcggaaaaacataaggtttaaccgcagcaagtctctagcttttcatacaatgttaaccaaaggggtggggagcgacgatggagaagatgagaacagaggggatatccccgctagtatcagcctgtccgagattgaccctctcgggcaggggaacgataaactcccctttaaaactgataccgagcggtcacagttgggcgagtccagtgtgtcatatcccaacatcattcatattgactccgaaaacctgtcagaaaccgtgaaggagaatagccaggaggagacaccagaaacgacggcatcccctatcgaataccaagacaaactgtacttacacttgaagaagaacctgtccaaagtaaaggcctacgccatggagattgggaaaaaaattcccgttccagaccaatgtacaatcgaagacactgtgcgcagttgcgttgcaaagctcttcttcacttgcagtctgaagggtcattactgtttgtatagcaagtcttccttcatcctgatctctcaggagcctcaaccatggatccagattatgtttctttttcagcaagacttagatcaggtacagctgcacctggaggaggtgcgtttctttgatgtatttggttttagtgaaaccgcaggcgcatggcagtgtttcatgtgcaacaatcccgaaaaggcaacagtggtcaaccaggacggccagccactcattgagggaaagctgaaagaaaagcaggtccggtggaagtttattaagcgctggaaaactagatactttactctggctgggaaccaactgctgtttcagaagggaaaaagcaaggatgacccagacgactgtcccattgagctaagcaaggtgcaatctgtaaaggccgttgcaaaaaaacggagggatagatcactgcccagggccttcgagatcttcactgataacaagacatacgtgtttaaggcaaaggacgagaagaacgcagaagaatggttgcagtgcattaatgtggcggtggctcaggctaaagagagggagagtagagaggtcactacctacctctag

SEQ ID NO: 65653 - DNA, 2367 bp, Artificial Sequence
  derived and/or modified sequence
atgcaccagctgtttcgtctggtcctcgggcagaaggatctcagtcgagctggcgatctcttctcgttggacgactccgagatagaggactctttgacggaggcgttagagcaaataaaaattatctcatcatcgagcgattatcagactaacaataacgatcaggctgtagtggagatttgtatcacccggatcacaacagccatcagggaaacagaaagtattgagaagcacgccaaggccctagtcggtctttgggacagttgtctggaacacaacctacggccattcgggaaggacgaggacacacctcatgccaaaatcgcatctgacatcatgtcatgtatcctacaaaactataatcgacctccagtgatggcacttgcaatcccgatcgcagtgaaattcttgcaccgcggaaataaggagctttgccggaatatgagcaactacctatctttagccgctattaccaaagctgatttactggcagaccacacggaggtgatagtcaaatccattttgcagggaaacacaatgcttctcagagttttaccagccgtatatgagaagcagcctcagcccatcaatcggcacctaaccgagctcctggccttgatgtcccagttggagcagccagagcagtaccatctcctgcggcttttgcatgttgcagccaagaagaagcaactggaagtggttcagaaatgcatcccattcctcattggacaccttaaggactctacccataacgatatcattctgaacattctgatcgagatagccgtgtacgagccagtggcgcttaattcattcttaccaatgttgaaagagattggagaacgtttcccctacttaacaggccagatggcccgaatctacggggcagtgggccatgtggacgaggagagagccaggtcctgcctgacttacctggtgtcacagctagctaacatggagcacagcttccaccatattctcctcctggagatcaagtccatcacagataccttttcctcaatattgggccctcagagcagggatatctttagaatgtcgaactcctttacagctattgctaagttgctgactcggcaactggagaacactaaggccggaagcgggcgacgcaaaatttctacagaaattgagttccctgagaaattggaggagactaaactcatagtgactgagaatgaagatcacgagaaactgcaggtcaagatccaggccttcgaggataagataaacgcaggatctaacacacccggatctattagacgttactcactagggcaagtgagcaaagaggagagaaaaaatatcagatttaaccgctccaagtcattggcctttcataccatgctgaccaaaggagttggcagcgacgatggagaggacgagaaccgcggtgatatccctgcttccatatctcttagcgaaatcgaccccctgggtcaaggaaacgacaaactccctttcaaaactgatacagagcgatcacagttgggcgagagttcagtatcctacccaaatatcattcacatcgattctgaaaatctaagcgagaccgtgaaggaaaacagccaggaggagacacctgaaaccactgcctccccaattgagtatcaggacaagctgtatctccatctgaaaaaaaatctgagcaaggttaaagcttacgccatggagattggcaaaaagattccagtgccagaccagtgtacaatagaagacaccgtgcgcagttgtgtggcgaaactctttttcacttgttcactgaagggccattactgcttgtattctaaaagtagctttattctgatttcccaggagcctcagccttggatccagattatgttcctgtttcagcaggacctcgaccaggtccagttgcacttggaggaggtgcgattcttcgatgtttttggcttcagtgagacagctggcgcatggcagtgttttatgtgtaataacccggaaaaggccactgttgtgaaccaggacggtcaacccctgatcgagggcaaactgaaagaaaagcaagtccgatggaagtttatcaaacggtggaaaactcgatattttacactggctgggaaccaattacttttccaaaagggaaagtctaaggatgatcccgacgactgccccatcgaattgtcaaaggttcagtcggtcaaagcggtagcaaaaaagagacgggaccgatctctgccacgcgcatttgagatctttacagataacaaaacatacgtttttaaggctaaagatgagaagaacgccgaggaatggctgcagtgtatcaacgtcgccgtggcccaggctaaggagagggagtcacgtgaagttacaacttatctttag

SEQ ID NO: 65654 - DNA, 3979 bp, Artificial Sequence
  derived and/or modified sequence
gtgctctaaagatcaaggattttgccttctattttctatgaccagagattcctgtgcaaagagagagtgtcaatgaagacctcaaagtctggagaaaaatgacctttcatggaataagaagtatacctccttctacatgtttttgtcttactgacctctgataactggaacacatgactctgggtctgtagaaagtcaactgatcaaactcatcctcaccatgcatcaactgttcagactggttttgggacaaaaagatctttcacgagctggggacctcttctccttagatgactctgagattgaagacagccttacagaagctttggagcaaattaagataattagctcatcttcagattaccaaaccaataacaatgaccaggcagtagttgaaatctgtatcacaagaatcacaacagccatcagagagaccgagtccattgaaaagcatgcaaaggcccttgtggggctctgggactcctgcttggaacataacctgagaccctttgggaaagacgaagacactcctcatgcaaaaatcgcatctgatatcatgagttgcattttacagaattacaaccgacccccagtgatggcattagccatccccattgcagtgaaattcctccacagaggcaacaaggaactgtgcaggaatatgtctaactacctgtctctggctgcaattaccaaggcagatctcctggctgatcacacggaagttatagtaaagagcatactccaaggtaacaccatgttgttgagagtgttacctgctgtgtatgaaaagcagcctcagccaattaatagacacctgacagaactcctggccttgatgtctcagctggaacagccagaacagtaccatctactacggcttttgcatgtagcagcaaagaaaaaacaactcgaggtagttcagaagtgtattcctttcctaattgggcatttgaaggattcaacccataatgacatcatcctaaacatcctcatagagatagcagtctatgagccagtggctttgaacagttttcttccaatgctgaaagagattggtgagagattcccctacctcactggacagatggcaaggatttatggagctgttgggcatgtggatgaagagagagccaggagctgcctgacatacctggtgagccaactggccaacatggagcattcgtttcaccatattctcctgctggagattaaaagcatcaccgacaccttctcctcaatcttgggccctcagagcagagacatcttccgcatgagcaacagcttcaccgccattgctaaactccttacccgacaactggaaaataccaaggctggaagtggcaggagaaaaatcagcactgaaattgaattccctgagaaactggaagaaaccaagctcatagtaactgaaaatgaagaccatgaaaaactccaagttaaaatccaggcttttgaagacaagataaatgcagggagcaatacccctggctctatcagaagatatagtctgggccaagtttctaaagaagaaagaaaaaacattagatttaacaggtcaaaaagtttggctttccacactatgctcacaaagggtgtgggttcagatgacggcgaagatgaaaacaggggagacataccagccagcatctctctttcagaaatagacccacttggccaaggaaatgacaagctgccgtttaagacagacactgagagatcacagctgggggagtcttcagtttcatacccaaatattatacatatagactcagagaatttgtcagaaactgttaaagaaaactcccaggaagaaactccagagacaactgcaagtcctatagaataccaagataagctctacttgcacttaaaaaaaaacctcagcaaagtgaaagcatatgccatggaaattggaaagaagattccagtccctgatcagtgtaccattgaagacactgtgagaagttgtgtagcaaagttgttcttcacctgctccctgaagggtcattactgcctatacagtaagtccagttttattctcatcagccaagaacctcagccatggatccagatcatgtttctatttcagcaggatctggaccaggtacagctccatctggaagaagtgaggttctttgacgtgtttggcttcagtgaaacagcaggagcatggcaatgcttcatgtgcaacaatcctgagaaagcaactgttgtaaatcaagatggccagcctctcatagaaggaaaacttaaagagaagcaagtcagatggaagttcatcaaaaggtggaaaacacgctattttacactggctggaaatcaacttctgtttcaaaaaggaaagtctaaagatgaccctgacgactgcccaatagaactcagcaaagtacagagtgtgaaggctgtggccaagaaacgcagggaccgctctctcccccgggctttcgaaatcttcacagacaataaaacctatgtctttaaggccaaggatgagaagaatgcagaagaatggctccagtgcatcaacgtggcagttgcccaagccaaagaaagggaaagtagagaagtaaccacatatctgtagggatttataagtcagccatgacaattatacaccacaggcattgtattatcattgccaatgtcaagaaaaagagctaaatttaccaagccatgttgttttttactaaataccaatggaattgttgtcctttaagaagaagggcctaaaatggcaggattcttagtaaatgtcatactctaacagctttagtattgacttcagaatatatctgatgcccacaaaaataaaataaaataaaaggagctacagagtatgccctcagatagtgtggggccaggaagggaaaagtcactgataaaagaacttctgtagatatgtcatttaaaactgtgagaaaacaacatgaaaagatgcctgaactctccatcctgaggaaagattagcacttctgatgaaaatcacagtctgtcaaaggtattaaaagaaaactttaaaaaaaaaaacctttagaaacgttgaactaatgtacactgagaaaaaccatataacttacttatagacatataattacatgatcctctcttactacaactgaggctaacacatggtaaaatggttcccaaatcaagccagttatgtcattaaatacttgtctttcagaattacttatttaattattccatttaagttcatataatataatctacagtttagatacttggacatatatcctgcccaaggcactaagtgtaatataggaaaaggatagaaagccattttctctatcttcaaaataatgtgccatctccgttaaaattaagactttaaagttctataattttttctttgtattcaactttttaatacctccaaattacaaacatctatttttttcactacatagatatataattacactatgatagacagaattctagagtgattctcaataatccatgccttggtataatcctctcccccattgagtgtgggtgggacatgtaacctgcttctaaccaacagaatatggcaaaagtgatgggatcatctctcccatattatgttatgttatataacaaaagtgaagagaagttgcagatatacataaggtttctaatcagctgactttgagttaatcaaagagatcccctgggtgggcctgacctaatcagactagtcctttaaaagagagtgaaccagtcagagactctctctcctattagccttaaataagcaagctgccatgagctctacggctgcaaggaaataagttttgtgaacaaccatgtgatcttggaagaagcatctgaacctcagataaaagcccagccccagccaacgccttgcttgcagctttgtgaaactctgagcagaggacccagctaaatcacgtttggactcctgacccacagaaactttcagataataaatgtatgctgttttaaatctaaa

SEQ ID NO: 65655 - DNA, 4178 bp, Artificial Sequence
  derived and/or modified sequence
gaaacagagcgttgcactgggaggtaactccgctgggtgaggtgcagcctgtcacctgaccggtctctggggctgccggtggcatcaggctgcattccttgaattcttccacccggcaccggctccgcaatgaacaacttcaggttcactgagctgagcggattccactcgctgtgccctcggagcctgcctgaatctcccgcccagtctcaaaccatgcagctgagtaactgcaagggcgcctttgaggagtagcacgcagagagtgtcaatgaagacctcaaagtctggagaaaaatgacctttcatggaataagaagtatacctccttctacatgtttttgtcttactgacctctgataactggaacacatgactctgggtctgtagaaagtcaactgatcaaactcatcctcaccatgcatcaactgttcagactggttttgggacaaaaagatctttcacgagctggggacctcttctccttagatgactctgagattgaagacagccttacagaagctttggagcaaattaagataattagctcatcttcagattaccaaaccaataacaatgaccaggcagtagttgaaatctgtatcacaagaatcacaacagccatcagagagaccgagtccattgaaaagcatgcaaaggcccttgtggggctctgggactcctgcttggaacataacctgagaccctttgggaaagacgaagacactcctcatgcaaaaatcgcatctgatatcatgagttgcattttacagaattacaaccgacccccagtgatggcattagccatccccattgcagtgaaattcctccacagaggcaacaaggaactgtgcaggaatatgtctaactacctgtctctggctgcaattaccaaggcagatctcctggctgatcacacggaagttatagtaaagagcatactccaaggtaacaccatgttgttgagagtgttacctgctgtgtatgaaaagcagcctcagccaattaatagacacctgacagaactcctggccttgatgtctcagctggaacagccagaacagtaccatctactacggcttttgcatgtagcagcaaagaaaaaacaactcgaggtagttcagaagtgtattcctttcctaattgggcatttgaaggattcaacccataatgacatcatcctaaacatcctcatagagatagcagtctatgagccagtggctttgaacagttttcttccaatgctgaaagagattggtgagagattcccctacctcactggacagatggcaaggatttatggagctgttgggcatgtggatgaagagagagccaggagctgcctgacatacctggtgagccaactggccaacatggagcattcgtttcaccatattctcctgctggagattaaaagcatcaccgacaccttctcctcaatcttgggccctcagagcagagacatcttccgcatgagcaacagcttcaccgccattgctaaactccttacccgacaactggaaaataccaaggctggaagtggcaggagaaaaatcagcactgaaattgaattccctgagaaactggaagaaaccaagctcatagtaactgaaaatgaagaccatgaaaaactccaagttaaaatccaggcttttgaagacaagataaatgcagggagcaatacccctggctctatcagaagatatagtctgggccaagtttctaaagaagaaagaaaaaacattagatttaacaggtcaaaaagtttggctttccacactatgctcacaaagggtgtgggttcagatgacggcgaagatgaaaacaggggagacataccagccagcatctctctttcagaaatagacccacttggccaaggaaatgacaagctgccgtttaagacagacactgagagatcacagctgggggagtcttcagtttcatacccaaatattatacatatagactcagagaatttgtcagaaactgttaaagaaaactcccaggaagaaactccagagacaactgcaagtcctatagaataccaagataagctctacttgcacttaaaaaaaaacctcagcaaagtgaaagcatatgccatggaaattggaaagaagattccagtccctgatcagtgtaccattgaagacactgtgagaagttgtgtagcaaagttgttcttcacctgctccctgaagggtcattactgcctatacagtaagtccagttttattctcatcagccaagaacctcagccatggatccagatcatgtttctatttcagcaggatctggaccaggtacagctccatctggaagaagtgaggttctttgacgtgtttggcttcagtgaaacagcaggagcatggcaatgcttcatgtgcaacaatcctgagaaagcaactgttgtaaatcaagatggccagcctctcatagaaggaaaacttaaagagaagcaagtcagatggaagttcatcaaaaggtggaaaacacgctattttacactggctggaaatcaacttctgtttcaaaaaggaaagtctaaagatgaccctgacgactgcccaatagaactcagcaaagtacagagtgtgaaggctgtggccaagaaacgcagggaccgctctctcccccgggctttcgaaatcttcacagacaataaaacctatgtctttaaggccaaggatgagaagaatgcagaagaatggctccagtgcatcaacgtggcagttgcccaagccaaagaaagggaaagtagagaagtaaccacatatctgtagggatttataagtcagccatgacaattatacaccacaggcattgtattatcattgccaatgtcaagaaaaagagctaaatttaccaagccatgttgttttttactaaataccaatggaattgttgtcctttaagaagaagggcctaaaatggcaggattcttagtaaatgtcatactctaacagctttagtattgacttcagaatatatctgatgcccacaaaaataaaataaaataaaaggagctacagagtatgccctcagatagtgtggggccaggaagggaaaagtcactgataaaagaacttctgtagatatgtcatttaaaactgtgagaaaacaacatgaaaagatgcctgaactctccatcctgaggaaagattagcacttctgatgaaaatcacagtctgtcaaaggtattaaaagaaaactttaaaaaaaaaaacctttagaaacgttgaactaatgtacactgagaaaaaccatataacttacttatagacatataattacatgatcctctcttactacaactgaggctaacacatggtaaaatggttcccaaatcaagccagttatgtcattaaatacttgtctttcagaattacttatttaattattccatttaagttcatataatataatctacagtttagatacttggacatatatcctgcccaaggcactaagtgtaatataggaaaaggatagaaagccattttctctatcttcaaaataatgtgccatctccgttaaaattaagactttaaagttctataattttttctttgtattcaactttttaatacctccaaattacaaacatctatttttttcactacatagatatataattacactatgatagacagaattctagagtgattctcaataatccatgccttggtataatcctctcccccattgagtgtgggtgggacatgtaacctgcttctaaccaacagaatatggcaaaagtgatgggatcatctctcccatattatgttatgttatataacaaaagtgaagagaagttgcagatatacataaggtttctaatcagctgactttgagttaatcaaagagatcccctgggtgggcctgacctaatcagactagtcctttaaaagagagtgaaccagtcagagactctctctcctattagccttaaataagcaagctgccatgagctctacggctgcaaggaaataagttttgtgaacaaccatgtgatcttggaagaagcatctgaacctcagataaaagcccagccccagccaacgccttgcttgcagctttgtgaaactctgagcagaggacccagctaaatcacgtttggactcctgacccacagaaactttcagataataaatgtatgctgttttaaatctaaa

SEQ ID NO: 65656 - protein, 213 aa, Artificial Sequence
  derived and/or modified sequence
MHQLFRLVLGQKDLSRAGDLFSLDDSEIEDSLTEALEQIKIISSSSDYQTNNNDQAVVEICITRITTAIRETESIEKHAKALVGLWDSCLEHNLRPFGKDEDTPHAKIASDIMSCILQNYNRPPVMALAIPIAVKFLHRGNKELCRNMSNYLSLAAITKADLLADHTEVIVKSILQGMVRKLSLGTCFGRYLKVFSSSIYGLWEARPRVLEAN

SEQ ID NO: 65657 - DNA, 642 bp, Artificial Sequence
  derived and/or modified sequence
atgcaccagctgttcagactggtgctgggccagaaggacctgagcagagccggcgacctgttcagcctggacgacagcgagatcgaggacagcctgaccgaggccctggagcagatcaagatcatcagcagcagcagcgactaccagaccaacaacaacgaccaggccgtggtggagatctgcatcaccagaatcaccaccgccatcagagagaccgagagcatcgagaagcacgccaaggccctggtgggcctgtgggacagctgcctggagcacaacctgagacccttcggcaaggacgaggacaccccccacgccaagatcgccagcgacatcatgagctgcatcctgcagaactacaacagaccccccgtgatggccctggccatccccatcgccgtgaagttcctgcacagaggcaacaaggagctgtgcagaaacatgagcaactacctgagcctggccgccatcaccaaggccgacctgctggccgaccacaccgaggtgatcgtgaagagcatcctgcagggcatggtgagaaagctgagcctgggcacctgcttcggcagatacctgaaggtgttcagcagcagcatctacggcctgtgggaggccagacccagagtgctggaggccaactag

SEQ ID NO: 65658 - DNA, 642 bp, Artificial Sequence
  derived and/or modified sequence
atgcaccagctgtttcgcttagtgttgggacaaaaagatcttagccgggccggagacctgttttctcttgatgactccgagattgaggattccctgaccgaggctctggagcaaataaaaattatttcatctagcagtgactatcagactaacaacaatgatcaggcagttgtggagatctgtatcactaggatcactacagccatcagggaaacagagtctatcgagaagcatgccaaggccttggtggggctgtgggatagctgcctcgaacacaacttaaggccattcggaaaagatgaggataccccccacgctaaaattgcctccgacatcatgtcgtgtattttacagaactataacaggccgcccgtaatggctctggcaatcccaatagccgtcaaatttctgcataggggtaacaaggagctttgtaggaacatgtccaactacctctccttggctgcgataaccaaggccgacctcctggctgaccataccgaagttattgtcaagtccattctgcaaggtatggtcaggaagcttagtctcgggacgtgctttgggaggtatctcaaagtgttcagctcaagcatttacggcctgtgggaggcaagaccaagagtcttggaagccaactag

SEQ ID NO: 65659 - DNA, 642 bp, Artificial Sequence
  derived and/or modified sequence
atgcatcaactctttcggcttgtcctgggacagaaagatctgtctagggccggcgacctgttttccctcgatgactctgaaatagaggattctttaacggaagccctggagcaaatcaaaattatcagcagtagctcagactaccagactaacaacaacgatcaagcagtagttgaaatttgcatcaccaggattacaactgctattagggaaacagagtccatcgagaagcacgccaaggcccttgtaggactctgggattcatgcttggaacataatctccggccctttggaaaagacgaagatacgccacatgccaaaatcgccagcgacattatgtcatgcatcctgcaaaactacaaccgtcccccggtgatggccctcgctattcccattgccgtcaaattcctgcataggggcaataaggaactgtgtaggaatatgtctaactacctgtctctagcggctattactaaagcagacctgttggctgatcacaccgaggtgatcgtgaagtccatcctgcagggcatggtccgcaagctctctctgggcacatgttttggccgctatctgaaagttttctcaagtagtatctacggcttatgggaggcgcgtcccagggtgcttgaagccaactag

SEQ ID NO: 65660 - DNA, 642 bp, Artificial Sequence
  derived and/or modified sequence
atgcaccagctgttccggctggtgctgggccagaaggacctgagcagagctggggacctcttcagcctggatgacagcgagattgaggacagcctgacagaggccctggagcagatcaagatcatcagcagcagcagtgactaccagaccaacaacaatgaccaggccgtggtggagatctgcatcacccgcatcaccacagccatccgggagacagagagcattgagaagcacgccaaggccctggtgggcctgtgggacagctgcctggagcacaacctgcggccctttgggaaggatgaggacacccctcatgccaagatcgccagtgacatcatgagctgcatcctgcagaactacaacagacctcctgtgatggccctggccatccccatcgctgtgaagttcctgcaccggggcaacaaggagctgtgcaggaacatgagcaactacctgagcctggccgccatcaccaaggctgacctgctggccgaccacacagaggtgattgtgaagagcatcctgcagggcatggtgaggaagctgagcctgggcacctgcttcggccgctacctgaaggtgttcagcagcagcatctacggcctgtgggaggcccggccccgggtgctggaggccaactag

SEQ ID NO: 65661 - DNA, 642 bp, Artificial Sequence
  derived and/or modified sequence
atgcaccagctgttccggctggtgctgggccagaaggacctgagccgggcaggcgacttgttctccctggacgattcagaaattgaggatagcctgacagaggctcttgaacaaataaagataataagctcatcttctgactatcagactaacaataacgatcaagccgtggtggagatttgtatcactcggatcacaaccgccatccgggagactgagtctattgaaaaacatgccaaggccttggttggcctgtgggactcttgcctggaacataacctgcgtccctttggtaaggatgaggacacccctcacgccaagattgcatcagatattatgtcgtgcattttacagaattataataggccaccagtgatggctctggctattcccatcgccgtgaaattcctccacagggggaacaaggagctttgtcgaaacatgtctaactatctgagcctcgctgctattactaaggcagatttacttgccgaccacacggaagtgatcgtcaagagtattctacagggaatggtgcgaaaactgtctctgggaacatgcttcggcaggtaccttaaggtgttcagttcctccatatatggcttgtgggaggcaagacctagagttctcgaggctaattag

SEQ ID NO: 65662 - DNA, 642 bp, Artificial Sequence
  derived and/or modified sequence
atgcaccagctgttccggctggtgctgggccagaaggacctgagcagagcaggcgatctctttagtctggatgattcagagattgaggattcgcttactgaagctttggaacaaatcaagattatctcatcctcctctgattatcagacaaacaataacgatcaggccgtcgtcgaaatttgcatcactagaattacaacggccatcagagagacagaatcaatcgagaagcacgctaaagcactggtgggtctctgggactcatgtttagagcacaacttgaggcccttcggaaaggatgaagatacccctcacgccaaaatcgcatctgatattatgtcttgtattcttcagaattataaccgacccccagtgatggcactcgccatacccattgccgtgaaatttctgcatcgggggaataaggagttatgtcgcaatatgagcaactacctgtctttggccgccatcacaaaagccgacttgctggccgatcatacggaggttatcgttaagtccatcctgcagggcatggttcgcaaactcagtctcgggacatgttttggcagatatctgaaggtcttcagctctagcatctatggactgtgggaggcccgacctcgggtcttagaggctaattag

SEQ ID NO: 65663 - DNA, 642 bp, Artificial Sequence
  derived and/or modified sequence
atgcatcaactttttcggttggtccttggccagaaggacctcagtcgggctggcgatctcttttcgctggacgatagcgagatcgaagactctttgactgaagccctagaacagattaaaataatttctagcagcagcgactatcagaccaataacaatgatcaggccgtagtagaaatctgcatcacacgcatcacaaccgcgatccgagagactgagtccattgagaaacacgcaaaggccctggttgggctctgggacagttgccttgaacataacctgcgcccatttggaaaagatgaagatacccctcatgccaaaattgcatcagatatcatgtcttgcatactacagaactacaacagacctcccgtgatggcactggcaatcccgatcgctgtgaaattcctgcatagagggaataaggagttgtgtcgcaacatgtccaattatttgtccctggctgcaattactaaggctgatttattagcggatcacaccgaggtcattgtgaagagcattctgcaaggtatggtgcggaagctaagtcttggaacctgttttggccgatatctcaaggtcttctcaagttctatttacggcctgtgggaagccaggcccagggtgctggaagctaactag

SEQ ID NO: 65664 - DNA, 642 bp, Artificial Sequence
  derived and/or modified sequence
atgcaccaattattcagactcgttctaggacagaaggacctgagcagagcaggggacctcttcagtcttgatgacagtgaaattgaagacagcctgacagaggccctggagcaaatcaagattatcagtagctcttctgactaccagacaaataacaacgaccaggctgtcgttgaaatctgcatcacccgcattacaacagccataagggagacggagagtatcgagaagcatgctaaggccctggttggactctgggactcatgccttgagcataacctacgaccgtttggcaaggatgaggacacgccacatgctaagatcgccagcgatatcatgtcatgcatcttgcaaaattataataggccccctgtgatggctctcgcaattccaattgctgttaagtttcttcatcgaggtaacaaagagctttgtcgtaatatgtctaattacttgtccttagcagcgataacaaaagctgatctgttggcggaccatacagaggtaatcgtcaagagtatcctgcagggaatggtcaggaaactctccttaggtacatgttttggacggtacctgaaagtgttctccagctccatttacggtttatgggaggcaagaccccgagtgctcgaggccaattag

SEQ ID NO: 65665 - DNA, 1401 bp, Artificial Sequence
  derived and/or modified sequence
ggttgttaggcaaatctaattctttcaaactacagatctgctcagagaaatctgtaaatctagtgtagaaataagtgaagctttgcgtcaattgttaggtctaagcagaagtttgggagagagaagaaaagttactcatttgcctgattccgcacgagagtgtcaatgaagacctcaaagtctggagaaaaatgacctttcatggaataagaagtatacctccttctacatgtttttgtcttactgacctctgataactggaacacatgactctgggtctgtagaaagtcaactgatcaaactcatcctcaccatgcatcaactgttcagactggttttgggacaaaaagatctttcacgagctggggacctcttctccttagatgactctgagattgaagacagccttacagaagctttggagcaaattaagataattagctcatcttcagattaccaaaccaataacaatgaccaggcagtagttgaaatctgtatcacaagaatcacaacagccatcagagagaccgagtccattgaaaagcatgcaaaggcccttgtggggctctgggactcctgcttggaacataacctgagaccctttgggaaagacgaagacactcctcatgcaaaaatcgcatctgatatcatgagttgcattttacagaattacaaccgacccccagtgatggcattagccatccccattgcagtgaaattcctccacagaggcaacaaggaactgtgcaggaatatgtctaactacctgtctctggctgcaattaccaaggcagatctcctggctgatcacacggaagttatagtaaagagcatactccaaggtatggtgcgaaagttgagcttggggacatgttttgggagatatttaaaagtattttcatcaagcatttatggtttgtgggaagcaagacctagagtattagaagcaaattaatttctctgttttgctgccagttgacctgtgaacatgcaaaaggttacttaatctggctgtctgtgtcccttcccaaggcagatgaattacttagactcattaaaagaattgtaagcattcttccaaatctgtgtttctcagtttgaagaactgcatttccgtgcttctggtcacctgttcaactaccaactgtggagatcttatctctgtgtactgagtggaacacgtcactcagtggggtatgaaaaacctgtcttcatttgcttccaaaagcaagaaatgtcttttgttagataaaatacatcagaaaatgtgtaatgacttcttaaatgtgaacatgatttggataacaagcataaatactagcataaaaagccaaatagtacacctctgttaattgttacaacatttgaatgaataagaagctcaaattagttcatgcaaaa

SEQ ID NO: 65666 - DNA, 1714 bp, Artificial Sequence
  derived and/or modified sequence
tgtaaatctagtgtagaaataagtgaagctttgcgtcaattgttaggtctaagcagaagtttgggagagagaagaaaagttactcatttgcctgattccgcacggaaacagagcgttgcactgggaggtaactccgctgggtgaggtgcagcctgtcacctgaccggtctctggggctgccggtggcatcaggctgcattccttgaattcttccacccggcaccggctccgcaatgaacaacttcaggttcactgagctgagcggattccactcgctgtgccctcggagcctgcctgaatctcccgcccagtctcaaaccatgcagctgagtaactgcaagggcgcctttgaggagtagcacgcagagagtgtcaatgaagacctcaaagtctggagaaaaatgacctttcatggaataagaagtatacctccttctacatgtttttgtcttactgacctctgataactggaacacatgactctgggtctgtagaaagtcaactgatcaaactcatcctcaccatgcatcaactgttcagactggttttgggacaaaaagatctttcacgagctggggacctcttctccttagatgactctgagattgaagacagccttacagaagctttggagcaaattaagataattagctcatcttcagattaccaaaccaataacaatgaccaggcagtagttgaaatctgtatcacaagaatcacaacagccatcagagagaccgagtccattgaaaagcatgcaaaggcccttgtggggctctgggactcctgcttggaacataacctgagaccctttgggaaagacgaagacactcctcatgcaaaaatcgcatctgatatcatgagttgcattttacagaattacaaccgacccccagtgatggcattagccatccccattgcagtgaaattcctccacagaggcaacaaggaactgtgcaggaatatgtctaactacctgtctctggctgcaattaccaaggcagatctcctggctgatcacacggaagttatagtaaagagcatactccaaggtatggtgcgaaagttgagcttggggacatgttttgggagatatttaaaagtattttcatcaagcatttatggtttgtgggaagcaagacctagagtattagaagcaaattaatttctctgttttgctgccagttgacctgtgaacatgcaaaaggttacttaatctggctgtctgtgtcccttcccaaggcagatgaattacttagactcattaaaagaattgtaagcattcttccaaatctgtgtttctcagtttgaagaactgcatttccgtgcttctggtcacctgttcaactaccaactgtggagatcttatctctgtgtactgagtggaacacgtcactcagtggggtatgaaaaacctgtcttcatttgcttccaaaagcaagaaatgtcttttgttagataaaatacatcagaaaatgtgtaatgacttcttaaatgtgaacatgatttggataacaagcataaatactagcataaaaagccaaatagtacacctctgttaattgttacaacatttgaatgaataagaagctcaaattagttcatgcaaaatattctccttgtcttcttttattttctttggtttcagatcaatcaaaaaacatgtttttgaacttgaagtcagagaacaatacatgatattaattgatgtgca

SEQ ID NO: 65667 - protein, 55 aa, Artificial Sequence
  derived and/or modified sequence
MHQLFRLVLGQKDLSRAGDLFSLDDSEIEDSLTEALEQIKIISSSSDYQTNNNDQ

SEQ ID NO: 65668 - protein, 177 aa, Artificial Sequence
  derived and/or modified sequence
MHQLFRLVLGQKDLSRAGDLFSLDDSEIEDSLTEALEQIKIISSSSDYQTNNNDQAVVEICITRITTAIRETESIEKHAKALVGLWDSCLEHNLRPFGKDEDTPHAKIASDIMSCILQNYNRPPVMALAIPIAVKFLHRGNKELCRNMSNYLSLAAITKADLLADHTEVIVKSILQV

SEQ ID NO: 65669 - DNA, 192 bp, Artificial Sequence
  derived and/or modified sequence
atgcaccagctgttcagactggtgctgggccagaaggacctgagcagagccggcgacctgttcagcctggacgacagcgagatcgaggacagcctgaccgaggccctggagcagatcaagatcatcagcagcagcagcgactaccagaccaacaacaacgaccaggccgtggtggagatctgcatcacctag

SEQ ID NO: 65670 - DNA, 498 bp, Artificial Sequence
  derived and/or modified sequence
atgcaccagctgttcagactggtgctgggccagaaggacctgagcagagccggcgacctgttcagcctggacgacagcgagatcgaggacagcctgaccgaggccctggagcagatcaagatcatcagcagcagcagcgactaccagaccaacaacaacgaccaggccgtggtggagatctgcatcaccagaatcaccaccgccatcagagagaccgagagcatcgagaagcacgccaaggccctggtgggcctgtgggacagctgcctggagcacaacctgagacccttcggcaaggacgaggacaccccccacgccaagatcgccagcgacatcatgagctgcatcctgcagaactacaacagaccccccgtgatggccctggccatccccatcgccgtgaagttcctgcacagaggcaacaaggagctgtgcagaaacatgagcaactacctgagcctggccgccatcaccaaggccgacctgctggccgactag

SEQ ID NO: 65671 - DNA, 168 bp, Artificial Sequence
  derived and/or modified sequence
atgcaccagctgttcagactggtgctgggccagaaggacctgagcagagccggcgacctgttcagcctggacgacagcgagatcgaggacagcctgaccgaggccctggagcagatcaagatcatcagcagcagcagcgactaccagaccaacaacaacgaccagtag

SEQ ID NO: 65672 - DNA, 534 bp, Artificial Sequence
  derived and/or modified sequence
atgcaccagctgttcagactggtgctgggccagaaggacctgagcagagccggcgacctgttcagcctggacgacagcgagatcgaggacagcctgaccgaggccctggagcagatcaagatcatcagcagcagcagcgactaccagaccaacaacaacgaccaggccgtggtggagatctgcatcaccagaatcaccaccgccatcagagagaccgagagcatcgagaagcacgccaaggccctggtgggcctgtgggacagctgcctggagcacaacctgagacccttcggcaaggacgaggacaccccccacgccaagatcgccagcgacatcatgagctgcatcctgcagaactacaacagaccccccgtgatggccctggccatccccatcgccgtgaagttcctgcacagaggcaacaaggagctgtgcagaaacatgagcaactacctgagcctggccgccatcaccaaggccgacctgctggccgaccacaccgaggtgatcgtgaagagcatcctgcaggtgtag

SEQ ID NO: 65673 - DNA, 192 bp, Artificial Sequence
  derived and/or modified sequence
atgcatcaactttttcggctggtgcttggccagaaggatctgagtagggcaggggacctgttcagcctggatgatagcgaaatcgaggacagtctgaccgaggcactagagcagatcaagattatatcctccagctctgattatcagaccaacaataatgaccaggccgtcgtcgaaatctgcatcacgtag

SEQ ID NO: 65674 - DNA, 498 bp, Artificial Sequence
  derived and/or modified sequence
atgcatcagctatttcgcctcgtcctgggccagaaggatctttctcgcgctggagacctattttcgctcgacgacagcgagatagaagactccttaaccgaggcactcgagcagattaaaatcattagttcgtcctccgattaccaaacaaacaataatgaccaagccgtcgtggagatttgcattacgcggatcaccaccgcaatcagggaaactgagagcatcgagaagcacgctaaggccttggttggcttatgggatagctgcctcgagcataatttacgcccatttggaaaagacgaggacacacctcacgccaaaatagccagcgacattatgtcatgcatcctccagaactataaccggcccccagtaatggcactagccatcccaattgccgtgaaattcctacacagaggcaacaaggagctgtgtaggaacatgtccaactatcttagcctcgcagccatcaccaaggccgatcttctggcagactag

SEQ ID NO: 65675 - DNA, 168 bp, Artificial Sequence
  derived and/or modified sequence
atgcatcaattgttcagactggtcttgggacaaaaggacctgagccgagccggggatctgttttcactcgacgacagtgagattgaagactcactcaccgaggcacttgagcaaatcaaaattattagttcatcttcagactaccagacgaataataacgaccaatag

SEQ ID NO: 65676 - DNA, 534 bp, Artificial Sequence
  derived and/or modified sequence
atgcatcagttgtttcggctggtgctggggcagaaagatctgagccgcgccggggatctgttcagcctcgacgacagcgaaattgaagacagtttgaccgaagctctggagcagatcaagatcatctcctccagtagtgattaccagaccaataacaatgatcaggccgtcgttgaaatctgtattacgcgaatcaccactgcgattcgcgaaacagagagcatagaaaagcacgctaaggcccttgtaggactctgggactcgtgcctagagcacaacctgagacctttcggcaaggatgaagataccccccacgccaagatcgcctctgacatcatgtcatgcattctccaaaattacaatcgtccacctgttatggccctcgctattcctatcgctgttaaatttctgcacagagggaacaaagaactgtgccgaaatatgtctaattatttgagcttggcagccattaccaaggctgacctgctggccgaccatacagaggtgatagtcaaatctatactccaagtgtag

SEQ ID NO: 65677 - DNA, 192 bp, Artificial Sequence
  derived and/or modified sequence
atgcaccagctgttccggctggtgctgggccagaaggacctgagcagagctggggacctcttcagcctggatgacagcgagattgaggacagcctgacagaggccctggagcagatcaagatcatcagcagcagcagtgactaccagaccaacaacaatgaccaggccgtggtggagatctgcatcacctag

SEQ ID NO: 65678 - DNA, 498 bp, Artificial Sequence
  derived and/or modified sequence
atgcaccagctgttccggctggtgctgggccagaaggacctgagcagagctggggacctcttcagcctggatgacagcgagattgaggacagcctgacagaggccctggagcagatcaagatcatcagcagcagcagtgactaccagaccaacaacaatgaccaggccgtggtggagatctgcatcacccgcatcaccacagccatccgggagacagagagcattgagaagcacgccaaggccctggtgggcctgtgggacagctgcctggagcacaacctgcggccctttgggaaggatgaggacacccctcatgccaagatcgccagtgacatcatgagctgcatcctgcagaactacaacagacctcctgtgatggccctggccatccccatcgctgtgaagttcctgcaccggggcaacaaggagctgtgcaggaacatgagcaactacctgagcctggccgccatcaccaaggctgacctgctggccgactag

SEQ ID NO: 65679 - DNA, 168 bp, Artificial Sequence
  derived and/or modified sequence
atgcaccagctgttccggctggtgctgggccagaaggacctgagcagagctggggacctcttcagcctggatgacagcgagattgaggacagcctgacagaggccctggagcagatcaagatcatcagcagcagcagtgactaccagaccaacaacaatgaccagtag

SEQ ID NO: 65680 - DNA, 534 bp, Artificial Sequence
  derived and/or modified sequence
atgcaccagctgttccggctggtgctgggccagaaggacctgagcagagctggggacctcttcagcctggatgacagcgagattgaggacagcctgacagaggccctggagcagatcaagatcatcagcagcagcagtgactaccagaccaacaacaatgaccaggccgtggtggagatctgcatcacccgcatcaccacagccatccgggagacagagagcattgagaagcacgccaaggccctggtgggcctgtgggacagctgcctggagcacaacctgcggccctttgggaaggatgaggacacccctcatgccaagatcgccagtgacatcatgagctgcatcctgcagaactacaacagacctcctgtgatggccctggccatccccatcgctgtgaagttcctgcaccggggcaacaaggagctgtgcaggaacatgagcaactacctgagcctggccgccatcaccaaggctgacctgctggccgaccacacagaggtgattgtgaagagcatcctgcaggtgtag

SEQ ID NO: 65681 - DNA, 192 bp, Artificial Sequence
  derived and/or modified sequence
atgcaccagctgttccggctggtgctgggccagaaggacctgagccgtgccggagatctgttttctctggacgactcagaaatcgaagacagtctaacagaggcactggagcagataaagattatcagttcatcctcagactatcaaacgaataataacgatcaggccgtggtggagatatgcatcacatag

SEQ ID NO: 65682 - DNA, 498 bp, Artificial Sequence
  derived and/or modified sequence
atgcaccagctgttccggctggtgctgggccagaaggacctgagccgggcgggagatcttttcagcctggacgactctgagattgaggattcactcaccgaagcccttgaacagatcaaaattatctcatcctcgagtgattatcagaccaacaacaacgaccaggccgtggtggagatttgtatcaccagaattaccaccgctattagggagactgaatccattgaaaaacacgccaaggccctggtggggttatgggactcatgcctcgaacataatctgcgaccgttcggaaaggatgaggacaccccacatgcaaagattgcaagtgacatcatgtcatgtatcctgcaaaattataacagaccccccgtcatggcactggctatccctatcgccgtgaaattccttcatagaggaaacaaggagctctgccgcaatatgagcaactacctttctttagcagcaatcaccaaggccgacctcttggctgactag

SEQ ID NO: 65683 - DNA, 168 bp, Artificial Sequence
  derived and/or modified sequence
atgcaccagctgttccggctggtgctgggccagaaggacctgagccgggctggggacttgtttagtctggatgatagcgaaatcgaagactctttgacggaggccctggaacagattaaaattatctcttctagttcagactatcagactaataataatgatcagtag

SEQ ID NO: 65684 - DNA, 534 bp, Artificial Sequence
  derived and/or modified sequence
atgcaccagctgttccggctggtgctgggccagaaggacctgagccgagccggggacctgttttccttggacgactccgaaatcgaggattcactgaccgaggcgctcgagcagattaagattatttccagctcatctgactaccagaccaataataatgaccaggcggtggtggaaatttgtatcaccaggataactacggcaatacgtgagactgagtcgatcgagaaacacgccaaggcactggtcggcctgtgggatagctgcctggagcacaatctgaggccatttgggaaagatgaggacaccccacacgccaaaatagctagtgacattatgtcttgcattttacagaattataatcggcccccggttatggcactcgccatccccatcgccgtgaagtttttacaccggggaaacaaggagctttgtcgaaacatgtcgaactatctgtccctggccgcaattactaaagcagacctcttggcggatcacacggaggtgattgtgaaatccatcttacaggtgtag

SEQ ID NO: 65685 - DNA, 192 bp, Artificial Sequence
  derived and/or modified sequence
atgcatcaactattccgcctggtactagggcagaaagatctgtctcgcgcaggcgacctctttagccttgatgactctgaaatcgaggactccctgacagaggcattagaacagatcaagattatcagtagctcatctgactatcagaccaataacaacgatcaggccgttgtagaaatctgtatcacatag

SEQ ID NO: 65686 - DNA, 498 bp, Artificial Sequence
  derived and/or modified sequence
atgcatcagctgttcaggctggttctcggccagaaagatctgtccagggccggagacctgttctccctggatgactccgagattgaagactcacttactgaggccctcgaacagatcaaaatcatttccagtagcagcgactatcagaccaacaacaacgatcaagctgttgtggaaatttgtattactcgcattactactgcaatacgtgaaactgaaagtatcgagaagcacgcgaaggctctggttggcctgtgggatagctgtctggagcacaacttgcggcctttcggcaaggatgaggatacaccacatgcgaagatagccagcgacatcatgagttgcatcctacaaaactataacaggccgcctgtaatggctcttgctatcccaatcgcagtgaagtttcttcaccgcggtaacaaggaactctgcagaaacatgagcaattatctctctctggccgcaattacaaaagctgacctgcttgccgactag

SEQ ID NO: 65687 - DNA, 168 bp, Artificial Sequence
  derived and/or modified sequence
atgcaccaactgtttagacttgttttggggcaaaaagacctctcccgcgctggcgacttgttttctctggacgacagcgaaattgaggattcgttgaccgaagcgctggagcagatcaaaatcatttcctcaagttccgactaccagactaacaacaatgatcagtag

SEQ ID NO: 65688 - DNA, 534 bp, Artificial Sequence
  derived and/or modified sequence
atgcatcagctgttccgtttggttctgggtcagaaggatctttctagggcgggagacttgttttctctagacgattccgagattgaggactcgctcacggaagccctggaacaaatcaaaattatcagttcatcatcggattaccagacaaataataacgatcaggccgtggtggaaatctgtattacgcgcataacaactgcaattcgtgagacggagagcattgagaagcatgccaaggcacttgttggcctttgggacagctgtcttgagcacaatctgcggccatttggcaaggacgaagatacacctcacgcaaagatcgcgtccgacatcatgtcctgtatacttcaaaattacaaccggccaccagtcatggcattagccattccgatcgcagtcaaatttctgcatcgtggcaataaagaactttgccgaaacatgtctaattacctctctctggcggcaataacaaaggcagatctcctcgctgatcacactgaggtgatcgtaaagagcatactccaagtgtag

SEQ ID NO: 65689 - DNA, 730 bp, Artificial Sequence
  derived and/or modified sequence
tggatgcaattgtttaggagaagagtgaaggagaagagaagagagcccgaaactaaacagggaggaatccaccatttagaagtctggcaggcaaagaggacaaggctttgtgtttcacctcaggaaacagagcgttgcactgggaggtaactccgctgggtgaggtgcagcctgtcacctgaccggtctctggggctgccggtggcatcaggctgcattccttgaattcttccacccggcaccggctccgcaatgaacaacttcaggttcactgagctgagcggattccactcgctgtgccctcggagcctgcctgaatctcccgcccagtctcaaaccatgcagctgagtaactgcaagggcgcctttgaggagtagcacgcagagagtgtcaatgaagacctcaaagtctggagaaaaatgacctttcatggaataagaagtatacctccttctacatgtttttgtcttactgacctctgataactggaacacatgactctgggtctgtagaaagtcaactgatcaaactcatcctcaccatgcatcaactgttcagactggttttgggacaaaaagatctttcacgagctggggacctcttctccttagatgactctgagattgaagacagccttacagaagctttggagcaaattaagataattagctcatcttcagattaccaaaccaataacaatgaccaggcagtagttgaaatctgtatcac

SEQ ID NO: 65690 - DNA, 746 bp, Artificial Sequence
  derived and/or modified sequence
tgtttaggagaagagtgaaggagaagagaagagagcccgaaactaaacagggaggaatccaccatttagaagtctggcaggcaaagaggacaagagagtgtcaatgaagacctcaaagtctggagaaaaatgacctttcatggaataagaagtatacctccttctacatgtttttgtcttactgacctctgataactggaacacatgactctgggtctgtagaaagtcaactgatcaaactcatcctcaccatgcatcaactgttcagactggttttgggacaaaaagatctttcacgagctggggacctcttctccttagatgactctgagattgaagacagccttacagaagctttggagcaaattaagataattagctcatcttcagattaccaaaccaataacaatgaccaggcagtagttgaaatctgtatcacaagaatcacaacagccatcagagagaccgagtccattgaaaagcatgcaaaggcccttgtggggctctgggactcctgcttggaacataacctgagaccctttgggaaagacgaagacactcctcatgcaaaaatcgcatctgatatcatgagttgcattttacagaattacaaccgacccccagtgatggcattagccatccccattgcagtgaaattcctccacagaggcaacaaggaactgtgcaggaatatgtctaactacctgtctctggctgcaattaccaaggcagatctcctggctgat

SEQ ID NO: 65691 - DNA, 557 bp, Artificial Sequence
  derived and/or modified sequence
gatgcaattgtttaggagaagagtgaaggagaagagaagagagcccgaaactaaacagggaggaatccaccatttagaagtctggcaggcaaagaggacaaggtgtaatatctggttgctgttgccattctgccaccaagaaacctgatgacttcatttgggcctcttcaaccagctgcccctaaagctagcaagctccacccttcagtgtccactgataaattccttaatagcagagtgtcaatgaagacctcaaagtctggagaaaaatgacctttcatggaataagaagtatacctccttctacatgtttttgtcttactgacctctgataactggaacacatgactctgggtctgtagaaagtcaactgatcaaactcatcctcaccatgcatcaactgttcagactggttttgggacaaaaagatctttcacgagctggggacctcttctccttagatgactctgagattgaagacagccttacagaagctttggagcaaattaagataattagctcatcttcagattaccaaaccaataacaatgaccagg

SEQ ID NO: 65692 - DNA, 992 bp, Artificial Sequence
  derived and/or modified sequence
agagtgtcaatgaagacctcaaagtctggagaaaaatgacctttcatggaataagaagtatacctccttctacatgtttttgtcttactgacctctgataactggaacacatgactctgggtctgtagaaagtcaactgatcaaactcatcctcaccatgcatcaactgttcagactggttttgggacaaaaagatctttcacgagctggggacctcttctccttagatgactctgagattgaagacagccttacagaagctttggagcaaattaagataattagctcatcttcagattaccaaaccaataacaatgaccaggcagtagttgaaatctgtatcacaagaatcacaacagccatcagagagaccgagtccattgaaaagcatgcaaaggcccttgtggggctctgggactcctgcttggaacataacctgagaccctttgggaaagacgaagacactcctcatgcaaaaatcgcatctgatatcatgagttgcattttacagaattacaaccgacccccagtgatggcattagccatccccattgcagtgaaattcctccacagaggcaacaaggaactgtgcaggaatatgtctaactacctgtctctggctgcaattaccaaggcagatctcctggctgatcacacggaagttatagtaaagagcatactccaagtttgaagaactgcatttccgtgcttctggtcacctgttcaactaccaactgtggagatcttatctctgtgtactgagtggaacacgtcactcagtggggtatgaaaaacctgtcttcatttgcttccaaaagcaagaaatgtcttttgttagataaaatacatcagaaaatgtgtaatgacttcttaaatgtgaacatgatttggataacaagcataaatactagcataaaaagccaaatagtacacctctgttaattgttacaacatttgaatgaataagaagctcaaattagttcatgcaaaat

SEQ ID NO: 65693 - protein, 261 aa, Artificial Sequence
  derived and/or modified sequence
MHGEASDGEGEGDTEVMQQETVPVPVPSEKTKQPKECFLIQPKERKENTTKTRKRRKKKITDVLAKSEPKPGLPEDLQKLMKDYYSSRRLVIELEELNLPDSCFLKANDLTHSLSSYLKEICPKWVKLRKNHSEKKSVLMLIICSSAVRALELIRSMTAFRGDGKVIKLFAKHIKVQAQVKLLEKRVVHLGVGTPGRIKELVKQGGLNLSPLKFLVFDWNWRDQKLRRMMDIPEIRKEVFELLEMGVLSLCKSESLKLGLF

SEQ ID NO: 65694 - DNA, 786 bp, Artificial Sequence
  derived and/or modified sequence
atgcacggcgaggccagcgacggcgagggcgagggcgacaccgaggtgatgcagcaggagaccgtgcccgtgcccgtgcccagcgagaagaccaagcagcccaaggagtgcttcctgatccagcccaaggagagaaaggagaacaccaccaagaccagaaagagaagaaagaagaagatcaccgacgtgctggccaagagcgagcccaagcccggcctgcccgaggacctgcagaagctgatgaaggactactacagcagcagaagactggtgatcgagctggaggagctgaacctgcccgacagctgcttcctgaaggccaacgacctgacccacagcctgagcagctacctgaaggagatctgccccaagtgggtgaagctgagaaagaaccacagcgagaagaagagcgtgctgatgctgatcatctgcagcagcgccgtgagagccctggagctgatcagaagcatgaccgccttcagaggcgacggcaaggtgatcaagctgttcgccaagcacatcaaggtgcaggcccaggtgaagctgctggagaagagagtggtgcacctgggcgtgggcacccccggcagaatcaaggagctggtgaagcagggcggcctgaacctgagccccctgaagttcctggtgttcgactggaactggagagaccagaagctgagaagaatgatggacatccccgagatcagaaaggaggtgttcgagctgctggagatgggcgtgctgagcctgtgcaagagcgagagcctgaagctgggcctgttctag

SEQ ID NO: 65695 - DNA, 1056 bp, Artificial Sequence
  derived and/or modified sequence
tttagtgtcacaggagacacgagggcaaagtgctgaggaaactctagagcaacatcggaatgcatggtgaagcatcagatggtgaaggagaaggagacacagaagtgatgcagcaggagacagttccagttcctgtaccttcagagaaaaccaaacagcctaaagaatgttttttgatacaaccaaaggaaagaaaagagaataccaccaagaccaggaaaagaagaaagaagaaaattactgatgttcttgcaaaatcagaaccaaaaccagggttacctgaagacctacagaagctgatgaaggactattatagcagcagacgcttggtgattgaattagaagaactgaacctgccagactcctgtttcctcaaggccaatgatttgactcacagtctttcctcatacctaaaagaaatttgtcctaagtgggtaaaacttaggaagaaccacagtgagaagaaatcggtcctgatgctgatcatctgcagctcggccgtccgagccctggagctcattaggtcgatgacagcattcagaggagacggcaaagttataaaattatttgcaaagcacataaaggtccaggcgcaggtaaagttgctggagaagcgtgtggtgcacctgggtgtaggaactccggggagaattaaagaacttgttaaacaaggtggccttaatttgagccccttaaaatttctggtttttgactggaactggagagatcagaagttgaggagaatgatggacattcccgagataagaaaggaggtattcgaacttctggaaatgggagtgctcagtctgtgcaagtcagaatccttgaaactgggccttttctaagtctgtgtcctaatgaagattccagttttcacagtagaagttgcatcttatttaatgactctgatacattgcaagcactcagtaaatatcagcaaatagtttatgttaattgtgtcaacagatggatcactggaatgtggggattctgaaacagaaatgaaactgtccttttgacaactctcttatataataaagtatcaccggcttgtgt

SEQ ID NO: 65696 - DNA, 786 bp, Artificial Sequence
  derived and/or modified sequence
atgcatggagaagctagtgatggcgagggcgaaggagacactgaggtcatgcagcaagaaactgtgcccgttcctgtgccttccgagaaaacaaagcagccgaaggaatgctttctcatccaaccaaaagagcggaaggagaataccaccaagacccgtaagcgcagaaagaagaaaatcacagatgttcttgccaaaagtgaacctaagcccggtctgcccgaggatctgcagaaacttatgaaggactattacagcagtcgcagactcgtgatcgagttagaggaattgaatttgcccgactcttgcttcctgaaagccaacgacctgacacactccctttcatcatacttgaaggaaatttgccctaagtgggtgaaactgagaaagaaccactcggaaaagaagtcagttctcatgctcattatatgttcttccgccgtacgcgccctggaactgattcggtcgatgaccgcctttcgcggcgatggcaaggtgattaaactatttgccaaacatatcaaggtgcaagcacaggtaaagttgctagaaaaacgcgttgttcacctcggcgtgggtactccaggacggatcaaagaactagtgaagcaaggcggtctcaatctgtcacccctgaaattcctggtcttcgactggaactggagagatcagaagctgaggcgtatgatggacattcccgaaatcaggaaagaagtttttgaacttctagaaatgggcgtcctgtcattgtgtaagtctgagagcctcaaactgggtctgttttag

SEQ ID NO: 65697 - DNA, 786 bp, Artificial Sequence
  derived and/or modified sequence
atgcacggggaggccagtgatggagagggggagggggacacagaggtgatgcagcaggagaccgtgcctgtgcctgtgcccagcgagaagaccaagcagcccaaggagtgcttcctgatccagcccaaggagaggaaagaaaacaccaccaagaccaggaagaggaggaagaagaagatcacagatgtgctggccaagtctgagcccaagccaggcctgcctgaggacctgcagaagctgatgaaggactactacagcagccggcggctggtgattgagctggaggagctgaacctgcctgacagctgcttcctgaaggccaatgacctgacccacagcctgagcagctacctgaaggagatctgccccaagtgggtgaagctgaggaagaaccacagcgagaagaagtctgtgctgatgctgatcatctgcagcagcgctgtgcgggccctggagctgatccgctccatgacagccttcagaggagatggcaaggtgatcaagctgtttgccaagcacatcaaggtgcaggcccaggtgaagctgctggagaagagggtggtgcacctgggcgtgggcaccccaggccgcatcaaggagctggtgaagcagggcggcctgaacctgagccccctgaagttcctggtgtttgactggaactggagggaccagaagctgcggaggatgatggacatccctgagatcaggaaggaggtgtttgagctgctggagatgggcgtgctgagcctgtgcaagtctgagagcctgaagctgggcctcttctag

SEQ ID NO: 65698 - DNA, 786 bp, Artificial Sequence
  derived and/or modified sequence
atgcacggcgaggccagcgacggcgagggcgagggcgacaccgaggttatgcaacaggaaaccgtgccagtaccggtgcctagcgaaaagacaaagcaacccaaggagtgcttcctcattcagccgaaagagcggaaagaaaacaccaccaagacacgcaaacgccgtaagaagaaaattacagatgttctagcaaagagtgaacccaagccgggtctgcctgaagatctccaaaaactgatgaaggattattactcctcgcgcagattagtgatagaactggaggaactgaacctgcccgatagttgcttcttaaaggcaaatgacctgacccattcacttagctcatacctgaaagaaatttgtcctaaatgggtgaagctacgcaaaaatcactcggaaaaaaaatctgttctgatgttgatcatttgtagcagcgccgtgagagccctcgagctgattaggtccatgaccgcctttcgaggggacggcaaagtgataaagctcttcgcaaagcatatcaaagtgcaggcccaggtgaaactgctcgagaagagggtcgtacacctgggcgttggaaccccaggccgcatcaaggaattggtcaaacaggggggcttaaatctgtcaccactcaaattcctcgtgtttgactggaactggcgggatcagaagctgaggagaatgatggatatacccgagatacgcaaagaggtttttgagctgctagagatgggcgtgttatcactgtgcaagagcgaatcccttaagctgggtctgttttag

SEQ ID NO: 65699 - DNA, 786 bp, Artificial Sequence
  derived and/or modified sequence
atgcacggggaagctagcgatggtgagggagagggcgacactgaagtgatgcagcaggagactgtgcccgtccctgtgccgagcgaaaagaccaagcagccaaaggagtgctttctcattcagcctaaggagcgaaaggaaaatacgactaagacaagaaagagaaggaaaaagaagattaccgacgtgttggcaaagtctgaacccaaacccggtttgcctgaagacctgcagaaactcatgaaggactactatagcagtaggaggctcgtgatcgagcttgaagagcttaatctcccagattcttgcttcttaaaagccaacgacctcacccactctctcagctcatacctgaaggagatatgccccaagtgggtcaaacttaggaagaatcattccgagaaaaagagcgtcctcatgttaattatttgctcttccgctgtgagggcactggagttgattaggagcatgaccgccttcagaggcgacggtaaggtgatcaaactgtttgccaaacacatcaaggtgcaagcccaagtcaaactactggaaaagcgagttgtgcacctgggagttggcacacctggacgcattaaagaattggtcaagcagggcggactaaatttaagccctctcaaatttctggtattcgactggaactggagggatcagaagctgcgaagaatgatggacatcccagaaatccgaaaggaggtgtttgaactgctggagatgggcgtcctgtctttatgcaagtctgaatctctgaagctcggactgttttag

SEQ ID NO: 65700 - protein, 570 aa, Artificial Sequence
  derived and/or modified sequence
MTLLWCVVSLYFYGILQSDASERCDDWGLDTMRQIQVFEDEPARIKCPLFEHFLKFNYSTAHSAGLTLIWYWTRQDRDLEEPINFRLPENRISKEKDVLWFRPTLLNDTGNYTCMLRNTTYCSKVAFPLEVVQKDSCFNSPMKLPVHKLYIEYGIQRITCPNVDGYFPSSVKPTITWYMGCYKIQNFNNVIPEGMNLSFLIALISNNGNYTCVVTYPENGRTFHLTRTLTVKVVGSPKNAVPPVIHSPNDHVVYEKEPGEELLIPCTVYFSFLMDSRNEVWWTIDGKKPDDITIDVTINESISHSRTEDETRTQILSIKKVTSEDLKRSYVCHARSAKGEVAKAAKVKQKVPAPRYTVELACGFGATVLLVVILIVVYHVYWLEMVLFYRAHFGTDETILDGKEYDIYVSYARNAEEEEFVLLTLRGVLENEFGYKLCIFDRDSLPGGIVTDETLSFIQKSRRLLVVLSPNYVLQGTQALLELKAGLENMASRGNINVILVQYKAVKETKVKELKRAKTVLTVIKWKGEKSKYPQGRFWKQLQVAMPVKKSPRRSSSDEQGLSYSSLKNV

SEQ ID NO: 65701 - protein, 113 aa, Artificial Sequence
  derived and/or modified sequence
MTLLWCVVSLYFYGILQSDASERCDDWGLDTMRQIQVFEDEPARIKCPLFEHFLKFNYSTAHSAGLTLIWYWTRQDRDLEEPINFRLPENRISKEKDVLWFRPTLLNDTGNYT

SEQ ID NO: 65702 - protein, 145 aa, Artificial Sequence
  derived and/or modified sequence
MTLLWCVVSLYFYGILQSDASERCDDWGLDTMRQIQVFEDEPARIKCPLFEHFLKFNYSTAHSAGLTLIWYWTRQDRDLEEPINFRLPENRISKEKDVLWFRPTLLNDTGNYTCMLRNTTYCSKVAFPLEVVQKDSCFNSPMKLP

SEQ ID NO: 65703 - DNA, 1713 bp, Artificial Sequence
  derived and/or modified sequence
atgacgctgctctggtgtgtggtatcactgtacttctatggcatcctgcagtcagatgcctctgaacggtgcgacgactgggggttagacacaatgagacaaatccaggtcttcgaagacgagccggcccggatcaagtgccctctcttcgaacattttttaaagtttaactatagcacagcccatagtgccgggttaaccttgatctggtattggaccaggcaggaccgcgacttggaagagcccatcaatttccggctacctgagaataggatttccaaggaaaaagacgtcttatggtttagacccacgcttctgaacgatacaggtaactatacctgtatgctgaggaacaccacctattgctctaaggtcgcttttcccttggaggtcgtacagaaggacagctgcttcaattctcctatgaaattgccagtgcataaactctatatcgaatatggtattcaaagaatcacatgtcctaacgtcgatggatactttccatcttcggtaaagcctaccattacctggtacatgggttgttacaagattcagaattttaataatgtcattcctgaaggcatgaatttgagtttcctgattgcactgatttcaaacaacggcaattacacatgcgtagttacataccccgaaaacggaagaacctttcaccttacgcggacactgaccgtgaaagtcgtgggcagccctaaaaatgccgtgcccccagtgatccacagtcccaacgatcatgttgtgtacgagaaggagcctggggaagaactgctgattccgtgcacggtatacttcagctttctgatggacagcagaaatgaggtgtggtggaccatcgacggaaaaaagccagatgatattacaattgatgtaaccatcaatgaaagcatctcccactctcggactgaggacgagactagaactcagattctgtcaattaaaaaagtaactagcgaagaccttaagagatcgtacgtgtgtcacgcacggagtgctaagggggaagtggccaaagcagcaaaggtgaaacagaaagtgcccgcccctagatacactgttgagctagcctgcggctttggggctaccgtcttgctggtcgtgatactcatcgtggtttaccatgtgtactggctggaaatggtgctcttctatcgcgcacattttggaaccgacgaaacaattttggatggaaaagaatacgatatatacgtaagctatgccaggaatgccgaagaagaagaatttgtgctcctgacacttcggggggtgctggagaacgagttcggctacaaactgtgcatatttgatcgcgacagcttgcctggaggcatcgttacggatgagaccctgagttttatccagaagtctagacggctcctcgtagtgctcagcccaaactatgtgctgcagggcacacaggcacttctggaactaaaagctggtctggaaaatatggcttcacgtggcaacattaatgtgatattggtgcagtacaaggccgtgaaagaaaccaaagtgaaggagctgaagcgggccaagaccgtccttaccgtgattaagtggaaaggtgagaagtccaaatatccgcagggacgcttttggaagcaactccaggtggctatgccagtcaaaaagtctccaaggcggtccagcagtgatgagcagggccttagctattcaagccttaagaacgtttag

SEQ ID NO: 65704 - DNA, 1713 bp, Artificial Sequence
  derived and/or modified sequence
atgacactgttatggtgcgttgtgtccctgtacttttatggaattctgcagtccgacgccagtgagcgatgtgatgattggggcctggacactatgcgccagattcaggtgtttgaggatgaacccgcaaggattaagtgtcctctgtttgagcattttctgaagtttaattacagcaccgcccactccgccggtctgactctgatttggtactggactagacaggatagggacctagaggaaccaattaacttccggcttccagagaaccgtatctctaaggagaaggatgtcttgtggtttcgtcccacgctgctgaacgacaccggtaactacacgtgtatgctgagaaacaccacctactgcagcaaagtcgccttcccactggaagtggtacagaaggactcatgctttaacagtcctatgaagttgccagtgcacaagctgtacatcgaatacgggattcagaggattacttgtcccaacgtggatggctatttcccctcatccgtgaaaccaacgattacatggtatatgggctgctacaagatccaaaattttaacaatgtaattcccgagggtatgaacctgtctttccttatcgcactgatctccaataacgggaattatacatgcgtcgtgacataccctgagaatggcaggacttttcatttaacaagaactctgaccgtcaaggtggtagggtctccaaagaatgccgtgccccccgtgatccactcacctaatgaccacgtagtgtacgagaaggagcctggcgaagaactgttgattccatgcactgtgtatttctcttttttaatggattccaggaatgaggtatggtggaccatcgacgggaaaaagccagacgacataacgatcgatgtcacaatcaatgagagcatctctcacagcagaaccgaggatgagacaaggactcagatcctgagcatcaaaaaggtgacgtccgaagatctgaaaagatcatacgtgtgccatgccagatccgcgaagggagaggtcgccaaagccgccaaagtgaagcaaaaagtgcccgccccccggtacactgtagagctggcttgcggcttcggagctactgtgctgttagtcgtcattttgatcgtggtatatcacgtatactggctcgaaatggtcttgttttacagagcacattttgggacagacgaaacgatcctcgacggaaaggagtacgacatctatgttagttacgctaggaacgctgaagaggaggagtttgtcttgctgaccctaaggggtgtactggagaacgaattcggctacaagttatgtatattcgatcgcgactcactccccggcggtatcgttaccgacgagaccttatctttcatccagaagagtagaagactcttggtcgtactctccccaaattacgtgctgcagggaacacaggcccttttagaattaaaggccggccttgagaacatggccagcaggggaaacataaacgtgatactggtgcaatacaaggcagtgaaggagactaaggtcaaagaactgaagcgcgcgaagacagtgcttactgttatcaaatggaaaggcgaaaagtccaaatatcctcaagggagattttggaaacagctccaagtggcaatgcctgttaagaaatcaccacgtagaagcagttctgacgagcaagggttgagttattcatccctgaaaaacgtgtag

SEQ ID NO: 65705 - DNA, 1713 bp, Artificial Sequence
  derived and/or modified sequence
atgaccttgctttggtgcgtcgtatccctgtacttttatgggattcttcagagtgacgctagcgaacgttgcgacgactggggtcttgacacaatgagacagattcaggtctttgaagatgagcctgcacgaataaaatgcccactgtttgagcactttctgaaattcaattattctacagcccacagtgccgggctcaccctgatttggtactggacccgccaggatagagacctagaagaacccatcaacttcagattgcccgagaaccgtatcagcaaggaaaaggacgttttatggttccgtcctacacttctgaacgatactgggaactacacctgtatgttacggaataccacttattgctctaaagtggcgttccctcttgaggtggtgcaaaaagactcatgctttaacagtccaatgaaactgccagtccataaactgtatatagagtatggaatccagagaataacgtgtcccaacgttgacggctactttccaagctcggtaaagccaaccattacatggtatatggggtgctacaagattcagaactttaacaacgtgattccagagggcatgaatctgagcttcctgatcgcactgatcagtaacaacggaaattatacctgtgtggtgacctatcctgagaacggaagaacgttccatctgactagaactttgacagtgaaagtcgttggtagccctaagaatgctgttcctcccgtcatccatagtcctaacgaccatgtggtctacgagaaggagcctggcgaagaactcctcattccgtgtaccgtttattttagtttcctgatggatagtcggaatgaggtgtggtggacaattgatggcaaaaaacctgacgacattacaattgatgtgacaatcaacgagtccatcagccatagccgaactgaggacgagacaaggacgcagatactgtctattaagaaagtgacttcagaggatctgaaaaggtcttatgtgtgccacgcccggtcagcaaaaggtgaggtggcaaaggctgccaaggttaagcagaaagtccctgcgcctaggtatactgtcgagctagcctgtgggtttggcgcgacagtgttgcttgtggtcattctaattgtagtgtatcatgtgtactggctggagatggtgctcttttatcgggcccattttggtactgatgaaacaattctggacggaaaggaatatgatatctacgttagttatgcccggaacgccgaggaggaggaatttgtactccttacccttcggggagtcctggaaaacgagttcggctacaagctgtgtattttcgatcgtgactctctaccaggtggaatcgtaactgatgagacgctatctttcattcaaaagtccaggagactgctggttgtactgagtccaaattacgtcctccaggggactcaagccctgctggagcttaaggcaggtctggaaaatatggcctctagaggtaatatcaacgtgattctggtccaatataaagccgttaaggaaacgaaagtcaaggaactgaagagagccaagactgtgctgacagttatcaaatggaagggagaaaagtcgaagtatccccagggccgcttctggaagcagttacaggtggcaatgcctgtgaaaaagtcgcctcggcggtcttctagcgatgagcagggcctgtcctactcttcactgaaaaacgtatag

SEQ ID NO: 65706 - DNA, 1713 bp, Artificial Sequence
  derived and/or modified sequence
atgaccctcctgtggtgcgtggtgagcctttacttctatggaattcttcagagtgatgcatccgagcggtgcgacgattggggactggacaccatgcgacagattcaagtcttcgaagatgagccggcacgtattaaatgccctctgtttgagcacttcctgaaattcaattactcaaccgctcattccgccggcttgacgctcatttggtactggacccgccaggaccgagatcttgaggaaccaattaactttaggctgccagagaacaggataagcaaggagaaggacgttctttggtttaggccaaccttactcaacgacacgggaaattatacttgcatgctccggaacactacgtattgcagcaaagtcgctttcccgcttgaggtcgtgcagaaagattcgtgttttaattcccccatgaaactgccagtgcataagctatacatcgaatacggaattcaacggatcacttgtcccaacgtcgacggttactttccgtcctctgtcaagcccaccataacatggtacatggggtgttataagattcagaactttaacaacgtgattcctgaaggcatgaacctttctttcctgatcgctcttatatcaaataatgggaactacacctgcgtagtcacttatcccgagaatggacgcacgtttcacctcacaaggaccctgaccgttaaagtagtcggcagtcctaaaaatgccgtgccacccgttatccactctccaaacgatcacgttgtgtacgagaaggagcctggagaagagcttctcatcccatgcaccgtgtatttttcattcctaatggattcgcgcaacgaggtatggtggactatagacggaaagaagccagacgatataaccattgacgtgacaatcaacgaatccataagccacagccgtactgaggacgaaacacgaacccagattctctcgatcaaaaaggtcacctccgaggacctcaagcggagctacgtttgccacgccaggagcgctaaaggggaggtggccaaagcagctaaggtgaaacagaaggtgcctgcgccacggtacaccgtggagcttgcgtgcggctttggagcaacagtcctcctcgtggtcattctgattgtagtttatcacgtgtattggctagagatggtgttgttctatcgggcccacttcggcactgatgagacaatcctggacggcaaagagtatgatatatacgtcagttacgcccgaaatgcggaagaagaggagtttgtgctcctgacattaagaggtgtcctggaaaacgaattcggatacaagctctgtattttcgatcgcgactcactccctggcgggattgtgactgatgagacactttccttcattcagaaaagcaggcgattactcgtggtcctgtcgcccaactatgtgctgcaaggcacacaggcactgctggagcttaaagccggtcttgagaacatggcaagtagaggcaatatcaatgttatactggtgcagtataaggccgtgaaggagaccaaagtcaaggaattgaagagagcaaagaccgtgttgactgtaataaaatggaaaggcgagaagtccaagtaccctcaaggcagattctggaagcagctccaagtcgcgatgcccgttaagaagtctccgcgcaggtcaagcagtgacgaacagggcctcagttattcatctctgaaaaatgtgtag

SEQ ID NO: 65707 - DNA, 4697 bp, Artificial Sequence
  derived and/or modified sequence
aaagggggaaaagaaagtgcggcggaaagtaagaggctcactggggaagactgccgggatccaggtctccggggtccgctttggccagaggcgcggaaggaagcagtgcccggcgacactgcacccatcccggctgcttttgctgcgccctctcagcttcccaagaaaggatgacacttctgtggtgtgtagtgagtctctacttttatggaatcctgcaaagtgatgcctcagaacgctgcgatgactggggactagacaccatgaggcaaatccaagtgtttgaagatgagccagctcgcatcaagtgcccactctttgaacacttcttgaaattcaactacagcacagcccattcagctggccttactctgatctggtattggactaggcaggaccgggaccttgaggagccaattaacttccgcctccccgagaaccgcattagtaaggagaaagatgtgctgtggttccggcccactctcctcaatgacactggcaactatacctgcatgttaaggaacactacatattgcagcaaagttgcatttcccttggaagttgttcaaaaagacagctgtttcaattcccccatgaaactcccagtgcataaactgtatatagaatatggcattcagaggatcacttgtccaaatgtagatggatattttccttccagtgtcaaaccgactatcacttggtatatgggctgttataaaatacagaattttaataatgtaatacccgaaggtatgaacttgagtttcctcattgccttaatttcaaataatggaaattacacatgtgttgttacatatccagaaaatggacgtacgtttcatctcaccaggactctgactgtaaaggtagtaggctctccaaaaaatgcagtgccccctgtgatccattcacctaatgatcatgtggtctatgagaaagaaccaggagaggagctactcattccctgtacggtctattttagttttctgatggattctcgcaatgaggtttggtggaccattgatggaaaaaaacctgatgacatcactattgatgtcaccattaacgaaagtataagtcatagtagaacagaagatgaaacaagaactcagattttgagcatcaagaaagttacctctgaggatctcaagcgcagctatgtctgtcatgctagaagtgccaaaggcgaagttgccaaagcagccaaggtgaagcagaaagtgccagctccaagatacacagtggaactggcttgtggttttggagccacagtcctgctagtggtgattctcattgttgtttaccatgtttactggctagagatggtcctattttaccgggctcattttggaacagatgaaaccattttagatggaaaagagtatgatatttatgtatcctatgcaaggaatgcggaagaagaagaatttgtattactgaccctccgtggagttttggagaatgaatttggatacaagctgtgcatctttgaccgagacagtctgcctgggggaattgtcacagatgagactttgagcttcattcagaaaagcagacgcctcctggttgttctaagccccaactacgtgctccagggaacccaagccctcctggagctcaaggctggcctagaaaatatggcctctcggggcaacatcaacgtcattttagtacagtacaaagctgtgaaggaaacgaaggtgaaagagctgaagagggctaagacggtgctcacggtcattaaatggaaaggggaaaaatccaagtatccacagggcaggttctggaagcagctgcaggtggccatgccagtgaagaaaagtcccaggcggtctagcagtgatgagcagggcctctcgtattcatctttgaaaaatgtatgaaaggaataatgaaaagggtaaaaagaacaaggggtgctccaggaagaaagagtccccccagtcttcattcgcagtttatggtttcataggcaaaaataatggtctaagcctcccaatagggataaatttagggtgactgtgtggctgactattctgcttcctcaggcaacactaaagtttagaaagatatcatcaacgttctgtcaccagtctctgatgccactatgttctttgcaggcaaagacttgttcaatgcgaatttccccttctacattgtctatccctgtttttatatgtctccattctttttaaaatcttaacatatggagcagcctttcctatgaatttaaatatgcctttaaaataagtcactgttgacagggtcatgagtttccgagtatagttttctttttatcttatttttactcgtccgttgaaaagataatcaaggcctacattttagctgaggataatgaacttttttcctcattcggctgtataatacataaccacagcaagactgacatccacttaggatgatacaaagcagtgtaactgaaaatgtttcttttaattgatttaaaggacttgtcttctataccacccttgtcctcatctcaggtaatttatgaaatctatgtaaacttgaaaaatatttcttaatttttgtttttgctccagtcaattcctgattatccacaggtcaacccacattttttcattccttctccctatctgcttatatcgcattgctcatttagagtttgcaggaggctccatactaggttcagtctgaaagaaatctcctaatggtgctatagagagggaggtaacagaaagactcttttagggcatttttctgactcatgaaaagagcacagaaaaggatgtttggcaatttgtcttttaagtcttaaccttgctaatgtgaatactgggaaagtgattttttctcactcgtttttgttgctccattgtaaagggcggaggtcagtcttagtggccttgagagttgcttttggcattaatattctaagagaattaactgtatttcctgtcacctattcactagtgcaggaaatatacttgctccaaataagtcagtatgagaagtcactgtcaatgaaagttgttttgtttgttttcagtaatattttgctgtttttaagacttggaaaactaagtgcagagtttacagagtggtaaatatctatgttacatgtagattatacatatatatacacacgtgtatatgagatatatatcttatatctccacaaacacaaattatatatatacatatccacacacatacattacatatatctgtgtatataaatccacatgcacatgaaatatatatatatatataatttgtgtgtgtgtatgtgtatgtatatgactttaaatagctatgggtacaatattaaaaaccactggaactcttgtccagtttttaaattatgtttttactggaatgtttttgtgtcagtgttttctgtacatattatttgttaattcacagctcacagagtgatagttgtcatagttcttgccttccctaagtttatataaataacttaagtattgctacagtttatctaggttgcagtggcatctgctgtgcacagagcttccatggtcactgctaagcagtagccagccatcgggcattaattgatttcctactatattcccagcagacacatttagaaactaagctatgttaacctcagtgctcaactatttgaactgttgagtgataaaggaaacaaatataactgtaaatgaatcttggtatcctgtgaaacagaataattcgtaatttaagaaagcccttatcccggtaacatgaatgttgatgaacaaatgtaaaattatatcctatatttaagtacccataataaatcatttccctctataagtgttattgattattttaaattgaaaaaagtttcacttggatgaaaaaagtagaaaagtaggtcattcttggatctacttttttttagccttattaatatttttccctattagaaaccacaattactccctctattaacccttcacttactagaccagaaaagaacttattccagataagctttgaatatcaattcttacataaactttaggcaaacagggaatagtctagtcaccaaaggaccattctcttgccaatgctgcattccttttgcacttttggattccatatttatcccaaatgctgttgggcacccctagaaataccttgatgttttttctatttatatgcctgcctttggtacttaattttacaaatgctgtaatataaagcatatcaagtttatgtgatacgtatcattgcaagagaatttgtttcaagatttttttttaatgttccagaagatggccaatagagaacattcaagggaaatggggaaacataatttagagaacaagaacaaaccatgtctcaaatttttttaaaaaaaattaatggttttaaatatatgctatagggacgttccatgcccaggttaacaaagaactgtgatatatagagtgtctaattacaaaatcatatacgatttatttaattctcttctgtattgtaacttagatgattcccaaggactctaataaaaaatcacttcattgtatttggaaacaaaaacatcattcattaattacttattttctttccataggttttaatattttgagagtgtcttttttatttcattcatgaacttttgtatttttcatttttcatttgatttgtaaatttacttatgttaaaaataaaccatttattttcagctttgaatttta

SEQ ID NO: 65708 - DNA, 4778 bp, Artificial Sequence
  derived and/or modified sequence
aaagggggaaaagaaagtgcggcggaaagtaagaggctcactggggaagactgccgggatccaggtctccggggtccgctttggccagaggcgcggaaggaagcagtgcccggcgacactgcacccatcccggctgcttttgctgcgccctctcagcttcccaagaaaggtgagtctcgcgccgccgtgagggctcagaagtcaccaagccgcagaatctcagggtagacggattcttagagatcttacaggatgacacttctgtggtgtgtagtgagtctctacttttatggaatcctgcaaagtgatgcctcagaacgctgcgatgactggggactagacaccatgaggcaaatccaagtgtttgaagatgagccagctcgcatcaagtgcccactctttgaacacttcttgaaattcaactacagcacagcccattcagctggccttactctgatctggtattggactaggcaggaccgggaccttgaggagccaattaacttccgcctccccgagaaccgcattagtaaggagaaagatgtgctgtggttccggcccactctcctcaatgacactggcaactatacctgcatgttaaggaacactacatattgcagcaaagttgcatttcccttggaagttgttcaaaaagacagctgtttcaattcccccatgaaactcccagtgcataaactgtatatagaatatggcattcagaggatcacttgtccaaatgtagatggatattttccttccagtgtcaaaccgactatcacttggtatatgggctgttataaaatacagaattttaataatgtaatacccgaaggtatgaacttgagtttcctcattgccttaatttcaaataatggaaattacacatgtgttgttacatatccagaaaatggacgtacgtttcatctcaccaggactctgactgtaaaggtagtaggctctccaaaaaatgcagtgccccctgtgatccattcacctaatgatcatgtggtctatgagaaagaaccaggagaggagctactcattccctgtacggtctattttagttttctgatggattctcgcaatgaggtttggtggaccattgatggaaaaaaacctgatgacatcactattgatgtcaccattaacgaaagtataagtcatagtagaacagaagatgaaacaagaactcagattttgagcatcaagaaagttacctctgaggatctcaagcgcagctatgtctgtcatgctagaagtgccaaaggcgaagttgccaaagcagccaaggtgaagcagaaagtgccagctccaagatacacagtggaactggcttgtggttttggagccacagtcctgctagtggtgattctcattgttgtttaccatgtttactggctagagatggtcctattttaccgggctcattttggaacagatgaaaccattttagatggaaaagagtatgatatttatgtatcctatgcaaggaatgcggaagaagaagaatttgtattactgaccctccgtggagttttggagaatgaatttggatacaagctgtgcatctttgaccgagacagtctgcctgggggaattgtcacagatgagactttgagcttcattcagaaaagcagacgcctcctggttgttctaagccccaactacgtgctccagggaacccaagccctcctggagctcaaggctggcctagaaaatatggcctctcggggcaacatcaacgtcattttagtacagtacaaagctgtgaaggaaacgaaggtgaaagagctgaagagggctaagacggtgctcacggtcattaaatggaaaggggaaaaatccaagtatccacagggcaggttctggaagcagctgcaggtggccatgccagtgaagaaaagtcccaggcggtctagcagtgatgagcagggcctctcgtattcatctttgaaaaatgtatgaaaggaataatgaaaagggtaaaaagaacaaggggtgctccaggaagaaagagtccccccagtcttcattcgcagtttatggtttcataggcaaaaataatggtctaagcctcccaatagggataaatttagggtgactgtgtggctgactattctgcttcctcaggcaacactaaagtttagaaagatatcatcaacgttctgtcaccagtctctgatgccactatgttctttgcaggcaaagacttgttcaatgcgaatttccccttctacattgtctatccctgtttttatatgtctccattctttttaaaatcttaacatatggagcagcctttcctatgaatttaaatatgcctttaaaataagtcactgttgacagggtcatgagtttccgagtatagttttctttttatcttatttttactcgtccgttgaaaagataatcaaggcctacattttagctgaggataatgaacttttttcctcattcggctgtataatacataaccacagcaagactgacatccacttaggatgatacaaagcagtgtaactgaaaatgtttcttttaattgatttaaaggacttgtcttctataccacccttgtcctcatctcaggtaatttatgaaatctatgtaaacttgaaaaatatttcttaatttttgtttttgctccagtcaattcctgattatccacaggtcaacccacattttttcattccttctccctatctgcttatatcgcattgctcatttagagtttgcaggaggctccatactaggttcagtctgaaagaaatctcctaatggtgctatagagagggaggtaacagaaagactcttttagggcatttttctgactcatgaaaagagcacagaaaaggatgtttggcaatttgtcttttaagtcttaaccttgctaatgtgaatactgggaaagtgattttttctcactcgtttttgttgctccattgtaaagggcggaggtcagtcttagtggccttgagagttgcttttggcattaatattctaagagaattaactgtatttcctgtcacctattcactagtgcaggaaatatacttgctccaaataagtcagtatgagaagtcactgtcaatgaaagttgttttgtttgttttcagtaatattttgctgtttttaagacttggaaaactaagtgcagagtttacagagtggtaaatatctatgttacatgtagattatacatatatatacacacgtgtatatgagatatatatcttatatctccacaaacacaaattatatatatacatatccacacacatacattacatatatctgtgtatataaatccacatgcacatgaaatatatatatatatataatttgtgtgtgtgtatgtgtatgtatatgactttaaatagctatgggtacaatattaaaaaccactggaactcttgtccagtttttaaattatgtttttactggaatgtttttgtgtcagtgttttctgtacatattatttgttaattcacagctcacagagtgatagttgtcatagttcttgccttccctaagtttatataaataacttaagtattgctacagtttatctaggttgcagtggcatctgctgtgcacagagcttccatggtcactgctaagcagtagccagccatcgggcattaattgatttcctactatattcccagcagacacatttagaaactaagctatgttaacctcagtgctcaactatttgaactgttgagtgataaaggaaacaaatataactgtaaatgaatcttggtatcctgtgaaacagaataattcgtaatttaagaaagcccttatcccggtaacatgaatgttgatgaacaaatgtaaaattatatcctatatttaagtacccataataaatcatttccctctataagtgttattgattattttaaattgaaaaaagtttcacttggatgaaaaaagtagaaaagtaggtcattcttggatctacttttttttagccttattaatatttttccctattagaaaccacaattactccctctattaacccttcacttactagaccagaaaagaacttattccagataagctttgaatatcaattcttacataaactttaggcaaacagggaatagtctagtcaccaaaggaccattctcttgccaatgctgcattccttttgcacttttggattccatatttatcccaaatgctgttgggcacccctagaaataccttgatgttttttctatttatatgcctgcctttggtacttaattttacaaatgctgtaatataaagcatatcaagtttatgtgatacgtatcattgcaagagaatttgtttcaagatttttttttaatgttccagaagatggccaatagagaacattcaagggaaatggggaaacataatttagagaacaagaacaaaccatgtctcaaatttttttaaaaaaaattaatggttttaaatatatgctatagggacgttccatgcccaggttaacaaagaactgtgatatatagagtgtctaattacaaaatcatatacgatttatttaattctcttctgtattgtaacttagatgattcccaaggactctaataaaaaatcacttcattgtatttggaaacaaaaacatcattcattaattacttattttctttccataggttttaatattttgagagtgtcttttttatttcattcatgaacttttgtatttttcatttttcatttgatttgtaaatttacttatgttaaaaataaaccatttattttcagctttgaatttt

SEQ ID NO: 65709 - DNA, 2244 bp, Artificial Sequence
  derived and/or modified sequence
aaaagaaagtgcggcggaaagtaagaggctcactggggaagactgccgggatccaggtctccggggtccgctttggccagaggcgcggaaggaagcagtgcccggcgacactgcacccatcccggctgcttttgctgcgccctctcagcttcccaagaaagggctttgacctgaagcttgaaattgagtttgggacaataatgtgtctcatggggaattgcatggactccttatcataagccaaatgctgaggtaaagctgcggaattgagtcgtcctccaagaagggagagaaaatgatgtcttgtgacatttccagataactggcatcgtcatgtgatcatcacctaagaactagaacatcagcaggccctagaagcctcactcttgcccctccctttaatatctcaaaggatgacacttctgtggtgtgtagtgagtctctacttttatggaatcctgcaaagtgatgcctcagaacgctgcgatgactggggactagacaccatgaggcaaatccaagtgtttgaagatgagccagctcgcatcaagtgcccactctttgaacacttcttgaaattcaactacagcacagcccattcagctggccttactctgatctggtattggactaggcaggaccgggaccttgaggagccaattaacttccgcctccccgagaaccgcattagtaaggagaaagatgtgctgtggttccggcccactctcctcaatgacactggcaactatacctgcatgttaaggaacactacatattgcagcaaagttgcatttcccttggaagttgttcaaaaagacagctgtttcaattcccccatgaaactcccagtgcataaactgtatatagaatatggcattcagaggatcacttgtccaaatgtagatggatattttccttccagtgtcaaaccgactatcacttggtatatgggctgttataaaatacagaattttaataatgtaatacccgaaggtatgaacttgagtttcctcattgccttaatttcaaataatggaaattacacatgtgttgttacatatccagaaaatggacgtacgtttcatctcaccaggactctgactgtaaaggtagtaggctctccaaaaaatgcagtgccccctgtgatccattcacctaatgatcatgtggtctatgagaaagaaccaggagaggagctactcattccctgtacggtctattttagttttctgatggattctcgcaatgaggtttggtggaccattgatggaaaaaaacctgatgacatcactattgatgtcaccattaacgaaagtataagtcatagtagaacagaagatgaaacaagaactcagattttgagcatcaagaaagttacctctgaggatctcaagcgcagctatgtctgtcatgctagaagtgccaaaggcgaagttgccaaagcagccaaggtgaagcagaaagtgccagctccaagatacacagtggaactggcttgtggttttggagccacagtcctgctagtggtgattctcattgttgtttaccatgtttactggctagagatggtcctattttaccgggctcattttggaacagatgaaaccattttagatggaaaagagtatgatatttatgtatcctatgcaaggaatgcggaagaagaagaatttgtattactgaccctccgtggagttttggagaatgaatttggatacaagctgtgcatctttgaccgagacagtctgcctgggggaattgtcacagatgagactttgagcttcattcagaaaagcagacgcctcctggttgttctaagccccaactacgtgctccagggaacccaagccctcctggagctcaaggctggcctagaaaatatggcctctcggggcaacatcaacgtcattttagtacagtacaaagctgtgaaggaaacgaaggtgaaagagctgaagagggctaagacggtgctcacggtcattaaatggaaaggggaaaaatccaagtatccacagggcaggttctggaagcagctgcaggtggccatgccagtgaagaaaagtcccaggcggtctagcagtgatgagcagggcctctcgtattcatctttgaaaaatgtatgaaaggaataatgaaaagggtaaaaagaacaaggggtgctccaggaagaaagagtccccccagtcttcattcgcagtttatggtttcataggcaaaaataatggtctaagcctcccaata

SEQ ID NO: 65710 - DNA, 4769 bp, Artificial Sequence
  derived and/or modified sequence
aaaagaaagtgcggcggaaagtaagaggctcactggggaagactgccgggatccaggtctccggggtccgctttggccagaggcgcggaaggaagcagtgcccggcgacactgcacccatcccggctgcttttgctgcgccctctcagcttcccaagaaaggcatcgtcatgtgatcatcacctaagaactagaacatcagcaggccctagaagcctcactcttgcccctccctttaatatctcaaaggatgacacttctgtggtgtgtagtgagtctctacttttatggaatcctgcaaagtgatgcctcagaacgctgcgatgactggggactagacaccatgaggcaaatccaagtgtttgaagatgagccagctcgcatcaagtgcccactctttgaacacttcttgaaattcaactacagcacagcccattcagctggccttactctgatctggtattggactaggcaggaccgggaccttgaggagccaattaacttccgcctccccgagaaccgcattagtaaggagaaagatgtgctgtggttccggcccactctcctcaatgacactggcaactatacctgcatgttaaggaacactacatattgcagcaaagttgcatttcccttggaagttgttcaaaaagacagctgtttcaattcccccatgaaactcccagtgcataaactgtatatagaatatggcattcagaggatcacttgtccaaatgtagatggatattttccttccagtgtcaaaccgactatcacttggtatatgggctgttataaaatacagaattttaataatgtaatacccgaaggtatgaacttgagtttcctcattgccttaatttcaaataatggaaattacacatgtgttgttacatatccagaaaatggacgtacgtttcatctcaccaggactctgactgtaaaggtagtaggctctccaaaaaatgcagtgccccctgtgatccattcacctaatgatcatgtggtctatgagaaagaaccaggagaggagctactcattccctgtacggtctattttagttttctgatggattctcgcaatgaggtttggtggaccattgatggaaaaaaacctgatgacatcactattgatgtcaccattaacgaaagtataagtcatagtagaacagaagatgaaacaagaactcagattttgagcatcaagaaagttacctctgaggatctcaagcgcagctatgtctgtcatgctagaagtgccaaaggcgaagttgccaaagcagccaaggtgaagcagaaagtgccagctccaagatacacagtggaactggcttgtggttttggagccacagtcctgctagtggtgattctcattgttgtttaccatgtttactggctagagatggtcctattttaccgggctcattttggaacagatgaaaccattttagatggaaaagagtatgatatttatgtatcctatgcaaggaatgcggaagaagaagaatttgtattactgaccctccgtggagttttggagaatgaatttggatacaagctgtgcatctttgaccgagacagtctgcctgggggaattgtcacagatgagactttgagcttcattcagaaaagcagacgcctcctggttgttctaagccccaactacgtgctccagggaacccaagccctcctggagctcaaggctggcctagaaaatatggcctctcggggcaacatcaacgtcattttagtacagtacaaagctgtgaaggaaacgaaggtgaaagagctgaagagggctaagacggtgctcacggtcattaaatggaaaggggaaaaatccaagtatccacagggcaggttctggaagcagctgcaggtggccatgccagtgaagaaaagtcccaggcggtctagcagtgatgagcagggcctctcgtattcatctttgaaaaatgtatgaaaggaataatgaaaagggtaaaaagaacaaggggtgctccaggaagaaagagtccccccagtcttcattcgcagtttatggtttcataggcaaaaataatggtctaagcctcccaatagggataaatttagggtgactgtgtggctgactattctgcttcctcaggcaacactaaagtttagaaagatatcatcaacgttctgtcaccagtctctgatgccactatgttctttgcaggcaaagacttgttcaatgcgaatttccccttctacattgtctatccctgtttttatatgtctccattctttttaaaatcttaacatatggagcagcctttcctatgaatttaaatatgcctttaaaataagtcactgttgacagggtcatgagtttccgagtatagttttctttttatcttatttttactcgtccgttgaaaagataatcaaggcctacattttagctgaggataatgaacttttttcctcattcggctgtataatacataaccacagcaagactgacatccacttaggatgatacaaagcagtgtaactgaaaatgtttcttttaattgatttaaaggacttgtcttctataccacccttgtcctcatctcaggtaatttatgaaatctatgtaaacttgaaaaatatttcttaatttttgtttttgctccagtcaattcctgattatccacaggtcaacccacattttttcattccttctccctatctgcttatatcgcattgctcatttagagtttgcaggaggctccatactaggttcagtctgaaagaaatctcctaatggtgctatagagagggaggtaacagaaagactcttttagggcatttttctgactcatgaaaagagcacagaaaaggatgtttggcaatttgtcttttaagtcttaaccttgctaatgtgaatactgggaaagtgattttttctcactcgtttttgttgctccattgtaaagggcggaggtcagtcttagtggccttgagagttgcttttggcattaatattctaagagaattaactgtatttcctgtcacctattcactagtgcaggaaatatacttgctccaaataagtcagtatgagaagtcactgtcaatgaaagttgttttgtttgttttcagtaatattttgctgtttttaagacttggaaaactaagtgcagagtttacagagtggtaaatatctatgttacatgtagattatacatatatatacacacgtgtatatgagatatatatcttatatctccacaaacacaaattatatatatacatatccacacacatacattacatatatctgtgtatataaatccacatgcacatgaaatatatatatatatataatttgtgtgtgtgtatgtgtatgtatatgactttaaatagctatgggtacaatattaaaaaccactggaactcttgtccagtttttaaattatgtttttactggaatgtttttgtgtcagtgttttctgtacatattatttgttaattcacagctcacagagtgatagttgtcatagttcttgccttccctaagtttatataaataacttaagtattgctacagtttatctaggttgcagtggcatctgctgtgcacagagcttccatggtcactgctaagcagtagccagccatcgggcattaattgatttcctactatattcccagcagacacatttagaaactaagctatgttaacctcagtgctcaactatttgaactgttgagtgataaaggaaacaaatataactgtaaatgaatcttggtatcctgtgaaacagaataattcgtaatttaagaaagcccttatcccggtaacatgaatgttgatgaacaaatgtaaaattatatcctatatttaagtacccataataaatcatttccctctataagtgttattgattattttaaattgaaaaaagtttcacttggatgaaaaaagtagaaaagtaggtcattcttggatctacttttttttagccttattaatatttttccctattagaaaccacaattactccctctattaacccttcacttactagaccagaaaagaacttattccagataagctttgaatatcaattcttacataaactttaggcaaacagggaatagtctagtcaccaaaggaccattctcttgccaatgctgcattccttttgcacttttggattccatatttatcccaaatgctgttgggcacccctagaaataccttgatgttttttctatttatatgcctgcctttggtacttaattttacaaatgctgtaatataaagcatatcaagtttatgtgatacgtatcattgcaagagaatttgtttcaagatttttttttaatgttccagaagatggccaatagagaacattcaagggaaatggggaaacataatttagagaacaagaacaaaccatgtctcaaatttttttaaaaaaaattaatggttttaaatatatgctatagggacgttccatgcccaggttaacaaagaactgtgatatatagagtgtctaattacaaaatcatatacgatttatttaattctcttctgtattgtaacttagatgattcccaaggactctaataaaaaatcacttcattgtatttggaaacaaaaacatcattcattaattacttattttctttccataggttttaatattttgagagtgtcttttttatttcattcatgaacttttgtatttttcatttttcatttgatttgtaaatttacttatgttaaaaataaaccatttattttcagctttg

SEQ ID NO: 65711 - DNA, 1713 bp, Artificial Sequence
  derived and/or modified sequence
atgaccctgctgtggtgtgtggtgtccctgtacttctacggcatcctgcagagtgatgccagcgagcgctgtgatgactggggcctggacaccatgaggcagatccaggtgtttgaagatgagcccgcccgcatcaagtgccccctgtttgagcacttcctgaagttcaactacagcacagcccacagcgctggcctgaccctcatctggtactggacccggcaggaccgggacctggaggagcccatcaacttccggctgcctgaaaatcgcatcagcaaggagaaggatgtgctgtggttccggcccaccctgctgaatgacaccggcaactacacctgcatgctgaggaacaccacctactgcagcaaggtggccttccccctggaggtggtgcagaaggacagctgcttcaacagccccatgaagctgcctgtgcacaagctgtacattgaatatggcatccagaggatcacctgccccaacgtggatggctacttccccagctctgtgaagcccaccatcacctggtacatgggctgctacaagatccagaacttcaacaacgtcatccctgagggcatgaacctgtccttcctgattgccctgatcagcaacaatggaaactacacctgtgtggtgacctacccagaaaatggaagaaccttccacctgaccaggaccctgactgtgaaggtggtgggcagccccaagaatgctgtgccccctgtgatccacagccccaatgaccacgtggtgtatgagaaggagcccggggaggagctgctgatcccctgcaccgtgtacttctccttcctgatggacagcagaaatgaggtgtggtggaccattgatggcaagaagccagatgacatcaccattgatgtgaccatcaatgaaagcatcagccacagcaggacagaagatgagaccaggacccagatcctgagcatcaagaaggtgaccagcgaggacctgaagaggagctatgtgtgccacgcccggagcgccaagggggaggtggccaaggccgccaaggtgaagcagaaggtgcctgccccccgctacacagtggagctggcctgtggctttggagccaccgtgctgctggtggtgatcctgattgtggtgtaccacgtgtactggctggagatggtgctcttctaccgggcccactttggaacagatgagaccatcctggatggcaaggagtatgacatctacgtgtcctatgccagaaatgctgaggaggaggagtttgtgctgctgaccctgcggggcgtgctggagaatgaatttggctacaagctgtgcatctttgaccgggacagcctgcccggcggcatcgtgacagatgagaccctgtccttcatccagaagagccggcggctgctggtggtgctgagccccaactacgtgctgcagggcacccaggccctgctggagctgaaggccggcctggagaacatggccagccggggcaacatcaacgtcatcctggtgcagtacaaggctgtgaaggagaccaaggtgaaggagctgaagagggccaagacagtgctgaccgtcatcaagtggaagggggagaagagcaagtacccccagggccgcttctggaagcagctgcaggtggccatgcctgtgaagaagagccccaggaggagcagcagtgatgagcagggcctgagctacagcagcctgaagaatgtgtag

SEQ ID NO: 65712 - DNA, 1713 bp, Artificial Sequence
  derived and/or modified sequence
atgaccctgctgtggtgcgtggtgagcctgtacttctacggcatcctgcagagcgatgcttcggaaaggtgtgacgactggggactggacaccatgaggcagatccaggtgtttgaggatgagccagcgcgtattaagtgtccactgttcgaacattttctcaagtttaattactccacagcccattctgcggggctcacattgatctggtactggacccgccaagatagagatctggaggagcctattaatttccgacttcccgagaatcggatcagtaaagagaaggatgtgctgtggttcaggcctacactgctgaacgataccggaaattatacttgcatgttacgcaatacaacttattgctccaaggtggcatttcctctcgaagtggttcagaaggatagctgcttcaattctcccatgaaacttccggttcacaagctctatatcgagtatggaatacagcggattacttgcccaaacgtggatggatattttccttcttcagtcaaacctaccatcacttggtacatgggttgttacaaaatccaaaacttcaataacgtgatccccgagggcatgaacctgagcttcctcattgctcttatttctaacaacggaaactacacctgcgttgtgacatatcctgaaaatggtaggacctttcatttgacacgaaccctcactgtgaaggttgttgggtctcccaagaatgctgttccaccagtgattcactccccaaatgaccacgttgtgtatgagaaggagcctggcgaagagctcctgatcccctgcaccgtttacttttcttttttaatggattctaggaacgaagtgtggtggacaatcgatggtaagaaaccagacgacattaccattgatgtaactattaacgagagcatctctcacagtagaaccgaggatgaaacaagaacacagattctgtccattaaaaaagtaacctctgaagacctgaaacgcagctacgtttgccacgcccgcagtgcgaagggtgaagtggccaaagcagctaaagtaaagcagaaggtccccgcccccaggtataccgtagaactggcgtgtggttttggcgctactgttcttctggtggtgattctgattgtggtctatcacgtgtattggttggagatggtgctgttctaccgagcccattttgggactgatgagacaatcttagatggaaaggagtatgatatttatgtgtcatatgcccggaacgccgaggaggaagagtttgtgctcttaacactgcgcggtgttttggaaaacgagttcggatataagctgtgtatcttcgatcgcgactcattaccaggcggaattgtgaccgacgaaacactgagtttcatccaaaaaagccggaggttgctggtcgttcttagcccaaattatgtcctgcagggaactcaggcgctccttgagctaaaagctggactggaaaatatggcctctcgtggcaatataaacgttatcctcgttcagtacaaggcagtgaaagagaccaaggtcaaggagttaaagcgagctaagaccgtcctgactgtgattaaatggaagggagagaagtctaaatatccccaggggcgattttggaagcagctgcaggttgctatgcccgtgaagaaaagtcccagaaggagctcctccgatgagcaaggcctctcttattctagtctcaagaatgtgtag

SEQ ID NO: 65713 - DNA, 1713 bp, Artificial Sequence
  derived and/or modified sequence
atgaccctgctgtggtgcgtggtgagcctgtacttctacggcatcctgcagagtgacgcatctgaacgatgcgatgactggggactggatacgatgagacagatccaggtttttgaggatgaaccagcaaggatcaaatgtccactgtttgaacattttcttaagttcaactactcaaccgcccactccgccgggctcacacttatctggtactggactcggcaggatcgggacctcgaggagcccataaattttaggctgcccgagaatcgaatctccaaagagaaggatgtcctctggttccgccctactctccttaatgacacggggaattacacctgtatgttacgaaacactacttactgttcaaaggtggcatttccccttgaagtagtgcagaaggacagctgtttcaacagtccaatgaaacttccggtgcacaaactgtatatcgagtatggaatccagaggattacatgcccaaatgtagacggctactttccttcatctgttaagcctaccattacttggtatatggggtgttataagatacagaatttcaacaatgttattccggagggcatgaatctgagcttcttgattgcactcataagcaataacgggaattatacatgcgtggtcacatatcctgagaacggacgcactttccacttaactcgtacattaactgtgaaggtcgttggatcaccgaaaaatgccgtgccccctgtgattcattctcctaacgaccacgtcgtgtatgaaaaggaaccgggggaggagctgttaatcccctgcactgtgtatttcagttttctgatggacagtcgcaacgaggtctggtggacaatcgacgggaaaaaacctgatgatatcactatagatgtgacaatcaatgagagcattagccattcccgaacagaagatgaaacaagaacgcagatcctgagcataaagaaggtgacttctgaagatctgaaacgttcttacgtttgccatgcccggagcgcgaaaggggaggtggccaaggccgcaaaggtgaagcagaaagtacctgcacctcgatatacagtggagctggcatgtggctttggcgccacagtgctcttggtcgtgatacttatcgttgtctaccacgtgtattggctggagatggtgctattttaccgcgcccattttggaacggacgaaaccatccttgacggcaaagagtatgatatctacgttagttatgcaaggaatgcggaagaagaggagtttgtgctgctgacgctgagaggcgtactcgagaacgagtttggctataaactctgtatatttgatcgggatagcttgccaggcgggattgttaccgacgagaccttgtcttttattcagaagtctcggcggcttctggttgtgctgtccccaaactatgtgctgcagggcacccaggcgctgcttgagctcaaagccggattagagaatatggcctccagaggcaatatcaatgtcattctcgtgcagtataaggctgtaaaagagaccaaagtgaaggagctgaagagggccaagacggttttaactgttatcaagtggaagggggagaaaagcaaatacccgcaaggccgtttctggaagcaactgcaagtggctatgccagtgaagaagtccccgcgacggtcctcaagtgacgagcaggggctgtcctacagttcactaaagaacgtgtag

SEQ ID NO: 65714 - DNA, 1713 bp, Artificial Sequence
  derived and/or modified sequence
atgaccctgctgtggtgcgtggtgagcctgtacttctacggcatcctgcagtcagacgcctccgaacgctgcgacgattgggggctggacactatgaggcagatacaggttttcgaggacgaaccggctaggatcaagtgtcctctgtttgaacatttcctgaagtttaactacagcaccgcccattcggccggactgacattaatttggtattggacgcgccaggacagagacctcgaggagcctataaattttcgactgcccgagaaccgtatcagcaaggagaaggacgtgctgtggttccgtcctaccctcctaaacgataccggcaactatacatgcatgctgaggaataccacgtactgtagcaaggtggcgtttccactggaggtcgtgcaaaaagatagctgcttcaattcacccatgaagctgccagtgcataagctgtacattgagtatggcatccagcggatcacctgtccgaatgtggacggctatttcccaagctctgtgaaaccaaccatcacttggtacatgggatgttataaaatccagaacttcaacaacgtcataccggagggaatgaatctttcctttctcatcgccctgatctctaataacggtaactacacatgtgttgtcacttatccagagaacggtagaacgttccatctgactagaacccttactgtgaaagtcgtgggttcccccaagaacgctgtgcctcctgtgatccatagccccaatgaccacgtagtgtatgagaaagagccaggggaggagcttctcattccgtgtaccgtctattttagtttcttgatggattcccggaatgaggtgtggtggacaatcgatggcaagaaacccgacgacattacaattgacgtcacaataaacgagtctatttcccactctagaactgaggacgagactcgaacccagatcctgtcaattaaaaaagtgaccagtgaggacttgaagagaagctatgtgtgtcacgccagatctgccaagggcgaagtcgccaaggccgccaaggtcaagcagaaagtgcccgccccaagatatacagtggagctggcctgtgggtttggcgccaccgtcctgctagtggtcatcctgattgttgtttaccatgtgtactggctggaaatggtccttttctatcgcgctcattttgggaccgacgagaccattcttgatggtaaagagtacgacatctacgtatcgtatgcccggaacgcagaggaagaagagtttgttctcctcactctgcgcggcgtgctcgaaaatgaattcggctacaaactgtgcatctttgacagagactctcttcctggcggtattgtgacggacgagactctgagcttcatccagaagtctagacgactcctggtagtgctgagtccgaattacgtgctgcagggtacacaggccctcttggagctgaaagccgggctcgaaaacatggcatcgcgcgggaatatcaatgttatcctcgtccagtacaaggcagtgaaagaaactaaggtgaaagagctcaagagagccaagactgtgctgactgtcattaaatggaagggggagaagagcaaatacccacaagggcggttttggaaacagctacaggtcgccatgcccgtcaagaaatctccccgccgctccagcagcgacgagcagggattgagctattcttctctgaaaaacgtgtag

SEQ ID NO: 65715 - DNA, 1713 bp, Artificial Sequence
  derived and/or modified sequence
atgaccctgctgtggtgcgtggtgagcctgtacttctacggcatcctgcagagtgatgcttccgagcggtgtgatgactggggactggacacgatgaggcagatccaggttttcgaagatgagccagcgcgcataaagtgtcccttgtttgaacattttctgaagttcaattattcgaccgctcactccgcaggcctgacgctgatatggtattggacccggcaagacagggacctggaggaaccgataaactttagactgccggaaaaccgcatcagcaaggaaaaggatgtgttgtggttccgaccaaccttactcaacgatactggaaactatacttgcatgctccgaaatactacttactgtagcaaggtggccttcccactcgaggttgttcagaaagatagttgtttcaactctcccatgaagctcccggtccacaaactttacattgagtacggcatccaacgcatcacctgcccgaacgttgatggatactttccatccagcgtgaagccgacgattacctggtatatgggttgctacaagatccagaacttcaataatgtcattccagagggaatgaatctatccttccttatagcactgatttcaaacaacggcaattatacctgcgtggtaacttacccggaaaatggcaggacattccatctgacccggactctgactgtgaaagtcgtggggtcccctaaaaatgcagtcccacctgttatccacagcccgaatgatcacgtggtctacgagaaagagcccggtgaggagcttttgattccttgtactgtctactttagcttcctaatggattcacgaaacgaagtttggtggaccattgacggaaagaaacctgatgacatcacaatcgacgtcactattaatgagagtatctcacacagtagaaccgaagacgaaaccaggacccagatcctgagtattaaaaaggtgacctccgaggacctaaagcgttcctacgtgtgtcacgcacggagcgccaagggagaggtagccaaagctgccaaggtgaagcagaaagtcccagcccccaggtacacagtggagctggcttgcggttttggagccactgtgctgcttgttgtgatcctgattgtggtttaccatgtgtactggctggagatggttctcttctatagagcacactttggaaccgacgagacaattctggatgggaaagagtatgatatttacgtgtcttacgctcggaacgctgaggaagaggaatttgtgctgctcaccttgcgaggagttctcgaaaacgagttcggatataagctgtgtatctttgatagggatagtctcccaggcggtatcgtgaccgacgaaacactctcatttatccagaaatcacggcggctgttagtcgtgctgagtccgaattacgtgctgcagggtacacaggccttactagagctaaaagcgggcctggaaaacatggcctcccggggaaatattaatgttatcctggtgcagtacaaggcagtaaaggagaccaaggttaaagaactcaaaagagccaagaccgtgctgacagttatcaagtggaagggagagaagagcaagtatccccaaggccgcttctggaagcaactgcaggtggctatgccagtaaagaagagcccgaggcgcagctcttccgacgagcagggattaagctatagttctctcaaaaacgtctag

SEQ ID NO: 65716 - DNA, 1713 bp, Artificial Sequence
  derived and/or modified sequence
atgaccctcctgtggtgcgtcgtttccctgtatttttacggtatcttacagagcgacgcctccgagaggtgtgatgactggggcctggacaccatgcgacagatacaggtgtttgaggacgaaccagcgaggatcaagtgccccctttttgagcatttcctcaagttcaactacagcacagcacacagcgccggtctgaccctcatctggtactggacgcgccaagatcgagatctagaagagcctatcaatttccggctacccgagaaccggataagtaaagagaaagacgtgttgtggtttcgccctacgctgcttaatgacactggaaattacacgtgcatgctaagaaacactacatattgttccaaagtggcctttccgctggaagtggtacagaaagattcctgctttaactcccctatgaagctccccgtgcacaagctgtacatcgagtacgggattcaaagaatcacttgccctaacgtcgacgggtacttcccttcatccgtgaagcccaccatcacttggtatatgggatgttataagatacagaacttcaacaacgtgatccccgaggggatgaatctgtccttcctgatcgctttgatcagcaataatggtaattatacctgcgtcgtgacctaccctgaaaacggcagaacattccatctgaccaggacgctgacggtcaaggtggtggggagcccaaagaacgccgtgcctcccgtcattcacagccctaatgatcacgtggtatacgagaaggaacctggtgaggagctgctcatcccttgtactgtatatttttcattcctgatggattccagaaacgaggtttggtggaccattgatgggaagaagcctgatgatataaccatcgatgtcacaattaacgagtccatctcacacagcagaacggaggacgaaaccaggacacagatcctgtccattaagaaagtgacaagcgaggatttgaaaagatcctatgtgtgccatgccagatccgctaagggagaagtggcgaaagcggctaaagtgaaacagaaagtgccggctccacgttacactgtagagctagcttgtgggttcggcgcaactgtgctcctagtcgtcattctgattgtcgtttatcatgtttactggctggaaatggtgctcttttaccgagcacattttggtaccgatgaaactattcttgatggtaaggaatatgacatctacgttagttatgcccgtaacgctgaagaggaggaattcgtgcttttgaccctcaggggagtccttgagaacgagtttggctacaaactctgcatctttgatagggattctctcccgggagggatcgtcacagatgagacactgtccttcatccaaaaatctcgcagactcctggtggtccttagtcccaactacgtgctgcagggaacacaagctctgttggagttaaaggctggactggaaaatatggcttctaggggtaatatcaacgtgattcttgtccagtataaagcagtcaaagagacaaaggtgaaagagcttaagcgggcaaagacagtgctcacagtcatcaagtggaaaggcgagaagagcaaatatccccagggccgattttggaagcagctccaggtcgcgatgccagtaaaaaaaagccctagacggagctcgtccgacgagcagggcctgagctacagtagcctgaaaaatgtgtag

SEQ ID NO: 65717 - DNA, 1713 bp, Artificial Sequence
  derived and/or modified sequence
atgacgttactgtggtgcgtcgtttctctgtatttctacggcatacttcagtctgatgcatctgaaagatgcgacgattgggggctggataccatgcgtcaaatacaggtgtttgaggacgaacccgcaaggatcaaatgccctctgtttgagcactttctgaaatttaactacagcaccgctcatagcgccggtctgacacttatttggtattggacgaggcaagatcgggatctagaagaacctatcaattttaggttaccggaaaataggatttccaaagaaaaggacgtcctgtggttccggcctacactgcttaatgatacaggtaattatacgtgcatgctgagaaatacgacgtattgttctaaggtcgcatttccgcttgaggtggtgcagaaggacagttgctttaactctcccatgaagttgcctgtccacaaattgtacattgaatatgggatccagcgtatcacatgccccaacgtagacggttacttcccctcaagcgtgaaaccaactattacctggtatatgggatgctataagattcagaatttcaataacgtgatcccagaagggatgaatctgtctttcttaatcgctctcatctcgaacaacggcaactatacctgcgtcgtcacataccccgaaaacgggaggacatttcatttaacaagaaccctcaccgtgaaagtggtgggaagccctaagaatgcagtgcccccagttatccacagtccaaacgaccatgtggtatatgagaaggagcccggtgaggaacttctgatcccgtgcactgtgtacttcagtttcttgatggattcgcgaaatgaggtgtggtggacaatagatggcaaaaagccagacgatatcaccatcgacgtgactattaatgaaagcatctcccattcgaggactgaggatgaaacgaggacgcagatcttgtcaatcaaaaaggtgacctccgaagatctgaaacgatcctatgtctgtcacgcaaggtctgctaaaggggaagtggctaaggctgccaaggtgaagcaaaaagttcccgctcccagatataccgtagagttagcttgcggctttggcgcaaccgtactgctggtagttatcctcattgtggtgtatcacgtgtattggctggaaatggttctattctacagagcgcacttcggtacagacgagactatccttgacgggaaagaatacgatatatatgtgtcctatgcccgaaatgccgaggaagaagagtttgtgctcctaacgcttcgaggggtgttagaaaacgagtttggctacaagctgtgcatatttgatcgagattccttgcctggaggcatcgtgaccgacgaaactctgagcttcattcaaaagtcgagacggcttcttgttgtgttgtcacccaattacgtcctacagggaactcaagccctcttagagctaaaagcaggattggaaaacatggcatcgcgaggcaatattaacgtcatcctagtccagtataaggccgtcaaggaaacgaaggtcaaagaactgaaacgcgcaaaaaccgtcttgacagtgataaaatggaaaggggagaaatccaaataccctcaaggccgtttttggaaacagttgcaggtcgccatgccggttaagaagagccctcggaggtcatcaagcgacgaacaggggctgtcttactcaagcctgaagaatgtgtag

SEQ ID NO: 65718 - DNA, 1713 bp, Artificial Sequence
  derived and/or modified sequence
atgaccctcctgtggtgcgtcgtctccctctatttttatggaatattacagtccgatgcatctgagaggtgtgacgattgggggctagacacaatgcgccagatccaggtgttcgaggatgagcctgccaggattaagtgcccactcttcgagcatttccttaagttcaattattccaccgcccattctgccggtctcactcttatctggtattggaccaggcaggatcgtgatctggaagagccgatcaactttagactgccagaaaatcgcattagtaaggagaaagatgtgctgtggttccgccctacactcctgaatgacacgggaaactacacttgtatgttgcggaataccacgtactgctccaaggtcgccttccccctcgaggtagtgcaaaaagactcttgctttaacagcccaatgaaacttccagtgcacaaactgtacattgaatacggcattcagcgaatcacttgtccaaatgtggacgggtacttcccaagctcagtaaaacctactatcacttggtacatggggtgctataaaattcagaactttaacaacgtgattcctgagggaatgaacttaagttttctgattgccctcatctctaataacggtaattacacatgcgtagtcacttacccagaaaatggtcggacattccatctgactcggactctcacagtaaaagtcgtcggctcacctaagaacgccgtgccgcctgtgattcattcccctaacgatcacgtggtgtatgagaaggagccaggcgaggagctcttgataccatgcactgtttatttcagcttcctgatggactctcgaaacgaggtctggtggactattgatggcaaaaagcctgatgatataactatcgacgtgactatcaatgagagcatttctcactccaggactgaggatgaaacaaggacccagattctgtccatcaaaaaggtgacttctgaagacctgaagagatcttacgtttgccacgcaagatccgcgaagggtgaggtcgcaaaagccgctaaagtgaagcagaaagtcccggctcctaggtacaccgtggagcttgcctgcggctttggagccacggttctactggttgtcatactgatcgtggtgtaccacgtgtactggttggagatggtgcttttctacagggcccactttgggacagacgaaacaatactagacggcaaggagtatgacatctatgtgtcttacgccagaaatgcagaggaagaggaattcgtcctgctgacacttcgcggagtcctggaaaatgaatttggctacaagctgtgcattttcgaccgggacagtctgccaggcggtatcgtgacggacgagaccctcagctttattcaaaaatcaaggcggctactggtggtgcttagcccaaattacgtactgcaggggacccaggctctcctggaacttaaggcgggactcgagaatatggcttccagagggaacattaatgttatcctcgtgcaatataaggccgtgaaggaaacaaaggtgaaggaattgaagagagcaaagacggttctgaccgtgatcaaatggaagggtgagaagagcaagtacccccagggtcgtttttggaagcagctccaggtggcaatgccagtgaagaagagtcctaggcggtcaagtagtgacgagcagggactcagctacagctcactgaaaaacgtttag

SEQ ID NO: 65719 - DNA, 1713 bp, Artificial Sequence
  derived and/or modified sequence
atgacactgctttggtgcgtggtgtcgttgtacttctatgggattctccagtcagacgctagtgagagatgcgacgattgggggctggacaccatgcgccagatccaagtcttcgaggacgaacccgcaagaatcaagtgtccactttttgagcacttcttgaagttcaactattctacggcccattcagcaggccttacgctgatttggtactggactaggcaggacagagacctggaggagccaattaacttcaggctccctgaaaataggataagtaaagagaaggacgtcctgtggtttcggccaacgctgctgaatgatacaggcaattatacttgcatgctgaggaacactacttactgttcgaaggtcgcattcccccttgaggtcgttcagaaggactcttgctttaacagtcccatgaagcttcccgtacacaaattgtatatcgagtatgggattcagagaatcacctgtcctaatgtcgacggctatttccctagcagcgtaaagccaacaatcacttggtatatgggatgttacaaaattcaaaattttaacaatgtgataccagagggtatgaatctgagcttcctgatagctctgattagcaataatgggaattacacctgtgtggtgacataccccgaaaatgggaggacgtttcacctgactagaactttgacagttaaggtagtggggagccctaaaaacgcggtaccgccagtcatccatagccctaatgatcacgtagtgtatgagaaggagccaggagaggaactcttgattccttgtacggtatacttcagtttccttatggactccagaaacgaagtgtggtggactattgatggcaagaagcctgatgatatcaccatcgacgtgacgataaatgagtctatctcacactcacggactgaagacgagaccaggactcagattctgagcatcaagaaggttacatccgaggacctcaagagatcttacgtctgccatgccagaagcgctaaaggtgaagtggcaaaggcagcaaaagtgaaacagaaggtacctgcccctcggtacaccgtggagctcgcatgcgggttcggcgctaccgtcctcctggtcgttatactcattgtagtgtaccacgtgtattggttggaaatggtgctgttttatcgtgctcactttggcacagatgagaccattcttgacggtaaagagtacgacatctatgtgtcttacgccagaaatgcagaagaggaagagttcgtactgttgaccctgcggggagttctggagaacgaatttggctataaactgtgcattttcgaccgagattccttgcccggtggcatcgttaccgatgaaactctgtcctttattcaaaagtctaggcggctcttagttgtgctctcgcctaattacgtactgcaaggaacacaggctctcctggagctcaaagccggtctggagaatatggcatccagaggcaacatcaacgtaatactggtgcaatacaaggcagtcaaggaaaccaaggtgaaagaactgaaacgggctaaaaccgtacttacggtgatcaaatggaagggcgagaagtccaagtacccgcagggaagattctggaaacagttacaagtggccatgcccgtgaagaagtcaccccgacgatcgtcttccgacgagcaagggctgtcatacagctctttaaaaaacgtttag

SEQ ID NO: 65720 - DNA, 1713 bp, Artificial Sequence
  derived and/or modified sequence
atgacgcttctgtggtgtgtggtcagcctgtacttctatggtatcctgcagtctgatgcatcagaacgctgtgacgactggggactggataccatgcgccagatacaggtatttgaagatgaacccgctaggatcaaatgcccattattcgaacactttcttaaatttaattatagcactgctcactcagccggactcactctcatttggtactggacccgacaggatcgcgacctcgaagaaccaataaattttagattgcctgagaacagaatatctaaagagaaggatgtattatggtttaggccaaccctgctcaacgatactggcaattacacttgtatgttacgcaacaccacttattgctctaaagtagccttccccctggaagtggtccaaaaagattcatgctttaattcacccatgaaactccccgtgcacaagctctacatcgaatacgggatacagcgcattacttgcccaaatgtggacgggtactttccctcaagtgtgaaaccaaccatcacatggtatatggggtgctacaaaattcaaaattttaataatgtgatcccggaaggtatgaatctgtcatttctgattgccctgataagcaataacgggaactatacttgcgttgttacttatccggagaatggcaggacttttcatctcactagaacactgacggtgaaagtggtcggatccccaaagaacgctgtccctcccgtaatacatagccccaatgaccacgtggtttacgagaaagagccaggcgaagaactgctgattccttgtactgtgtattttagctttttgatggattcccggaatgaggtatggtggaccatagacggtaaaaaacctgatgacatcacaattgatgtgactatcaacgaatcaatttcccactctcgtacagaagacgagacacgcacccagatcctctcaatcaagaaggtaacctctgaagaccttaagcggagctatgtgtgccatgcaagaagtgctaagggtgaggtcgctaaggctgctaaggtcaaacagaaggtgcctgctccgaggtatacggtagagctcgcctgcggctttggggccacagtgctgttggtcgtgatcttaattgtcgtctaccatgtgtactggcttgaaatggtcttattttatagggctcacttcggcaccgatgaaaccattctcgatggtaaagagtacgacatttatgtaagctacgctcgtaacgctgaggaggaagagtttgtgctactgacgctgaggggcgtgctggagaatgaattcggttataagctttgtatctttgatagagattcacttccagggggaatcgttacagatgaaaccctgtcgtttatccagaagagcagacgacttctggtcgttcttagtcctaattacgtgttgcagggaacacaggccctgctagagctgaaagccggattagagaatatggcaagccgtggcaatatcaatgtcattttggtgcaatacaaagcggtgaaagagactaaggtcaaggagttgaagcgcgccaaaacggtattaactgtgataaaatggaaaggtgagaagtccaagtatcctcaggggaggttctggaagcaactgcaagttgccatgcccgtaaagaaatctcctcgaagatcttcatctgacgagcaagggctttcttattcatcactgaaaaacgtttag

SEQ ID NO: 65721 - DNA, 1713 bp, Artificial Sequence
  derived and/or modified sequence
atgacgcttctgtggtgtgtggtcagcctgtacttctatggtatcctgcagtctgatgcatcagaacgctgtgacgactggggactggataccatgcgccagatacaggtatttgaagatgaacccgctaggatcaaatgcccattattcgaacactttcttaaatttaattatagcactgctcactcagccggactcactctcatttggtactggacccgacaggatcgcgacctcgaagaaccaataaattttagattgcctgagaacagaatatctaaagagaaggatgtattatggtttcgccctactctcttaaatgataccggaaattacacttgtatgctgagaaacaccacctactgcagcaaagttgccttcccgcttgaggtggtccagaaggatagttgtttcaatagcccgatgaaacttcccgtacacaaattgtacatagagtacggaatacaacgcattacttgcccaaatgtggatggctacttcccttcctctgtcaagcccactatcacatggtacatgggatgttataaaatccagaacttcaataacgtgatccctgagggtatgaatctgagcttcttgatcgcacttatcagcaacaacggcaattatacatgtgtcgtcacctatcccgaaaacggccgaaccttccatctgaccagaacattaaccgtgaaagtcgtgggcagccctaagaacgccgtgcctcctgtaattcatagccctaacgaccacgtagtatacgagaaagaaccaggcgaggaattgctcattccctgtacagtgtacttctccttcctgatggattccaggaacgaagtttggtggactattgacggcaaaaagcctgatgacatcaccattgacgtcacaatcaacgagagcattagccactcccgtacagaggacgaaaccagaacgcaaatactgagcattaaaaaggtcactagtgaagatcttaaaagaagctatgtatgtcacgccaggtccgctaaaggcgaagtggcaaaggcggccaaagtcaaacagaaagtccctgcgcctcgctacaccgttgagttagcatgtgggttcggtgccaccgttctgctggtagtgattctaatcgtcgtgtaccacgtgtactggctagagatggtccttttctacagagcgcacttcgggactgatgagaccatacttgacgggaaagagtacgacatctacgtcagctatgctcgaaatgccgaagaggaagagtttgttttgctgactctccgaggagtgctggaaaacgagtttgggtacaaattatgcattttcgatagagactccttacctggcggaattgtgaccgacgaaactttgtcctttatccagaagtctagacggctgctggttgtgcttagccctaactatgtactgcagggaacccaggccttattagaactgaaagccggtttggagaacatggcaagcagagggaatattaatgtcatattggtccagtataaggcagtcaaggaaacgaaggttaaagagttaaagcgagcaaagacggtgcttacggtgatcaagtggaagggtgagaagtcgaaatatccccaaggtaggttctggaaacagctacaggttgccatgcccgtgaaaaaaagtccacgaaggtcttcctcagatgagcagggtctatcctactccagcctcaagaatgtgtag

SEQ ID NO: 65722 - DNA, 1713 bp, Artificial Sequence
  derived and/or modified sequence
atgaccctgctgtggtgcgtggtgagcctgtacttctacggcatcctgcagagcgacgccagcgagagatgcgacgactggggcctggacaccatgagacagatccaggtgttcgaggacgagcccgccagaatcaagtgccccctgttcgagcacttcctgaagttcaactacagcaccgcccacagcgccggcctgaccctgatctggtactggaccagacaggacagagacctggaggagcccatcaacttcagactgcccgagaacagaatcagcaaggagaaggacgtgctgtggttcagacccaccctgctgaacgacaccggcaactacacctgcatgctgagaaacaccacctactgcagcaaggtggccttccccctggaggtggtgcagaaggacagctgcttcaacagccccatgaagctgcccgtgcacaagctgtacatcgagtacggcatccagagaatcacctgccccaacgtggacggctacttccccagcagcgtgaagcccaccatcacctggtacatgggctgctacaagatccagaacttcaacaacgtgatccccgagggcatgaacctgagcttcctgatcgccctgatcagcaacaacggcaactacacctgcgtggtgacctaccccgagaacggcagaaccttccacctgaccagaaccctgaccgtgaaggtggtgggcagccccaagaacgccgtgccccccgtgatccacagccccaacgaccacgtggtgtacgagaaggagcccggcgaggagctgctgatcccctgcaccgtgtacttcagcttcctgatggacagcagaaacgaggtgtggtggaccatcgacggcaagaagcccgacgacatcaccatcgacgtgaccatcaacgagagcatcagccacagcagaaccgaggacgagaccagaacccagatcctgagcatcaagaaggtgaccagcgaggacctgaagagaagctacgtgtgccacgccagaagcgccaagggcgaggtggccaaggccgccaaggtgaagcagaaggtgcccgcccccagatacaccgtggagctggcctgcggcttcggcgccaccgtgctgctggtggtgatcctgatcgtggtgtaccacgtgtactggctggagatggtgctgttctacagagcccacttcggcaccgacgagaccatcctggacggcaaggagtacgacatctacgtgagctacgccagaaacgccgaggaggaggagttcgtgctgctgaccctgagaggcgtgctggagaacgagttcggctacaagctgtgcatcttcgacagagacagcctgcccggcggcatcgtgaccgacgagaccctgagcttcatccagaagagcagaagactgctggtggtgctgagccccaactacgtgctgcagggcacccaggccctgctggagctgaaggccggcctggagaacatggccagcagaggcaacatcaacgtgatcctggtgcagtacaaggccgtgaaggagaccaaggtgaaggagctgaagagagccaagaccgtgctgaccgtgatcaagtggaagggcgagaagagcaagtacccccagggcagattctggaagcagctgcaggtggccatgcccgtgaagaagagccccagaagaagcagcagcgacgagcagggcctgagctacagcagcctgaagaacgtgtag

SEQ ID NO: 65723 - protein, 356 aa, Artificial Sequence
  derived and/or modified sequence
MTLLWCVVSLYFYGILQSDASERCDDWGLDTMRQIQVFEDEPARIKCPLFEHFLKFNYSTAHSAGLTLIWYWTRQDRDLEEPINFRLPENRISKEKDVLWFRPTLLNDTGNYTCMLRNTTYCSKVAFPLEVVQKDSCFNSPMKLPVHKLYIEYGIQRITCPNVDGYFPSSVKPTITWYMGCYKIQNFNNVIPEGMNLSFLIALISNNGNYTCVVTYPENGRTFHLTRTLTVKVVGSPKNAVPPVIHSPNDHVVYEKEPGEELLIPCTVYFSFLMDSRNEVWWTIDGKKPDDITIDVTINESISHSRTEDETRTQILSIKKVTSEDLKRSYVCHARSAKGEVAKAAKVKQKGNRCGQ

SEQ ID NO: 65724 - DNA, 1071 bp, Artificial Sequence
  derived and/or modified sequence
atgactctgctgtggtgcgtggttagcctgtacttttacggcattcttcagtcagatgcctctgagagatgtgacgactggggccttgacaccatgcggcagattcaagtgtttgaagatgaacctgcaaggattaaatgcccactatttgagcatttcctgaagttcaactactctacagcccatagcgctggcctaacactaatctggtactggacccgccaagacagagacctggaggaaccaattaacttccggctgcctgagaaccggattagtaaggaaaaagatgtgctttggttccgccctacactcctcaacgatactgggaattacacttgcatgctcagaaatactacctattgctctaaagtcgcttttccactagaggtggtgcaaaaagatagctgctttaattcacctatgaagctacccgtccataagctgtatattgaatacggaatccagaggatcacttgcccaaacgtggatggatatttcccatcttcggttaagccaaccatcacctggtatatgggctgctataaaattcaaaacttcaataacgtcatacccgagggaatgaatctgagctttctcatcgccctcatctcaaacaatggcaactacacttgcgtcgtgacctaccctgagaacggccggacgttccacctcacacgcacgctgacagtgaaggtagttggttctcctaagaacgcggtgcccccagtgatccattctccgaatgaccatgtggtgtacgagaaggaaccgggagaagaactgctaatcccctgtactgtctactttagcttccttatggactcacgcaacgaagtgtggtggactattgatggtaagaagcctgatgacataaccatcgatgtcaccattaatgaatccatatctcacagcagaaccgaggacgagacgcgcactcaaatcctttctatcaagaaagtgacttcagaggacctgaaacggtcttatgtgtgtcatgccagatccgcaaagggtgaggtggcaaaggcagccaaggtgaagcagaaggggaataggtgtggtcagtag

SEQ ID NO: 65725 - DNA, 342 bp, Artificial Sequence
  derived and/or modified sequence
atgaccctgctgtggtgcgtggtttctctgtatttttatgggattcttcagtcggacgctagtgagagatgcgacgattggggtttggacactatgcggcagattcaggtgtttgaagatgagccagcaaggatcaagtgccccctttttgaacacttcctcaagtttaactactctacagctcactccgcagggctgactttaatctggtattggacaaggcaagaccgtgacctggaagagcccatcaatttccgtctgccggaaaatcgcatctcaaaagaaaaagatgtcttatggttccggccaaccttgttgaacgacactgggaactatacttag

SEQ ID NO: 65726 - DNA, 1071 bp, Artificial Sequence
  derived and/or modified sequence
atgacgctgctttggtgtgtggtgagtctctacttctatgggatactacaatcagatgcctccgaaaggtgcgatgattggggcctcgacacaatgcggcagatccaggttttcgaggacgaacccgccaggataaaatgccctctttttgaacacttcttaaagtttaactatagcacggcccacagtgccggtctgaccctgatatggtactggacccggcaagatcgcgatcttgaagagcccatcaacttcaggctccccgaaaatcgcatcagcaaggaaaaggacgtgctttggtttaggcccacgctgctgaatgatacagggaattacacttgcatgcttcggaatacaacctattgcagtaaggtagcctttcctttagaggtcgttcagaaagatagctgcttcaatagccctatgaaactccctgtgcacaagctttatattgagtatggtatacagcggatcacctgtcctaatgtagatggttacttcccttcctctgtcaagcccactatcacctggtatatgggctgttacaagatccagaattttaacaatgttatcccggaaggcatgaatctatcatttctgattgctctcatctccaacaatggcaactatacttgcgtcgttacctacccggagaacggcaggacatttcaccttacacgtaccctgaccgtgaaggttgtcggcagcccaaaaaatgccgtcccacctgtcattcattcacccaatgaccatgtcgtatatgaaaaggagcccggtgaagagttacttattccttgcactgtgtacttctcgttcctcatggattcacgcaatgaggtttggtggactattgatggtaaaaaaccagatgatattactattgacgtcacgatcaatgagagcatttctcactctcgaactgaagatgaaacacgaactcagattctttctattaagaaggtgacctcagaagacctcaagcggagctacgtttgtcacgcgcgcagcgcaaaaggcgaggtagccaaggccgccaaggtaaagcagaaggggaaccgctgtgggcagtag

SEQ ID NO: 65727 - DNA, 438 bp, Artificial Sequence
  derived and/or modified sequence
atgacattactctggtgtgtggtgagcctctatttctatggaattctgcagagcgacgcaagcgagcggtgcgacgactggggactggatacaatgagacagatccaagtttttgaggatgagcctgcacgtatcaagtgcccactgtttgagcatttcctgaagttcaattacagcaccgcccactctgccggactgacactcatttggtactggaccaggcaggaccgggatctggaggagccaatcaatttccgcctccctgaaaacaggatttccaaagagaaggatgtactctggtttagaccaacgctactcaatgacactggcaattatacttgcatgctgaggaatacaacctactgtagcaaggtggctttccccctcgaagtggtccaaaaggattcctgcttcaattcacccatgaaactgccatag

SEQ ID NO: 65728 - DNA, 2048 bp, Artificial Sequence
  derived and/or modified sequence
agactgccgggatccaggtctccggggtccgctttggccagaggcgcggaaggaagcagtgcccggcgacactgcacccatcccggctgcttttgctgcgccctctcagcttcccaagaaaggcatcgtcatgtgatcatcacctaagaactagaacatcagcaggccctagaagcctcactcttgcccctccctttaatatctcaaaggatgacacttctgtggtgtgtagtgagtctctacttttatggaatcctgcaaagtgatgcctcagaacgctgcgatgactggggactagacaccatgaggcaaatccaagtgtttgaagatgagccagctcgcatcaagtgcccactctttgaacacttcttgaaattcaactacagcacagcccattcagctggccttactctgatctggtattggactaggcaggaccgggaccttgaggagccaattaacttccgcctccccgagaaccgcattagtaaggagaaagatgtgctgtggttccggcccactctcctcaatgacactggcaactatacctgcatgttaaggaacactacatattgcagcaaagttgcatttcccttggaagttgttcaaaaagacagctgtttcaattcccccatgaaactcccagtgcataaactgtatatagaatatggcattcagaggatcacttgtccaaatgtagatggatattttccttccagtgtcaaaccgactatcacttggtatatgggctgttataaaatacagaattttaataatgtaatacccgaaggtatgaacttgagtttcctcattgccttaatttcaaataatggaaattacacatgtgttgttacatatccagaaaatggacgtacgtttcatctcaccaggactctgactgtaaaggtagtaggctctccaaaaaatgcagtgccccctgtgatccattcacctaatgatcatgtggtctatgagaaagaaccaggagaggagctactcattccctgtacggtctattttagttttctgatggattctcgcaatgaggtttggtggaccattgatggaaaaaaacctgatgacatcactattgatgtcaccattaacgaaagtataagtcatagtagaacagaagatgaaacaagaactcagattttgagcatcaagaaagttacctctgaggatctcaagcgcagctatgtctgtcatgctagaagtgccaaaggcgaagttgccaaagcagccaaggtgaagcagaaaggtaatagatgcggtcagtgatgaatctctcagctccaaattaacattgtggtgaataaggacaaaaggagagattgagaacaagagagctccagcacctagcccgacggcatctaacccatagtaatgaatcaaacttaaatgaaaaatatgaaagttttcatctatgtaagatactcaaaatattgtttctgatattgttagtaccgtaatgcccaaatgtagctaaaaaaatcgacgtgagtacagtgagacacaattttgtgtctgtacaattatgaaaaattaaaaacaaagaaaatattcaaagctaccaaagatagaaaaaactggtagagccacatattgttggtgaattattaagacccttttaaaaatcattcatggtagacttcaagagtcataaaaaagattgcatcatctgacctaagactttcggaatttttcctgaacaaataacagaaagggaattatataccttttaatattattagaagcattatctgtagttgtaaaacattattaatagcagccatccaattgtatgcaactaattaaggtattgaatgtttattttccaaaaatgcataattataatattattttaaacactatgtatcaatatttaagcaggtttataatataccagcagccacaattgctaaaatgaaaatcatttaaattatgattttaaatggtataaacatgatttctatgttgatagtactatattattctacaataaatggaaattataaagccttcttgtcagaagtgctgctcctaaa

SEQ ID NO: 65729 - DNA, 534 bp, Artificial Sequence
  derived and/or modified sequence
ctcactggggaagactgccgggatccaggtctccggggtccgctttggccagaggcgcggaaggaagcagtgcccggcgacactgcacccatcccggctgcttttgctgcgccctctcagcttcccaagaaagtccttttgcagattgctcagcacaggacatgataattttcatctcggattttggaggaattgatgacacttctgtggtgtgtagtgagtctctacttttatggaatcctgcaaagtgatgcctcagaacgctgcgatgactggggactagacaccatgaggcaaatccaagtgtttgaagatgagccagctcgcatcaagtgcccactctttgaacacttcttgaaattcaactacagcacagcccattcagctggccttactctgatctggtattggactaggcaggaccgggaccttgaggagccaattaacttccgcctccccgagaaccgcattagtaaggagaaagatgtgctgtggttccggcccactctcctcaatgacactggcaactatacc

SEQ ID NO: 65730 - DNA, 1957 bp, Artificial Sequence
  derived and/or modified sequence
tgccgggatccaggtctccggggtccgctttggccagaggcgcggaaggaagcagtgcccggcgacactgcacccatcccggctgcttttgctgcgccctctcagcttcccaagaaaggatgacacttctgtggtgtgtagtgagtctctacttttatggaatcctgcaaagtgatgcctcagaacgctgcgatgactggggactagacaccatgaggcaaatccaagtgtttgaagatgagccagctcgcatcaagtgcccactctttgaacacttcttgaaattcaactacagcacagcccattcagctggccttactctgatctggtattggactaggcaggaccgggaccttgaggagccaattaacttccgcctccccgagaaccgcattagtaaggagaaagatgtgctgtggttccggcccactctcctcaatgacactggcaactatacctgcatgttaaggaacactacatattgcagcaaagttgcatttcccttggaagttgttcaaaaagacagctgtttcaattcccccatgaaactcccagtgcataaactgtatatagaatatggcattcagaggatcacttgtccaaatgtagatggatattttccttccagtgtcaaaccgactatcacttggtatatgggctgttataaaatacagaattttaataatgtaatacccgaaggtatgaacttgagtttcctcattgccttaatttcaaataatggaaattacacatgtgttgttacatatccagaaaatggacgtacgtttcatctcaccaggactctgactgtaaaggtagtaggctctccaaaaaatgcagtgccccctgtgatccattcacctaatgatcatgtggtctatgagaaagaaccaggagaggagctactcattccctgtacggtctattttagttttctgatggattctcgcaatgaggtttggtggaccattgatggaaaaaaacctgatgacatcactattgatgtcaccattaacgaaagtataagtcatagtagaacagaagatgaaacaagaactcagattttgagcatcaagaaagttacctctgaggatctcaagcgcagctatgtctgtcatgctagaagtgccaaaggcgaagttgccaaagcagccaaggtgaagcagaaaggtaatagatgcggtcagtgatgaatctctcagctccaaattaacattgtggtgaataaggacaaaaggagagattgagaacaagagagctccagcacctagcccgacggcatctaacccatagtaatgaatcaaacttaaatgaaaaatatgaaagttttcatctatgtaagatactcaaaatattgtttctgatattgttagtaccgtaatgcccaaatgtagctaaaaaaatcgacgtgagtacagtgagacacaattttgtgtctgtacaattatgaaaaattaaaaacaaagaaaatattcaaagctaccaaagatagaaaaaactggtagagccacatattgttggtgaattattaagacccttttaaaaatcattcatggtagacttcaagagtcataaaaaagattgcatcatctgacctaagactttcggaatttttcctgaacaaataacagaaagggaattatataccttttaatattattagaagcattatctgtagttgtaaaacattattaatagcagccatccaattgtatgcaactaattaaggtattgaatgtttattttccaaaaatgcataattataatattattttaaacactatgtatcaatatttaagcaggtttataatataccagcagccacaattgctaaaatgaaaatcatttaaattatgattttaaatggtataaacatgatttctatgttgatagtactatattattctacaataaatggaaattataaagccttcttgtcagaagtgctgctcctaaa

SEQ ID NO: 65731 - DNA, 523 bp, Artificial Sequence
  derived and/or modified sequence
agatatttcttgggtagtagaaaaagaaatacttcacagagctgtcaaatctccacatcttcagcattaaatatcatgcaaccaaatgatgacacttctgtggtgtgtagtgagtctctacttttatggaatcctgcaaagtgatgcctcagaacgctgcgatgactggggactagacaccatgaggcaaatccaagtgtttgaagatgagccagctcgcatcaagtgcccactctttgaacacttcttgaaattcaactacagcacagcccattcagctggccttactctgatctggtattggactaggcaggaccgggaccttgaggagccaattaacttccgcctccccgagaaccgcattagtaaggagaaagatgtgctgtggttccggcccactctcctcaatgacactggcaactatacctgcatgttaaggaacactacatattgcagcaaagttgcatttcccttggaagttgttcaaaaagacagctgtttcaattcccccatgaaactccca

SEQ ID NO: 65732 - DNA, 1071 bp, Artificial Sequence
  derived and/or modified sequence
atgaccctgctgtggtgtgtggtgtccctgtacttctacggcatcctgcagagtgatgccagcgagcgctgtgatgactggggcctggacaccatgaggcagatccaggtgtttgaagatgagcccgcccgcatcaagtgccccctgtttgagcacttcctgaagttcaactacagcacagcccacagcgctggcctgaccctcatctggtactggacccggcaggaccgggacctggaggagcccatcaacttccggctgcctgaaaatcgcatcagcaaggagaaggatgtgctgtggttccggcccaccctgctgaatgacaccggcaactacacctgcatgctgaggaacaccacctactgcagcaaggtggccttccccctggaggtggtgcagaaggacagctgcttcaacagccccatgaagctgcctgtgcacaagctgtacattgaatatggcatccagaggatcacctgccccaacgtggatggctacttccccagctctgtgaagcccaccatcacctggtacatgggctgctacaagatccagaacttcaacaacgtcatccctgagggcatgaacctgtccttcctgattgccctgatcagcaacaatggaaactacacctgtgtggtgacctacccagaaaatggaagaaccttccacctgaccaggaccctgactgtgaaggtggtgggcagccccaagaatgctgtgccccctgtgatccacagccccaatgaccacgtggtgtatgagaaggagcccggggaggagctgctgatcccctgcaccgtgtacttctccttcctgatggacagcagaaatgaggtgtggtggaccattgatggcaagaagccagatgacatcaccattgatgtgaccatcaatgaaagcatcagccacagcaggacagaagatgagaccaggacccagatcctgagcatcaagaaggtgaccagcgaggacctgaagaggagctatgtgtgccacgcccggagcgccaagggggaggtggccaaggccgccaaggtgaagcagaagggcaacagatgtggccagtag

SEQ ID NO: 65733 - DNA, 342 bp, Artificial Sequence
  derived and/or modified sequence
atgaccctgctgtggtgtgtggtgtccctgtacttctacggcatcctgcagagtgatgccagcgagcgctgtgatgactggggcctggacaccatgaggcagatccaggtgtttgaagatgagcccgcccgcatcaagtgccccctgtttgagcacttcctgaagttcaactacagcacagcccacagcgctggcctgaccctcatctggtactggacccggcaggaccgggacctggaggagcccatcaacttccggctgcctgaaaatcgcatcagcaaggagaaggatgtgctgtggttccggcccaccctgctgaatgacaccggcaactacacctag

SEQ ID NO: 65734 - DNA, 438 bp, Artificial Sequence
  derived and/or modified sequence
atgaccctgctgtggtgtgtggtgtccctgtacttctacggcatcctgcagagtgatgccagcgagcgctgtgatgactggggcctggacaccatgaggcagatccaggtgtttgaagatgagcccgcccgcatcaagtgccccctgtttgagcacttcctgaagttcaactacagcacagcccacagcgctggcctgaccctcatctggtactggacccggcaggaccgggacctggaggagcccatcaacttccggctgcctgaaaatcgcatcagcaaggagaaggatgtgctgtggttccggcccaccctgctgaatgacaccggcaactacacctgcatgctgaggaacaccacctactgcagcaaggtggccttccccctggaggtggtgcagaaggacagctgcttcaacagccccatgaagctgccctag

SEQ ID NO: 65735 - DNA, 1071 bp, Artificial Sequence
  derived and/or modified sequence
atgaccctgctgtggtgcgtggtgagcctgtacttctacggcatcctgcagagtgatgctagcgaaaggtgcgatgactggggtctcgacaccatgcgtcagattcaggtgttcgaggatgagcctgcacggatcaaatgccctttatttgagcatttcctgaagttcaattatagtaccgctcatagtgctggcttaacccttatctggtattggacccggcaggacagggacttggaggagcctatcaattttaggctgccagaaaatagaatcagtaaagagaaggacgtcttgtggtttcggcccactctcctgaatgacactggcaattatacctgcatgctgcgaaacactacgtattgcagcaaggtggctttccctctggaagtcgtgcagaaagactcctgctttaattcacctatgaagctaccagttcacaaattgtatatagagtacggcatccaaagaatcacttgtcctaatgtggacggctactttccctctagtgtgaaaccaacgattacttggtatatgggctgttataagatacaaaatttcaacaatgtaattcctgagggtatgaatctctccttccttatcgcgctcatttccaataacggaaattatacatgcgtcgtgacctacccagagaacggacgcacctttcacctcacaagaactttgactgttaaagtggtgggctcacctaagaacgctgtgcctcctgtcatccattcccccaacgatcacgtggtgtacgaaaaagagcctggagaggagttgttaatcccttgtacagtgtacttcagtttcctgatggactcacgcaacgaggtgtggtggacaatcgacgggaagaaaccggatgatatcaccatcgacgttacaatcaatgaatcgatctctcacagccgaactgaggacgaaacaagaacacagattctctctattaagaaggtgaccagcgaggacttaaagagatcttatgtgtgtcatgctcgctctgcaaagggggaggtcgccaaggctgctaaggttaagcaaaaggggaaccgctgcggacagtag

SEQ ID NO: 65736 - DNA, 342 bp, Artificial Sequence
  derived and/or modified sequence
atgaccctgctgtggtgcgtggtgagcctgtacttctacggcatcctccagtcggatgccagcgagcgctgcgacgattgggggctggacacaatgcgacaaattcaggtttttgaggacgagcccgcacggataaaatgccctctgttcgaacatttcttgaaattcaactattccacagctcactcagccgggttgactctgatatggtactggaccagacaggatcgcgatctagaagagcccatcaattttaggctgccagagaatcggatctccaaagaaaaggacgtgctttggttccgccccacgctgcttaatgacaccgggaattatacatag

SEQ ID NO: 65737 - DNA, 1071 bp, Artificial Sequence
  derived and/or modified sequence
atgaccctgctgtggtgcgtggtgagcctgtacttctacggcatcctgcagtccgacgctagcgaacgctgcgatgactggggactggacacaatgcgccagattcaggtgttcgaggatgaacctgctcggattaaatgcccgctgttcgagcattttctgaagtttaattacagcactgcacacagcgccgggttaacactcatctggtattggacacgtcaggatagagaccttgaagagccaatcaacttccgtctacccgaaaaccgcatcagtaaagagaaggatgtactttggttccgccccacactcctgaacgacacagggaactacacttgcatgctccgtaacactacttattgtagcaaagtcgctttccctctagaggtggtgcaaaaggattcttgttttaattcccccatgaagctccctgtgcacaaactgtatattgagtatggcattcagcggataacctgtcccaatgtcgacggctactttccttcttccgttaagcctaccattacttggtacatgggctgttataagatccagaattttaacaacgtgatacctgaaggtatgaatctgagcttcctgattgccctgatctccaacaatggcaactacacttgtgtagtcacttatcccgagaacgggagaacatttcatctcaccaggactctcaccgtaaaagtggtgggatccccaaaaaacgctgtgccccctgttatacactctcccaacgatcatgtcgtgtacgaaaaggaaccgggggaagaacttctgatcccgtgcaccgtgtacttcagttttcttatggactctaggaacgaagtgtggtggacaatcgacggcaaaaaaccagacgatattacaatcgacgttacaattaacgagtcaattagtcactccagaaccgaggacgagaccagaacccaaattctgtccatcaaaaaagtgacatccgaagaccttaaacggagctatgtgtgtcacgcgcggagcgcaaagggcgaggtggcgaaagcggccaaggtcaaacagaagggtaatagatgcgggcaatag

SEQ ID NO: 65738 - DNA, 438 bp, Artificial Sequence
  derived and/or modified sequence
atgaccctgctgtggtgcgtggtgagcctgtacttctacggcatcctgcagtccgacgcctcggaacggtgtgacgactggggcctggatacaatgaggcagattcaagtcttcgaagacgagccggctagaatcaaatgtcccttgtttgaacactttctaaaattcaattactcaaccgcacactcagcaggcctcaccctcatctggtactggacgcgacaggatagggatttagaagaaccaattaattttcgcctaccagagaacaggatctcaaaagagaaggatgtcctatggttccggcctacgctattgaatgataccggaaactatacttgcatgctgcgaaataccacttattgcagcaaggtcgcatttcctctcgaggtggtgcaaaaagactcttgtttcaattcacctatgaaactgccttag

SEQ ID NO: 65739 - DNA, 1071 bp, Artificial Sequence
  derived and/or modified sequence
atgactctgctgtggtgtgtcgtatctctctacttctacgggatcctgcagagtgatgctagcgagcgctgcgacgactgggggctggacactatgcgtcaaatccaggttttcgaagacgaacctgcacgaatcaagtgtcccctgtttgagcattttctaaaatttaactacagcaccgctcacagtgctgggcttacccttatttggtattggacacggcaggaccgcgatctggaagaacccatcaatttccggttaccagagaaccgcatctcaaaagagaaagatgtgctttggttccgtccaaccttgctgaatgatactggcaactacacatgtatgttgcggaacacaacttactgcagcaaagtcgccttccccctagaggtcgttcaaaaggactcatgtttcaatagtcccatgaagctgcctgtacacaaattatacatcgagtacggtattcagcggattacctgtccaaacgtggacggatatttccctagttcggttaagcccacaataacctggtacatgggttgttataaaatccagaactttaataacgtcattcctgaaggaatgaacctgagtttcctgatagccctgatcagtaataatggcaactacacctgtgtcgttacttaccccgagaatggaagaactttccacctaacccgcactcttacggtgaaggtggtaggatctcccaagaatgctgtccctccggtgatacactccccaaacgatcatgtggtatacgaaaaggaacccggtgaagagttgctgattccttgcacagtctatttttctttcctcatggactcgaggaatgaagtgtggtggactatcgacggcaaaaaaccagatgatatcacaatcgacgtaaccatcaatgagtcgatatctcactcgcggactgaggacgagactcgcacccaaatcttaagcataaagaaggttaccagtgaagacctcaaacggtcatacgtctgccacgccagatccgcaaaaggagaagtggccaaggctgccaaagtgaagcaaaagggaaatcgctgtggtcagtag

SEQ ID NO: 65740 - DNA, 342 bp, Artificial Sequence
  derived and/or modified sequence
atgactctgctgtggtgcgtggtgtctctgtacttttacggtattctccagtcagacgccagcgagcgctgcgacgattggggtctggacacaatgcgtcagattcaagttttcgaagatgaacccgctcgcatcaagtgtccactgtttgaacactttctcaagttcaactattctactgcgcatagcgccggactgacgctcatctggtattggacccgccaggatcgcgacctcgaggagccaatcaattttagactcccagagaatcgcattagcaaggagaaggatgtgctgtggtttagacctacactgcttaatgataccggtaactatacatag

SEQ ID NO: 65741 - DNA, 1071 bp, Artificial Sequence
  derived and/or modified sequence
atgacactcttgtggtgtgttgtatctttatacttttacggcatacttcagagtgacgcgtctgagaggtgtgatgactggggcctggatacaatgaggcaaatccaggtgttcgaagatgagcctgcacggataaagtgtcctctgtttgaacacttcttgaagttcaactactctaccgcacattcagctggcctaacactgatctggtactggacaagacaggacagggacttggaggaacctatcaatttccgtctaccagagaatcggatatctaaagagaaggacgtgttgtggttccggcctaccctgcttaacgacacaggaaactatacctgtatgctgcgaaatacgacatactgctccaaggtagcttttcccctcgaggttgtccagaaggactcctgctttaactcccctatgaaactgccagtgcataagttgtacattgaatatgggattcagcgcatcacctgtcctaatgtggacggttacttcccgagttcagtcaagccgaccataacctggtatatggggtgctacaagattcagaatttcaacaatgtcatacctgaaggcatgaatctgagctttctgatcgccctgatcagcaataacgggaattatacatgcgtggtgacctacccagagaatggaagaactttccacctgactcggacgttaacagtgaaggtggttggttcgcctaagaatgcggtcccacccgtgattcattcgcccaacgaccatgtggtgtacgagaaggaaccaggtgaggagctcctgataccatgcacggtgtatttttcttttttgatggactctaggaatgaggtgtggtggaccatagatggtaaaaaacctgacgacatcacaatagacgtcactataaacgagagcatatctcatagtcgtaccgaagatgagactcgaactcagatcctgtccattaagaaggtcaccagtgaggaccttaagaggtcatacgtctgccacgctagatcggctaaaggcgaggtagcaaaggcagcaaaggtgaaacaaaagggcaatcgatgcggccagtag

SEQ ID NO: 65742 - DNA, 438 bp, Artificial Sequence
  derived and/or modified sequence
atgaccctgctctggtgcgtggttagcctgtacttttacggcatactgcagagcgacgcctccgagagatgcgatgattggggattagatactatgaggcagattcaggttttcgaggacgagccagccaggatcaagtgcccgctctttgagcacttcctgaaatttaactactcaacagctcattccgcgggactcactctgatctggtactggacccgtcaggaccgcgatctagaagagccgattaattttaggttgcccgaaaacaggatctctaaggaaaaggatgttctttggttcagacccactcttctgaatgacactggcaattatacctgtatgctccgaaacacaacctattgcagtaaagtggcattccccttggaggtggtacagaaagactcttgcttcaacagtcccatgaagctcccctag

SEQ ID NO: 65743 - DNA, 1071 bp, Artificial Sequence
  derived and/or modified sequence
atgaccctgctgtggtgcgtggtgagcctgtacttctacggcatcctgcagagcgacgccagcgagagatgcgacgactggggcctggacaccatgagacagatccaggtgttcgaggacgagcccgccagaatcaagtgccccctgttcgagcacttcctgaagttcaactacagcaccgcccacagcgccggcctgaccctgatctggtactggaccagacaggacagagacctggaggagcccatcaacttcagactgcccgagaacagaatcagcaaggagaaggacgtgctgtggttcagacccaccctgctgaacgacaccggcaactacacctgcatgctgagaaacaccacctactgcagcaaggtggccttccccctggaggtggtgcagaaggacagctgcttcaacagccccatgaagctgcccgtgcacaagctgtacatcgagtacggcatccagagaatcacctgccccaacgtggacggctacttccccagcagcgtgaagcccaccatcacctggtacatgggctgctacaagatccagaacttcaacaacgtgatccccgagggcatgaacctgagcttcctgatcgccctgatcagcaacaacggcaactacacctgcgtggtgacctaccccgagaacggcagaaccttccacctgaccagaaccctgaccgtgaaggtggtgggcagccccaagaacgccgtgccccccgtgatccacagccccaacgaccacgtggtgtacgagaaggagcccggcgaggagctgctgatcccctgcaccgtgtacttcagcttcctgatggacagcagaaacgaggtgtggtggaccatcgacggcaagaagcccgacgacatcaccatcgacgtgaccatcaacgagagcatcagccacagcagaaccgaggacgagaccagaacccagatcctgagcatcaagaaggtgaccagcgaggacctgaagagaagctacgtgtgccacgccagaagcgccaagggcgaggtggccaaggccgccaaggtgaagcagaagggcaacagatgcggccagtag

SEQ ID NO: 65744 - DNA, 342 bp, Artificial Sequence
  derived and/or modified sequence
atgaccctgctgtggtgcgtggtgagcctgtacttctacggcatcctgcagagcgacgccagcgagagatgcgacgactggggcctggacaccatgagacagatccaggtgttcgaggacgagcccgccagaatcaagtgccccctgttcgagcacttcctgaagttcaactacagcaccgcccacagcgccggcctgaccctgatctggtactggaccagacaggacagagacctggaggagcccatcaacttcagactgcccgagaacagaatcagcaaggagaaggacgtgctgtggttcagacccaccctgctgaacgacaccggcaactacacctag

SEQ ID NO: 65745 - DNA, 438 bp, Artificial Sequence
  derived and/or modified sequence
atgaccctgctgtggtgcgtggtgagcctgtacttctacggcatcctgcagagcgacgccagcgagagatgcgacgactggggcctggacaccatgagacagatccaggtgttcgaggacgagcccgccagaatcaagtgccccctgttcgagcacttcctgaagttcaactacagcaccgcccacagcgccggcctgaccctgatctggtactggaccagacaggacagagacctggaggagcccatcaacttcagactgcccgagaacagaatcagcaaggagaaggacgtgctgtggttcagacccaccctgctgaacgacaccggcaactacacctgcatgctgagaaacaccacctactgcagcaaggtggccttccccctggaggtggtgcagaaggacagctgcttcaacagccccatgaagctgccctag

SEQ ID NO: 65746 - protein, 687 aa, Artificial Sequence
  derived and/or modified sequence
MTLLWCVVSLYFYGILQSDASERCDDWGLDTMRQIQVFEDEPARIKCPLFEHFLKFNYSTAHSAGLTLIWYWTRQDRDLEEPINFRLPENRISKEKDVLWFRPTLLNDTGNYTCMLRNTTYCSKVAFPLEVVQKDSCFNSPMKLPVHKLYIEYGIQRITCPNVDGYFPSSVKPTITWYMGCYKIQNFNNVIPEGMNLSFLIALISNNGNYTCVVTYPENGRTFHLTRTLTVKVVGSPKNAVPPVIHSPNDHVVYEKEPGEELLIPCTVYFSFLMDSRNEVWWTIDGKKPDDITIDVTINESISHSRTEDETRTQILSIKKVTSEDLKRSYVCHARSAKGEVAKAAKVKQKVPAPRYTVELACGFGATVLLVVILIVVYHVYWLEMVLFYRAHFGTDETILDGKEYDIYVSYARNAEEEEFVLLTLRGVLENEFGYKLCIFDRDSLPGGNTVEAVFDFIQRSRRMIVVLSPDYVTEKSISMLEFKLGVMCQNSIATKLIVVEYRPLEHPHPGILQLKESVSFVSWKGEKSKHSGSKFWKALRLALPLRSLSASSGWNESCSSQSDISLDHVQRRRSRLKEPPELQSSERAAGSPPAPGTMSKHRGKSSATCRCCVTYCEGENHLRNKSRAEIHNQPQWETHLCKPVPQESETQWIQNGTRLEPPAPQISALALHHFTDLSNNNDFYIL

SEQ ID NO: 65747 - DNA, 2064 bp, Artificial Sequence
  derived and/or modified sequence
atgacgctcctatggtgcgtggtctctttgtacttctacggaatccttcaatccgacgctagcgaaaggtgcgacgactggggcctggacacaatgcgccagatccaggttttcgaggatgagcctgctcgaattaagtgtccactatttgagcactttttgaagtttaactacagcacagcccacagcgccggcctgaccttgatttggtactggactaggcaagatcgtgatctcgaggagccgatcaactttcgattgcctgagaacagaataagcaaagagaaagatgtgctctggttcaggcctactctccttaacgacactggaaactatacctgcatgttgcgcaacaccacctattgctctaaggtcgcgtttcccctggaggttgttcaaaaagatagctgtttcaatagcccaatgaaactccccgtgcataaactttacatagagtacgggattcagcggatcacttgtccaaatgtcgatgggtactttccatcctcagtaaagccaaccatcacctggtacatgggatgttacaagattcagaatttcaacaatgtgatacctgagggtatgaacctgagcttcctgattgcattaatcagcaataatgggaactatacatgtgtggttacatatcctgagaatggcagaaccttccacctaaccagaactctgactgttaaggtggtgggtagcccaaaaaacgctgtgccgcctgttatacacagccccaacgaccatgtggtttatgagaaagaacccggagaagagctgctgatcccatgcacagtctacttttcttttctgatggacagcagaaatgaggtatggtggaccattgatgggaagaaaccggacgatattaccattgatgtcaccataaacgagtctatctcccacagtagaactgaagacgagacaaggacgcagattctgtccattaaaaaggtgaccagcgaggacttgaaaaggtcttatgtatgccatgcccgttcagccaagggcgaagtcgccaaagctgccaaggttaagcagaaggttcccgccccgcgatacacagtcgaactagcctgcggcttcggagccaccgtacttctggtggtgattttgatcgtggtgtatcatgtttattggctcgaaatggtgctgttttaccgggctcattttggaacagatgaaacaattctcgatggtaaggaatacgatatttacgtatcttacgctaggaatgcagaagaggaagagtttgtgctcctcaccctgcgaggggtcctggaaaacgaattcggctacaaactgtgcatcttcgaccgggattccttgcccgggggaaatactgttgaggcggtgttcgactttatccagcgctcacggagaatgatagtagtgttgagtcccgactacgttacagaaaaatccatatctatgctggagttcaagctgggagtaatgtgccagaatagcatagccacaaaacttatcgtggtggagtacagaccactcgaacacccccacccggggatcctccaattgaaagaatctgtctcatttgtttcctggaagggcgagaaaagcaaacacagcggcagcaaattctggaaggcccttcgcttagcccttcctctccgctctctctctgccagctccggatggaatgaaagttgctcaagtcagagcgatattagtttggaccacgtccagcgacgaaggtccagactcaaggagcctcctgagctacagtcctctgagagggctgctggttctcctcccgctccgggcaccatgtcaaagcacaggggcaagtcgtcagctacgtgtcgctgttgcgtgacctactgcgaaggtgaaaatcaccttagaaataaaagtagggccgagatccacaaccaaccccaatgggagacgcatctatgcaaacctgtcccacaggagtcagagactcagtggatccaaaatgggactagacttgaaccgcccgctccccagattagcgccttagccttgcaccatttcactgacctgagcaataacaacgacttctacatcctttag

SEQ ID NO: 65748 - DNA, 2064 bp, Artificial Sequence
  derived and/or modified sequence
atgacccttctctggtgcgtggtatccctgtacttctatggaattctccagtccgacgcctctgaaaggtgcgatgattggggcctggacactatgcgccagatccaagtttttgaggatgagccagcccgcatcaagtgccctctatttgagcatttcctgaaattcaactattctactgctcacagtgcaggattgacacttatctggtactggactcgccaggacagggacctcgaagaaccgatcaactttcgcctccccgaaaaccgcatcagcaaagaaaaggatgtactgtggtttcgtccaacactgttgaacgacacaggcaactacacctgtatgttaagaaacactacttactgttccaaggtcgcctttccgctcgaagtcgtccaaaaagattcttgcttcaacagtcctatgaagctgcccgtgcataagctgtacatcgagtacgggatccagagaatcacctgtccaaacgtggatgggtactttccaagtagtgtcaagcctacgatcacctggtacatgggctgttataagatccaaaacttcaataacgtgattccggaaggcatgaaccttagctttctgatcgctctgatttcgaataatggcaattacacttgtgtagtcacttaccctgaaaacgggcgtaccttccaccttacccggactttgacagtcaaggttgtcggaagcccgaagaacgcagtgccacccgtgattcacagccccaacgaccatgtcgtatacgagaaagagcctggtgaggagttgctgatcccctgtacagtttatttttccttcctaatggactcccgcaatgaggtctggtggactatcgacggaaagaagcctgatgatataaccattgatgtgacaatcaacgagtctatctcacacagccgaacggaggatgagacaaggactcaaatactgtccatcaagaaagtcaccagtgaagatcttaaacgaagctatgtctgccatgcgcggtccgcaaaaggcgaggtggccaaggcggcaaaagtaaagcagaaagttcctgcccctcgctatacggtcgagctggcttgcggcttcggggcaacggttttactggtggtgatattgatagttgtataccatgtatactggctggagatggttttgttctacagagcgcattttggaaccgacgaaaccatactcgacggaaaggagtacgacatctatgtctcctacgcaagaaatgccgaagaggaggagttcgtcctgcttactcttaggggggtcctggaaaatgaattcgggtacaaattgtgcatcttcgatcgagattctttacccggaggaaatacagttgaagcggtgttcgatttcattcagcggtctcgccggatgattgttgtcttatccccggattacgttacagaaaagagtatctctatgttggagttcaagctaggtgtgatgtgtcagaactctattgccaccaaactcattgtggtcgagtacaggcctctggaacatcctcaccccggaatcttgcagctgaaagagagcgtgtccttcgtctcatggaagggcgagaaatctaagcattcaggctccaaattttggaaagcactcagactcgccctcccccttaggtctctgtccgcttcgagcgggtggaacgagtcttgctcaagtcaatctgacattagccttgaccacgtgcagcgccggcgctctagactcaaggaaccacccgagttgcagtcgtcggagcgcgcagctggctcaccccccgccccaggaaccatgtccaagcataggggaaaaagcagtgctacatgcaggtgctgcgttacatactgcgaaggggagaaccacttgaggaataaatcacgtgcagagatacataaccagccgcagtgggaaacccacttatgtaagccggtgccccaggaatccgagactcagtggatccaaaacggcaccagactggagccaccagctccacaaatctccgctcttgcactacatcatttcacagatttaagcaataacaacgacttctacattttgtag

SEQ ID NO: 65749 - DNA, 3717 bp, Artificial Sequence
  derived and/or modified sequence
tgccgggatccaggtctccggggtccgctttggccagaggcgcggaaggaagcagtgcccggcgacactgcacccatcccggctgcttttgctgcgccctctcagcttcccaagaaaggcatcgtcatgtgatcatcacctaagaactagaacatcagcaggccctagaagcctcactcttgcccctccctttaatatctcaaaggatgacacttctgtggtgtgtagtgagtctctacttttatggaatcctgcaaagtgatgcctcagaacgctgcgatgactggggactagacaccatgaggcaaatccaagtgtttgaagatgagccagctcgcatcaagtgcccactctttgaacacttcttgaaattcaactacagcacagcccattcagctggccttactctgatctggtattggactaggcaggaccgggaccttgaggagccaattaacttccgcctccccgagaaccgcattagtaaggagaaagatgtgctgtggttccggcccactctcctcaatgacactggcaactatacctgcatgttaaggaacactacatattgcagcaaagttgcatttcccttggaagttgttcaaaaagacagctgtttcaattcccccatgaaactcccagtgcataaactgtatatagaatatggcattcagaggatcacttgtccaaatgtagatggatattttccttccagtgtcaaaccgactatcacttggtatatgggctgttataaaatacagaattttaataatgtaatacccgaaggtatgaacttgagtttcctcattgccttaatttcaaataatggaaattacacatgtgttgttacatatccagaaaatggacgtacgtttcatctcaccaggactctgactgtaaaggtagtaggctctccaaaaaatgcagtgccccctgtgatccattcacctaatgatcatgtggtctatgagaaagaaccaggagaggagctactcattccctgtacggtctattttagttttctgatggattctcgcaatgaggtttggtggaccattgatggaaaaaaacctgatgacatcactattgatgtcaccattaacgaaagtataagtcatagtagaacagaagatgaaacaagaactcagattttgagcatcaagaaagttacctctgaggatctcaagcgcagctatgtctgtcatgctagaagtgccaaaggcgaagttgccaaagcagccaaggtgaagcagaaagtgccagctccaagatacacagtggaactggcttgtggttttggagccacagtcctgctagtggtgattctcattgttgtttaccatgtttactggctagagatggtcctattttaccgggctcattttggaacagatgaaaccattttagatggaaaagagtatgatatttatgtatcctatgcaaggaatgcggaagaagaagaatttgtattactgaccctccgtggagttttggagaatgaatttggatacaagctgtgcatctttgaccgagacagtctgcctgggggaaatacagtggaagcagtttttgatttcattcagagaagcagaaggatgattgttgttctgagccctgactatgtgacagaaaagagcatcagcatgctggagtttaaactgggtgtcatgtgccagaactccattgccaccaagctcattgtggttgagtaccgtccccttgagcacccgcacccaggcattcttcagctcaaagagtctgtgtcttttgtgagctggaagggagaaaagtccaaacattctggctctaaattctggaaagctttgcggttggctcttcccctgagaagtctgagtgccagttctggctggaatgagagctgctcttcccagtctgacatcagtctggatcacgttcaaaggaggagaagtcgtttgaaagagcccccagaacttcagagctcagagagggctgcaggtagccctccagccccaggcacaatgtccaagcaccgagggaagtcctccgccacctgccgctgttgtgtcacctactgtgaaggagagaatcaccttaggaacaagagccgggcagagattcataaccagccccagtgggagacacacctctgtaagcctgttccccaagagtcagaaactcaatggatacaaaatggcaccagattggaaccccctgctccccagatctcagcccttgctcttcatcatttcacggacttatccaataacaacgacttttatatcctataattactgtgtgtggtgggtggtggctactatctctaccaaccctctgtatgtcatgaacctgtgggaaaatctgacatttttatcatctaatggactatcagatttctgtcccctttattgatttttaaaaactatttatttctaggagacaaaagacctgaaggacctgaatccagaattattgcctctaaaggcctcagaagagcacactcttcttgggccctagaaggtcagtatgtgaaagttgcctaaagtctgatcctctatcttgtccaatggtttaaaactgagctaagaatttaaatgtgtttcttttcagtgagttgatcaacctcacattataagtcagtcaggtgtacttgggctatgatgcttacagggtgtatgcattcccagggagcagcatggaaaggagctggttctggtggaagctgtaggacgaagctcaacagaaaacctacagcacatttttcctcaaagaaccaaacatacccacccagggatacatggcgttctctgtctcactgtaaactagtgttctctaaactgcctaacattgttagcatcaataaaattctatttttacgtcattttatttgtactaacaaatttttacatctctctcacccttctacttcctatgattgttgtattcttatctggagagtattccatttcagaaaatggagatttggtttaggtaccagaaaaactaagatgccttttttgtttctctctgatatgtaatgggagagatgtggaaaataaccaaaagagagggagaatgtgacttaaatgaaatggaagtttacaacaatctcatatttttagaactgacagatgaaaaattccgtattgtaagtgatgtagcgtagaaataggtgccttcgtcccattcaggcttctgagaagggataataaattcaagtgcctacaaggatcagaaggtaagagaaaagagaaaatatggccagataccagcttattttacatgctctccatctagaactgatgtgaatagggacataggcacagatagttatttcttctctgtaaacattttcataaactcatataaggcacatggcatttgatttccaagtcaggtagatcattggccctctaagcaactgaagaacacatatttcttaaaaagggtcagcttcaggccgggtgtggtggctcatgcctataatcccagcactttgggaagtcaagacttgtggatcaactgaggtcagttgttcaagagcagcctggccaacattgtgaaaccccatctctacaaaaatacaaaattagccaggtatggtggtgggcacctgtaatcccagctactcaggaggctgaggcaggagaaactcttgaacctaggaggtggaggttgcagtgagccgagatcgtgccactgcactccagacttggtgacagagcaagactccatctt

SEQ ID NO: 65750 - DNA, 2234 bp, Artificial Sequence
  derived and/or modified sequence
aaagggggaaaagaaagtgcggcggaaagtaagaggctcactggggaagactgccgggatccaggtctccggggtccgctttggccagaggcgcggaaggaagcagtgcccggcgacactgcacccatcccggctgcttttgctgcgccctctcagcttcccaagaaaggatgacacttctgtggtgtgtagtgagtctctacttttatggaatcctgcaaagtgatgcctcagaacgctgcgatgactggggactagacaccatgaggcaaatccaagtgtttgaagatgagccagctcgcatcaagtgcccactctttgaacacttcttgaaattcaactacagcacagcccattcagctggccttactctgatctggtattggactaggcaggaccgggaccttgaggagccaattaacttccgcctccccgagaaccgcattagtaaggagaaagatgtgctgtggttccggcccactctcctcaatgacactggcaactatacctgcatgttaaggaacactacatattgcagcaaagttgcatttcccttggaagttgttcaaaaagacagctgtttcaattcccccatgaaactcccagtgcataaactgtatatagaatatggcattcagaggatcacttgtccaaatgtagatggatattttccttccagtgtcaaaccgactatcacttggtatatgggctgttataaaatacagaattttaataatgtaatacccgaaggtatgaacttgagtttcctcattgccttaatttcaaataatggaaattacacatgtgttgttacatatccagaaaatggacgtacgtttcatctcaccaggactctgactgtaaaggtagtaggctctccaaaaaatgcagtgccccctgtgatccattcacctaatgatcatgtggtctatgagaaagaaccaggagaggagctactcattccctgtacggtctattttagttttctgatggattctcgcaatgaggtttggtggaccattgatggaaaaaaacctgatgacatcactattgatgtcaccattaacgaaagtataagtcatagtagaacagaagatgaaacaagaactcagattttgagcatcaagaaagttacctctgaggatctcaagcgcagctatgtctgtcatgctagaagtgccaaaggcgaagttgccaaagcagccaaggtgaagcagaaagtgccagctccaagatacacagtggaactggcttgtggttttggagccacagtcctgctagtggtgattctcattgttgtttaccatgtttactggctagagatggtcctattttaccgggctcattttggaacagatgaaaccattttagatggaaaagagtatgatatttatgtatcctatgcaaggaatgcggaagaagaagaatttgtattactgaccctccgtggagttttggagaatgaatttggatacaagctgtgcatctttgaccgagacagtctgcctgggggaaatacagtggaagcagtttttgatttcattcagagaagcagaaggatgattgttgttctgagccctgactatgtgacagaaaagagcatcagcatgctggagtttaaactgggtgtcatgtgccagaactccattgccaccaagctcattgtggttgagtaccgtccccttgagcacccgcacccaggcattcttcagctcaaagagtctgtgtcttttgtgagctggaagggagaaaagtccaaacattctggctctaaattctggaaagctttgcggttggctcttcccctgagaagtctgagtgccagttctggctggaatgagagctgctcttcccagtctgacatcagtctggatcacgttcaaaggaggagaagtcgtttgaaagagcccccagaacttcagagctcagagagggctgcaggtagccctccagccccaggcacaatgtccaagcaccgagggaagtcctccgccacctgccgctgttgtgtcacctactgtgaaggagagaatcaccttaggaacaagagccgggcagagattcataaccagccccagtgggagacacacctctgtaagcctgttccccaagagtcagaaactcaatggatacaaaatggcaccagattggaaccccctgctccccagatctcagcccttgctcttcatcatttcacggacttatccaataacaacgacttttatatcctataa

SEQ ID NO: 65751 - DNA, 2064 bp, Artificial Sequence
  derived and/or modified sequence
atgaccctgctgtggtgtgtggtgtccctgtacttctacggcatcctgcagagtgatgccagcgagcgctgtgatgactggggcctggacaccatgaggcagatccaggtgtttgaagatgagcccgcccgcatcaagtgccccctgtttgagcacttcctgaagttcaactacagcacagcccacagcgctggcctgaccctcatctggtactggacccggcaggaccgggacctggaggagcccatcaacttccggctgcctgaaaatcgcatcagcaaggagaaggatgtgctgtggttccggcccaccctgctgaatgacaccggcaactacacctgcatgctgaggaacaccacctactgcagcaaggtggccttccccctggaggtggtgcagaaggacagctgcttcaacagccccatgaagctgcctgtgcacaagctgtacattgaatatggcatccagaggatcacctgccccaacgtggatggctacttccccagctctgtgaagcccaccatcacctggtacatgggctgctacaagatccagaacttcaacaacgtcatccctgagggcatgaacctgtccttcctgattgccctgatcagcaacaatggaaactacacctgtgtggtgacctacccagaaaatggaagaaccttccacctgaccaggaccctgactgtgaaggtggtgggcagccccaagaatgctgtgccccctgtgatccacagccccaatgaccacgtggtgtatgagaaggagcccggggaggagctgctgatcccctgcaccgtgtacttctccttcctgatggacagcagaaatgaggtgtggtggaccattgatggcaagaagccagatgacatcaccattgatgtgaccatcaatgaaagcatcagccacagcaggacagaagatgagaccaggacccagatcctgagcatcaagaaggtgaccagcgaggacctgaagaggagctatgtgtgccacgcccggagcgccaagggggaggtggccaaggccgccaaggtgaagcagaaggtgcctgccccccgctacacagtggagctggcctgtggctttggagccaccgtgctgctggtggtgatcctgattgtggtgtaccacgtgtactggctggagatggtgctcttctaccgggcccactttggaacagatgagaccatcctggatggcaaggagtatgacatctacgtgtcctatgccagaaatgctgaggaggaggagtttgtgctgctgaccctgcggggcgtgctggagaatgaatttggctacaagctgtgcatctttgaccgggacagcctgcccggcggcaacacagtggaggccgtgtttgacttcatccagaggagcaggaggatgattgtggtgctgagcccagactatgtgacagagaagagcatctccatgctggagttcaagctgggcgtgatgtgccagaacagcatcgccaccaagctgattgtggtggagtaccggcccctggagcacccccaccctggcatcctgcagctgaaggagagcgtgtcctttgtgtcctggaagggggagaagagcaagcacagcggcagcaagttctggaaggccctgcggctggccctgcccctgcggagcctgagcgccagcagcggctggaatgaaagctgcagcagccagagcgacatcagcctggaccacgtgcagaggagaagaagccggctgaaggagcccccagagctgcagagcagcgagagagctgctggcagccccccagcccctggcaccatgagcaagcaccggggcaagagcagcgccacctgccgctgctgcgtgacctactgtgagggggagaaccacctgaggaacaagagcagagctgagatccacaaccagccccagtgggagacccacctgtgcaagcctgtgccccaggagagcgagacccagtggatccagaatggcacccggctggagcccccagccccccagatcagcgccctggccctgcaccacttcacagacctgagcaacaacaatgacttctacatcctgtag

SEQ ID NO: 65752 - DNA, 2064 bp, Artificial Sequence
  derived and/or modified sequence
atgaccctgctgtggtgcgtggtgagcctgtacttctacggcatccttcagtcagacgccagcgagcggtgtgacgattgggggctggatacgatgagacaaattcaagtgtttgaggacgaacccgcccggatcaaatgtccgctgttcgagcactttctgaaatttaattatagcactgcacacagcgccggcttaacactgatctggtattggactcggcaggatagggacctggaagagcctattaatttccggctgcctgagaaccgcatttctaaggaaaaggacgtcctgtggtttcgcccgactctactgaatgatactggcaattacacttgtatgcttcgaaacaccacttattgcagcaaggttgcttttcccctggaggtggtgcaaaaggacagctgttttaacagccccatgaagctccctgtgcataagctatatatcgagtacggaatccagcgcattacctgtccaaacgtagatggctacttccccagctccgtgaaacccacaataacctggtacatgggttgctataagatacagaactttaataatgtgattcctgaagggatgaatctgagttttcttatagctctgatcagtaacaacggaaactatacgtgtgttgttacatatccagaaaatggaagaacgttccacctgactcgaacattaaccgtcaaagtcgtgggatcacccaagaacgctgtaccccctgtgattcactcccccaatgaccatgtcgtgtatgaaaaggagcctggagaggaactcctgattccctgcaccgtgtatttctcgtttttgatggacagtcggaacgaagtgtggtggaccatcgatgggaagaaaccagacgacatcactatcgacgtcaccataaatgagtccatttcacactcaaggacagaggatgagacccgcactcagatcttgtcaataaagaaagtgacctcagaagacctcaaaaggtcatatgtgtgtcacgcccggtcagctaagggggaagtagctaaagccgctaaggtgaaacagaaggtacccgcacccaggtacactgtggaacttgcgtgcggattcggtgcgactgtgctactggtggtcattctgatagtcgtgtatcacgtatattggcttgaaatggtgttgttttacagggcccacttcggtactgacgagaccatcctggacgggaaggagtatgatatttacgtatcatacgcccgcaatgctgaagaagaagagtttgtgcttctcactctacgcggggtcctcgaaaacgaatttggctataaactctgtattttcgacagggattcccttccaggcggcaacacagtagaagccgtgttcgactttatccagcgaagtcgcaggatgattgtggtactcagtcccgattacgtgaccgaaaaatccatttctatgctagaatttaagcttggggttatgtgccaaaactcgattgccacgaagttgatagtagtggaatacagaccgctcgagcacccgcaccccgggatcctccaactgaaggagtctgtaagcttcgtctcatggaaaggagagaagagtaagcactcaggctcaaagttttggaaagctctccggctcgcactgcctctgcgctctctgtctgcatcttctgggtggaacgagtcttgcagtagccagagtgacatctccctcgaccacgttcagcgccgacgctcccggctcaaagagccgccagaactgcagtcgtccgaaagagcagctggatcccctcctgctcccggtacaatgtctaagcatcgaggcaagtctagcgccacatgtcgatgttgcgtgacttactgtgaaggtgagaatcacctgaggaataaatctagagctgaaatccacaaccagccacagtgggaaacacacttatgcaaacctgtgccccaggaaagtgagacgcagtggatccagaatggaacaaggctggagccacctgccccccagatatctgcgctggcccttcatcatttcactgacctttctaacaataacgacttctatatcttatag

SEQ ID NO: 65753 - DNA, 2064 bp, Artificial Sequence
  derived and/or modified sequence
atgaccctgctgtggtgcgtggtgagcctgtacttctacggcatcctgcagagcgatgcctcagagaggtgtgatgactggggtctggacaccatgcggcagatacaggttttcgaagacgaaccggcccgaatcaaatgccccctctttgaacacttccttaaattcaactatagtacagcacacagcgccggactcaccctgatctggtattggactagacaagatcgcgacttggaggagccaataaattttcggctcccagagaataggatctccaaagagaaggatgtgctgtggttcaggcccaccctgttaaacgataccggtaattatacctgcatgctcaggaacaccacctactgttccaaagtggcatttccgttagaagttgtccaaaaagatagctgcttcaattcccctatgaaactacctgtgcataaactttacatagaatatggcattcagcgtatcacatgtccaaatgtggatggatatttcccttcttcagtaaaaccgacaatcacttggtatatgggctgttataagatccagaattttaacaatgtaatccccgaagggatgaatctgagttttctgatcgcactgattagcaataacgggaattacacgtgtgtggttacgtacccagaaaatggacggacctttcacctcacacgcacattaacagtcaaggtggtgggcagcccaaagaatgccgtgccacctgtgattcactctccaaacgaccacgttgtctacgagaaggaacccggtgaagaactcttgattccgtgcaccgtttatttctcgttcctcatggatagtagaaatgaggtgtggtggaccatcgatggcaaaaaacctgacgacattactatcgatgtcacgataaacgaatctatcagccactctagaaccgaggatgaaacccggacccagattctgtcgattaagaaagtcacaagcgaagacctgaagcggtcttatgtctgccatgctcgctcggctaagggcgaagtagcgaaggccgccaaggttaagcagaaagtgccagccccgcggtacaccgtagaactggcttgcggcttcggtgctacagtattactagtcgtgatactgattgtggtatatcatgtttattggctcgagatggtcctgttttatcgggcacacttcggcactgacgagactattttggacggcaaggaatacgacatctacgtgtcgtatgcgcgtaatgctgaagaggaggagttcgtgttgcttacactgcggggggtgttggaaaacgagtttggttataaactctgcatttttgatcgagactccctcccaggcggcaataccgtcgaggcagtgttcgactttattcagcgctcacggcgcatgattgtggtgctgagcccggactacgtcactgagaagtccatttctatgctggagtttaagctaggggtgatgtgtcaaaattctatcgcaactaaactgattgtggttgaataccgccctctggaacatccacaccctggaatcctgcagctcaaagagtccgtttcttttgtgtcctggaagggagaaaagtcaaaacactcaggttccaaattctggaaggcgcttcgattggccctcccactcaggtccctcagcgcttcgtctgggtggaatgaaagctgcagttcacagagcgacatctcactggaccacgtccaaaggcgtaggtccaggttgaaagagccccccgaactgcagtcatctgaacgggccgctggttcgcccccagctcccggaactatgtccaagcacaggggcaagtcatccgcaacttgtaggtgttgtgttacctactgtgaaggagaaaatcatttaagaaataagtctagagccgaaattcataatcaaccccagtgggaaacacatctttgtaagcccgttcctcaggagagtgagacccaatggatccagaacggcactagacttgagccgcccgccccccagatatccgctctcgcacttcaccactttacagacctgagcaacaataatgacttttatatcctgtag

SEQ ID NO: 65754 - DNA, 2064 bp, Artificial Sequence
  derived and/or modified sequence
atgacactgctatggtgcgtagtttcgctgtacttttatggtatcctgcagagtgacgcaagcgaacgatgtgacgactgggggctggacactatgaggcagatacaagtgttcgaggatgagcccgctcgaattaagtgccccctcttcgaacactttttgaaattcaattatagtacagcacactccgccggattgacccttatctggtactggacacgacaggacagggacctcgaagagccaatcaattttaggcttccagaaaatcggatatctaaagagaaagacgtcttgtggttcagaccgaccctgttgaacgatacgggaaactacacctgtatgctgagaaataccacttattgctctaaagtggccttccccctggaagtggtccagaaggactcatgtttcaattccccaatgaagctacccgtgcacaaactgtatatcgaatatggtattcagcggattacctgtcccaatgtcgacggttatttccccagctcagtgaagcctactataacttggtatatgggctgttataaaatacaaaatttcaataatgtaatccccgaagggatgaatttatcattcctgatcgcactaatcagcaataatggcaattacacatgtgtcgtgacctatcctgagaacggacgaaccttccacctgactcggactttaaccgtaaaggtcgtggggagccccaaaaacgcggtcccaccggtcattcattccccaaatgaccacgttgtctatgagaaggagcctggagaagagttgctgatcccgtgcacagtgtatttcagctttctgatggatagccgaaacgaggtatggtggaccatagacggcaaaaaaccagacgacattaccattgatgtgacgatcaatgaatctatttctcattcgcggaccgaagatgagacaaggacccagattctgtccatcaagaaagttacctcagaagatctcaagcgctcctatgtgtgtcatgcacgatcagccaagggggaagtcgctaaggctgccaaggtgaagcaaaaagtgccagcacctcgctacactgtggagctggcttgtggttttggggctacagtgctccttgtggtgatcctgattgtggtctatcacgtatattggctggagatggtccttttttaccgagctcacttcggcaccgacgaaactattctagatggcaaggagtacgatatctacgtgtcttatgcccgaaatgcagaggaggaagagtttgtcctgctgactcttcggggtgtgttagagaacgaatttggctataagttgtgcatcttcgacagagatagcctgcctggtggaaacaccgtggaggcagtctttgactttatccagaggtcccggagaatgatcgttgtgttatctcctgactacgtgaccgagaagagtataagcatgcttgagtttaagcttggggtgatgtgccagaactctatcgcaaccaaacttatcgtggtcgagtaccgtccactagaacatccacaccccggtatccttcaacttaaagaatcagtgtcctttgtgtcctggaaaggggagaaaagtaagcacagtgggtcaaaattttggaaagctctgagattggctctgcccctgagaagtctgtccgcttccagcggctggaatgaaagctgcagttctcagtctgatatttccctagatcacgtgcagagacggagatctcgccttaaagagccccctgagctgcagtcgagcgagagagcggctggctcacctccagctccagggactatgagcaagcatcgagggaagagctccgcgacttgtaggtgttgtgtgacatactgtgagggcgagaatcacctcagaaataagtcgagagctgagatccacaatcagccacagtgggaaacccatctgtgtaaacccgtccctcaggagagtgaaacccagtggatacagaacggtacacgtctggaaccaccagctccacagatttcagcgcttgctctgcaccatttcacagatctgtcaaacaataacgacttttatattttatag

SEQ ID NO: 65755 - DNA, 2064 bp, Artificial Sequence
  derived and/or modified sequence
atgacattattgtggtgcgttgtgtccttatacttttacggcattctgcagagtgacgcgtcagaaaggtgtgatgattggggccttgatacaatgaggcaaatacaggtttttgaagacgaacccgctaggataaagtgtccactattcgagcattttcttaagtttaattactctactgcccacagcgctgggctcaccctcatctggtactggacaagacaagaccgggatttagaggagcccataaatttcagactgcccgaaaataggatcagcaaggagaaggacgtgctctggtttcgcccaactcttcttaacgatactggtaactatacctgcatgcttaggaatactacttactgctctaaggtggcatttccgctcgaggtagtgcaaaaggactcatgctttaacagccccatgaaactcccggttcataagctttacattgagtatggtattcagcgcataacgtgtcccaatgttgacggctacttccctagctctgtgaagcccaccatcacatggtatatgggctgctacaaaatccaaaacttcaataacgtgattcccgaggggatgaacctctcattccttatcgcacttatttccaataacggcaattacacctgtgtcgtcacgtatccggaaaacggacgaacatttcatctcaccagaactctgacagtcaaagtagtcggaagcccaaagaacgctgtgccccctgtgatccactcccctaacgaccacgtggtgtacgaaaaagagcctggcgaagaactgctgattccgtgtaccgtgtacttctcattcctgatggatagcaggaacgaagtctggtggacaatcgacggcaaaaagccagatgacattacaatcgatgttacaattaatgaaagcatttcccacagccggaccgaagacgaaacccggacccaaatcctcagcattaagaaagtcacttccgaggatctgaagcgctcctacgtgtgtcatgcaagaagcgccaagggagaggtcgccaaggctgctaaagttaaacaaaaagtccctgcccctcgatacaccgtggagctcgcttgcgggtttggagcaacagtgcttcttgtggtaatcctcatagtcgtctaccacgtgtattggttggagatggttctgttttatcgtgcccattttggcactgacgaaaccattctggacggtaaagaatatgacatatatgtctcctacgctagaaacgctgaggaggaagagttcgtgcttttgaccctgcggggtgtcctggaaaacgagttcgggtacaagctctgcattttcgatcgggactctttgccaggtggaaatacagtggaagctgtgtttgacttcattcagaggagccgcaggatgatagtcgtcctgtcgccggattatgtaactgaaaagtctatctcaatgttggagttcaagctgggcgtcatgtgtcagaatagtatcgctaccaaactcatagtggtcgagtatcgtccattagaacaccctcatcctggaatactgcagctgaaggagtctgtgagctttgtgtcttggaagggggagaaatcaaagcactccggctcaaagttttggaaagctctgagacttgctctgcctctgcggtccttgtccgccagcagtggatggaacgaatcttgctccagccagagcgatatcagcttggaccacgttcagcgtagaaggagtaggctcaaggagccacccgaactgcagagttctgagcgagccgcagggtcacccccagctccaggcacaatgtctaagcaccggggaaagtcatccgccacatgcaggtgctgcgttacttactgcgagggtgaaaatcacctacgaaataaaagccgagcagaaattcacaatcagccacagtgggaaacacatctctgcaagcctgtgccccaagaatctgagacgcagtggatccaaaatggcacgcgtctggaaccccctgctcctcagatcagcgcgctcgccctgcaccactttacagacttgagtaataacaacgatttttacattctgtag

SEQ ID NO: 65756 - DNA, 2064 bp, Artificial Sequence
  derived and/or modified sequence
atgaccctgctgtggtgcgtggtgagcctgtacttctacggcatcctgcagagcgacgccagcgagagatgcgacgactggggcctggacaccatgagacagatccaggtgttcgaggacgagcccgccagaatcaagtgccccctgttcgagcacttcctgaagttcaactacagcaccgcccacagcgccggcctgaccctgatctggtactggaccagacaggacagagacctggaggagcccatcaacttcagactgcccgagaacagaatcagcaaggagaaggacgtgctgtggttcagacccaccctgctgaacgacaccggcaactacacctgcatgctgagaaacaccacctactgcagcaaggtggccttccccctggaggtggtgcagaaggacagctgcttcaacagccccatgaagctgcccgtgcacaagctgtacatcgagtacggcatccagagaatcacctgccccaacgtggacggctacttccccagcagcgtgaagcccaccatcacctggtacatgggctgctacaagatccagaacttcaacaacgtgatccccgagggcatgaacctgagcttcctgatcgccctgatcagcaacaacggcaactacacctgcgtggtgacctaccccgagaacggcagaaccttccacctgaccagaaccctgaccgtgaaggtggtgggcagccccaagaacgccgtgccccccgtgatccacagccccaacgaccacgtggtgtacgagaaggagcccggcgaggagctgctgatcccctgcaccgtgtacttcagcttcctgatggacagcagaaacgaggtgtggtggaccatcgacggcaagaagcccgacgacatcaccatcgacgtgaccatcaacgagagcatcagccacagcagaaccgaggacgagaccagaacccagatcctgagcatcaagaaggtgaccagcgaggacctgaagagaagctacgtgtgccacgccagaagcgccaagggcgaggtggccaaggccgccaaggtgaagcagaaggtgcccgcccccagatacaccgtggagctggcctgcggcttcggcgccaccgtgctgctggtggtgatcctgatcgtggtgtaccacgtgtactggctggagatggtgctgttctacagagcccacttcggcaccgacgagaccatcctggacggcaaggagtacgacatctacgtgagctacgccagaaacgccgaggaggaggagttcgtgctgctgaccctgagaggcgtgctggagaacgagttcggctacaagctgtgcatcttcgacagagacagcctgcccggcggcaacaccgtggaggccgtgttcgacttcatccagagaagcagaagaatgatcgtggtgctgagccccgactacgtgaccgagaagagcatcagcatgctggagttcaagctgggcgtgatgtgccagaacagcatcgccaccaagctgatcgtggtggagtacagacccctggagcacccccaccccggcatcctgcagctgaaggagagcgtgagcttcgtgagctggaagggcgagaagagcaagcacagcggcagcaagttctggaaggccctgagactggccctgcccctgagaagcctgagcgccagcagcggctggaacgagagctgcagcagccagagcgacatcagcctggaccacgtgcagagaagaagaagcagactgaaggagccccccgagctgcagagcagcgagagagccgccggcagcccccccgcccccggcaccatgagcaagcacagaggcaagagcagcgccacctgcagatgctgcgtgacctactgcgagggcgagaaccacctgagaaacaagagcagagccgagatccacaaccagccccagtgggagacccacctgtgcaagcccgtgccccaggagagcgagacccagtggatccagaacggcaccagactggagccccccgccccccagatcagcgccctggccctgcaccacttcaccgacctgagcaacaacaacgacttctacatcctgtag

SEQ ID NO: 65757 - protein, 386 aa, Artificial Sequence
  derived and/or modified sequence
MEEEGKKGKKYLGQLTSIPGYLNPSSRTEILHFIDNAKRAHQLPGHLTQEHDAVLSLSAYNVKLAWRDGEDIILRVPIHDIAAVSYVRDDAAHLVVLKTAQDPGISPSQSLCAESSRGLSAGSLSESAVGPVEACCLVILAAESKVAAEELCCLLGQVFQVVYTESTIDFLDRAIFDGASTPTHHLSLHSDDSSTKVDIKETYEVEASTFCFPESVDVGGASPHSKTISESELSASATELLQDYMLTLRTKLSSQEIQQFAALLHEYRNGASIHEFCINLRQLYGDSRKFLLLGLRPFIPEKDSQHFENFLETIGVKDGRGIITDSFGRHRRALSTTSSSTTNGNRATGSSDDRSAPSEGDEWDRMISDISSDIEALGCSMDQDSA

SEQ ID NO: 65758 - DNA, 1161 bp, Artificial Sequence
  derived and/or modified sequence
atggaagaggagggcaaaaaagggaaaaagtacctaggccagctgacatcaattccgggctacttgaatccctcctcgcgaaccgagatactgcacttcattgataacgccaagcgcgcccatcagctgccaggccacctgacacaagaacacgacgccgttctgtcattgtccgcgtataatgttaaactggcctggagagatggcgaagacataatcctccgcgtcccgattcatgacattgctgccgtgagctacgttagggatgacgcagctcacctggtggtcttgaagacggcccaggaccccggcatttcacccagtcagtccctctgcgctgaaagctcaagggggcttagcgcaggttccctgagcgaatcggcagtgggcccagtggaggcatgttgcctagtgatccttgccgccgagtccaaagtggccgccgaggagctttgctgcctgcttggtcaggttttccaggtggtctataccgaatcaaccatcgactttcttgatcgcgccatctttgacggggctagcacccccacccaccacctatcactccactctgatgactcaagtacaaaagtggatattaaagagacttatgaagtggaggcctcaacattttgcttccccgagtcagtggacgtgggcggtgccagtccacatagcaagacgatcagcgaatctgagctgagcgcatcggcaacagagctcctgcaggactatatgctgactttgagaacaaagttgagctcccaagaaatccaacaattcgccgctctgctccacgaatataggaacggcgcgtcgatccatgagttctgtataaacctgagacagttgtatggcgacagcagaaaatttctgcttctgggccttaggccgtttatcccagagaaggattcccagcattttgaaaacttcctagagacaattggagtcaaggacggcagaggtattattacggatagcttcggtcgtcatagacgggctctctctacaacatcgtcctccacaacaaacggcaatcgcgctacgggttcaagtgacgaccggtccgctccgtctgaaggtgacgagtgggaccgaatgatctctgacatctcgtctgacatcgaagcactgggatgttctatggaccaggactctgcttag

SEQ ID NO: 65759 - DNA, 1161 bp, Artificial Sequence
  derived and/or modified sequence
atggaggaggagggcaagaagggcaagaagtacctgggccagctgaccagcatccctggctacctgaaccccagcagcaggacagagatcctgcacttcatcgacaatgccaagagggcccaccagctgcccggccacctgacccaggagcatgatgctgtgctgagcctgagcgcctacaacgtgaagctggcctggagagatggagaggacatcatcctgcgggtgcccatccatgacattgctgctgtgtcctatgtgagagatgatgctgcccacctggtggtgctgaagacagcccaggaccccggcatcagccccagccagagcctgtgtgccgagagcagccggggcctgtctgctggcagcctgtctgagagcgctgtgggccctgtggaggcctgctgcctggtgatcctggccgctgagagcaaggtggccgctgaggagctgtgctgcctgctgggccaggtgttccaggtggtgtacacagagagcaccatcgacttcctggaccgggccatctttgatggagccagcacccccacccaccacctgagcctgcacagtgatgacagcagcaccaaggtggacatcaaggagacctatgaggtggaggccagcaccttctgcttccctgagagcgtggatgtgggcggggccagcccccacagcaagaccatcagcgagagcgagctgagcgccagcgccacagagctgctgcaggactacatgctgaccctgcggaccaagctgagcagccaggagatccagcagtttgctgccctgctgcacgagtacagaaatggagccagcatccacgagttctgcatcaacctgcggcagctgtatggagacagcaggaagttcctgctgctgggcctgcggcccttcatccctgagaaggacagccagcactttgagaacttcctggagaccatcggcgtgaaggatggccggggcatcatcacagacagctttggccgccacagaagagccctgagcaccaccagcagcagcaccaccaatggaaacagagccaccggcagcagtgatgacagaagtgcccccagtgaaggagatgagtgggacaggatgatcagtgacatcagcagtgacatcgaggccctgggctgcagcatggaccaggacagcgcctag

SEQ ID NO: 65760 - DNA, 1161 bp, Artificial Sequence
  derived and/or modified sequence
atggaggaggagggcaagaagggcaagaagtacctgggccagctgacctctattcctggctaccttaacccatctagccgcactgaaattctgcacttcatcgacaacgccaaacgggcccaccaactgccgggccacctcacacaggagcacgatgctgtgctgtctctgtctgcatacaacgtcaaattggcctggcgggatggcgaggatattatcctgcgcgtgcctatccatgatatcgctgcggtatcgtacgtgagggacgatgctgctcatttagttgtcctcaaaactgcccaggaccctggcattagcccaagccagtccctctgtgccgagagctcaaggggcctgtctgcaggtagcctgagcgagagtgccgtggggcctgtagaggcctgctgtctggtgatcctggccgctgagtcaaaagtggccgccgaagaactgtgttgcctgctcggacaggtcttccaggttgtctacactgagagtacaatcgacttcctcgaccgcgcgatatttgacggcgccagcactcccacgcaccacctttcactgcactccgatgacagctccaccaaagttgatatcaaagaaacgtacgaggtggaggcaagcactttttgcttccctgagtccgttgacgtcggtggcgcgtcgcctcactcaaagacaatcagcgagtcagagctttcagctagcgccactgaacttctgcaagattatatgctgacgctcaggacaaagttaagtagtcaggaaatccaacagtttgctgctttacttcacgagtaccgtaacggcgcgtctatccacgaattttgtatcaatctgagacagctgtatggagactcccgaaaatttctgctgctgggccttagacccttcataccagaaaaggacagtcagcacttcgagaatttccttgagactatcggcgtgaaagatgggcgcggcatcatcactgacagcttcggcagacatcgtagagccctgtccactacatcttccagcactactaacggcaaccgagccacagggagctcagacgataggtccgcgccatcggaaggtgacgaatgggaccgaatgatctcggacatcagcagcgacatcgaagctctggggtgcagcatggatcaggattccgcgtag

SEQ ID NO: 65761 - DNA, 1161 bp, Artificial Sequence
  derived and/or modified sequence
atggaagaagaaggaaaaaaggggaagaagtacctggggcaattgacaagcattcctggatatttgaatccatctagccggacggaaatcctgcatttcattgataacgcaaagcgagcccatcagctcccgggacatctcactcaagaacacgacgccgtgctgagcctgagcgcctacaacgtcaagctggcatggcgggacggagaggacatcattctgagagtgccaatccatgacatcgcagctgtgagctacgtgagggatgacgcagcgcatctggtggtgcttaaaaccgctcaagaccccggaatctcaccaagtcaatccctgtgcgccgagtcttctcggggactttcagccggatccttatccgagtcagctgttggccctgtcgaggcttgttgtctcgttatcctggctgctgaaagtaaagtcgccgcagaagaactttgttgcctgctggggcaggtcttccaagtggtctataccgagtctacaattgactttctggatcgcgctatctttgatggagcaagcacgccaacccaccatctgtctctgcactccgatgacagctcgactaaagttgacatcaaagagacctatgaagttgaggccagcaccttctgttttccagagtctgtggatgtcgggggagcttccccccactctaagacaatctctgaatcagagctgagcgcatccgccaccgagttgcttcaagactacatgctcacactaaggacaaagctgtcatcccaggaaatccagcaattcgccgcactgctgcacgaataccggaacggcgcatcaattcacgagttttgcatcaatctgcgacagctatacggggactcacgcaagttcttgctcctagggctgagacccttcatacccgagaaagactctcagcatttcgagaacttcctagaaacaatcggggtaaaagacgggaggggaatcatcaccgattccttcgggagacatcgtcgagccctttctactaccagctccagtacaacgaacgggaatagggctactgggagttcagacgatagaagtgccccttccgaaggtgatgaatgggataggatgatcagtgacatcagtagtgacatcgaagctctcggctgctccatggatcaggattctgcctag

SEQ ID NO: 65762 - DNA, 1719 bp, Artificial Sequence
  derived and/or modified sequence
gcgcggccggggcggagacttcgggcccggctggcgggcggcgccgggagcgcgggggcggcgggcccgggtcgagcatgtagcggctgctggcggcggggctcccggggcgggccgggcgggccgcgggagccgcacgcggcgatatggaagaggagggcaagaagggcaagaagtatttaggtcagttaacgtccataccaggatacctgaatccctccagtaggactgaaatcctgcatttcatagacaatgcaaagagagcccaccagcttccgggacacttgactcaggagcacgatgctgtgctcagcctgtctgcgtacaacgtcaagctggcctggagggacggggaggatatcatcctcagggtgcccatccatgacatcgccgccgtctcctatgttcgggatgacgctgcacacctggtggtcctgaagacagcccaggacccagggatctcccccagccagagtctgtgtgcggaaagttccagaggcctcagtgcaggctccctgtcggagagtgcagttgggcccgtggaggcatgctgcctggtcatcctggctgcagagagcaaggtcgctgcggaggagctttgctgtctgctaggccaggtcttccaggttgtttacacggagtccaccatcgactttctggacagagcgatatttgatggggcctctaccccgacccaccacctgtccctgcacagcgatgactcttctacaaaagtggacattaaggagacctacgaggtggaagccagcactttctgcttccctgaatctgtggatgtgggtggtgcatcaccccacagcaagaccatcagtgagagcgagctgagcgccagcgccactgagctgctgcaggactacatgctgacgctgcgcaccaagctgtcatcacaggagatccagcagtttgcagcactgctgcacgagtaccgcaatggggcctctatccacgagttctgcatcaacctgcggcagctctacggggacagccgcaagttcctgctgcttggtctgaggcccttcatccctgagaaggacagccagcacttcgagaacttcctggagaccattggcgtgaaggatggccgcggcatcatcactgacagctttggcaggcaccggcgggccctgagcaccacatccagttccaccaccaatgggaacagggccacgggcagctctgatgaccggtcggcaccctcagagggggatgagtgggaccgcatgatctcggacatcagcagcgacattgaggcgctgggctgcagcatggaccaggactcagcatgatggacagtggatgggggggcacccacaccttccgcgcagtcgtcataggccttcccagaaggagctgcccagacctgcgtgtcagcccttggtggtggccagggagaggcgcccggtgcagatggccccgggcggcccaggtcctctactgtgaaggagcagggagctgccgagggacacgagcctcagtgcggggtggaaggctctttgccttgtccaccagggctcagccaagccctgcagtgtgtccccgctcggggagggcccggccgagcgggcagggagagccagtcctgtcggctgggcccttggacggctgtcagttttgcacatgatgttcctattgtaactctcagagaccttaaaaagaagtttactgcaatgtgaataatttaatctctggttgccaagc

SEQ ID NO: 65763 - DNA, 1161 bp, Artificial Sequence
  derived and/or modified sequence
atggaggaggagggcaagaagggcaagaagtacctgggccagctgaccagcatccccggctacctgaaccccagcagcagaaccgagatcctgcacttcatcgacaacgccaagagagcccaccagctgcccggccacctgacccaggagcacgacgccgtgctgagcctgagcgcctacaacgtgaagctggcctggagagacggcgaggacatcatcctgagagtgcccatccacgacatcgccgccgtgagctacgtgagagacgacgccgcccacctggtggtgctgaagaccgcccaggaccccggcatcagccccagccagagcctgtgcgccgagagcagcagaggcctgagcgccggcagcctgagcgagagcgccgtgggccccgtggaggcctgctgcctggtgatcctggccgccgagagcaaggtggccgccgaggagctgtgctgcctgctgggccaggtgttccaggtggtgtacaccgagagcaccatcgacttcctggacagagccatcttcgacggcgccagcacccccacccaccacctgagcctgcacagcgacgacagcagcaccaaggtggacatcaaggagacctacgaggtggaggccagcaccttctgcttccccgagagcgtggacgtgggcggcgccagcccccacagcaagaccatcagcgagagcgagctgagcgccagcgccaccgagctgctgcaggactacatgctgaccctgagaaccaagctgagcagccaggagatccagcagttcgccgccctgctgcacgagtacagaaacggcgccagcatccacgagttctgcatcaacctgagacagctgtacggcgacagcagaaagttcctgctgctgggcctgagacccttcatccccgagaaggacagccagcacttcgagaacttcctggagaccatcggcgtgaaggacggcagaggcatcatcaccgacagcttcggcagacacagaagagccctgagcaccaccagcagcagcaccaccaacggcaacagagccaccggcagcagcgacgacagaagcgcccccagcgagggcgacgagtgggacagaatgatcagcgacatcagcagcgacatcgaggccctgggctgcagcatggaccaggacagcgcctag

SEQ ID NO: 65764 - protein, 353 aa, Artificial Sequence
  derived and/or modified sequence
MEEEGKKGKKPGIVSPFKRVFLKGEKSRDKKAHEKVTERRPLHTVVLSLPERVEPDRLLSDYIEKEVKYLGQLTSIPGYLNPSSRTEILHFIDNAKRAHQLPGHLTQEHDAVLSLSAYNVKLAWRDGEDIILRVPIHDIAAVSYVRDDAAHLVVLKTDDSSTKVDIKETYEVEASTFCFPESVDVGGASPHSKTISESELSASATELLQDYMLTLRTKLSSQEIQQFAALLHEYRNGASIHEFCINLRQLYGDSRKFLLLGLRPFIPEKDSQHFENFLETIGVKDGRGIITDSFGRHRRALSTTSSSTTNGNRATGSSDDRSAPSEGDEWDRMISDISSDIEALGCSMDQDSA

SEQ ID NO: 65765 - DNA, 216 bp, Artificial Sequence
  derived and/or modified sequence
atggaagaggagggcaagaaaggcaaaaagcctggcatcgtgagtccctttaaacgcgtgtttctcaagggagagaaaagtcgcgacaagaaggcccatgagaaggtaaccgaacgcaggcctctgcacactgtggttcttagcctgccggagcgcgtggaaccagatcgactgctgagtgattacatcgaaaaggaggtgaaaggcagccactag

SEQ ID NO: 65766 - DNA, 1062 bp, Artificial Sequence
  derived and/or modified sequence
atggaagaggagggaaagaagggtaaaaaaccaggcattgtttcaccatttaaaagggtcttccttaagggagagaagagtagggacaaaaaagcacatgaaaaggtcacggagagacggcccctccacaccgttgtcctctcacttcctgagagggtggaacccgatcgattacttagcgactacattgaaaaagaagtgaagtatctaggccagctcaccagcattcctggctatctcaatcctagctcccggacggagatcctgcattttattgacaatgcaaagcgggcccatcagttacccggccacttgacacaagagcacgacgcagtcctctccttgagcgcctacaacgtgaaactggcatggcgcgacggtgaggatattattctgcgcgtgcctattcatgacattgccgccgtgtcttacgtgcgcgatgacgctgcccacctggtcgtgctcaaaactgatgattcctcaaccaaggtggacatcaaagaaacctacgaggtcgaggcttcaactttttgctttcccgaatccgtggacgtggggggggcctcaccacatagtaagaccatctccgagtctgaactctccgccagtgccactgagctgttacaggattatatgctcacgctgcgtaccaagctgtcatcacaggagatccagcagtttgccgccctgctgcatgagtaccgtaatggagccagcattcacgaattctgtattaacctcagacagttgtacggtgacagccgcaagtttctgttactgggactacgtccatttatccctgaaaaggactcacagcattttgaaaacttcctcgaaacaattggggtgaaagatggcaggggcattatcacagattcgtttggccgccacagacgagcccttagcacgactagctcctctacaaccaatggaaatagggctaccggaagcagtgacgacaggtctgctccctcagaaggggatgagtgggaccgcatgattagcgacataagcagtgacattgaagccctgggttgttcgatggaccaagacagcgcatag

SEQ ID NO: 65767 - DNA, 216 bp, Artificial Sequence
  derived and/or modified sequence
atggaggaggagggcaagaagggcaagaagccaggcatcgtgagccccttcaagagggtcttcctgaagggggagaagagccgggacaagaaggcccacgagaaggtgacagaaagaagacccctgcacacagtggtgctgagcctgcctgagcgggtggagccagaccggctgctgagtgactacatcgagaaggaggtgaagggcagccactag

SEQ ID NO: 65768 - DNA, 1062 bp, Artificial Sequence
  derived and/or modified sequence
atggaggaggagggcaagaagggcaagaagccaggcatcgtgagccccttcaagagggtcttcctgaagggggagaagagccgggacaagaaggcccacgagaaggtgacagaaagaagacccctgcacacagtggtgctgagcctgcctgagcgggtggagccagaccggctgctgagtgactacatcgagaaggaggtgaagtacctgggccagctgaccagcatccctggctacctgaaccccagcagcaggacagagatcctgcacttcatcgacaatgccaagagggcccaccagctgcccggccacctgacccaggagcatgatgctgtgctgagcctgagcgcctacaacgtgaagctggcctggagagatggagaggacatcatcctgcgggtgcccatccatgacattgctgctgtgtcctatgtgagagatgatgctgcccacctggtggtgctgaagacagatgacagcagcaccaaggtggacatcaaggagacctatgaggtggaggccagcaccttctgcttccctgagagcgtggatgtgggcggggccagcccccacagcaagaccatcagcgagagcgagctgagcgccagcgccacagagctgctgcaggactacatgctgaccctgcggaccaagctgagcagccaggagatccagcagtttgctgccctgctgcacgagtacagaaatggagccagcatccacgagttctgcatcaacctgcggcagctgtatggagacagcaggaagttcctgctgctgggcctgcggcccttcatccctgagaaggacagccagcactttgagaacttcctggagaccatcggcgtgaaggatggccggggcatcatcacagacagctttggccgccaccggcgggccctgagcaccaccagcagcagcaccaccaacggcaacagagccaccggcagcagtgatgacagaagtgcccccagtgaaggagatgagtgggacaggatgatcagtgacatcagcagtgacatcgaggccctgggctgcagcatggaccaggacagcgcctag

SEQ ID NO: 65769 - DNA, 216 bp, Artificial Sequence
  derived and/or modified sequence
atggaggaggagggcaagaagggcaagaagcccggcatcgtgagccccttcaaaagagtgtttctaaaaggtgagaaatcacgcgacaagaaagctcacgaaaaggtcactgagaggaggccacttcacacagtagtgttgtctctgcctgagagagtagagcctgatcgtctgttgtcggactacatagagaaagaggtgaaggggtctcattag

SEQ ID NO: 65770 - DNA, 1062 bp, Artificial Sequence
  derived and/or modified sequence
atggaggaggagggcaagaagggcaagaagcccggcatcgtgagcccatttaagcgcgtttttctgaaaggggaaaaatctagagacaaaaaggcgcatgaaaaggttaccgaaagaagaccactgcacactgtggtgctgtctctcccagagcgggtggagccagacaggctgctcagtgactatatagagaaagaagtgaagtacctgggccagcttacttcgattccgggctacctaaatccgagctcaaggactgagatactgcactttattgacaacgcaaagcgcgcacaccagctgcccgggcatctgacgcaggagcatgatgccgtcctgagccttagtgcttacaacgtcaagttggcatggcgtgatggcgaagatataatcctgagggtgccaattcatgacatcgctgctgtaagctacgtccgcgatgatgcagcccacttagtggtactaaaaaccgacgactcatccactaaggttgatataaaagagacatatgaggtcgaggcctccacattttgtttccctgagagtgtggatgtgggcggcgcgagtccgcatagtaagaccatctccgaaagcgaattgagtgcaagcgccacggagctgctgcaggactacatgctcacgcttaggactaagctcagctcacaggaaattcagcaatttgccgctttactacacgagtataggaatggtgcgtcgatccatgaattctgcattaacctccgacagctatacggggattctaggaaatttctcttactcggactcagaccattcattccagaaaaggacagccagcatttcgaaaactttctcgagaccattggggttaaagacgggagaggtattataaccgattcatttgggcgacatcgccgggccctgagcactacttcgagtagcactacgaacggcaacagggccactggcagcagtgacgaccggtccgcaccctccgaaggggatgagtgggacagaatgatctcggatatctcctcagacatcgaggcgcttgggtgctcaatggaccaagacagtgcctag

SEQ ID NO: 65771 - DNA, 216 bp, Artificial Sequence
  derived and/or modified sequence
atggaggaagagggcaaaaagggcaaaaaacccggtatcgtgtcacccttcaaaagggtcttcttgaagggagagaagagtcgtgataagaaagcccacgagaaggtcactgaaaggcgccctttacatacggtagtgctctctctccctgaaagggttgaaccggataggctgttgtcggactacatagaaaaggaagttaagggcagccattag

SEQ ID NO: 65772 - DNA, 1062 bp, Artificial Sequence
  derived and/or modified sequence
atggaggaagaagggaagaaaggaaaaaagccaggcattgtgagcccctttaagagggtgttcctcaagggggaaaaatcccgggacaagaaggctcatgaaaaagtgactgagagacgtccactgcacactgtcgtcttaagcttgcccgagcgtgtagagcccgaccgcctgctgtcagattacatcgagaaggaggtaaaatacctgggccagctgacaagcatacctggatatctgaatccatcctccagaacagagatactgcactttattgataatgccaaacgagcgcaccagcttccaggccatctcacccaggaacatgatgccgtactcagcctctctgcctacaacgtcaaattagcctggcgagatggagaagatatcattctccgcgtccccattcatgacatagcagccgtctcatacgttcgcgatgacgcggcacatctagtagtgctgaagactgacgattctagtacaaaggttgacattaaagagacttacgaagtcgaagcctcaaccttctgctttcctgagtcagtcgatgtgggaggtgctagtccacatagcaaaaccatctctgagtccgagctgagcgcttccgccaccgagttgctgcaggactacatgttgacacttaggacaaagctgtcaagccaggagatccagcagttcgccgctttgctccacgaataccgcaacggagcgtctatacacgagttctgcatcaatctaaggcagttgtatggcgacagtagaaagttcctgttgctgggcctgcggcctttcatacctgaaaaagattcacagcactttgagaacttcttggagactatcggagtcaaggacgggcgaggtattattactgactccttcggacggcatcgacgggctctgagcacgacctcttcaagcaccacaaatgggaatcgggcaactggtagctctgacgatagaagcgctccctctgaaggagacgaatgggatcgaatgatctctgatatttcctccgacatcgaagcgttgggctgctcgatggatcaggactccgcatag

SEQ ID NO: 65773 - DNA, 2844 bp, Artificial Sequence
  derived and/or modified sequence
cccgggtcgagcatgtagcggctgctggcggcggggctcccggggcgggccgggcgggccgcgggagccgcacgcggcgatatggaagaggagggcaagaagggcaagaagcctggaattgtctcgccatttaaacgagtattcctaaaaggtgaaaagagtagagataagaaagcccatgagaaggtgacagagaggcgccctctgcacactgtggtgttgtcattgcctgagcgcgtcgagccagacagactgctgagcgactatattgagaaggaggtaaagggctcccattaatcacatattgatatttattttatttttcatgccctttcatttttctctcatttttcctattctttactcttcccaatgccttctgggaatgtttcaaaccactctccgtcttatgaattcattcctcaactgtattcattcaaccctgaattaaattgtttgtttctactatatctgattggtccttttttataactccttgtccctatttgtttccagtgccctcctacatgcccttgagaatatttattaggattattgtaaattcttgttttctctggcttatcagttcttctccctccagaattagttgtttagtttgtgatcttgcctttccagtgcttgaggtctgtgttccacagatctgtctttattttttccattccctccagcctgggtgacagagtgagactttgcctcaaaaaaacaaaacaaaacaaaacaaactcagacaaacaagatatgtttttgaacaatgaatatgtggatatcaaaattaaatcaataccattcacaatcacttaaaaaatgaaacacgggtataaatcttacaaaacatgaataagatttgtatgctgaaaactatagaacactgatgaaagaaatcaaagatctgaataagtggagagacacactgaattcatggattggaagactcaacctaattagtatgttacttgtccctaagttgatataaatggaccaactccttgaaaagcacaaactactactacaagtcatccaatatgaaataatttgaatagcttgtaactattaaaagtgaattctacaattcctatcaaaatttcagcaagaattttttgtagatataaacaagactattcttaaagtgcagtggcacgatcttaaatttcaagctattcttgaaatttaaatggagaggcaaaataagtagaatagctaataataattttgaaaaagaagaaaatgagaagagtcagcctgtctgatttcaagatagatcatactgctatcacaatcaagactgtggtatctgcagagggactgacacagagatcaggggagcaaaatgaactagaaacagatccacacatatatgcccagctgattcttgacaaaggttcataagcaattcagtggagaagggataggatagccttttaacaaatggtgctggagcagttggacatttgtaggcaaaaattgaaccttgccctgaatttcacaacttaaacacaaaaattaactcaaaatggatcataggcttaaatataaaatacaacttctaggataaaacatagaaaatcttcaggatgcagggctacgcagagttctgagacttgatacctaaagcataattcataaaagaaaaaactgataaactggacttcatcaaaatttaaaactcttgctctataaaagacaatgaaaacatatgctacagactgagaggagatatttttaaaccacatatctgacagagggttggtatctacagtatataaagaactctcaaaactcaacagtaaaacaaacaatccgattaagacataagcaaaagacaggaggagatacttcaatgaagaggatatacagatggcagtaagcacatgaaaatatgctcagcatcattagccatcagggaaatgcacattaaaaccataatgagctgccaatacacacctaacagaatgtttaaaaaaagtagaacacaagatgctggagaagatgtggaggaactggacccctcattcattgctggtagggatgtaaaatggtaccgccactctagaaagcagtctggcagtttcttcaaatctccacgtgcaactacgaacaacttggcaattgcactcctaggcatttatcccagggaaatgaaaatttatgttcacatgaaaacctgcctactaatattcaaaacagttgtattcatagtagcccaaaactggaaacaactccatgtcctttggtggataaatggttaaacaaaatgaggtccatccatgccacagaagactattcaataatacaaagggctgggcatggtggcacctgcctgtagtcccacctactggggaggctgaggctggaggattgcttgagcccaggaagtccaggctgcagtgagccatgatcatgccactgtgctccatcctggatgacagtgagaccctgtcttaaagcaacaacaaaggaacaaactacacagcaacctggatgggcctccagagaattatgttgagtgaaaaaagccgttcctaaaggtttcacactgtatgttcctttctgtaacatctttgaaatgacacagttgctgaggtggagaacagattagggtttgctaggggtggagagaagtaggtgtgcctataaagggcaacaggaggggtcctcacagtgatgggtgctctggctgtgtttacatccatgtcctggtgtgatgtgctgtagttctgcaagatgtcactgctgggggcaatagggtaaagggagcgatggatctccctgtatcatttcttataataagagaatttacaattaccttaaaataaaagtttaatt

SEQ ID NO: 65774 - DNA, 1620 bp, Artificial Sequence
  derived and/or modified sequence
gcgcggccggggcggagacttcgggcccggctggcgggcggcgccgggagcgcgggggcggcgggcccgggtcgagcatgtagcggctgctggcggcggggctcccggggcgggccgggcgggccgcgggagccgcacgcggcgatatggaagaggagggcaagaagggcaagaagcctggaattgtctcgccatttaaacgagtattcctaaaaggtgaaaagagtagagataagaaagcccatgagaaggtgacagagaggcgccctctgcacactgtggtgttgtcattgcctgagcgcgtcgagccagacagactgctgagcgactatattgagaaggaggtaaagtatttaggtcagttaacgtccataccaggatacctgaatccctccagtaggactgaaatcctgcatttcatagacaatgcaaagagagcccaccagcttccgggacacttgactcaggagcacgatgctgtgctcagcctgtctgcgtacaacgtcaagctggcctggagggacggggaggatatcatcctcagggtgcccatccatgacatcgccgccgtctcctatgttcgggatgacgctgcacacctggtggtcctgaagacagatgactcttctacaaaagtggacattaaggagacctacgaggtggaagccagcactttctgcttccctgaatctgtggatgtgggtggtgcatcaccccacagcaagaccatcagtgagagcgagctgagcgccagcgccactgagctgctgcaggactacatgctgacgctgcgcaccaagctgtcatcacaggagatccagcagtttgcagcactgctgcacgagtaccgcaatggggcctctatccacgagttctgcatcaacctgcggcagctctacggggacagccgcaagttcctgctgcttggtctgaggcccttcatccctgagaaggacagccagcacttcgagaacttcctggagaccattggcgtgaaggatggccgcggcatcatcactgacagctttggcaggcaccggcgggccctgagcaccacatccagttccaccaccaatgggaacagggccacgggcagctctgatgaccggtcggcaccctcagagggggatgagtgggaccgcatgatctcggacatcagcagcgacattgaggcgctgggctgcagcatggaccaggactcagcatgatggacagtggatgggggggcacccacaccttccgcgcagtcgtcataggccttcccagaaggagctgcccagacctgcgtgtcagcccttggtggtggccagggagaggcgcccggtgcagatggccccgggcggcccaggtcctctactgtgaaggagcagggagctgccgagggacacgagcctcagtgcggggtggaaggctctttgccttgtccaccagggctcagccaagccctgcagtgtgtccccgctcggggagggcccggccgagcgggcagggagagccagtcctgtcggctgggcccttggacggctgtcagttttgcacatgatgttcctattgtaactctcagagaccttaaaaagaagtttactgcaatgtgaataatttaatctctggttgccaagc

SEQ ID NO: 65775 - DNA, 216 bp, Artificial Sequence
  derived and/or modified sequence
atggaggaggagggcaagaagggcaagaagcccggcatcgtgagccccttcaagagagtgttcctgaagggcgagaagagcagagacaagaaggcccacgagaaggtgaccgagagaagacccctgcacaccgtggtgctgagcctgcccgagagagtggagcccgacagactgctgagcgactacatcgagaaggaggtgaagggcagccactag

SEQ ID NO: 65776 - DNA, 1062 bp, Artificial Sequence
  derived and/or modified sequence
atggaggaggagggcaagaagggcaagaagcccggcatcgtgagccccttcaagagagtgttcctgaagggcgagaagagcagagacaagaaggcccacgagaaggtgaccgagagaagacccctgcacaccgtggtgctgagcctgcccgagagagtggagcccgacagactgctgagcgactacatcgagaaggaggtgaagtacctgggccagctgaccagcatccccggctacctgaaccccagcagcagaaccgagatcctgcacttcatcgacaacgccaagagagcccaccagctgcccggccacctgacccaggagcacgacgccgtgctgagcctgagcgcctacaacgtgaagctggcctggagagacggcgaggacatcatcctgagagtgcccatccacgacatcgccgccgtgagctacgtgagagacgacgccgcccacctggtggtgctgaagaccgacgacagcagcaccaaggtggacatcaaggagacctacgaggtggaggccagcaccttctgcttccccgagagcgtggacgtgggcggcgccagcccccacagcaagaccatcagcgagagcgagctgagcgccagcgccaccgagctgctgcaggactacatgctgaccctgagaaccaagctgagcagccaggagatccagcagttcgccgccctgctgcacgagtacagaaacggcgccagcatccacgagttctgcatcaacctgagacagctgtacggcgacagcagaaagttcctgctgctgggcctgagacccttcatccccgagaaggacagccagcacttcgagaacttcctggagaccatcggcgtgaaggacggcagaggcatcatcaccgacagcttcggcagacacagaagagccctgagcaccaccagcagcagcaccaccaacggcaacagagccaccggcagcagcgacgacagaagcgcccccagcgagggcgacgagtgggacagaatgatcagcgacatcagcagcgacatcgaggccctgggctgcagcatggaccaggacagcgcctag

SEQ ID NO: 65777 - protein, 1301 aa, Artificial Sequence [sequence omitted]

SEQ ID NO: 65778 - DNA, 3906 bp, Artificial Sequence
  derived and/or modified sequence
atgctggacccctcctccagcgaggaggaatcagacgaaggattagaggaggagtcccgagatgtattagtagccgctggctcgagtcagcgggctcctcccgcaccaacccgggagggacgaagggatgcccccggtcgcgccggcggggggggggctgctagatcagtctccccgagcccctccgtcctgtcagagggccgtgacgaacctcagcgccaactggacgacgagcaagaacgaaggatcaggttgcaattatacgtgtttgtggtccggtgtatagcctatcctttcaacgcgaagcagcccactgatatggctcggcggcaacagaaactaaacaaacaacagctccagctgctgaaggaacggttccaagcttttctaaacggggagactcagatagtggccgatgaggcattttgtaacgctgtgaggtcttattatgaagtttttctaaagtctgatagagtggctagaatggtacagtccggcggatgttcggcaaacgatttcagagaagtgttcaaaaagaatatagaaaagagagtccgctctctgccagaaatcgacggccttagtaaagaaaccgtgttgtccagttggatagccaagtacgacgccatatatcgaggggaagaagacctttgcaagcaaccaaaccgcatggcactgtctgccgtatccgagctcattctatctaaagagcagttgtacgagatgttccaacagatcttggggatcaaaaaactggagcaccagctcttgtataatgcatgccaacttgacaatgccgacgagcaagccgcacagatccggcgggaattagatggaagattgcaattggcggataaaatggctaaagaaaggaaattcccgaagttcatcgcgaaggatatggagaacatgtatatcgaggagctcaggtcttcagttaatttactgatggccaacctcgagtcactccctgtctctaaaggtggccctgagtttaagcttcaaaaactcaagcggtcacagaattcggcgttcctggatatcggcgacgaaaacgagatccagttaagcaaaagtgacgtggtcttgtcctttactctcgagatcgtcatcatggaagtccagggcctgaaatctgtagcccctaataggatcgtgtattgtaccatggaagtagaaggggagaagttacagacggatcaggccgaggctagccgtcctcaatgggggactcaaggtgacttcaccacaacccaccccaggccggtggtaaaagttaaattgtttactgagtctacaggggtcctggccttagaggacaaagagttgggtcgcgtcatcctctacccgacctccaattcgagtaagagcgcagaactgcaccgtatggtggttccaaaaaattcacaagacagtgatctaaagatcaaactggctgtaagaatggacaaaccagcccacatgaaacattctggatatctgtacgctctaggccagaaagtttggaagaggtggaaaaagaggtacttcgtgcttgttcaggttagccagtacaccttcgccatgtgttcctaccgggagaaaaagtcggaacctcaagagctgatgcaacttgaaggctacaccgtggattatacagatccacacccaggcctgcaaggaggctgcatgttcttcaatgcggtcaaggagggagacactgttatctttgcatctgacgatgaacaggaccggatcctgtgggtccaggcaatgtaccgcgccacaggtcaatcctataagccggtccctgcgatccaaacccaaaagctgaacccaaagggaggcacgctgcacgccgatgcgcagctatcagagtttactgatgcagacagattccagaaacacggaatggacgaattcattagcgccaacccgtgtaaacttgaccacgccttcctttttcggatcttgcaaaggcaaacattggatcatcggctcaacgatagctatagctgcttgggatggttcagccctgggcaagtcttcgtgcttgacgagtattgcgccaggtatggcgtgcgaggttgtcatagacatctctgttacctggcagagctcatggagcatagtgaaaacggagccgtgatcgaccctactctgctccactactccttcgccttttgcgccagccacgttcatgggaacagacctgacggcatcggtactgttagtgtcgaggagaaggaaagattcgaggagatcaaagagcgactgtcttccctgcttgaaaatcagatttcacattttagatactgctttcctttcggccgtcctgaaggggcactgaaagccactctgagccttctagaacgagtccttatgaaagatatagcaaccccaataccagctgaagaagttaagaaagtggtccggaagtgtctagagaaggccgccttgattaactacaccagattgacagagtacgccaagattgagggtccagccgagaaggagaccgagacgatgaatcaggctagcccagccagaaaattggaggaaatattacacttggccgagctgtgcatcgaggtgcttcagcagaatgaagagcaccatgcggaagccttcgcatggtggcctgacttactggcagaacatgccgagaagttctgggccctttttaccgtcgacatggatactgccttagaagcccagccccaggactcatgggattcatttcccttgttccagctcctgaacaactttttgagaaatgacaccctgttatgtaatggaaaatttcataagcatctacaggagatatttgtgccccttgtagtgagatacgtcgacctgatggagtcttccatcgcacagagcatccataggggatttgagcaagaaacatggcagccagtcaagaacattgctaactccttgccaaacgtagcactgcccaaggtcccgtccctgcccctcaaccttccgcagatccctaacatttcaacagcttcatggatgcccagtttatacgaaagtactaacggaagcgcaacgtccgaggacctgttctggaaactcgacgctttgcaaatgtttgtcttcgacctccactggcctgagcaggagttcgcccaccaccttgagcaaagactcaagctcatggctagtgatatgttggaggcttgtgtgaaacgcactcgaaccgccttcgagctcaaactgcagaaggcttctaagacaaccgacctccgcattcctgcttctgtgtgcaccatgttcaatgtcctggtcgacgccaaaaagcagtctacaaagttgtgcgcgcttgacgggggccaggaacagcagtaccactcaaaaattgacgatttgatcgataactccgttaaagagattattagcctgctggtcagcaagttcgtgagtgtccttgaaggggtgctatccaaactctcacgctatgatgagggaacattttttagcagcattctctccttcaccgtgaaagcagcggccaagtacgtagacgttcccaagcccggcatggatctggccgacacatatattatgttcgtcaggcagaaccaggacatcctgagggaaaaggttaacgaagagatgtatatagagaaattgttcgaccagtggtacagctctagcatgaaagtgatatgcgtgtggcttaccgatagattggatcttcagctgcacatttatcaactgaaaaccctgatcaagatcgtgaagaaaacctatcgggattttagactgcaaggggtcctggaaggcactctgaatagcaagacttacgatacagttcaccggcgactgaccgtagaagaggccacagcatccgtatcagaagggggtgggttgcagggaataacaatgaaggatagcgatgaggaagaagaggggtag

SEQ ID NO: 65779 - DNA, 3906 bp, Artificial Sequence
  derived and/or modified sequence
atgctggaccccagcagcagcgaggaggagagtgatgagggcctggaggaggagagcagagatgtgctggtggccgccggcagcagccagagggcccccccagcccccacccgggagggcagaagagatgcccctggccgggccggcggcggcggggccgcccggtctgtgagccccagccccagcgtgctgtctgagggcagagatgagccccagaggcagctggatgatgagcaggagcggcgcatccggctgcagctgtatgtgtttgtggtgcgctgcatcgcctaccccttcaatgccaagcagcccacagacatggcccggcggcagcagaagctgaacaagcagcagctgcagctgctgaaggagcgcttccaggccttcctgaatggagagacccagatcgtggctgatgaggccttctgcaatgctgtgcgcagctactatgaggtgttcctgaagagtgacagagtggccaggatggtgcagagcggcggctgcagcgccaatgacttccgggaggtgttcaagaagaacatcgagaagagggtgcgcagcctgcctgagattgatggcctgagcaaggagaccgtgctgagctcctggatcgccaagtatgatgccatctacagaggagaggaggacctgtgcaagcagcccaacaggatggccctgtctgctgtgtctgagctgatcctgagcaaggagcagctgtatgagatgttccagcagatcctgggcatcaagaagctggagcaccagctgctgtacaatgcctgccagctggacaatgctgatgagcaggccgcccagatccggcgggagctggatggccgcctgcagctggccgacaagatggccaaggagaggaagttccccaagttcatcgccaaggacatggagaacatgtacatcgaggagctgcggagctctgtgaacctgctgatggccaacctggagagcctgcctgtgtccaaaggaggccctgagttcaagctgcagaagctgaagaggagccagaacagcgccttcctggacattggagatgaaaatgagatccagctgagcaagagtgatgtggtgctgtccttcaccctggagatcgtcatcatggaggtgcagggcctgaagtctgtggcccccaacagaattgtgtactgcaccatggaggtggagggggagaagctgcagacagaccaggccgaggccagccggccccagtggggcacccagggcgacttcaccaccacccaccccaggcctgtggtgaaggtgaagctgttcacagagagcactggagtgctggccctggaggacaaggagctgggccgggtcatcctgtaccccaccagcaacagcagcaagtctgctgagctgcacaggatggtggtgcccaagaacagccaggacagcgacctgaagatcaagctggccgtgaggatggacaagccagcccacatgaagcacagcggctacctgtatgccctgggccagaaggtgtggaagcgctggaagaagcgctactttgtgctggtgcaggtgtcccagtacacctttgccatgtgcagctaccgggagaagaagtctgagccccaggagctgatgcagctggagggctacacagtggactacacagacccccaccctggcctgcagggcggctgcatgttcttcaatgctgtgaaggagggggacaccgtcatctttgccagtgatgatgagcaggaccgcatcctgtgggtgcaggccatgtaccgggccaccggccagagctacaagcctgtgcctgccatccagacccagaagctgaaccccaagggcggcaccctgcatgctgatgcccagctgtctgagttcacagatgctgaccgcttccagaagcacggcatggatgagttcatcagcgccaacccctgcaagctggaccacgccttcctgttccgcatcctgcagaggcagaccctggaccaccggctgaatgacagctacagctgcctgggctggttcagccctggccaggtgtttgtgctggatgagtactgtgcccgctatggagtgcggggctgccaccgccacctgtgctacctggccgagctgatggagcacagtgaaaatggagctgtgattgaccccaccctgctgcactacagctttgccttctgtgccagccacgtgcacggcaacagaccagatggcatcggcaccgtgtctgtggaggagaaggagagatttgaggagatcaaggagcggctgagcagcctgctggagaaccagatcagccacttccgctactgcttccccttcggccggcctgagggcgccctgaaggccaccctgagcctgctggagcgggtgctgatgaaggacatcgccacccccatcccagctgaggaggtgaagaaggtggtgaggaagtgcctggagaaggccgccctgatcaactacacccggctgacagaatatgccaagattgagggccctgctgagaaggagacagagaccatgaaccaggccagccctgccaggaagctggaggagatcctgcacctggccgagctgtgcatcgaggtgctgcagcagaatgaggagcaccacgccgaggcctttgcctggtggccagacctgctggccgagcacgccgagaagttctgggccctcttcaccgtggacatggacacagccctggaggcccagccccaggacagctgggacagcttccccctcttccagctgctgaacaacttcctgagaaatgacaccctgctgtgcaatggcaagttccacaagcacctgcaggagatctttgtgcccctggtggtgcgctacgtggacctgatggagagcagcatcgcccagagcatccaccggggctttgagcaggagacctggcagcctgtgaagaacatcgccaacagcctgcccaacgtggccctgcccaaggtgcccagcctgcccctgaacctgccccagatccccaacatcagcacagcctcctggatgcccagcctgtatgagagcaccaatggaagtgccaccagtgaagatctcttctggaagctggatgccctgcagatgtttgtgtttgacctgcactggccagagcaggagtttgcccaccacctggagcagaggctgaagctgatggccagtgacatgctggaggcctgtgtgaagaggaccaggacagcctttgagctgaagctgcagaaggccagcaagaccacagacctgcgcatcccagcctctgtgtgcaccatgtttaatgtgctggtggatgccaagaagcagagcaccaagctgtgtgccctggatggcggccaggagcagcagtaccacagcaagattgatgacctgattgacaacagcgtgaaggagatcatcagcctgctggtgtccaagtttgtgtctgtgctggagggcgtgctgagcaagctgagccgctatgatgagggcaccttcttcagcagcatcctgtccttcaccgtgaaggccgccgccaagtatgtggatgtgcccaagccaggcatggacctggccgacacctacatcatgtttgtgcggcagaaccaggacatcctgcgggagaaggtgaatgaggagatgtacatcgagaagctgtttgaccagtggtacagcagctccatgaaggtgatctgtgtgtggctgacagaccggctggacctgcagctgcacatctaccagctgaagaccctcatcaagatcgtgaagaagacctacagagacttccggctgcagggcgtgctggagggcaccctgaacagcaagacctatgacacagtgcaccggcggctgactgtggaggaggccacagcctctgtgtctgagggcggcggcctgcagggcatcaccatgaaggacagtgatgaggaggaggagggctag

SEQ ID NO: 65780 - DNA, 3906 bp, Artificial Sequence
  derived and/or modified sequence
atgctggaccccagcagcagcgaggaggagagcgacgagggcctggaggaagaatcgagggatgtcttggtggctgccggttcctcacagagggcgccaccagcacctacaagagagggacgccgggacgccccaggccgtgctggagggggcggcgctgcccgctccgtgtctccctccccaagtgtcctgtcagaagggagagacgagcctcagagacagttggacgatgagcaagagcgtcgcatccgcctacagctttacgtgttcgtggtgcggtgcatcgcctatcccttcaatgccaaacaaccaaccgacatggccagaagacaacagaaactgaataagcaacagctccagctgttgaaggaaagatttcaggcattcctcaacggcgaaacacagatcgtggccgatgaagccttttgtaatgccgtgcgctcatattacgaggtatttttgaagagcgacagggtggcccgcatggtgcaatctggtggttgttctgccaacgatttcagagaggtctttaaaaaaaatatcgagaaacgtgtgcggagtctgcccgaaattgatggcctctcaaaagagaccgtgctgtccagttggatcgctaagtacgatgccatttacagaggggaggaagatctgtgcaaacagccaaaccgtatggcccttagtgctgtgagcgaacttatactctcaaaggagcagctttacgaaatgttccagcagatcttagggatcaagaagctggagcatcagcttctttataacgcgtgtcagctggataacgctgacgaacaggctgcacagattcgccgcgaattggatggcagattacagctggccgacaagatggccaaagaacgcaagttccctaaatttatagccaaagatatggagaacatgtacattgaggaactgcggagcagcgtcaacctcctgatggcaaatctggagagcctcccagtgtctaaggggggccctgagttcaagctgcaaaaattgaaacgcagtcagaatagtgccttcttggatatcggagacgaaaacgagatccagctctcaaaatctgacgtcgtgctgtcattcacgttagaaatcgtgatcatggaagtccagggcctgaaaagtgtcgcaccaaatcgcattgtgtattgtactatggaagtcgaaggagagaaactgcaaaccgaccaggctgaggccagtcggccacagtggggaacccagggggatttcacgaccacgcacccgagacctgtcgtgaaagtgaagctgtttacggaatccaccggagtgctcgccctcgaagataaggaactcggtcgggttattctgtacccgacatccaacagctccaagagcgccgaattgcacaggatggtcgtgccaaagaattcacaggattccgatctgaaaatcaaactcgccgtgcgcatggataagccagcacatatgaaacattccggctacctctacgcactgggccagaaggtgtggaagcgatggaagaagcgctacttcgtactggtgcaagtgagtcagtatacctttgcaatgtgtagctatcgtgagaagaaatccgaaccacaggagcttatgcagctggagggctacacagtggactacacagatccacacccaggtctgcagggcggatgcatgtttttcaatgctgtcaaggaaggagatacagtcatatttgcaagtgatgatgagcaagatcgcattctgtgggtgcaggcaatgtacagagctactggccagtcgtataaaccagtgcccgcaattcagacccagaagctgaaccccaaagggggcacccttcatgcagacgcccaactcagcgagttcactgacgcagaccggttccagaaacatggtatggatgagtttataagtgcaaatccatgtaaactggatcacgcattcctctttagaatcctccaacgacagaccctcgatcacaggctgaatgactcctattcgtgccttggctggttctcacctggtcaggtgtttgtgctcgatgagtactgtgccagatacggcgtacggggctgccacaggcatctgtgctatctagcagaactgatggagcactcggaaaatggcgccgttatcgacccgactttgttgcattactcgttcgcgttctgcgcctctcatgtgcacgggaacaggcctgacggcatcggtacagtctcagtggaggagaaagaacggtttgaggagattaaagagaggctgtcgtccttgctggaaaaccagatttcacatttccgctattgctttccctttgggcggccagagggagccctcaaagccaccctgtcactcctcgaaagggtgctgatgaaggacatcgctactccaatacccgctgaagaggtcaagaaggttgtgcgcaaatgcctagaaaaggccgccctcatcaactacacgcgcctcacggagtacgcaaaaattgaaggacccgccgagaaggagactgaaaccatgaaccaggccagccctgctcggaaattagaggaaatattgcatttggcggaactgtgtattgaagtgctgcagcaaaatgaggagcaccacgcagaggcattcgcatggtggcccgatttacttgcagagcacgccgagaaattctgggctcttttcaccgtggacatggatactgctttagaggctcagccccaagacagctgggattctttcccactctttcagctcctgaacaattttttaagaaacgataccctactctgcaacgggaaattccataaacatctacaggagatatttgtgcccctggtggtgaggtatgtggatttgatggagagctccattgctcagtcaattcacagaggattcgagcaagagacttggcaacctgtaaagaacattgccaacagcctgcccaacgtggcacttccgaaggtgcctagtctcccccttaacctgccccaaataccaaacatcagtaccgcgagctggatgcccagcctctacgagagcaccaacggcagtgccacctcagaagacttgttttggaagctagacgcactgcaaatgttcgtgtttgaccttcattggcctgagcaggaatttgcccatcaccttgagcaacggttgaaattaatggccagcgatatgctcgaagcatgcgtgaagagaacgcgaactgcattcgagctgaaactacagaaagcctctaagaccacagatcttcgcataccagccagtgtttgcaccatgttcaacgtcctggtggacgcaaagaagcagtccactaaactgtgcgcactggatggcggacaggagcaacagtatcactctaaaattgacgatctgatcgataactccgttaaagaaatcatctcgttactggtcagtaaattcgtctccgtcttggaaggtgtgctatccaagctgtcccgatatgatgaaggaactttttttagcagtattctgtcctttacagtgaaagcggccgcgaagtacgtggacgtccccaagcccggcatggacttggccgatacctacatcatgttcgttagacagaaccaggacatcctgagggagaaagtgaatgaggaaatgtatattgagaagttgtttgaccagtggtattcttcatcaatgaaggtgatttgcgtgtggctgaccgaccgcctcgatctgcagctgcacatttaccaactgaaaactttaatcaaaatcgtcaagaaaacttatcgcgactttcgtctgcaaggcgttctggaaggtaccctgaattcgaagacttatgatacagtccatagacgattgaccgtggaggaagccacggcctctgtgtcagaaggaggaggccttcaggggatcaccatgaaggacagcgatgaagaggaggaaggatag

SEQ ID NO: 65781 - DNA, 3906 bp, Artificial Sequence
  derived and/or modified sequence
atgctcgacccatcctcaagtgaagaggagagcgacgaaggcctcgaagaagaatcccgcgacgtcctggtggctgccggaagcagccagcgcgctcccccagccccaacccgcgaaggcagaagagatgctccaggacgggcaggaggcggtggggctgctagatcggttagccccagcccatctgtgctgtctgagggtcgtgatgaaccccagagacagcttgatgatgagcaggagcgcaggatcagactccagctgtacgtgtttgtggtcaggtgcatagcttaccctttcaatgctaagcagccgactgatatggccagaagacaacagaaactgaacaaacagcaacttcagctgctgaaagagagattccaggccttccttaatggcgagacccagattgtagccgacgaagccttctgcaacgcagtgaggtcgtactatgaagtctttctcaaatcagacagagtggccaggatggtccagtcaggcggatgttcggctaacgattttcgggaggtttttaaaaagaacatcgagaagcgggtccgtagcctcccagagattgacggattaagtaaggaaacggtgctgtcaagttggatcgctaaatatgacgcaatctaccgcggtgaggaggacttgtgcaaacagcccaatcggatggccttgtctgcagtgtccgaacttatcctatcgaaagagcaactctacgagatgttccagcaaattctcggtattaaaaagctcgagcaccagcttctgtataacgcgtgccagctggacaacgccgacgagcaggccgcacagattaggcgtgaactggacggccgtctgcagttggccgacaaaatggcgaaggagcgcaaattcccaaagttcattgctaaggatatggaaaatatgtatatcgaggaactgcgtagctcagtgaatttattaatggcaaacctggaatccttacccgtgtccaaaggcggtccagaattcaaactgcaaaaattgaaacgctcgcagaatagcgcttttctagacattggtgatgagaatgagatccagctctccaaaagcgatgtagttctaagcttcacattggaaatcgtgataatggaagtgcaggggctgaagagtgtcgcgccaaaccggatcgtctactgtacgatggaagtcgagggagagaaactccaaacggaccaagctgaggcgagccggccacagtggggcactcaaggcgactttactacgacccatcctagaccggtggtaaaagtcaagctgttcactgagagtacgggggtgttggctttggaggacaaggagctcgggagggttattctctacccaacatctaattcttctaaaagcgcagagcttcaccgcatggtcgttcccaaaaactcacaggacagtgatctgaagattaagttggccgtgcggatggacaagcccgcacatatgaaacactccggctatttatatgccttgggccagaaggtgtggaagcggtggaaaaagcggtacttcgttctagtacaggtgagtcagtatacttttgctatgtgcagttacagggagaaaaaatctgagcctcaagagctgatgcagcttgaagggtacacagtggattatacagacccacatcctggcctccagggaggatgtatgttttttaacgcggtcaaggagggtgatactgttatatttgcatctgacgatgagcaggatcggattttgtgggtgcaagctatgtaccgcgctactggccagagctataagccagtgccagccattcagacccagaaattgaaccctaagggaggcacactccacgccgacgcccagctcagcgagtttaccgacgccgacaggtttcagaagcatggcatggatgaattcatttccgccaacccatgcaagctcgaccacgccttcctattccggatattacagaggcaaaccctggaccaccgcttgaatgatagctatagctgtttaggctggttttctcctggccaagtgttcgtgcttgacgaatactgcgctcggtacggtgtaagaggctgccaccgtcatttgtgctaccttgccgaactcatggaacactctgagaatggcgctgttatcgatcccacactgctacactactccttcgctttttgtgccagccatgtgcatggcaaccggccagatggaatcggcaccgtttccgtggaggagaaagaaaggttcgaggagattaaagagaggctgtcttccctgctggaaaaccagatatcccactttaggtattgtttccctttcgggagacccgaaggagctctgaaagccacactgtcgctcctggagagggtgctaatgaaggacattgcaacaccaatccctgctgaggaggtgaaaaaggttgttagaaagtgtctcgaaaaggccgcactgataaattacacccgcttaaccgagtatgccaagatagaggggcctgccgaaaaagagaccgaaacaatgaatcaggcctctcctgccagaaagctggaggagatcttacatctcgccgagctgtgcatagaggtgctgcagcaaaacgaggagcatcatgccgaggcctttgcttggtggcccgacctgctggctgaacatgctgaaaagttttgggctctgtttacagtggacatggacacggctcttgaagcacagccccaagacagttgggattcttttcccttgttccagctgctgaacaactttctgagaaacgatacccttttgtgtaacggcaagtttcacaaacacttgcaggagattttcgtgccactggtcgtaaggtatgttgacttaatggagtcatctatcgctcagagtattcaccggggattcgaacaggaaacttggcagcccgtgaagaatatcgccaattcgctgccaaatgtcgccttgcccaaagtgcctagtctgccgctgaatctgccgcagattcctaatattagcaccgcttcatggatgccatccctgtacgaatccacaaacgggagcgcaacgtccgaagatctcttttggaagttggacgcgctgcagatgtttgtcttcgatctacactggcctgaacaggaattcgctcaccacctagagcagagactcaaactgatggcctcagatatgctagaggcatgtgttaagaggaccagaaccgcgttcgagctgaagttacagaaggcatcaaagactactgacctgaggatcccagcatcagtctgcaccatgtttaacgtgttagtcgatgccaaaaagcaatccactaaactgtgtgcattggacggtgggcaggagcaacagtaccacagcaagattgatgatttgatcgacaacagcgttaaggagatcatatctctcttagtgtctaagtttgtgtcagtgttagaaggggtcctgtcaaagttatcccgctatgatgaggggacatttttctcatccattttgtcttttaccgtcaaggctgccgctaaatacgtagacgttcctaagccagggatggacctggccgacacttacatcatgtttgtcagacagaaccaggacatcctgcgcgaaaaggtcaatgaggaaatgtatatcgaaaaactcttcgaccagtggtactcttctagcatgaaggtcatctgcgtctggctcacagatcgcctggacctgcaactgcacatctaccagcttaaaaccctgattaaaatcgtcaagaaaacctaccgagattttcggctgcaaggagtgctggagggcacactgaatagcaaaacatatgatactgtccacagacggctaaccgtggaggaggcgaccgctagcgtctcagaagggggtggactacagggcatcaccatgaaagactcagacgaagaggaagaaggctag

SEQ ID NO: 65782 - DNA, 6066 bp, Artificial Sequence
  derived and/or modified sequence
attcaattccacgtgttgcttgttgtaggcgccacaggttccccacctgcgtccgggcgctcgggcggctccgcctctgccggcgggctctggggaaccgctgggtcggcgcgcccggggctggcggagcaattcctgaggcgcccaagctcacccccaacgctaactccgcctattcagtcccggcggctccccctctcccccctcccaatcctcctcccggctcctgcccgcccctttcgccctggtggtaggaaacactcctgaatctaactcgacgtgtccggaaagccctggccagttttcctttcgttctgcggccgctgcagccagccccgcggctccctcagacccgcgggcgcagccgccgggggtgaggcgcttggggaccgcgggccgagcggcggggatccccgagcaccatgctggacccgtcttccagcgaagaggagtcggacgaggggctggaagaggaaagccgcgatgtgctggtggcagccggcagctcgcagcgagctcctccagccccgactcgggaagggcggcgggacgcgccggggcgcgcgggcggcggcggcgcggccagatctgtgagcccgagcccctctgtgctcagcgaggggcgagacgagccccagcggcagctggacgatgagcaggagcggaggatccgcctgcagctctacgtcttcgtcgtgaggtgcatcgcgtaccccttcaacgccaagcagcccaccgacatggcccggaggcagcagaagcttaacaaacaacagttgcagttactgaaagaacggttccaggccttcctcaatggggaaacccaaattgtagctgacgaagcattttgcaacgcagttcggagttattatgaggtttttctaaagagtgaccgagtggccagaatggtacagagtggagggtgttctgctaatgacttcagagaagtatttaagaaaaacatagaaaaacgtgtgcggagtttgccagaaatagatggcttgagcaaagagacagtgttgagctcatggatagccaaatatgatgccatttacagaggtgaagaggacttgtgcaaacagccaaatagaatggccctaagtgcagtgtctgaacttattctgagcaaggaacaactctatgaaatgtttcagcagattctgggtattaaaaaactggaacaccagctcctttataatgcatgtcagctggataacgcagatgaacaagcagcccagatcagaagggaacttgatggccggctgcaattggcagataaaatggcaaaggaaagaaaattccccaaatttatagcaaaagatatggagaatatgtatatagaagagttgcggtcttcagtgaatttgctaatggccaatttggaaagtcttccagtttcgaaaggtggtccggaatttaaattacaaaaattaaaacgttcacagaactctgcatttttggacataggagatgagaatgagattcagctgtcaaagtccgacgtggtactgtcattcaccttagagattgtcataatggaagtgcaaggcctgaagtcagttgctcccaatcgaattgtttactgtacaatggaagtggaaggagaaaaacttcagacagaccaggccgaagcctcaaggccacaatgggggactcaaggagatttcaccaccacccatcctcggcctgtggtcaaagtgaaactcttcacagaaagcactggagttctggccctggaagataaagaactgggaagggtgatattatacccaacttctaatagctccaaatcagctgaattacaccgaatggtagttccaaaaaatagccaggattctgacttaaaaatcaaactggcagtgcgaatggataaaccagcacatatgaagcatagtggatatctgtatgcccttggacagaaggtttggaaaagatggaaaaaacgttactttgttctagttcaggttagccaatatacctttgctatgtgcagttatagagaaaagaagtctgaaccacaagaattaatgcagcttgaaggctatactgtggattataccgatccccacccaggccttcagggtggttgtatgttctttaatgctgttaaagaaggagatactgtaatctttgccagtgatgatgaacaggacagaatattatgggttcaagccatgtatagggccacaggtcaatcatataaaccagttcctgcaattcaaacccagaaactgaatcctaaaggaggaactctccatgcagatgctcagctttctgaatttacagatgcagatcgttttcagaaacatggtatggatgagtttatttctgcaaacccctgcaagcttgatcatgccttcctttttagaatactccagaggcagactttggatcacagactgaatgattcctattcttgcttgggatggtttagccctggccaagtctttgtgttagatgagtactgtgcccgttatggtgtgagaggctgtcacagacatctctgctaccttgcagaactgatggaacattcagaaaatggtgctgtcattgaccctaccctgctccattacagctttgcattctgtgcctctcatgtgcacggcaacaggcctgatggaattgggactgtttcagtggaagaaaaagaaagatttgaggagataaaagagagactctcttcccttttagaaaatcagataagccatttcagatactgttttccctttggacgacctgaaggtgctctaaaagctacactttcattacttgaaagggttttaatgaaagatattgccactcccataccagcagaagaggtgaagaaagtggtcagaaaatgtctcgagaaagctgccttgatcaattacactagactcacagaatatgccaaaatagaaggcccagcagaaaaggaaacagagaccatgaaccaggcatctcctgctagaaagctggaagagattcttcatctggcagagctctgcatagaagtcttacagcagaatgaagagcatcatgcagaggcatttgcctggtggcctgatttattggctgaacatgcagagaaattttgggctttatttacagtggatatggacactgcactagaggctcaaccgcaagactcctgggatagttttcctcttttccaactgcttaataatttcctccgaaatgacacacttttgtgtaatggaaaatttcacaaacacttgcaagaaatctttgtacccttggttgtccgctatgtggatctcatggagtcttccatcgcccagtcaattcacagaggttttgagcaggagacatggcagcctgtcaagaatatcgccaacagtcttcccaatgtagctcttccaaaagttccaagtctgcctcttaatcttccacagattcctaacatttctactgcttcgtggatgccttctttatatgagtccaccaatggctcagcaacatcagaagaccttttttggaagcttgatgcactgcaaatgtttgtctttgatctgcactggccagaacaggaatttgcccaccacttagagcaaagacttaaactaatggccagtgatatgctagaggcctgtgtcaaaagaacaagaactgcatttgaactcaagctacaaaaggcaagcaaaacaactgacttgcgcattccagcttccgtttgcactatgtttaatgtattagtcgatgccaaaaagcaaagcaccaaactctgtgccctggatggaggacaagagcaacagtaccattcaaaaatagatgatctgatcgacaacagtgtaaaagaaatcatttcactgttagtttcaaagtttgtttcagtgttggaaggcgtgttgtctaagctgtcaaggtatgatgaaggcactttcttttcatccattctgtcattcactgtgaaagcagctgcaaaatatgttgatgttccaaaaccaggaatggatctggcagacacctatattatgtttgttcggcaaaaccaagatattcttcgagaaaaggtcaatgaggaaatgtatatagaaaagttatttgatcaatggtacagcagttccatgaaagtcatttgcgtgtggttgactgatagattagacctccaactccatatttaccagctgaagacgctcatcaagattgtgaagaaaacctacagggactttcgattgcagggtgtgttggaaggaacactgaacagtaagacttatgatactgtgcacagacgtttaacagtagaggaggccacagcctctgtttcagaaggaggaggacttcagggcattactatgaaagacagtgacgaagaagaagaaggctgatatcacacagctttgcagaaggaaggaagaccttgatcgacattgttttttatttttttaaccttgtccttgtaattacattcattgtttgttttggccaaataaaaatgcttgtatttctttaaaaagtaagcctgaatgtagagtaaaaggggaaatgccaagattttggggtttttttgtttcctttttttgtttgtttgtttgtttgtttttttggagaagagcatcctcttttgtgtagtttgacctaaaaatgaaccttggctctgcttgtgatcagaacatgaacttttttttttaaagaagatttgagcatttttctgtaatcacatcaaaatgatgttttctgtgtaaagcgagatacatatttctcataatgcagcattgtgagaagtcagttcggaccactgcaccaacactgtcgtatccttgttaaaatggtgtgtaccttacaaattataatttatgtgccaggttcgttttgtacttaatttgctattattgtgatgtgtataaaatctttaatcttggttcttagtactttgaattggtctacaggtatattcctgggatgaaaggattgccaaacccaaatatagactagattatccaatgggtttgtgtctttgttccattctcaacatttcttctttcaactataagtaatccccaggtgtggggtagcaagtgtgcttccgtcaagataccatattctcctgctccagtataacagcttgcaggcaataaaaatctatttgctcataactacttctgtatttattagacttatatagagcaaatgcagtaaaagaggtttgcagtgtttcaaacatcccaactatctgactctgtgtttttgtttcttgagttttttgtttgttttgtttgtaatattttgtttttaatcaaatgagtaaaagatagtaacactgactgttctttgtacctaataggcacatacattgttaaaagaattactatgacagcatatttccatagcagaggaaatatatatttcatatattattagttaatattagtaatcaatgttaactaataattagtaatgttagtaatattaactagtaattcacattattagtggttctctcaaaatattttcttgctagggtttgagagataattgtattatgttgcgtaagttctctatgaattatttttgtgatatttcccaaaacatattggcagattgtgctactgcatttattaataagtaatttttaaatgaaggcagttaatgcagaataagtggaggtatccctgcatttatgaaaacgtttattctgaaactttagaaatgaaacaacttggacctccagattcgttctcccatggtgtaataagtggtcgttaggtacctagactagccttaaaaatctatttaatctacagttactatttagcattgttttggctcattttctgggccctagggctaagataacaaacaaggaaatttcttccttcttccgggattaaagactaactctaccaactcactatctttgaaaggcagtttgggaatgttctccctccttttcttctctattcacacaccaaatactattttctccaaaccctcaaatgtccagtcatgctatcccaaactctccaatggcaccatccccaagcttgctgttccacgacacattgctctgtacttagtaattacccacccttcttttcctttcaataaaatgtccatttccttgat

SEQ ID NO: 65783 - DNA, 3906 bp, Artificial Sequence
  derived and/or modified sequence
atgctggaccccagcagcagcgaggaggagagcgacgagggcctggaggaggagagcagagacgtgctggtggccgccggcagcagccagagagccccccccgcccccaccagagagggcagaagagacgcccccggcagagccggcggcggcggcgccgccagaagcgtgagccccagccccagcgtgctgagcgagggcagagacgagccccagagacagctggacgacgagcaggagagaagaatcagactgcagctgtacgtgttcgtggtgagatgcatcgcctaccccttcaacgccaagcagcccaccgacatggccagaagacagcagaagctgaacaagcagcagctgcagctgctgaaggagagattccaggccttcctgaacggcgagacccagatcgtggccgacgaggccttctgcaacgccgtgagaagctactacgaggtgttcctgaagagcgacagagtggccagaatggtgcagagcggcggctgcagcgccaacgacttcagagaggtgttcaagaagaacatcgagaagagagtgagaagcctgcccgagatcgacggcctgagcaaggagaccgtgctgagcagctggatcgccaagtacgacgccatctacagaggcgaggaggacctgtgcaagcagcccaacagaatggccctgagcgccgtgagcgagctgatcctgagcaaggagcagctgtacgagatgttccagcagatcctgggcatcaagaagctggagcaccagctgctgtacaacgcctgccagctggacaacgccgacgagcaggccgcccagatcagaagagagctggacggcagactgcagctggccgacaagatggccaaggagagaaagttccccaagttcatcgccaaggacatggagaacatgtacatcgaggagctgagaagcagcgtgaacctgctgatggccaacctggagagcctgcccgtgagcaagggcggccccgagttcaagctgcagaagctgaagagaagccagaacagcgccttcctggacatcggcgacgagaacgagatccagctgagcaagagcgacgtggtgctgagcttcaccctggagatcgtgatcatggaggtgcagggcctgaagagcgtggcccccaacagaatcgtgtactgcaccatggaggtggagggcgagaagctgcagaccgaccaggccgaggccagcagaccccagtggggcacccagggcgacttcaccaccacccaccccagacccgtggtgaaggtgaagctgttcaccgagagcaccggcgtgctggccctggaggacaaggagctgggcagagtgatcctgtaccccaccagcaacagcagcaagagcgccgagctgcacagaatggtggtgcccaagaacagccaggacagcgacctgaagatcaagctggccgtgagaatggacaagcccgcccacatgaagcacagcggctacctgtacgccctgggccagaaggtgtggaagagatggaagaagagatacttcgtgctggtgcaggtgagccagtacaccttcgccatgtgcagctacagagagaagaagagcgagccccaggagctgatgcagctggagggctacaccgtggactacaccgacccccaccccggcctgcagggcggctgcatgttcttcaacgccgtgaaggagggcgacaccgtgatcttcgccagcgacgacgagcaggacagaatcctgtgggtgcaggccatgtacagagccaccggccagagctacaagcccgtgcccgccatccagacccagaagctgaaccccaagggcggcaccctgcacgccgacgcccagctgagcgagttcaccgacgccgacagattccagaagcacggcatggacgagttcatcagcgccaacccctgcaagctggaccacgccttcctgttcagaatcctgcagagacagaccctggaccacagactgaacgacagctacagctgcctgggctggttcagccccggccaggtgttcgtgctggacgagtactgcgccagatacggcgtgagaggctgccacagacacctgtgctacctggccgagctgatggagcacagcgagaacggcgccgtgatcgaccccaccctgctgcactacagcttcgccttctgcgccagccacgtgcacggcaacagacccgacggcatcggcaccgtgagcgtggaggagaaggagagattcgaggagatcaaggagagactgagcagcctgctggagaaccagatcagccacttcagatactgcttccccttcggcagacccgagggcgccctgaaggccaccctgagcctgctggagagagtgctgatgaaggacatcgccacccccatccccgccgaggaggtgaagaaggtggtgagaaagtgcctggagaaggccgccctgatcaactacaccagactgaccgagtacgccaagatcgagggccccgccgagaaggagaccgagaccatgaaccaggccagccccgccagaaagctggaggagatcctgcacctggccgagctgtgcatcgaggtgctgcagcagaacgaggagcaccacgccgaggccttcgcctggtggcccgacctgctggccgagcacgccgagaagttctgggccctgttcaccgtggacatggacaccgccctggaggcccagccccaggacagctgggacagcttccccctgttccagctgctgaacaacttcctgagaaacgacaccctgctgtgcaacggcaagttccacaagcacctgcaggagatcttcgtgcccctggtggtgagatacgtggacctgatggagagcagcatcgcccagagcatccacagaggcttcgagcaggagacctggcagcccgtgaagaacatcgccaacagcctgcccaacgtggccctgcccaaggtgcccagcctgcccctgaacctgccccagatccccaacatcagcaccgccagctggatgcccagcctgtacgagagcaccaacggcagcgccaccagcgaggacctgttctggaagctggacgccctgcagatgttcgtgttcgacctgcactggcccgagcaggagttcgcccaccacctggagcagagactgaagctgatggccagcgacatgctggaggcctgcgtgaagagaaccagaaccgccttcgagctgaagctgcagaaggccagcaagaccaccgacctgagaatccccgccagcgtgtgcaccatgttcaacgtgctggtggacgccaagaagcagagcaccaagctgtgcgccctggacggcggccaggagcagcagtaccacagcaagatcgacgacctgatcgacaacagcgtgaaggagatcatcagcctgctggtgagcaagttcgtgagcgtgctggagggcgtgctgagcaagctgagcagatacgacgagggcaccttcttcagcagcatcctgagcttcaccgtgaaggccgccgccaagtacgtggacgtgcccaagcccggcatggacctggccgacacctacatcatgttcgtgagacagaaccaggacatcctgagagagaaggtgaacgaggagatgtacatcgagaagctgttcgaccagtggtacagcagcagcatgaaggtgatctgcgtgtggctgaccgacagactggacctgcagctgcacatctaccagctgaagaccctgatcaagatcgtgaagaagacctacagagacttcagactgcagggcgtgctggagggcaccctgaacagcaagacctacgacaccgtgcacagaagactgaccgtggaggaggccaccgccagcgtgagcgagggcggcggcctgcagggcatcaccatgaaggacagcgacgaggaggaggagggctag

SEQ ID NO: 65784 - protein, 288 aa, Artificial Sequence
  derived and/or modified sequence
MVVVTGREPDSRRQDGAMSSSDAEDDFLEPATPTATQAGHALPLLPQEFPEVVPLNIGGAHFTTRLSTLRCYEDTMLAAMFSGRHYIPTDSEGRYFIDRDGTHFGDVLNFLRSGDLPPRERVRAVYKEAQYYAIGPLLEQLENMQPLKGEKVRQAFLGLMPYYKDHLERIVEIARLRAVQRKARFAKLKVCVFKEEMPITPYECPLLNSLRFERSESDGQLFEHHCEVDVSFGPWEAVADVYDLLHCLVTDLSAQGLTVDHQCIGVCDKHLVNHYYCKRPIYEFKITW

SEQ ID NO: 65785 - DNA, 867 bp, Artificial Sequence
  derived and/or modified sequence
atggtcgtggttaccgggcgcgaacctgactctaggcgccaagacggcgcgatgtcatcctctgatgctgaagacgattttctggagcccgccactccaacagcgactcaggccggacacgccctgccccttctgccccaggagtttcctgaggtggtccctttaaatatcggcggggcccacttcaccacgaggctttccacgttgaggtgttacgaagatacaatgctggccgccatgtttagtggtaggcactacattcctactgactctgaaggacggtacttcatagatcgcgacggaactcacttcggcgatgtgctgaatttcctccggtctggtgacctgcccccccgagagagggtgagagcggtgtataaagaggctcagtactacgccattggacctctgctggagcagctcgagaacatgcagcctttaaagggggagaaggtgcggcaggcattcctgggtctcatgccctactacaaggatcacctggagagaatagttgaaattgcacgtctgcgggccgttcagcgtaaagctagattcgcaaagctcaaggtgtgcgtgtttaaagaagaaatgcccatcacaccctacgaatgtcctctgctaaactcccttcggtttgaacgttcagaaagcgacggacagctttttgagcaccattgtgaagtggacgttagttttgggccatgggaggctgtggctgatgtgtatgacctcctgcattgcctagtaacggacctgagcgctcagggtctgaccgtggatcatcagtgtataggcgtgtgcgataaacacttagtgaatcattattactgtaagcgacctatctatgagttcaagatcacctggtag

SEQ ID NO: 65786 - DNA, 867 bp, Artificial Sequence
  derived and/or modified sequence
atggtggtggtgacaggccgggagccagacagccggcggcaggatggagccatgagcagcagtgatgctgaagatgacttcctggagcccgccacccccacagccacccaggccggccacgccctgcccctgctgccccaggagttccctgaggtggtgcccctgaacattggaggagcccacttcaccacccggctgagcaccctgcgctgctatgaggacaccatgctggccgccatgttcagcggccgccactacatccccacagattctgagggccgctacttcatcgacagagatggcacccactttggagatgtgctgaacttcctgcggagcggggacctgcccccccgggagcgggtgcgggctgtgtacaaggaggcccagtactatgccatcggccccctgctggagcagctggagaacatgcagcccctgaagggggagaaggtgcggcaggccttcctgggcctgatgccctactacaaggaccacctggagcgcatcgtggagatcgcccggctgcgggctgtgcagaggaaggccaggtttgccaagctgaaggtgtgtgtgttcaaggaggagatgcccatcaccccctatgaatgtcccctgctgaacagcctgcgctttgagaggtctgagagtgatggccagctgtttgagcaccactgtgaggtggatgtgtcctttggcccctgggaggccgtggctgatgtgtatgacctgctgcactgcctggtgacagacctgagcgcccagggcctgactgtggaccaccagtgcatcggcgtgtgtgacaagcacctggtgaaccactactactgcaagaggcccatctatgagttcaagatcacctggtag

SEQ ID NO: 65787 - DNA, 867 bp, Artificial Sequence
  derived and/or modified sequence
atggtggtggtgaccggccgggagcccgacagccggcggcaggacggcgcaatgtccagtagtgacgccgaagacgactttctggagccagctactccaactgccactcaggcaggacatgccttgcccctactccctcaggaatttccagaggtggtcccactgaacattggaggagcccatttcacaacccggctgagtacactccggtgctatgaggatactatgttggccgctatgttcagcggcaggcattacattcctactgattcagaggggaggtacttcattgatagggacgggacacactttggtgacgtgctgaactttctgcgaagtggtgacctgcccccgagggaaagggtgcgggccgtatacaaagaggctcaatattacgctatcggcccgctcctcgagcagctcgagaacatgcagccactgaaaggcgagaaggtgcgccaggccttccttgggctaatgccatattacaaggatcatctggaacgcatcgtcgagattgccaggctgcgtgccgtgcagagaaaggccaggtttgccaaactgaaagtctgtgtattcaaagaagaaatgccgattaccccatacgagtgccccctactgaatagcctccggtttgaacgctctgagagtgacgggcagttgtttgaacaccactgcgaggtcgatgtgagttttggaccttgggaagccgtcgcggatgtttatgatctcctacattgtctggtgacggatctctccgcccaggggctcaccgtggaccatcagtgtatcggcgtctgtgacaaacatctggtgaatcactactactgtaaacggcccatatacgagttcaagataacctggtag

SEQ ID NO: 65788 - DNA, 1160 bp, Artificial Sequence
  derived and/or modified sequence
cgcccccctccggccagcccgcagccggccgcgtcatgccaggcgctgctcggcggtagggagtgcccggggccgccgcctccgcccgcccgaagccgcgcccactgcccagagccagagggatggtggtagtcacggggcgggagccagacagccgtcgtcaggacggtgccatgtccagctctgacgccgaagacgactttctggagccggccacgccgacggccacgcaggcggggcacgcgctgcccctgctgccacaggagtttcctgaggttgttccccttaacatcggaggggctcacttcactacacgcctgtccacactgcggtgctacgaagacaccatgttggcagccatgttcagtgggcggcactacatccccacggactccgagggccggtacttcatcgaccgagatggcacacactttggagatgtgctgaatttcctgcgctcaggggacctcccacccagggagcgtgttcgagctgtgtacaaagaggcccagtactatgccatcgggcccctcctggagcagctggagaacatgcagccactgaagggcgagaaggtgcgccaagcgtttctgggactcatgccctattacaaagaccacttggagcggattgtggagatcgcccggctgcgtgcggtccagcggaaggcccgctttgccaagctcaaggtctgtgtcttcaaggaggagatgcccatcaccccctatgagtgtccgctcctcaactccctgcgatttgagcggagtgagagtgacgggcagctttttgagcaccactgtgaagtggatgtgtcttttgggccctgggaggctgtggctgatgtttatgacctgctgcactgcctggtcacggacctctcggcccagggtctcaccgtggaccaccagtgcatcggggtgtgtgacaagcacctcgtgaaccactactactgcaagcgccccatctatgagttcaagatcacatggtgaaattgaaaaagatccccaaggatctgttactactgcatttccttcttgctctgtctacagcctaggccaactagtcagggtctggacatgcatctcctaaaggaagaactgtgtagcaccattgatcacaatgtaacatttccatgctgcattaagggtgtctctctctaa

SEQ ID NO: 65789 - DNA, 867 bp, Artificial Sequence
  derived and/or modified sequence
atggtggtcgtgacgggcagggagcctgattctcggagacaggatggtgcaatgagcagttccgatgcagaagatgacttcctggagcctgcaactccaaccgcgacacaggcgggtcacgcactcccactgctgccacaggagtttcctgaagtggtgcctctgaatatcgggggagcccatttcacaaccagattgagtacactcagatgttacgaagacactatgctcgcagctatgttctcaggcaggcattacatccccacggattcggaagggagatactttatagatagagacgggacccactttggcgatgtgctcaacttcctgaggtctggtgacctcccaccccgagaaagggtcagggctgtatacaaggaggctcagtactatgccattggccctctgctggaacaactggaaaacatgcagcctctcaaaggagagaaggtcagacaggcatttctggggctaatgccctattataaggatcacctggagcggattgtggagatcgccagactgagggcagtgcagcggaaggctagatttgctaagctgaaggtgtgtgtgtttaaagaggagatgcctatcaccccctatgagtgccccctgctgaacagcctccgcttcgagagaagcgaaagcgatgggcaactgtttgaacaccactgcgaggtagacgtgagtttcgggccatgggaagctgtggccgacgtgtatgatttgctccattgcctggtgactgatctttctgcacaaggtctcactgtggatcatcagtgcataggcgtgtgtgacaagcacctagtcaaccattactattgcaaacgtccgatttatgagtttaaaatcacctggtag

SEQ ID NO: 65790 - DNA, 867 bp, Artificial Sequence
  derived and/or modified sequence
atggtggtggtgaccggcagagagcccgacagcagaagacaggacggcgccatgagcagcagcgacgccgaggacgacttcctggagcccgccacccccaccgccacccaggccggccacgccctgcccctgctgccccaggagttccccgaggtggtgcccctgaacatcggcggcgcccacttcaccaccagactgagcaccctgagatgctacgaggacaccatgctggccgccatgttcagcggcagacactacatccccaccgacagcgagggcagatacttcatcgacagagacggcacccacttcggcgacgtgctgaacttcctgagaagcggcgacctgccccccagagagagagtgagagccgtgtacaaggaggcccagtactacgccatcggccccctgctggagcagctggagaacatgcagcccctgaagggcgagaaggtgagacaggccttcctgggcctgatgccctactacaaggaccacctggagagaatcgtggagatcgccagactgagagccgtgcagagaaaggccagattcgccaagctgaaggtgtgcgtgttcaaggaggagatgcccatcaccccctacgagtgccccctgctgaacagcctgagattcgagagaagcgagagcgacggccagctgttcgagcaccactgcgaggtggacgtgagcttcggcccctgggaggccgtggccgacgtgtacgacctgctgcactgcctggtgaccgacctgagcgcccagggcctgaccgtggaccaccagtgcatcggcgtgtgcgacaagcacctggtgaaccactactactgcaagagacccatctacgagttcaagatcacctggtag

SEQ ID NO: 65791 - protein, 714 aa, Artificial Sequence
  derived and/or modified sequence
MDHAEENEILAATQRYYVERPIFSHPVLQERLHTKDKVPDSIADKLKQAFTCTPKKIRNIIYMFLPITKWLPAYKFKEYVLGDLVSGISTGVLQLPQGLAFAMLAAVPPIFGLYSSFYPVIMYCFLGTSRHISIGPFAVISLMIGGVAVRLVPDDIVIPGGVNATNGTEARDALRVKVAMSVTLLSGIIQFCLGVCRFGFVAIYLTEPLVRGFTTAAAVHVFTSMLKYLFGVKTKRYSGIFSVVYSTVAVLQNVKNLNVCSLGVGLMVFGLLLGGKEFNERFKEKLPAPIPLEFFAVVMGTGISAGFNLKESYNVDVVGTLPLGLLPPANPDTSLFHLVYVDAIAIAIVGFSVTISMAKTLANKHGYQVDGNQELIALGLCNSIGSLFQTFSISCSLSRSLVQEGTGGKTQLAGCLASLMILLVILATGFLFESLPQTIWLTTFVSSLFLGLDYGLITAVIIALLTVIYRTQSPSYKVLGKLPETDVYIDIDAYEEVKEIPGIKIFQINAPIYYANSDLYSNALKRKTGVNPAVIMGARRKAMRKYAKEVGNANMANATVVKATQDAEVDGEDATKPEEEDGEVKYPPIVIKSTFPEEMQRFMPPGDNVHTVILDFTQVNFIDSVGVKTLAGIVKEYGDVGIYVYLAGCSAQVVNDLTRNRFFENPALWELLFHSIHDAVLGSQLREALAEQEASAPPSQEDLEPNATPATPEA

SEQ ID NO: 65792 - protein, 712 aa, Artificial Sequence
  derived and/or modified sequence
MDHAEENEILAATQRYYVERPIFSHPVLQERLHTKDKVPDSIADKLKQAFTCTPKKIRNIIYMFLPITKWLPAYKFKEYVLGDLVSGISTGVLQLPQGLAFAMLAAVPPIFGLYSSFYPVIMYCFLGTSRHISIGPFAVISLMIGGVAVRLVPDDIVIPGGVNATNGTEARDALRVKVAMSVTLLSGIIQFCLGVCRFGFVAIYLTEPLVRGFTTAAAVHVFTSMLKYLFGVKTKRYSGIFSVVYSTVAVLQNVKNLNVCSLGVGLMVFGLLLGGKEFNERFKEKLPAPIPLEFFAVVMGTGISAGFNLKESYNVDVVGTLPLGLLPPANPDTSLFHLVYVDAIAIAIVGFSVTISMAKTLANKHGYQVDGNQELIALGLCNSIGSLFQTFSISCSLSRSLVQEGTGGKTQLAGCLASLMILLVILATGFLFESLPQTIWLTTFVSSLFLGLDYGLITAVIIALLTVIYRTQSPSYKVLGKLPETDVYIDIDAYEEVKEIPGIKIFQINAPIYYANSDLYSNALKRKTGVNPAVIMGARRKAMRKYAKEVGNANMANATVVKADAEVDGEDATKPEEEDGEVKYPPIVIKSTFPEEMQRFMPPGDNVHTVILDFTQVNFIDSVGVKTLAGIVKEYGDVGIYVYLAGCSAQVVNDLTRNRFFENPALWELLFHSIHDAVLGSQLREALAEQEASAPPSQEDLEPNATPATPEA

SEQ ID NO: 65793 - protein, 473 aa, Artificial Sequence
  derived and/or modified sequence
MDHAEENEILAATQRYYVERPIFSHPVLQERLHTKDKVPDSIADKLKQAFTCTPKKIRNIIYMFLPITKWLPAYKFKEYVLGDLVSGISTGVLQLPQGLAFAMLAAVPPIFGLYSSFYPVIMYCFLGTSRHISIGPFAVISLMIGGVAVRLVPDDIVIPGGVNATNGTEARDALRVKVAMSVTLLSGIIQFCLGVCRFGFVAIYLTEPLVRGFTTAAAVHVFTSMLKYLFGVKTKRYSGIFSVVYSTVAVLQNVKNLNVCSLGVGLMVFGLLLGGKEFNERFKEKLPAPIPLEFFAVVMGTGISAGFNLKESYNVDVVGTLPLGLLPPANPDTSLFHLVYVDAIAIAIVGFSVTISMAKTLANKHGYQVDGNQELIALGLCNSIGSLFQTFSISCSLSRSLVQEGTGGKTQLAGCLASLMILLVILATGFLFESLPQTIWLTTFVSSLFLGLDYGLITAVIIALLTVIYRTQR

SEQ ID NO: 65794 - protein, 447 aa, Artificial Sequence
  derived and/or modified sequence
MDHAEENEILAATQRYYVERPIFSHPVLQERLHTKDKVPDSIADKLKQAFTCTPKKIRNIIYMFLPITKWLPAYKFKEYVLGDLVSGISTGVLQLPQGLAFAMLAAVPPIFGLYSSFYPVIMYCFLGTSRHISIGPFAVISLMIGGVAVRLVPDDIVIPGGVNATNGTEARDALRVKVAMSVTLLSGIIQFCLGVCRFGFVAIYLTEPLVRGFTTAAAVHVFTSMLKYLFGVKTKRYSGIFSVVYSTVAVLQNVKNLNVCSLGVGLMVFGLLLGGKEFNERFKEKLPAPIPLEFFAVVMGTGISAGFNLKESYNVDVVGTLPLGLLPPANPDTSLFHLVYVDAIAIAIVGFSVTISMAKTLANKHGYQVDGNQELIALGLCNSIGSLFQTFSISCSLSRSLVQEGTGGKTQTIWLTTFVSSLFLGLDYGLITAVIIALLTVIYRTQR

SEQ ID NO: 65795 - DNA, 534 bp, Artificial Sequence
  derived and/or modified sequence
atgggagcgcggcgaaaagccatgcgcaagtacgctaaagaggtcggaaatgctaacatggcaaacgccacagttgtgaaggctgatgccgaagtcgacggggaagatgccacaaagcctgaagaagaggacggcgaagtaaagtaccccccaattgtcataaaatccacctttcccgaggaaatgcagagatttatgccgccaggagacaacgtgcataccgtgatccttgattttacacaggttaactttatcgacagcgttggtgtgaagaccctcgccgggatcgtgaaagagtatggcgatgtcgggatttatgtctatctcgcgggctgctctgcccaagtagtgaacgatcttactagaaataggttcttcgagaatcccgctttgtgggagctcctgtttcacagcatccatgacgcggtgctgggttcccaactccgcgaggcattggcggagcaagaagccagcgctcccccaagccaggaagacctggaacccaacgcaaccccagctacacccgaggcctag

SEQ ID NO: 65796 - DNA, 2145 bp, Artificial Sequence
  derived and/or modified sequence
atggaccacgcagaagagaatgaaattttagctgctactcagaggtactacgtggagagacccatcttcagccatccagtgctgcaggaaaggcttcacactaaagataaggtacctgactcaatagcggataagctgaagcaggccttcacttgcactccaaaaaagattaggaatatcatttacatgtttctgccaattacaaaatggcttcccgcttacaaattcaaggagtatgtgctgggcgacctcgtgtcaggcatatccacaggggtactgcagctcccccagggactggctttcgccatgctagctgcagtgccaccaatcttcgggctgtactcatccttttaccccgtgatcatgtactgcttcttaggcacatcaagacatatatctattggaccctttgccgtgatctcccttatgattggcggagttgctgtaagactggtgcctgacgacatcgtcatccctgggggagtcaatgccaccaacggcactgaggcccgagatgcgctccgcgtgaaggtcgccatgtccgtcactctgttatccggcattatacagttttgcctgggtgtgtgccgctttggctttgtggccatctaccttacggaaccactggtgagagggttcacgacagctgctgccgtgcatgtctttactagcatgttaaagtacttgttcggagtcaagacaaagcgctactccgggatctttagtgttgtctacagcacggtggcggtcctccagaatgtcaagaacctgaatgtatgctctctgggagtgggactaatggtgtttggattattgctgggtgggaaagaatttaacgagagattcaaagaaaagcttccggcacctattccacttgaattttttgccgtcgtgatgggaaccggaataagcgcgggcttcaacttaaaggagtcctacaacgtagacgttgttggaactctgcctctcggacttctacccccggcgaacccagacacatcactgttccatctcgtgtatgttgatgccattgctattgctatcgtggggttttctgtgacaatatctatggctaaaactttggccaataaacacggttaccaagtggacggcaatcaggagctaatcgcgctgggactttgcaacagtatcggctctctgtttcagacattctctatctcatgctcgttaagtcgaagcctagtacaagagggtactggcggcaaaacccagctcgccgggtgtctggcgagcctgatgatcttgctggtgatactcgcgactggctttcttttcgagtctctaccacagaccatctggctgacaactttcgtctccagcttgtttcttggcctcgactatggactcataacggccgtgatcatcgctctgctcaccgtaatatacaggacgcaaagtccctcgtacaaggtgcttggcaagttgcccgagaccgatgtgtacatcgatatcgacgcatacgaagaagtgaaggaaatccccggaatcaagattttccagatcaacgcaccaatatactatgccaattcagatctgtattccaacgctctgaaacgaaagacaggagttaatcctgctgtgatcatgggcgcccgccggaaagctatgagaaagtacgcgaaggaagtgggcaacgctaatatggcgaacgctactgtcgtgaaagcaacacaggatgccgaggttgatggagaggacgcgacgaaacccgaggaggaagatggcgaagttaagtaccctccaattgtgattaaaagcactttccccgaggaaatgcaaagattcatgccacccggcgataacgtgcacacagtgatcctcgattttacgcaagtaaacttcatcgactccgtgggagttaaaacactggccggtatcgtgaaggagtacggcgatgtggggatctatgtttacttagcaggctgttccgcacaggtagtgaatgacctaactcgcaatcgcttctttgagaatccagccctgtgggagttgctttttcactcgatccacgacgctgtcctgggctcacagctgagggaagccttggctgagcaggaggcaagtgcacctcccagccaggaagacctcgagcccaatgccaccccagccactcccgaggcatag

SEQ ID NO: 65797 - DNA, 2139 bp, Artificial Sequence
  derived and/or modified sequence
atggatcacgccgaggagaatgagatattggcagctacccagcggtactacgtagaaagacccatatttagccacccagtgttgcaggaaaggctccatactaaagacaaggtgccagatagcattgcagacaagctcaaacaggcctttacttgcacacccaaaaagatcagaaacatcatctatatgtttctgcccatcacaaagtggctgccggcctataagtttaaggaatatgtgctcggcgatttggtgagcggtatctccactggagtcctgcagttgccgcaaggtctggccttcgccatgctggctgccgtccccccgatcttcggactttactcatctttttacccggtgattatgtattgctttctgggaacaagtcgccacataagtatcgggccattcgcagtgatttccctgatgataggtggggtcgccgtgcgcttagtcccagatgatatcgtcattcctggcggcgtcaatgccacaaatgggacggaggcccgtgatgccttgcgggtgaaggtagcaatgagtgtgacgctgctgagtggtatcattcagttttgtctgggggtgtgccgttttggcttcgtggctatctatttaacagagcctctcgtgaggggcttcacgaccgctgccgctgttcacgtgtttacgtcaatgctgaaatatttgttcggggtgaaaacaaaacgatattccggcatcttcagcgtggtgtattcaactgtggccgtgctgcagaatgtgaaaaatctgaatgtgtgcagtctgggagttggattaatggtgttcggtctgctgctgggtggaaaggaatttaacgagagatttaaagaaaaactgccggctccaatccctcttgagttctttgccgttgtgatgggaacaggcatcagcgcaggattcaatcttaaggaatcgtacaatgtggatgtggtgggcaccctccctctaggcttacttcccccggccaatccggacacttctctgtttcatcttgtgtacgtggacgctatcgcaatcgctatagtggggttttccgtgactatttcaatggctaaaaccctagctaacaaacacggataccaggtcgatggcaatcaggagcttatagctctaggcctgtgtaactctattgggagcttgtttcagactttctccatctcctgctccctatcgagatctctcgtgcaggagggcactggaggcaaaacacaactggctggctgcctggccagtctcatgatcctgctagtgatccttgccactggatttctgttcgagtctctgccccagaccatctggctgactacatttgtgtcctctctctttttaggcctggattacggacttattaccgcagtcataatcgctcttctgacagtgatctaccgcacgcagagcccgtcatataaggtgttaggaaaactacccgagaccgatgtgtatatcgacatcgatgcatatgaagaagtgaaggagatcccagggatcaaaatctttcagattaatgccccaatctattacgctaacagcgacctgtatagcaacgcattaaaacgtaagaccggcgttaatcccgctgtcatcatgggtgctaggcgcaaggctatgcggaagtatgcaaaagaggtcgggaacgctaatatggctaatgctacggtggtcaaagccgacgccgaggtcgatggcgaagatgctaccaaacccgaggaggaggacggcgaagtcaaatatcctcccattgtcatcaagtcaacctttccagaggaaatgcagcgatttatgccaccgggggataatgttcatactgttattctggattttacccaagtgaattttattgattccgttggagtgaagaccctggctgggatcgtgaaagaatacggagatgttggcatctatgtctacctggctggatgttctgcgcaagttgtgaacgacttgaccagaaatcgcttttttgaaaaccctgccttatgggaactccttttccactcaattcacgacgccgtcctgggcagccagcttagggaagccttggcagagcaggaggcaagtgcgcctccttcacaggaggatctggaaccgaacgcaacccctgcaacgccagaagcctag

SEQ ID NO: 65798 - DNA, 1422 bp, Artificial Sequence
  derived and/or modified sequence
atggatcatgccgaggaaaacgaaattttggcggcgacccaacggtattatgtggagcgtcccatcttttctcaccccgtactgcaggagaggctgcacaccaaagataaggttccggacagcatcgcggataagttgaaacaggcgtttacctgcacgcctaaaaaaatcagaaacataatttatatgtttctccccattaccaagtggctgccagcttacaagtttaaggaatatgtactgggcgatctggtcagcgggatctccacaggcgtcctccagctgccgcaggggctagctttcgctatgctggccgccgtgcctcccatctttgggctgtattcctcgttctatcctgtgatcatgtactgtttcttgggcacctctaggcacatatctattgggccgttcgccgtcatatctttaatgatcggcggggttgccgtgcggctggtgcccgatgacatagtcatccctggtggagtaaatgcaactaatggcaccgaggcccgggacgcactgcgtgtgaaagttgctatgagcgtcaccctgcttagcgggatcatccagttctgcctgggcgtctgtagattcggattcgtggcaatctacctgaccgagccattggtgcgggggttcactactgccgctgctgtgcacgtcttcacgtctatgctaaagtacctgtttggggtgaaaaccaaaagatacagcggcattttctccgtcgtgtatagcaccgtcgcagtcctgcagaacgtgaaaaatctgaatgtgtgtagtttaggggtggggctcatggtgttcggcctactcctagggggcaaagaatttaatgagcggttcaaagaaaagctgccggctcctatccccctcgagttcttcgcagtagtaatgggtactggtatctccgctggcttcaacctcaaggagtcttacaacgtagatgtggtcggtacactgcctctgggactgcttcccccggccaatcctgacacttccctgttccacctggtttacgttgacgctatagccattgcaatcgtcggcttctctgttactatttcaatggcgaagacactggcaaataagcatggatatcaggtcgacggcaatcaggagctcatcgccttaggactgtgcaattctataggctccctgtttcagaccttttctatttcatgctctctgtccagatcgctggtgcaggaaggcaccgggggcaaaacccagctggcaggctgcttagcttccctgatgatcctgcttgtcatcttggccaccggctttctattcgagtctcttccacagacaatctggctgacaaccttcgtctcctctctcttcctgggtcttgactatggtttgatcacagcagtgattatagccctccttactgtgatctacaggacacagcggtag

SEQ ID NO: 65799 - DNA, 2139 bp, Artificial Sequence
  derived and/or modified sequence
atggaccatgctgaggaaaacgaaatattggctgcaacccagcgctactacgtggaaagaccaatcttcagccacccagtattgcaggaaagactacatacaaaagacaaagtacctgattctattgcagacaagctcaagcaggctttcacgtgtactcccaaaaagatccggaatattatatacatgtttttgccaatcaccaagtggctgccggcatacaaattcaaagaatacgtgctgggagatctggtcagcggcatctctactggcgttctgcagcttccacaaggccttgctttcgccatgttagctgccgtgccacctattttcggtctgtatagcagcttctaccctgtgatcatgtattgtttcttgggaacaagtcgccacatctcaatcggcccatttgcagtgatcagtctgatgatcggcggggtcgctgttagactggtgcccgatgatattgtgattccgggcggagtgaacgctaccaatgggacagaggctcgggatgctctgcgcgtgaaggtagctatgagcgtgaccctcctgtccggaatcattcagttctgtttgggcgtctgcaggttcgggtttgtggcgatttacctgacagaaccactggtgcgaggattcactacagcggctgcggtgcacgttttcacaagcatgctgaagtatctgttcggcgtgaaaactaagaggtatagtggcatcttcagtgtggtgtacagtaccgtggccgtgcttcagaatgttaagaatttaaacgtttgttccttaggcgttgggctgatggtttttggactgttgttgggaggaaaggagttcaacgaacggtttaaggaaaagctgccagcccccatccccctggagttctttgcagtggtgatgggcacaggaatcagtgctggatttaatctgaaggagtcctacaatgtcgatgtggtgggaactctcccattgggcctcttgccacctgcgaaccctgacacatcgctgttccacctagtgtatgttgatgctatcgccattgccatcgtgggattttctgtgactattagcatggccaaaacactcgctaataagcacggctatcaggttgacggaaatcaagagttgatcgcgctaggactctgcaatagcattggcagtctctttcagacctttagtatctcgtgttctctgagcagaagcctggtgcaggaggggaccggcggtaaaacacagctcgccgggtgcctcgcatctctcatgattttactagtgattctggctaccgggtttctttttgaatcactcccccaaaccatttggttgaccaccttcgtgtccagtttgttcctgggcctggactacgggctcattactgccgtaatcatcgccctgctgacagtcatttaccggacacagagcccatcctataaggtgctgggtaagctccccgaaacagacgtctatatcgatatagatgcttacgaagaggtgaaagaaattcccggtataaaaatttttcaaattaacgcacccatttactatgccaacagtgatttgtacagtaatgccttgaagcggaagacaggcgtgaacccggccgtgatcatgggcgccaggaggaaggccatgagaaaatatgcaaaggaagtcggcaatgccaacatggccaacgctacggtggtgaaagcggacgcagaagttgacggagaggacgcaactaagcctgaggaagaggatggggaggtcaaataccctccaatcgtgatcaagagtacattccccgaggaaatgcaacggttcatgccacctggcgataatgttcacacagtgattcttgattttacccaggtaaacttcattgattctgttggagttaagacacttgctggaattgtgaaggagtacggagacgtgggcatctacgtgtatttggccggctgctcagcccaggtggttaatgacttaacgcggaatcggtttttcgaaaaccccgcactatgggaactcctttttcacagcatccatgacgcagtactgggatcccagttgagagaggccttggctgagcaggaagcctctgctccacccagccaggaagacttggaaccaaacgcgaccccagcaacgcccgaggcctag

SEQ ID NO: 65800 - DNA, 1344 bp, Artificial Sequence
  derived and/or modified sequence
atggatcacgccgaagaaaacgaaatcctcgctgcaactcagcggtattatgtcgagaggcctatcttctcacatccagtcctccaggagcgactgcacacaaaagataaggtgccggactctatcgccgataagctgaaacaggcttttacctgcacacccaaaaagatcagaaacattatttacatgtttctgcccattacaaaatggctgccggcttataagtttaaggagtacgtgcttggagatctggtgtcagggataagtactggggtcctgcagctcccgcaaggactcgccttcgctatgctggcggccgtgcctccaatctttgggctttacagtagcttctatcctgtcattatgtattgctttctcggtacaagccgtcacattagcattggacctttcgcagtcatctccctaatgattggcggcgtggctgtgagactggtccctgacgatattgtgattcctggcggggtcaatgctacaaacggcactgaagcccgtgatgccctgagagtgaaggtggctatgtcagtaacacttctgtccggcatcattcaattttgtcttggtgtttgcagattcggtttcgtcgccatttacttgacagaacctttggtgcggggctttacaactgccgccgcagtgcacgttttcacctctatgcttaaatacttgtttggtgtgaaaactaagaggtatagcggcatattctctgtggtttactctaccgtggccgtcctgcaaaacgttaagaacctcaatgtttgctcactaggggtcggactcatggtgtttggactactcctcggcggcaaggaattcaacgaacgattcaaggagaaactgccagccccaatacccttagaattctttgcagtggtgatgggcaccgggatcagcgctgggtttaacctaaaagagtcatataatgtggatgtcgtggggaccctgccactcggcctgttaccacccgctaaccccgatactagcttatttcatctggtctacgttgacgccatcgccatcgccattgtgggattttctgtaaccatttccatggccaagactttggcgaataaacatgggtaccaggtggacggcaatcaggaactgattgctctgggtctgtgcaactcaattgggagtctttttcagaccttcagcatctcctgcagcctgagtcgctctcttgtccaggaaggaaccgggggcaaaacgcagaccatctggctcaccacctttgtttcgtctctatttctaggactggactacggcttgatcactgcagtgataatagcactgctcacagtgatataccggactcaacgctag

SEQ ID NO: 65801 - DNA, 534 bp, Artificial Sequence
  derived and/or modified sequence
atgggcgcccggaggaaggccatgaggaaatatgccaaggaggtgggcaatgccaacatggccaatgccaccgtggtgaaggcagatgctgaggtggatggagaagatgccaccaagccagaggaggaggatggagaggtgaagtacccacccatcgtcatcaagagcaccttccctgaggagatgcagcgcttcatgcctcctggggacaacgtgcacacagtcatcctggacttcacccaggtgaacttcattgattctgtgggcgtgaagaccctggccggcatcgtgaaggagtatggagatgtgggcatctacgtgtacctggccggctgcagcgcccaggtggtgaatgacctgaccaggaaccgcttctttgaaaatcctgccctgtgggagctgctcttccacagcatccatgatgctgtgctgggcagccagctgcgggaggccctggccgagcaggaggccagcgccccacccagccaggaggacctggagcccaatgccaccccagccaccccagaggcctag

SEQ ID NO: 65802 - DNA, 2145 bp, Artificial Sequence
  derived and/or modified sequence
atggaccacgccgaggagaatgagatcctggccgccacccagcgctactacgtggagcggcccatcttcagccaccctgtgctgcaggagcggctgcacaccaaggacaaggtgcctgacagcattgctgacaagctgaagcaggccttcacctgcacccccaagaagatccggaacatcatctacatgttcctgcccatcaccaagtggctgcctgcctacaagttcaaggagtatgtgctgggggacctggtgtctggcatcagcactggagtgctgcagctgccccagggcctggcctttgccatgctggccgctgtgccccccatcttcggcctgtacagcagcttctaccctgtgatcatgtactgcttcctgggcaccagccgccacatcagcatcggcccctttgctgtgatcagcctgatgattggaggagtggccgtgcggctggtgcctgatgacatcgtcatccctggaggagtgaatgccaccaacggcacagaggccagagatgccctgcgggtgaaggtggccatgtctgtgaccctgctgagcggcatcatccagttctgcctgggcgtgtgccgcttcggctttgtggccatctacctgacagagcccctggtgcggggcttcaccacagctgctgctgtgcacgtgttcacctccatgctgaagtacctgtttggagtgaagaccaagcgctacagcggcatcttctctgtggtgtacagcacagtggccgtgctgcagaatgtgaagaacctgaatgtgtgcagcctgggcgtgggcctgatggtgtttggcctgctgctgggcggcaaggagttcaatgaacgcttcaaggagaagctgcctgcccccatccccctggagttctttgctgtggtgatgggcaccggcatctctgctggcttcaacctgaaggagagctacaacgtggatgtggtgggcaccctgcccctgggcctgctgcccccagccaacccagacaccagcctcttccacctggtgtatgtggatgccatcgccatcgccatcgtgggcttctctgtgaccatctccatggccaagaccctggccaacaagcacggctaccaggtggatggcaaccaggagctgattgccctgggcctgtgcaacagcatcggcagcctcttccagaccttcagcatcagctgcagcctgagccgcagcctggtgcaggagggcaccggcggcaagacccagctggccggctgcctggccagcctgatgatcctgctggtgatcctggccaccggcttcctgtttgagagcctgccccagaccatctggctgaccacctttgtgagcagcctcttcctgggcctggactatggcctcatcacagctgtgatcatcgccctgctgaccgtcatctaccgcacccagagccccagctacaaggtgctgggcaagctgcctgagacagatgtgtacattgatattgatgcctatgaggaggtgaaggagatccctggcatcaagatcttccagatcaatgcccccatctactatgccaacagcgacctgtacagcaatgccctgaagaggaagacaggagtgaacccagctgtgatcatgggcgcccggaggaaggccatgaggaaatatgccaaggaggtgggcaatgccaacatggccaatgccaccgtggtgaaggccacccaggatgctgaggtggatggagaagatgccaccaagccagaggaggaggatggagaggtgaagtacccacccatcgtcatcaagagcaccttccctgaggagatgcagcgcttcatgcctcctggggacaacgtgcacacagtcatcctggacttcacccaggtgaacttcatcgacagcgtgggcgtgaagaccctggccggcatcgtgaaggagtatggagatgtgggcatctacgtgtacctggccggctgcagcgcccaggtggtgaatgacctgaccaggaaccgcttctttgagaacccagccctgtgggagctgctcttccacagcatccatgatgctgtgctgggcagccagctgcgggaggccctggccgagcaggaggccagcgccccacccagccaggaggacctggagcccaatgccaccccagccaccccagaggcctag

SEQ ID NO: 65803 - DNA, 2139 bp, Artificial Sequence
  derived and/or modified sequence
atggaccacgccgaggagaatgagatcctggccgccacccagcgctactacgtggagcggcccatcttcagccaccctgtgctgcaggagcggctgcacaccaaggacaaggtgcctgacagcattgctgacaagctgaagcaggccttcacctgcacccccaagaagatccggaacatcatctacatgttcctgcccatcaccaagtggctgcctgcctacaagttcaaggagtatgtgctgggggacctggtgtctggcatcagcactggagtgctgcagctgccccagggcctggcctttgccatgctggccgctgtgccccccatcttcggcctgtacagcagcttctaccctgtgatcatgtactgcttcctgggcaccagccgccacatcagcatcggcccctttgctgtgatcagcctgatgattggaggagtggccgtgcggctggtgcctgatgacatcgtcatccctggaggagtgaatgccaccaacggcacagaggccagagatgccctgcgggtgaaggtggccatgtctgtgaccctgctgagcggcatcatccagttctgcctgggcgtgtgccgcttcggctttgtggccatctacctgacagagcccctggtgcggggcttcaccacagctgctgctgtgcacgtgttcacctccatgctgaagtacctgtttggagtgaagaccaagcgctacagcggcatcttctctgtggtgtacagcacagtggccgtgctgcagaatgtgaagaacctgaatgtgtgcagcctgggcgtgggcctgatggtgtttggcctgctgctgggcggcaaggagttcaatgaacgcttcaaggagaagctgcctgcccccatccccctggagttctttgctgtggtgatgggcaccggcatctctgctggcttcaacctgaaggagagctacaacgtggatgtggtgggcaccctgcccctgggcctgctgcccccagccaacccagacaccagcctcttccacctggtgtatgtggatgccatcgccatcgccatcgtgggcttctctgtgaccatctccatggccaagaccctggccaacaagcacggctaccaggtggatggcaaccaggagctgattgccctgggcctgtgcaacagcatcggcagcctcttccagaccttcagcatcagctgcagcctgagccgcagcctggtgcaggagggcaccggcggcaagacccagctggccggctgcctggccagcctgatgatcctgctggtgatcctggccaccggcttcctgtttgagagcctgccccagaccatctggctgaccacctttgtgagcagcctcttcctgggcctggactatggcctcatcacagctgtgatcatcgccctgctgaccgtcatctaccgcacccagagccccagctacaaggtgctgggcaagctgcctgagacagatgtgtacattgatattgatgcctatgaggaggtgaaggagatccctggcatcaagatcttccagatcaatgcccccatctactatgccaacagcgacctgtacagcaatgccctgaagaggaagacaggagtgaacccagctgtgatcatgggcgcccggaggaaggccatgaggaaatatgccaaggaggtgggcaatgccaacatggccaatgccaccgtggtgaaggcagatgctgaggtggatggagaagatgccaccaagccagaggaggaggatggagaggtgaagtacccacccatcgtcatcaagagcaccttccctgaggagatgcagcgcttcatgcctcctggggacaacgtgcacacagtcatcctggacttcacccaggtgaacttcatcgacagcgtgggcgtgaagaccctggccggcatcgtgaaggagtatggagatgtgggcatctacgtgtacctggccggctgcagcgcccaggtggtgaatgacctgaccaggaaccgcttctttgagaacccagccctgtgggagctgctcttccacagcatccatgatgctgtgctgggcagccagctgcgggaggccctggccgagcaggaggccagcgccccacccagccaggaggacctggagcccaatgccaccccagccaccccagaggcctag

SEQ ID NO: 65804 - DNA, 1422 bp, Artificial Sequence
  derived and/or modified sequence
atggaccacgccgaggagaatgagatcctggccgccacccagcgctactacgtggagcggcccatcttcagccaccctgtgctgcaggagcggctgcacaccaaggacaaggtgcctgacagcattgctgacaagctgaagcaggccttcacctgcacccccaagaagatccggaacatcatctacatgttcctgcccatcaccaagtggctgcctgcctacaagttcaaggagtatgtgctgggggacctggtgtctggcatcagcactggagtgctgcagctgccccagggcctggcctttgccatgctggccgctgtgccccccatcttcggcctgtacagcagcttctaccctgtgatcatgtactgcttcctgggcaccagccgccacatcagcatcggcccctttgctgtgatcagcctgatgattggaggagtggccgtgcggctggtgcctgatgacatcgtcatccctggaggagtgaatgccaccaacggcacagaggccagagatgccctgcgggtgaaggtggccatgtctgtgaccctgctgagcggcatcatccagttctgcctgggcgtgtgccgcttcggctttgtggccatctacctgacagagcccctggtgcggggcttcaccacagctgctgctgtgcacgtgttcacctccatgctgaagtacctgtttggagtgaagaccaagcgctacagcggcatcttctctgtggtgtacagcacagtggccgtgctgcagaatgtgaagaacctgaatgtgtgcagcctgggcgtgggcctgatggtgtttggcctgctgctgggcggcaaggagttcaatgaacgcttcaaggagaagctgcctgcccccatccccctggagttctttgctgtggtgatgggcaccggcatctctgctggcttcaacctgaaggagagctacaacgtggatgtggtgggcaccctgcccctgggcctgctgcccccagccaacccagacaccagcctcttccacctggtgtatgtggatgccatcgccatcgccatcgtgggcttctctgtgaccatctccatggccaagaccctggccaacaagcacggctaccaggtggatggcaaccaggagctgattgccctgggcctgtgcaacagcatcggcagcctcttccagaccttcagcatcagctgcagcctgagccgcagcctggtgcaggagggcaccggcggcaagacccagctggccggctgcctggccagcctgatgatcctgctggtgatcctggccaccggcttcctgtttgagagcctgccccagaccatctggctgaccacctttgtgagcagcctcttcctgggcctggactatggcctcatcacagctgtgatcatcgccctgctgaccgtcatctaccgcacccagaggtag

SEQ ID NO: 65805 - DNA, 1344 bp, Artificial Sequence
  derived and/or modified sequence
atggaccacgccgaggagaatgagatcctggccgccacccagcgctactacgtggagcggcccatcttcagccaccctgtgctgcaggagcggctgcacaccaaggacaaggtgcctgacagcattgctgacaagctgaagcaggccttcacctgcacccccaagaagatccggaacatcatctacatgttcctgcccatcaccaagtggctgcctgcctacaagttcaaggagtatgtgctgggggacctggtgtctggcatcagcactggagtgctgcagctgccccagggcctggcctttgccatgctggccgctgtgccccccatcttcggcctgtacagcagcttctaccctgtgatcatgtactgcttcctgggcaccagccgccacatcagcatcggcccctttgctgtgatcagcctgatgattggaggagtggccgtgcggctggtgcctgatgacatcgtcatccctggaggagtgaatgccaccaacggcacagaggccagagatgccctgcgggtgaaggtggccatgtctgtgaccctgctgagcggcatcatccagttctgcctgggcgtgtgccgcttcggctttgtggccatctacctgacagagcccctggtgcggggcttcaccacagctgctgctgtgcacgtgttcacctccatgctgaagtacctgtttggagtgaagaccaagcgctacagcggcatcttctctgtggtgtacagcacagtggccgtgctgcagaatgtgaagaacctgaatgtgtgcagcctgggcgtgggcctgatggtgtttggcctgctgctgggcggcaaggagttcaatgaacgcttcaaggagaagctgcctgcccccatccccctggagttctttgctgtggtgatgggcaccggcatctctgctggcttcaacctgaaggagagctacaacgtggatgtggtgggcaccctgcccctgggcctgctgcccccagccaacccagacaccagcctcttccacctggtgtatgtggatgccatcgccatcgccatcgtgggcttctctgtgaccatctccatggccaagaccctggccaacaagcacggctaccaggtggatggcaaccaggagctgattgccctgggcctgtgcaacagcatcggcagcctcttccagaccttcagcatcagctgcagcctgagccgcagcctggtgcaggagggcaccggcggcaagacccagaccatctggctgaccacctttgtgagcagcctcttcctgggcctggactatggcctcatcacagctgtgatcatcgccctgctgaccgtcatctaccgcacccagaggtag

SEQ ID NO: 65806 - DNA, 534 bp, Artificial Sequence
  derived and/or modified sequence
atgggcgcccggcggaaggccatgcggaagtacgccaaggaggtggggaacgccaatatggcaaacgctaccgtcgttaaagctgacgcagaggttgacggcgaagatgcaactaagcctgaggaagaagacggagaggtgaagtatccgccgattgttattaaaagcacgttccccgaggagatgcaaagattcatgcctcctggagacaacgttcacacagtcatccttgacttcacccaggtcaacttcatcgactccgttggtgttaaaaccttggccggcattgtgaaagaatacggtgacgtcggcatttacgtgtacctcgccgggtgtagcgcacaggttgtcaatgacttaactcgcaaccgttttttcgaaaacccagccctttgggaactgctgttccactctatccacgatgccgtgctcggctctcaactcagggaagcactggctgaacaggaggctagcgctccacccagccaggaggacctggagcccaatgcgactcccgctacgcccgaagcatag

SEQ ID NO: 65807 - DNA, 2145 bp, Artificial Sequence
  derived and/or modified sequence
atggaccacgccgaggagaacgagatcctggccgccacccagcggtactatgttgagaggcccatcttctcgcatcctgtgctccaagagcgcctgcacacaaaagacaaggtcccagatagcatcgctgataagctgaaacaggctttcacttgcacccccaagaaaattagaaatatcatttatatgttcttacctatcacgaagtggctacccgcttataagtttaaggagtatgttttgggagacctggtgtcaggcatttcaaccggcgtcctccagctgccccagggccttgcttttgcgatgctagcagcggtgccgcccatctttggcctctactccagcttttaccccgtgatcatgtactgttttctgggaaccagcaggcatatctctattggccccttcgcagtgatcagcctaatgatcggaggggtggccgtgaggcttgtgccagatgacatcgtgatccctgggggcgtgaacgccactaatgggaccgaggctcgcgacgcactgcgcgtgaaggtggctatgtctgttactctgctgtcaggaattatccagttctgcctcggagtgtgtcgtttcgggtttgtggccatttatctcacagagccccttgtgcgcggtttcaccaccgcagcagcagtacacgtgtttaccagcatgctgaaatacctgtttggggtcaagacaaagcgttattctgggatcttttctgtcgtgtactctaccgtggctgtactgcagaacgtgaaaaacctcaatgtctgctcactgggagtgggattgatggtttttgggctactgttgggtggcaaagaatttaacgaacgctttaaggagaaactgcccgctcccattccattggaatttttcgccgtggttatgggaacgggaataagcgccggttttaatctcaaagaaagctacaacgtcgatgtggtgggcacattgcccctgggcctcttgccccccgctaatccggacacctctcttttccatctggtgtatgtggacgccatagccatcgctatcgtgggattttcggtgacaatttctatggccaaaacactcgccaacaagcacgggtaccaggttgacggtaatcaagaactgatcgcactgggcctctgcaattcaatcggctccctgttccagacatttagtattagctgcagtttaagcagatcactggtccaggaaggtacaggcggaaagacccaattagctggttgtttggcctctttaatgattttgctagtgattctggctacaggcttccttttcgagagtctacctcagaccatatggctcacaaccttcgtgtccagtctgttcttgggcttagactacggcctgatcaccgctgtgatcatagcactgctcaccgttatctatcggacccagagtccaagctacaaggtgctgggcaagctgcccgaaaccgacgtgtacatagacattgatgcatatgaggaggtgaaagaaatccctgggattaagatattccaaataaacgcccctatttactacgcaaactctgatctctactctaacgcattgaagagaaaaaccggcgtgaacccggccgtgattatgggggctcggagaaaggccatgcgcaagtatgctaaggaggtgggaaacgccaacatggctaacgccaccgtggtcaaggccactcaggatgcagaagtggatggcgaagacgctaccaaacctgaggaggaagatggcgaggtgaagtacccccccatcgtcatcaaaagcaccttccctgaggaaatgcagagatttatgcctcccggagataatgtgcacacggtcattttggactttacacaggtgaacttcatagactctgttggcgttaaaaccttggcaggtatcgtaaaagagtatggcgacgtgggtatttacgtgtacctggccggttgctccgcccaagtggtgaatgacctgactagaaaccggttcttcgagaatcctgcattatgggagctgttgtttcattctattcacgatgctgtactaggttctcagcttcgcgaggctctggctgagcaggaagcaagcgcgccccctagtcaggaagacctcgaacctaatgctactcccgcaactccagaagcgtag

SEQ ID NO: 65808 - DNA, 2139 bp, Artificial Sequence
  derived and/or modified sequence
atggaccacgccgaggagaacgagatcctggccgccacccagcggtactatgtagagaggcctatttttagccaccctgtcctccaagagcggttgcacaccaaagataaagtgcctgattcgattgccgataagctaaagcaggcctttacatgcacccccaagaagatcagaaatataatctacatgttcctgccaattacaaagtggctacccgcttataagttcaaggagtacgtgctgggcgacctagtgagcggtatttctactggcgtccttcagctgccacagggcctggccttcgccatgttggccgctgtgccgcccatatttggcctgtactcttctttctacccagtgatcatgtactgttttctgggaactagccggcacataagtatcggaccttttgcagttattagcttaatgattggtggggtggccgtccgcctcgtgcccgatgatattgtcattcctggcggcgtgaatgctaccaatggaacagaagcccgggacgcacttcgcgtcaaggtagccatgagcgtgacgctgctgtctggcataatccagttctgtctcggagtttgtcggttcggctttgtcgcgatatacttaaccgagccattggtacggggtttcaccacagctgcagccgtgcatgtcttcacgtctatgctcaaatacttatttggggttaagactaaacgctacagcgggatcttctccgtggtgtattcgaccgtcgccgtgctgcagaacgttaagaacctcaacgtatgttccctgggggtcggtttgatggtgtttggactattattgggggggaaagaattcaatgaaagatttaaggagaaactgccagctcccattcccttggagtttttcgctgtcgtcatggggacaggtattagtgccggctttaatctgaaagaaagctataacgtggacgtggtgggcaccctgcctctggggttgttaccacccgcaaatcccgatacaagtttgttccatctggtgtacgtcgacgccatcgcaatcgctatcgttggattctctgtcacaatcagtatggctaagacactggccaacaagcacggctaccaggtggacggcaatcaggaactgattgcattgggtttgtgcaattctatcgggagcctgttccaaactttcagtatcagctgctcgctgtcacgctcacttgtccaggaaggcacagggggcaaaacacagctggcagggtgtctcgcttctctgatgatcctgctagtgattctggcgacaggcttcctcttcgagtccttgccgcagacaatctggcttaccaccttcgtttcatcactttttctgggtctagattatgggctgattaccgcggtgatcattgctctgcttacagtaatttatcgaactcaatctccttcatacaaagtgctcggcaagctcccagagaccgatgtgtacatagacatcgacgcctatgaggaggtgaaagagatccctggcattaaaatatttcagattaacgcgccaatttattacgccaatagtgatctctattccaacgccctgaagcggaagacaggagtgaatcctgcagtcattatgggcgcaagaagaaaggcaatgcgcaagtatgccaaggaggtaggcaatgctaacatggccaatgccacagtggtaaaggcagatgctgaggtggatggcgaagacgctacgaagccagaagaggaggatggcgaggttaaatacccaccaatcgtgattaagagtacatttccagaggaaatgcagaggtttatgccccctggggataacgtgcacactgtaatactggatttcactcaagtgaattttattgactcagtgggtgtcaagacactggcgggcatagtgaaagagtacggggacgtcggtatctacgtgtatctggctggatgctctgcccaggtcgtcaacgacctgactcggaaccggttttttgagaatccagcgctctgggagctgcttttccatagtatccatgacgccgtacttgggtctcagctgcgcgaggccctcgcagaacaggaggcctccgccccaccatcacaggaggacctggaaccaaacgctaccccagccactcccgaggcgtag

SEQ ID NO: 65809 - DNA, 1422 bp, Artificial Sequence
  derived and/or modified sequence
atggaccacgccgaggagaacgagatcctggccgccacccagcggtactatgtcgaacgccccatcttctcccaccctgtgctgcaggagaggttacacaccaaggacaaggtacctgatagtatcgctgacaagcttaaacaggctttcacatgcactcccaagaagatcaggaacatcatatacatgtttctcccgatcacaaaatggctgccagcttacaaatttaaagaatacgttttaggagatttagtcagtggtatttccaccggggttttgcaactcccacagggcctggcatttgccatgctggccgccgtgccccccatcttcggcctgtacagctccttctaccccgtgattatgtattgcttcctcggaacctcccgccacatcagcataggacccttcgcagtgattagcttgatgataggcggagtggccgtgagactcgtccccgatgatatagtaatccccggaggcgtaaacgctaccaatggcactgaggccagagacgccctgagggttaaggtcgctatgtccgtaactcttttatccggtatcattcaattttgcttgggagtgtgtcgattcggtttcgtggccatttacctgaccgaaccactggtgagaggctttaccacagccgcagccgtgcacgtgttcacatccatgctgaagtacctgtttggggtgaagacaaaaagatacagcggaatattttcagttgtgtatagtactgtcgccgtactgcaaaatgtgaagaatcttaatgtgtgcagcctgggcgtgggactaatggtgtttggcctgttactgggcggcaaggagttcaacgagaggtttaaggagaaactccctgctcccatcccacttgagttctttgcggttgtaatgggcaccggcattagcgctggcttcaatctgaaagagtcttacaatgtcgatgtcgtggggaccctcccactcggtctgttgcctccggccaatccagacacgagtctgttccacctggtgtatgtagatgccatcgctatcgcgatcgtcggcttttccgttacaattagcatggccaaaacactcgccaacaaacatggctatcaagttgatgggaatcaggagctcatcgcactagggctgtgtaatagtattggtagtctcttccagactttcagtatttcttgctccctctctcgctccctggtccaagaagggactggcggaaagacccagcttgcggggtgtttagctagcctgatgattctgctggtgattcttgcaactggatttttgttcgagtccctgccgcagaccatttggctcacaacattcgtctcaagtctgtttttggggctggattacggccttatcacagctgtcatcatagccctcctgactgtgatctaccggacccaaaggtag

SEQ ID NO: 65810 - DNA, 2139 bp, Artificial Sequence
  derived and/or modified sequence
atggaccacgccgaggagaacgagatcctggccgccacccagcggtactacgtcgaacgcccaattttttctcatcccgtgctacaggaaaggctacacacgaaggacaaggtaccagattccattgcggataagcttaaacaggccttcacttgcacacctaaaaagatcagaaacatcatttatatgttcctgcccatcactaagtggctgccagcctacaagttcaaagagtatgtgttaggggaccttgtctcaggcatttccacaggcgttctgcagttgccacaaggactggctttcgccatgctggccgccgtgccgccaatctttggcctatattcctccttttatcctgtgattatgtattgttttctgggtaccagccggcatatctctatcggaccttttgccgtgatttctctgatgataggcggagtcgccgtgaggctggtacccgacgatatcgtgatcccaggtggagtgaatgcgacaaatgggaccgaagcccgcgacgccctgagggtgaaagtagccatgtcagtcacattgctcagcgggattatccagttttgtctgggtgtctgcagatttggcttcgtagccatctacttgacagaacctctggtcagaggtttcactaccgccgccgcagtacacgtctttacgtcaatgctgaaatacctgttcggagtaaagaccaaaaggtacagtgggattttctctgtggtgtactctactgtggccgttctgcagaacgtcaagaacctgaatgtatgcagcctgggggtcggcctgatggtgttcggactgcttttagggggaaaggagtttaatgagcggtttaaggagaaactgcccgcccctatccctctcgagttcttcgccgtcgtcatggggacaggaattagtgcaggcttcaatctcaaggaatcttacaatgttgacgtggttgggacattgcctctgggccttctgccgccagccaatcctgatacctctttgttccacctggtttacgtggacgcaatagcaatcgcgattgtcggtttcagcgtcaccatctccatggcgaagacgctcgcgaataagcacggctatcaagtggacgggaaccaggagctgatcgcactgggcctctgtaatagtatcgggagtcttttccagacattcagcatctcttgctcgctaagccggagcctggttcaagaggggaccggcggtaaaactcagctagcgggctgcttagcttccctcatgatcctgctcgtgattctggctacaggttttctgtttgaatcgcttcctcagaccatctggctgacaactttcgtgagttctttgtttttgggtttggattacgggctgattacagcagtcatcatcgccttattgaccgtgatctatcgaacacagagtccatcctacaaagtgctgggaaaactgcctgagaccgacgtgtatatcgacatcgatgcttatgaggaggttaaagagatccctggcattaaaatttttcagatcaatgcacccatttattatgctaattctgacctttacagcaacgctcttaagaggaagacaggagttaacccggcagtcattatgggagctcgaagaaaggctatgcgcaagtacgccaaagaggtgggcaatgcaaatatggctaacgcaactgttgtgaaggccgacgcagaggtggacggagaagatgcaaccaaaccagaagaagaggatggcgaagtgaaatacccaccgatcgtgataaaaagtactttcccagaagaaatgcagaggttcatgcctcccggtgataacgtacacaccgtgatcctggacttcacccaggtcaatttcattgatagcgtgggagttaagacattggcgggaattgtaaaggagtacggcgacgtgggcatttacgtgtatctggctggttgttctgcccaggtcgtcaacgacttaactcgcaacaggtttttcgaaaacccagccctgtgggagttacttttccactccattcacgatgctgtcctgggctcccagctgagggaagcccttgccgaacaggaagctagtgctcccccttctcaggaagatctcgagcctaatgccacacctgctactcctgaagcatag

SEQ ID NO: 65811 - DNA, 1344 bp, Artificial Sequence
  derived and/or modified sequence
atggaccacgccgaggagaacgagatcctggccgccacccagcggtattacgtggagcggccaatcttttcgcaccccgttcttcaggagcggctgcacacaaaggataaagtgcctgactccatcgcagataaactcaagcaggccttcacatgcacacctaagaagatccgcaacattatttatatgtttttgcccatcacaaagtggctgcccgcctataagttcaaggaatatgtgctgggagatcttgtatcaggaatctccacaggcgtcctgcagctgccacagggtttagcatttgctatgcttgcagctgtgccacctatcttcggcctgtatagctctttctaccccgtcattatgtattgtttcttaggaacaagccggcatatcagcatcggtccatttgctgtaatctcactgatgatcggcggagtggctgtgcggctagtcccagacgacatcgtcattcctggtggcgttaacgctaccaatggcaccgaggcgagagacgctctgcgggtgaaagtggcgatgtcagttacccttttgtccggtataatccagttttgcctgggagtctgccgctttggattcgtggctatatatttgacggaacccttggtcagaggtttcaccacggcagctgccgtgcacgtgttcacgtccatgcttaagtacctattcggcgtgaagaccaagcgatattctggcattttctccgtcgtctacagcacagtggccgtactgcagaatgttaagaatctgaacgtttgctccttaggtgtcgggctaatggtttttggcctcttgctcggtggcaaagaatttaatgagaggtttaaagagaaactcccggcccccatcccactggagttttttgccgttgtaatgggtaccggaatttctgctgggttcaacctgaaggagagctacaacgtggatgtggttggtactctacccctggggttgctgccgcccgccaacccagacacttcacttttccatttggtatacgtcgacgccattgcgatcgcgatcgttggattttcggtgaccatctcaatggccaagactctggccaacaagcatggatatcaagtggatggaaatcaggagcttatcgcactgggcctctgtaatagtattggatccctgttccagacattctccatcagttgttccttatcccggtcactggtgcaagagggaactggcggcaagacacagacaatctggctcacaacattcgtgagcagtctgttcctagggcttgactacggacttattaccgcggtgatcatcgcgttattgacagtcatttatcgcacccagaggtag

SEQ ID NO: 65812 - DNA, 534 bp, Artificial Sequence
  derived and/or modified sequence
atgggcgcaaggagaaaggccatgcggaagtatgccaaagaagtggggaatgcgaacatggctaacgctaccgtggttaaggccgatgccgaagtggacggggaggacgctactaagcccgaagaggaggatggggaagtgaaatacccacctatagttatcaaatccaccttcccagaagagatgcagcgctttatgcctcccggagacaatgtgcatacagtcattctagacttcactcaggtgaactttattgacagtgttggggtgaagaccttggccggaatcgtcaaggaatacggggacgtcggcatttatgtgtacctcgcgggttgttctgcacaggtagtgaacgatctgactcgtaatagattctttgaaaaccctgccctctgggagctgctgttccactccattcatgatgcagtactaggatcacagttgagagaagcactggcagagcaggaagctagcgccccaccatcccaggaggatctggagcctaacgccactccggcaacccccgaggcctag

SEQ ID NO: 65813 - DNA, 2145 bp, Artificial Sequence
  derived and/or modified sequence
atggaccacgctgaggaaaatgaaatattggccgcaacacagcggtattacgtagagcgcccaatcttctcccaccccgtccttcaggaacggctacatactaaagacaaagttcctgactctattgctgacaagctaaagcaagcgtttacatgtacccccaagaagatcaggaatatcatttacatgtttttacctatcactaagtggcttcccgcttacaagtttaaggagtacgtcctgggtgacttagtttcaggcatttcaaccggagtgcttcagctgccccagggactggctttcgccatgttagccgcagtgccccctatctttggattgtactcaagcttctaccccgtgattatgtactgctttcttggcactagtcggcacatttcgattgggcctttcgccgtaataagtctcatgattggcggtgtggccgtgcgattggtgccagacgatattgtaattccaggcggagttaacgccacgaatgggacggaggcccgagacgccctaagagtaaaggtggccatgtccgtgaccctgttgtccggtatcatccagttctgcctgggcgtctgtcgtttcggcttcgtggccatttatctgaccgagcctctggtgcgcggtttcacgacagccgctgccgtccatgtattcactagtatgctgaaatacctctttggagtgaagacaaaaaggtactcaggaatcttttccgttgtatactccactgttgctgtcctgcagaatgtgaagaatctcaacgtctgttctttaggcgtgggcttgatggtgtttggattgctgctcggcggaaaagagttcaacgaaagattcaaggaaaaactgcccgctcctatccctctggagttcttcgctgtggttatgggcaccgggatctcggccggtttcaacttaaaagagtcatacaacgtggatgtcgtcggcactttgcctctgggcctgcttcccccagcaaaccctgatactagtctgtttcacctggtctacgtcgatgcgatagctatcgcaattgtcggattctctgtgactatttctatggcaaagacgttggcaaacaagcacggataccaggttgatggcaaccaggagctcatcgcactcggcctgtgcaatagtattggtagcctgtttcagaccttcagtatctcctgttcactgagtcgtagccttgtccaggagggcaccgggggaaaaacacagttagcaggatgcttagccagcctgatgattctgctggttatactcgccacaggctttctcttcgagagcctgccccagacaatttggctcacaaccttcgtttccagtctgtttctaggcctggattatggcctgatcactgctgtgataatagctttgcttaccgtcatctatcgaacacagtcaccctcttataaggtgcttggcaagcttcctgagacggatgtgtacatcgacattgatgcctacgaagaggtcaaggagatccccggaatcaaaatcttccagatcaatgcgccaatttactatgccaatagcgatctgtacagcaatgctctgaagcgcaaaacaggtgtgaatcccgctgtaatcatgggcgctaggagaaaagcaatgcgaaaatatgctaaagaggtgggtaatgcaaacatggccaatgcaacagttgtgaaggccactcaggacgctgaggttgatggggaagatgctaccaaaccagaggaggaggacggtgaagttaagtatcccccaatcgtgatcaaatcgacctttcccgaagagatgcagaggtttatgccgccaggcgataacgttcacaccgtgatcttggacttcacccaggtcaatttcatcgactctgtgggggtgaaaacgcttgcgggtatcgtgaaagaatatggagacgtgggtatctatgtgtacctggctggctgctctgcacaggtggtgaatgacctgacacgcaaccggttttttgagaatccggctctttgggaattactgtttcattcaattcacgacgctgtcctcggttcgcagctgagggaggcacttgcagagcaggaggcctcagctccgcctagtcaagaggatctggaacccaatgcaacacccgcaacaccagaagcctag

SEQ ID NO: 65814 - DNA, 2139 bp, Artificial Sequence
  derived and/or modified sequence
atggatcacgccgaagaaaatgagatcctggccgctactcagcgttattacgtggaacgccctatcttttctcaccctgtacttcaggagaggctacacaccaaagacaaagtacccgactccatagcagataagctgaagcaggccttcacctgtacccctaagaaaataaggaacattatctacatgttcctgcctattactaaatggctgcccgcttataagtttaaagagtacgttttgggcgaccttgtctctgggatttccacaggagttttgcagctccctcagggactggcattcgcaatgctggccgctgtgcctccaattttcgggttatatagctccttttatcccgttataatgtactgcttcctgggcacctccaggcatatttccatcgggccattcgccgtgatttccttgatgattggtggcgttgccgtgaggctggtcccagacgacatcgtcatcccaggtggtgttaatgcgacgaacgggaccgaggccagagatgctttgcgagttaaggtggctatgtcagttactcttcttagcggcatcattcagttttgcttaggcgtttgtcgctttgggtttgtagcaatctatctcaccgagccactagttcggggatttactaccgctgcagctgtgcacgtatttaccagtatgttgaagtacttgtttggagttaagaccaaacggtacagcggtatcttctccgtcgtgtattctactgttgctgtcttgcagaacgtcaaaaatctgaacgtatgctcgctcggcgtagggctgatggtgtttggcctgcttttggggggaaaagaatttaatgagcgctttaaggagaagttacccgctccaattcccctggagttcttcgccgtcgtgatggggaccggcatcagcgcaggttttaatttaaaggagtcctataacgtggacgttgtgggaacgctgccgctgggcctgctgcccccagccaaccccgacacatctctgttccacctcgtgtatgtggacgccatcgcaattgctatcgttggattctccgtgaccatcagcatggccaagaccctggccaacaagcatgggtaccaggtggacgggaaccaggagctgatcgcactgggcttatgtaactcaatcggatctctattccaaacatttagcatcagctgtagtctgtcccggagcctagtgcaggagggaactggtggaaaaacccagttagcagggtgcctagccagtctgatgattctgctggtgatcctggccacgggcttcctattcgagagtctgccccagacaatctggctgacaacatttgtctccagcctttttttaggcctcgattacggcctgatcacagcggtcataattgcactgctgactgtgatataccgaactcaaagcccgagttacaaagtgcttggtaagctcccagagactgatgtttacatcgatattgatgcctacgaagaagtgaaagaaatcccaggaataaagatcttccaaatcaacgcccctatctactacgccaactccgatttgtacagcaacgcactgaagcggaagacaggggtcaatcctgcagttattatgggagcccgtcgcaaggctatgaggaagtacgccaaggaagtgggcaacgcaaacatggctaatgccactgtggttaaagccgatgctgaggtggacggggaggatgctaccaagccagaggaagaggatggagaagttaagtatcctcccatcgtgattaagtctacttttcccgaggaaatgcaacgatttatgccacctggcgataatgtccacacggttatcttggacttcacacaggtgaatttcatcgacagcgtcggggtgaaaacgttggcaggaatagtgaaggaatatggagatgtcggaatctacgtgtacctggccggttgctcagctcaagttgtgaatgacctgactaggaaccgattcttcgagaatccagctctgtgggagctgcttttccactcaatccatgacgccgtattgggatctcaactgcgggaagcactggctgagcaagaagcctcagcaccccctagccaggaggatctcgagcccaacgcaacacccgcaacccctgaagcatag

SEQ ID NO: 65815 - DNA, 1422 bp, Artificial Sequence
  derived and/or modified sequence
atggatcacgcagaggagaatgagatactggccgcaactcaacgctactatgtggagcgtcccatcttctcgcaccccgtgctccaggaacggctccacacgaaagataaggtgcctgattctatcgctgacaagctaaagcaagccttcacatgtacacctaagaaaatccgcaatatcatctacatgtttttgccaattacaaaatggctgcctgcctacaaatttaaagagtatgtactcggtgacttggtcagtgggataagtactggcgtgttgcagctgccccagggcctcgctttcgccatgcttgccgcagttccccctatcttcgggctgtattccagtttctatcctgtcataatgtactgttttctaggtacctcaaggcacataagtatcgggccttttgctgtgatctccttaatgattggaggcgtcgctgtgaggctggtgcccgatgatatcgtaattcctgggggagtgaacgccactaatgggaccgaagctagagacgccctccgggtgaaggtcgccatgtcagtgacacttttgagcggaatcatccagttttgtcttggggtatgtagattcggcttcgtggcgatttatttaacagagcccctggtgcgcggattcaccaccgccgctgcagttcacgtcttcactagcatgctgaaataccttttcggagtgaagactaaacgctactctggcatcttttccgtcgtctatagcacagtcgcagttttgcagaatgtaaagaacctgaatgtatgtagccttggcgtgggactgatggtgttcgggctgctcttgggcggtaaagagttcaacgaaagattcaaggaaaaattgcccgctccgatccccctagaatttttcgccgttgtgatgggcacgggcatcagtgcgggattcaatctcaaggagagctacaacgtagatgtggtgggtacactgccattgggactcctcccaccagctaacccagatacgagtctgtttcaccttgtatacgtggatgctattgcgattgccatcgttgggttctctgtgacgatctcaatggccaagaccctcgccaacaaacacggctaccaggtggacggaaaccaggagctgattgcgttagggctgtgcaatagcatcggatctttgttccagaccttcagcattagttgttccctgagcagatccttagttcaggagggaacagggggtaagacccaactggccggttgcctcgcctccctcatgatcctgttagtgatcttggcgacagggttccttttcgagagcctgccccaaacgatttggttgactacctttgtgagctcattgtttctcggactcgattacgggctaatcacagctgttattattgctctgctgaccgtgatctaccgcacccagaggtag

SEQ ID NO: 65816 - DNA, 2139 bp, Artificial Sequence
  derived and/or modified sequence
atggaccacgctgaggagaacgagattttagctgcaactcagaggtattacgttgagaggcccatattttcccatcccgtgctccaggaacggttacatacgaaggacaaggtgccagattccatcgccgataaactcaagcaagcttttacatgtactcctaagaaaattcgcaacatcatctacatgtttctccctatcaccaaatggctgccggcatataaattcaaagaatatgtcctcggcgatctggtttcgggcatctcaaccggagttctccaactgcctcagggcctcgcgtttgccatgttggccgctgtccccccaatattcggactgtattcaagcttctacccagtgattatgtattgctttctgggtacctctagacacataagcatcggcccattcgccgtcatctcgctgatgatcgggggtgttgccgtccggctggtccctgacgatatcgtgatcccaggaggagtgaatgcaacaaatggcactgaagctagggatgcactgcgcgtaaaggtagccatgtccgttacgctcctgtcagggattatacaattctgtctgggggtgtgtcgctttggctttgtagcaatctatctgacggagcccctggtgagggggttcaccaccgctgccgcagttcacgtcttcacgtctatgctaaaatatctgtttggagtgaaaaccaagcgatactctggaattttctctgtggtttatagcaccgtggccgtcctccagaatgttaagaatttgaatgtttgctctcttggcgttgggttgatggtgttcggcctgctgctgggcggaaaagagttcaacgaaagattcaaagagaagcttccagcacctatcccactggagtttttcgctgtggtgatgggtaccgggatttccgctggattcaatttaaaagagagctacaacgtggacgttgtagggactctcccccttgggctgctgccaccagcaaaccccgatactagcttgttccatctggtgtacgtggatgctatagctattgcaatcgttggtttctctgtaaccattagcatggccaagacactggccaataagcacggctatcaggtagacggcaaccaggagctgattgcgcttggcctgtgcaactctatcgggtccctcttccaaactttttccatctcctgttcactcagccgatcgctcgtacaagagggtacaggtggaaaaacacagctagcaggctgcctagcctcattgatgatcctgctggtgattctggccactggctttttgtttgaaagccttccccagactatttggttgaccacttttgtgagcagcctcttcttaggactggattacggcctcatcaccgctgtgatcattgcactgctgacagtgatctaccggactcagtcaccctcctataaggtcctggggaagctcccagaaactgatgtctatatcgatattgacgcttatgaagaggtaaaggaaatacctgggattaaaattttccaaattaatgccccaatttattatgctaattccgacctgtattctaacgcactgaagaggaaaactggcgtcaaccccgctgtgattatgggtgcgcgtaggaaggccatgcgaaagtatgctaaggaggtcggcaacgccaacatggccaatgccaccgtggttaaggcagacgctgaagtggacggcgaagacgcaaccaagcccgaggaagaagatggggaggtgaaatacccgcctattgtgatcaagagcaccttcccggaggagatgcagcggtttatgccccctggtgataatgtgcacaccgtgatcctggatttcacacaggtcaacttcatcgactctgtgggcgttaaaacactggccggtatcgtcaaagagtacggcgatgtgggcatatacgtctatcttgccggatgcagcgcacaggtggtgaacgacttgactagaaataggtttttcgagaatcctgcattgtgggagctgctctttcacagcattcatgatgccgtccttgggtcccaactccgggaagctctcgccgagcaggaagctagtgcaccgcctagtcaggaagacctggagccaaacgcgacgccggctacccccgaggcctag

SEQ ID NO: 65817 - DNA, 1344 bp, Artificial Sequence
  derived and/or modified sequence
atggaccatgcagaggagaatgaaattctggcagccacccagaggtattacgtggagagacctattttcagccatcctgttctccaggaacggttgcacacaaaagacaaggtgcctgattcaatcgcagataaactgaagcaggcctttacctgcactcccaaaaagataaggaatatcatttacatgtttttgcctattacgaagtggctacccgcatacaaattcaaggaatatgtgctgggggacctggtcagcggaatatcaacaggtgtcctgcaactgccccagggtttggcttttgcgatgctagctgctgtccctcccatctttggtttgtactcatctttttacccggtgatcatgtactgtttcttgggaacaagccggcacatttccattggtccattcgcagtgatcagcttgatgatcggcggagttgctgtacgcctagttccagacgacatcgtgattcctggcggtgttaatgcaactaacggcacggaagctcgcgacgcgcttcgggttaaggtggccatgagtgtaacattactgtcgggaataatccaattttgcctgggggtctgcaggtttggattcgtcgccatttaccttactgagccactggtgagagggttcacaacagctgccgctgtacatgtttttacctctatgcttaagtatctgttcggagttaaaacaaaaagatactccggaatttttagcgttgtgtattccaccgtagccgtcctacaaaacgtcaagaacctgaacgtgtgcagcctgggcgttggacttatggtatttggcttactacttggagggaaagagtttaacgagcggtttaaagagaaactgcccgctcctatcccactcgagtttttcgcagtagtcatgggtaccggcatctcggctggcttcaaccttaaagagagttacaacgtggacgtcgtcggcacactccctctggggcttctcccgcctgctaaccctgatacatcactcttccatctggtctatgtcgatgccattgctatagccatagtcggcttcagcgttactatcagtatggccaaaactctggcaaacaagcacggataccaggtggatggaaaccaggaattaatcgccctgggtctgtgcaattcaattggcagcctttttcagaccttctccatttcatgcagtctgtctcgatcactggtacaggaggggaccggcggtaaaacccagactatctggctgacaacatttgtgagcagcctctttctcggccttgactatggattgattactgccgtcatcatcgcactgctgactgtgatatatcggacccagcgttag

SEQ ID NO: 65818 - DNA, 2174 bp, Artificial Sequence
  derived and/or modified sequence
agagtactatggatcatgctgaagaaaatgaaatccttgcagcaacccagaggtactatgtggaaaggcctatctttagtcatccggtcctccaggaaagactacacacaaaggacaaggttcctgattccattgcggataagctgaaacaggcattcacatgtactcctaaaaaaataagaaatatcatttatatgttcctacccataactaaatggctgccagcatacaaattcaaggaatatgtgttgggtgacttggtctcaggcataagcacaggggtgcttcagcttcctcaaggcttagcctttgcaatgctggcagctgtgcctccaatatttggcctgtactcttcattttaccctgttatcatgtattgttttcttggaacctccagacacatatccataggtccttttgctgttattagcctgatgattggtggtgtagctgttcgattagtaccagatgatatagtcattccaggaggagtaaatgcaaccaatggcacagaggccagagatgccttgagagtgaaagtcgccatgtctgtgaccttactttcaggaatcattcagttttgcctaggtgtctgtaggtttggatttgtggccatatatctcacagagcctctggtccgtgggtttaccaccgcagcagctgtgcatgtcttcacctccatgttaaaatatctgtttggagttaaaacaaagcggtacagtggaatcttttccgtggtgtatagtacagttgctgtgttgcagaatgttaaaaacctcaacgtgtgttccctaggcgtcgggctgatggtttttggtttgctgttgggtggcaaggagtttaatgagagatttaaagagaaattgccggcgcctattcctttagagttctttgcggtcgtaatgggaactggcatttcagctgggtttaacttgaaagaatcatacaatgtggatgtcgttggaacacttcctctagggctgctacctccagccaatccggacaccagcctcttccaccttgtgtacgtagatgccattgccatagccatcgttggattttcagtgaccatctccatggccaagaccttagcaaataaacatggctaccaggttgacggcaatcaggagctcattgccctgggactgtgcaattccattggctcactcttccagaccttttcaatttcatgctccttgtctcgaagccttgttcaggagggaaccggtgggaagacacagcttgcaggttgtttggcctcattaatgattctgctggtcatattagcaactggattcctctttgaatcattgccccagaccatctggcttaccacttttgtgtcctccttgttcctgggattggactatggtttgatcactgctgtgatcattgctctgctgactgtgatttacagaacacagagtccaagctacaaagtccttggaaagcttcctgaaactgatgtgtatattgatatagacgcatatgaggaggtgaaagaaattcctggaataaaaatatttcaaataaatgcaccaatttactatgcaaatagcgacttgtatagcaatgcattaaaacgaaagactggagtgaacccagcagtcatcatgggagcaaggagaaaggccatgcggaagtacgctaaggaagtcggaaatgcaaatatggccaacgcaactgttgtcaaagcaacacaggatgcagaagtagatggagaggatgctaccaagcctgaagaagaggatggtgaagtaaaatatcccccaatagtgatcaaaagcacatttcctgaggaaatgcaaagatttatgcccccaggggataacgtccacactgtcattttggatttcactcaagtcaattttattgattctgttggagtgaaaactctggcagggattgtaaaagaatatggagacgtcggtatatatgtatacttagcaggatgcagtgcacaagttgtgaatgacctcactcggaatagattttttgaaaatcctgccctatgggagctgctgttccacagcattcatgatgcagttttaggcagccaacttagagaggcacttgctgaacaggaagcctcggctcccccttcccaggaggacttggagcccaatgccactcctgccactcctgaggcatagatgaggacctcaccctaggat

SEQ ID NO: 65819 - DNA, 2498 bp, Artificial Sequence
  derived and/or modified sequence
tctcccttctcctgctctcagcctcagtgatcaaggcttcagtgaactgcactggagctcccagcgggggatcttgtcccctgtcccgacttttgtgctgcacattggatctggtgacactcaggaaatgcttgtctccggctgttaaggaataatttcagagtactatggatcatgctgaagaaaatgaaatccttgcagcaacccagaggtactatgtggaaaggcctatctttagtcatccggtcctccaggaaagactacacacaaaggacaaggttcctgattccattgcggataagctgaaacaggcattcacatgtactcctaaaaaaataagaaatatcatttatatgttcctacccataactaaatggctgccagcatacaaattcaaggaatatgtgttgggtgacttggtctcaggcataagcacaggggtgcttcagcttcctcaaggcttagcctttgcaatgctggcagctgtgcctccaatatttggcctgtactcttcattttaccctgttatcatgtattgttttcttggaacctccagacacatatccataggtccttttgctgttattagcctgatgattggtggtgtagctgttcgattagtaccagatgatatagtcattccaggaggagtaaatgcaaccaatggcacagaggccagagatgccttgagagtgaaagtcgccatgtctgtgaccttactttcaggaatcattcagttttgcctaggtgtctgtaggtttggatttgtggccatatatctcacagagcctctggtccgtgggtttaccaccgcagcagctgtgcatgtcttcacctccatgttaaaatatctgtttggagttaaaacaaagcggtacagtggaatcttttccgtggtgtatagtacagttgctgtgttgcagaatgttaaaaacctcaacgtgtgttccctaggcgtcgggctgatggtttttggtttgctgttgggtggcaaggagtttaatgagagatttaaagagaaattgccggcgcctattcctttagagttctttgcggtcgtaatgggaactggcatttcagctgggtttaacttgaaagaatcatacaatgtggatgtcgttggaacacttcctctagggctgctacctccagccaatccggacaccagcctcttccaccttgtgtacgtagatgccattgccatagccatcgttggattttcagtgaccatctccatggccaagaccttagcaaataaacatggctaccaggttgacggcaatcaggagctcattgccctgggactgtgcaattccattggctcactcttccagaccttttcaatttcatgctccttgtctcgaagccttgttcaggagggaaccggtgggaagacacagcttgcaggttgtttggcctcattaatgattctgctggtcatattagcaactggattcctctttgaatcattgccccagaccatctggcttaccacttttgtgtcctccttgttcctgggattggactatggtttgatcactgctgtgatcattgctctgctgactgtgatttacagaacacagagtccaagctacaaagtccttggaaagcttcctgaaactgatgtgtatattgatatagacgcatatgaggaggtgaaagaaattcctggaataaaaatatttcaaataaatgcaccaatttactatgcaaatagcgacttgtatagcaatgcattaaaacgaaagactggagtgaacccagcagtcatcatgggagcaaggagaaaggccatgcggaagtacgctaaggaagtcggaaatgcaaatatggccaacgcaactgttgtcaaagcagatgcagaagtagatggagaggatgctaccaagcctgaagaagaggatggtgaagtaaaatatcccccaatagtgatcaaaagcacatttcctgaggaaatgcaaagatttatgcccccaggggataacgtccacactgtcattttggatttcactcaagtcaattttattgattctgttggagtgaaaactctggcagggattgtaaaagaatatggagacgtcggtatatatgtatacttagcaggatgcagtgcacaagttgtgaatgacctcactcggaatagattttttgaaaatcctgccctatgggagctgctgttccacagcattcatgatgcagttttaggcagccaacttagagaggcacttgctgaacaggaagcctcggctcccccttcccaggaggacttggagcccaatgccactcctgccactcctgaggcatagatgaggacctcaccctaggatggggttataagcctctcatgaagttcataatttacacgttttaaatactagacgctagatttttttttctaagggtgaatactagtagtccaggcttgatttggagggtgaatgacgcctagcaagatgtattgtacttgtgtttttttaattgaatacttcaaagataaa

SEQ ID NO: 65820 - DNA, 2374 bp, Artificial Sequence
  derived and/or modified sequence
tctcccttctcctgctctcagcctcagtgatcaaggcttcagtgaactgcactggagctcccagcgggggatcttgtcccctgtcccgacttttgtgctgcacattggatctggtgacactcaggaaatgcttgtctccggctgttaaggaataatttcagagtactatggatcatgctgaagaaaatgaaatccttgcagcaacccagaggtactatgtggaaaggcctatctttagtcatccggtcctccaggaaagactacacacaaaggacaaggttcctgattccattgcggataagctgaaacaggcattcacatgtactcctaaaaaaataagaaatatcatttatatgttcctacccataactaaatggctgccagcatacaaattcaaggaatatgtgttgggtgacttggtctcaggcataagcacaggggtgcttcagcttcctcaaggcttagcctttgcaatgctggcagctgtgcctccaatatttggcctgtactcttcattttaccctgttatcatgtattgttttcttggaacctccagacacatatccataggtccttttgctgttattagcctgatgattggtggtgtagctgttcgattagtaccagatgatatagtcattccaggaggagtaaatgcaaccaatggcacagaggccagagatgccttgagagtgaaagtcgccatgtctgtgaccttactttcaggaatcattcagttttgcctaggtgtctgtaggtttggatttgtggccatatatctcacagagcctctggtccgtgggtttaccaccgcagcagctgtgcatgtcttcacctccatgttaaaatatctgtttggagttaaaacaaagcggtacagtggaatcttttccgtggtgtatagtacagttgctgtgttgcagaatgttaaaaacctcaacgtgtgttccctaggcgtcgggctgatggtttttggtttgctgttgggtggcaaggagtttaatgagagatttaaagagaaattgccggcgcctattcctttagagttctttgcggtcgtaatgggaactggcatttcagctgggtttaacttgaaagaatcatacaatgtggatgtcgttggaacacttcctctagggctgctacctccagccaatccggacaccagcctcttccaccttgtgtacgtagatgccattgccatagccatcgttggattttcagtgaccatctccatggccaagaccttagcaaataaacatggctaccaggttgacggcaatcaggagctcattgccctgggactgtgcaattccattggctcactcttccagaccttttcaatttcatgctccttgtctcgaagccttgttcaggagggaaccggtgggaagacacagcttgcaggttgtttggcctcattaatgattctgctggtcatattagcaactggattcctctttgaatcattgccccagaccatctggcttaccacttttgtgtcctccttgttcctgggattggactatggtttgatcactgctgtgatcattgctctgctgactgtgatttacagaacacagaggtgaaagaaattcctggaataaaaatatttcaaataaatgcaccaatttactatgcaaatagcgacttgtatagcaatgcattaaaacgaaagactggagtgaacccagcagtcatcatgggagcaaggagaaaggccatgcggaagtacgctaaggaagtcggaaatgcaaatatggccaacgcaactgttgtcaaagcagatgcagaagtagatggagaggatgctaccaagcctgaagaagaggatggtgaagtaaaatatcccccaatagtgatcaaaagcacatttcctgaggaaatgcaaagatttatgcccccaggggataacgtccacactgtcattttggatttcactcaagtcaattttattgattctgttggagtgaaaactctggcagggattgtaaaagaatatggagacgtcggtatatatgtatacttagcaggatgcagtgcacaagttgtgaatgacctcactcggaatagattttttgaaaatcctgccctatgggagctgctgttccacagcattcatgatgcagttttaggcagccaacttagagaggcacttgctgaacaggaagcctcggctcccccttcccaggaggacttggagcccaatgccactcctgccactcctgaggcatagatgaggacctcaccctaggatggggttataagcctctcatgaagttcataatttacacgttttaaatactagacgctagatttttttttctaagggtgaatactagtagtccaggcttgatttggagggtgaatgacg

SEQ ID NO: 65821 - DNA, 2588 bp, Artificial Sequence
  derived and/or modified sequence
acctggaggcagcgcgcgcgtcgaagaggcagcggctgtggagcgcggcggggcggctccgcccagggcagcccgggctgggccaaggagcgagctctcccttctcctgctctcagcctcagtgatcaaggcttcagtgaactgcactggagctcccagcgggggatcttgtcccctgtcccgacttttgtgctgcacattggatctggtgacactcaggaaatgcttgtctccggctgttaaggaataatttcagagtactatggatcatgctgaagaaaatgaaatccttgcagcaacccagaggtactatgtggaaaggcctatctttagtcatccggtcctccaggaaagactacacacaaaggacaaggttcctgattccattgcggataagctgaaacaggcattcacatgtactcctaaaaaaataagaaatatcatttatatgttcctacccataactaaatggctgccagcatacaaattcaaggaatatgtgttgggtgacttggtctcaggcataagcacaggggtgcttcagcttcctcaaggcttagcctttgcaatgctggcagctgtgcctccaatatttggcctgtactcttcattttaccctgttatcatgtattgttttcttggaacctccagacacatatccataggtccttttgctgttattagcctgatgattggtggtgtagctgttcgattagtaccagatgatatagtcattccaggaggagtaaatgcaaccaatggcacagaggccagagatgccttgagagtgaaagtcgccatgtctgtgaccttactttcaggaatcattcagttttgcctaggtgtctgtaggtttggatttgtggccatatatctcacagagcctctggtccgtgggtttaccaccgcagcagctgtgcatgtcttcacctccatgttaaaatatctgtttggagttaaaacaaagcggtacagtggaatcttttccgtggtgtatagtacagttgctgtgttgcagaatgttaaaaacctcaacgtgtgttccctaggcgtcgggctgatggtttttggtttgctgttgggtggcaaggagtttaatgagagatttaaagagaaattgccggcgcctattcctttagagttctttgcggtcgtaatgggaactggcatttcagctgggtttaacttgaaagaatcatacaatgtggatgtcgttggaacacttcctctagggctgctacctccagccaatccggacaccagcctcttccaccttgtgtacgtagatgccattgccatagccatcgttggattttcagtgaccatctccatggccaagaccttagcaaataaacatggctaccaggttgacggcaatcaggagctcattgccctgggactgtgcaattccattggctcactcttccagaccttttcaatttcatgctccttgtctcgaagccttgttcaggagggaaccggtgggaagacacagcttgcaggttgtttggcctcattaatgattctgctggtcatattagcaactggattcctctttgaatcattgccccagaccatctggcttaccacttttgtgtcctccttgttcctgggattggactatggtttgatcactgctgtgatcattgctctgctgactgtgatttacagaacacagagtccaagctacaaagtccttggaaagcttcctgaaactgatgtgtatattgatatagacgcatatgaggaggtgaaagaaattcctggaataaaaatatttcaaataaatgcaccaatttactatgcaaatagcgacttgtatagcaatgcattaaaacgaaagactggagtgaacccagcagtcatcatgggagcaaggagaaaggccatgcggaagtacgctaaggaagtcggaaatgcaaatatggccaacgcaactgttgtcaaagcagatgcagaagtagatggagaggatgctaccaagcctgaagaagaggatggtgaagtaaaatatcccccaatagtgatcaaaagcacatttcctgaggaaatgcaaagatttatgcccccaggggataacgtccacactgtcattttggatttcactcaagtcaattttattgattctgttggagtgaaaactctggcagggattgtaaaagaatatggagacgtcggtatatatgtatacttagcaggatgcagtgcacaagttgtgaatgacctcactcggaatagattttttgaaaatcctgccctatgggagctgctgttccacagcattcatgatgcagttttaggcagccaacttagagaggcacttgctgaacaggaagcctcggctcccccttcccaggaggacttggagcccaatgccactcctgccactcctgaggcatagatgaggacctcaccctaggatggggttataagcctctcatgaagttcataatttacacgttttaaatactagacgctagatttttttttctaagggtgaatactagtagtccaggcttgatttggagggtgaatgacgcctagcaagatgtattgtacttgtgtttttttaattgaatacttcaaag

SEQ ID NO: 65822 - DNA, 2242 bp, Artificial Sequence
  derived and/or modified sequence
tctcccttctcctgctctcagcctcagtgatcaaggcttcagtgaactgcactggagctcccagcgggggatcttgtcccctgtcccgacttttgtgctgcacattggatctggtgacactcaggaaatgcttgtctccggctgttaaggaataatttcagagtactatggatcatgctgaagaaaatgaaatccttgcagcaacccagaggtactatgtggaaaggcctatctttagtcatccggtcctccaggaaagactacacacaaaggacaaggttcctgattccattgcggataagctgaaacaggcattcacatgtactcctaaaaaaataagaaatatcatttatatgttcctacccataactaaatggctgccagcatacaaattcaaggaatatgtgttgggtgacttggtctcaggcataagcacaggggtgcttcagcttcctcaaggcttagcctttgcaatgctggcagctgtgcctccaatatttggcctgtactcttcattttaccctgttatcatgtattgttttcttggaacctccagacacatatccataggtccttttgctgttattagcctgatgattggtggtgtagctgttcgattagtaccagatgatatagtcattccaggaggagtaaatgcaaccaatggcacagaggccagagatgccttgagagtgaaagtcgccatgtctgtgaccttactttcaggaatcattcagttttgcctaggtgtctgtaggtttggatttgtggccatatatctcacagagcctctggtccgtgggtttaccaccgcagcagctgtgcatgtcttcacctccatgttaaaatatctgtttggagttaaaacaaagcggtacagtggaatcttttccgtggtgtatagtacagttgctgtgttgcagaatgttaaaaacctcaacgtgtgttccctaggcgtcgggctgatggtttttggtttgctgttgggtggcaaggagtttaatgagagatttaaagagaaattgccggcgcctattcctttagagttctttgcggtcgtaatgggaactggcatttcagctgggtttaacttgaaagaatcatacaatgtggatgtcgttggaacacttcctctagggctgctacctccagccaatccggacaccagcctcttccaccttgtgtacgtagatgccattgccatagccatcgttggattttcagtgaccatctccatggccaagaccttagcaaataaacatggctaccaggttgacggcaatcaggagctcattgccctgggactgtgcaattccattggctcactcttccagaccttttcaatttcatgctccttgtctcgaagccttgttcaggagggaaccggtgggaagacacagaccatctggcttaccacttttgtgtcctccttgttcctgggattggactatggtttgatcactgctgtgatcattgctctgctgactgtgatttacagaacacagaggtgaaagaaattcctggaataaaaatatttcaaataaatgcaccaatttactatgcaaatagcgacttgtatagcaatgcattaaaacgaaaggatgcagaagtagatggagaggatgctaccaagcctgaagaagaggatggtgaagtaaaatatcccccaatagtgatcaaaagcacatttcctgaggaaatgcaaagatttatgcccccaggggataacgtccacactgtcattttggatttcactcaagtcaattttattgattctgttggagtgaaaactctggcagggattgtaaaagaatatggagacgtcggtatatatgtatacttagcaggatgcagtgcacaagttgtgaatgacctcactcggaatagattttttgaaaatcctgccctatgggagctgctgttccacagcattcatgatgcagttttaggcagccaacttagagaggcacttgctgaacaggaagcctcggctcccccttcccaggaggacttggagcccaatgccactcctgccactcctgaggcatagatgaggacctcaccctaggatggggttataagcctctcatgaagttcataatttacacgttttaaatactagacgctagatttttttttctaagggtgaatactagtagtccaggcttgatttggagggtgaatgacgcctagcaagatgtattgtacttgtgtttttttaattgaatacttcaaagataaa

SEQ ID NO: 65823 - DNA, 534 bp, Artificial Sequence
  derived and/or modified sequence
atgggcgccagaagaaaggccatgagaaagtacgccaaggaggtgggcaacgccaacatggccaacgccaccgtggtgaaggccgacgccgaggtggacggcgaggacgccaccaagcccgaggaggaggacggcgaggtgaagtacccccccatcgtgatcaagagcaccttccccgaggagatgcagagattcatgccccccggcgacaacgtgcacaccgtgatcctggacttcacccaggtgaacttcatcgacagcgtgggcgtgaagaccctggccggcatcgtgaaggagtacggcgacgtgggcatctacgtgtacctggccggctgcagcgcccaggtggtgaacgacctgaccagaaacagattcttcgagaaccccgccctgtgggagctgctgttccacagcatccacgacgccgtgctgggcagccagctgagagaggccctggccgagcaggaggccagcgccccccccagccaggaggacctggagcccaacgccacccccgccacccccgaggcctag

SEQ ID NO: 65824 - DNA, 2145 bp, Artificial Sequence
  derived and/or modified sequence
atggaccacgccgaggagaacgagatcctggccgccacccagagatactacgtggagagacccatcttcagccaccccgtgctgcaggagagactgcacaccaaggacaaggtgcccgacagcatcgccgacaagctgaagcaggccttcacctgcacccccaagaagatcagaaacatcatctacatgttcctgcccatcaccaagtggctgcccgcctacaagttcaaggagtacgtgctgggcgacctggtgagcggcatcagcaccggcgtgctgcagctgccccagggcctggccttcgccatgctggccgccgtgccccccatcttcggcctgtacagcagcttctaccccgtgatcatgtactgcttcctgggcaccagcagacacatcagcatcggccccttcgccgtgatcagcctgatgatcggcggcgtggccgtgagactggtgcccgacgacatcgtgatccccggcggcgtgaacgccaccaacggcaccgaggccagagacgccctgagagtgaaggtggccatgagcgtgaccctgctgagcggcatcatccagttctgcctgggcgtgtgcagattcggcttcgtggccatctacctgaccgagcccctggtgagaggcttcaccaccgccgccgccgtgcacgtgttcaccagcatgctgaagtacctgttcggcgtgaagaccaagagatacagcggcatcttcagcgtggtgtacagcaccgtggccgtgctgcagaacgtgaagaacctgaacgtgtgcagcctgggcgtgggcctgatggtgttcggcctgctgctgggcggcaaggagttcaacgagagattcaaggagaagctgcccgcccccatccccctggagttcttcgccgtggtgatgggcaccggcatcagcgccggcttcaacctgaaggagagctacaacgtggacgtggtgggcaccctgcccctgggcctgctgccccccgccaaccccgacaccagcctgttccacctggtgtacgtggacgccatcgccatcgccatcgtgggcttcagcgtgaccatcagcatggccaagaccctggccaacaagcacggctaccaggtggacggcaaccaggagctgatcgccctgggcctgtgcaacagcatcggcagcctgttccagaccttcagcatcagctgcagcctgagcagaagcctggtgcaggagggcaccggcggcaagacccagctggccggctgcctggccagcctgatgatcctgctggtgatcctggccaccggcttcctgttcgagagcctgccccagaccatctggctgaccaccttcgtgagcagcctgttcctgggcctggactacggcctgatcaccgccgtgatcatcgccctgctgaccgtgatctacagaacccagagccccagctacaaggtgctgggcaagctgcccgagaccgacgtgtacatcgacatcgacgcctacgaggaggtgaaggagatccccggcatcaagatcttccagatcaacgcccccatctactacgccaacagcgacctgtacagcaacgccctgaagagaaagaccggcgtgaaccccgccgtgatcatgggcgccagaagaaaggccatgagaaagtacgccaaggaggtgggcaacgccaacatggccaacgccaccgtggtgaaggccacccaggacgccgaggtggacggcgaggacgccaccaagcccgaggaggaggacggcgaggtgaagtacccccccatcgtgatcaagagcaccttccccgaggagatgcagagattcatgccccccggcgacaacgtgcacaccgtgatcctggacttcacccaggtgaacttcatcgacagcgtgggcgtgaagaccctggccggcatcgtgaaggagtacggcgacgtgggcatctacgtgtacctggccggctgcagcgcccaggtggtgaacgacctgaccagaaacagattcttcgagaaccccgccctgtgggagctgctgttccacagcatccacgacgccgtgctgggcagccagctgagagaggccctggccgagcaggaggccagcgccccccccagccaggaggacctggagcccaacgccacccccgccacccccgaggcctag

SEQ ID NO: 65825 - DNA, 2139 bp, Artificial Sequence
  derived and/or modified sequence
atggaccacgccgaggagaacgagatcctggccgccacccagagatactacgtggagagacccatcttcagccaccccgtgctgcaggagagactgcacaccaaggacaaggtgcccgacagcatcgccgacaagctgaagcaggccttcacctgcacccccaagaagatcagaaacatcatctacatgttcctgcccatcaccaagtggctgcccgcctacaagttcaaggagtacgtgctgggcgacctggtgagcggcatcagcaccggcgtgctgcagctgccccagggcctggccttcgccatgctggccgccgtgccccccatcttcggcctgtacagcagcttctaccccgtgatcatgtactgcttcctgggcaccagcagacacatcagcatcggccccttcgccgtgatcagcctgatgatcggcggcgtggccgtgagactggtgcccgacgacatcgtgatccccggcggcgtgaacgccaccaacggcaccgaggccagagacgccctgagagtgaaggtggccatgagcgtgaccctgctgagcggcatcatccagttctgcctgggcgtgtgcagattcggcttcgtggccatctacctgaccgagcccctggtgagaggcttcaccaccgccgccgccgtgcacgtgttcaccagcatgctgaagtacctgttcggcgtgaagaccaagagatacagcggcatcttcagcgtggtgtacagcaccgtggccgtgctgcagaacgtgaagaacctgaacgtgtgcagcctgggcgtgggcctgatggtgttcggcctgctgctgggcggcaaggagttcaacgagagattcaaggagaagctgcccgcccccatccccctggagttcttcgccgtggtgatgggcaccggcatcagcgccggcttcaacctgaaggagagctacaacgtggacgtggtgggcaccctgcccctgggcctgctgccccccgccaaccccgacaccagcctgttccacctggtgtacgtggacgccatcgccatcgccatcgtgggcttcagcgtgaccatcagcatggccaagaccctggccaacaagcacggctaccaggtggacggcaaccaggagctgatcgccctgggcctgtgcaacagcatcggcagcctgttccagaccttcagcatcagctgcagcctgagcagaagcctggtgcaggagggcaccggcggcaagacccagctggccggctgcctggccagcctgatgatcctgctggtgatcctggccaccggcttcctgttcgagagcctgccccagaccatctggctgaccaccttcgtgagcagcctgttcctgggcctggactacggcctgatcaccgccgtgatcatcgccctgctgaccgtgatctacagaacccagagccccagctacaaggtgctgggcaagctgcccgagaccgacgtgtacatcgacatcgacgcctacgaggaggtgaaggagatccccggcatcaagatcttccagatcaacgcccccatctactacgccaacagcgacctgtacagcaacgccctgaagagaaagaccggcgtgaaccccgccgtgatcatgggcgccagaagaaaggccatgagaaagtacgccaaggaggtgggcaacgccaacatggccaacgccaccgtggtgaaggccgacgccgaggtggacggcgaggacgccaccaagcccgaggaggaggacggcgaggtgaagtacccccccatcgtgatcaagagcaccttccccgaggagatgcagagattcatgccccccggcgacaacgtgcacaccgtgatcctggacttcacccaggtgaacttcatcgacagcgtgggcgtgaagaccctggccggcatcgtgaaggagtacggcgacgtgggcatctacgtgtacctggccggctgcagcgcccaggtggtgaacgacctgaccagaaacagattcttcgagaaccccgccctgtgggagctgctgttccacagcatccacgacgccgtgctgggcagccagctgagagaggccctggccgagcaggaggccagcgccccccccagccaggaggacctggagcccaacgccacccccgccacccccgaggcctag

SEQ ID NO: 65826 - DNA, 1422 bp, Artificial Sequence
  derived and/or modified sequence
atggaccacgccgaggagaacgagatcctggccgccacccagagatactacgtggagagacccatcttcagccaccccgtgctgcaggagagactgcacaccaaggacaaggtgcccgacagcatcgccgacaagctgaagcaggccttcacctgcacccccaagaagatcagaaacatcatctacatgttcctgcccatcaccaagtggctgcccgcctacaagttcaaggagtacgtgctgggcgacctggtgagcggcatcagcaccggcgtgctgcagctgccccagggcctggccttcgccatgctggccgccgtgccccccatcttcggcctgtacagcagcttctaccccgtgatcatgtactgcttcctgggcaccagcagacacatcagcatcggccccttcgccgtgatcagcctgatgatcggcggcgtggccgtgagactggtgcccgacgacatcgtgatccccggcggcgtgaacgccaccaacggcaccgaggccagagacgccctgagagtgaaggtggccatgagcgtgaccctgctgagcggcatcatccagttctgcctgggcgtgtgcagattcggcttcgtggccatctacctgaccgagcccctggtgagaggcttcaccaccgccgccgccgtgcacgtgttcaccagcatgctgaagtacctgttcggcgtgaagaccaagagatacagcggcatcttcagcgtggtgtacagcaccgtggccgtgctgcagaacgtgaagaacctgaacgtgtgcagcctgggcgtgggcctgatggtgttcggcctgctgctgggcggcaaggagttcaacgagagattcaaggagaagctgcccgcccccatccccctggagttcttcgccgtggtgatgggcaccggcatcagcgccggcttcaacctgaaggagagctacaacgtggacgtggtgggcaccctgcccctgggcctgctgccccccgccaaccccgacaccagcctgttccacctggtgtacgtggacgccatcgccatcgccatcgtgggcttcagcgtgaccatcagcatggccaagaccctggccaacaagcacggctaccaggtggacggcaaccaggagctgatcgccctgggcctgtgcaacagcatcggcagcctgttccagaccttcagcatcagctgcagcctgagcagaagcctggtgcaggagggcaccggcggcaagacccagctggccggctgcctggccagcctgatgatcctgctggtgatcctggccaccggcttcctgttcgagagcctgccccagaccatctggctgaccaccttcgtgagcagcctgttcctgggcctggactacggcctgatcaccgccgtgatcatcgccctgctgaccgtgatctacagaacccagagatag

SEQ ID NO: 65827 - DNA, 1344 bp, Artificial Sequence
  derived and/or modified sequence
atggaccacgccgaggagaacgagatcctggccgccacccagagatactacgtggagagacccatcttcagccaccccgtgctgcaggagagactgcacaccaaggacaaggtgcccgacagcatcgccgacaagctgaagcaggccttcacctgcacccccaagaagatcagaaacatcatctacatgttcctgcccatcaccaagtggctgcccgcctacaagttcaaggagtacgtgctgggcgacctggtgagcggcatcagcaccggcgtgctgcagctgccccagggcctggccttcgccatgctggccgccgtgccccccatcttcggcctgtacagcagcttctaccccgtgatcatgtactgcttcctgggcaccagcagacacatcagcatcggccccttcgccgtgatcagcctgatgatcggcggcgtggccgtgagactggtgcccgacgacatcgtgatccccggcggcgtgaacgccaccaacggcaccgaggccagagacgccctgagagtgaaggtggccatgagcgtgaccctgctgagcggcatcatccagttctgcctgggcgtgtgcagattcggcttcgtggccatctacctgaccgagcccctggtgagaggcttcaccaccgccgccgccgtgcacgtgttcaccagcatgctgaagtacctgttcggcgtgaagaccaagagatacagcggcatcttcagcgtggtgtacagcaccgtggccgtgctgcagaacgtgaagaacctgaacgtgtgcagcctgggcgtgggcctgatggtgttcggcctgctgctgggcggcaaggagttcaacgagagattcaaggagaagctgcccgcccccatccccctggagttcttcgccgtggtgatgggcaccggcatcagcgccggcttcaacctgaaggagagctacaacgtggacgtggtgggcaccctgcccctgggcctgctgccccccgccaaccccgacaccagcctgttccacctggtgtacgtggacgccatcgccatcgccatcgtgggcttcagcgtgaccatcagcatggccaagaccctggccaacaagcacggctaccaggtggacggcaaccaggagctgatcgccctgggcctgtgcaacagcatcggcagcctgttccagaccttcagcatcagctgcagcctgagcagaagcctggtgcaggagggcaccggcggcaagacccagaccatctggctgaccaccttcgtgagcagcctgttcctgggcctggactacggcctgatcaccgccgtgatcatcgccctgctgaccgtgatctacagaacccagagatag

SEQ ID NO: 65828 - DNA, 204 bp, Artificial Sequence
  derived and/or modified sequence
atgccactgcccgtcgctctgcagacgaggttagccaagagaggcatccttaagcacctggagcctgagccagaagaggaaatcattgctgaggactatgacgatgacccggtagattacgaggcaactcgcttagagggtttacccccctcatggtataaagttttcgatccatcctgcccgggttggtcagcaatggtgtag

SEQ ID NO: 65829 - DNA, 204 bp, Artificial Sequence
  derived and/or modified sequence
atgcccctgcctgtggccctgcagacccggctggccaagaggggcatcctgaagcacctggagcctgagcctgaggaggagatcatcgcagaagattatgatgatgatcctgtggactatgaggccacccggctggagggcctgcccccatcctggtacaaggtgtttgaccccagctgccccggctggagcgccatggtgtag

SEQ ID NO: 65830 - DNA, 204 bp, Artificial Sequence
  derived and/or modified sequence
atgcccctgcccgtggccctgcagacccggctggccaagcggggcatcctcaagcacttggagccagagccggaagaagagatcatcgccgaggactatgatgatgatccagtggactatgaagccacacgcctggaaggtttgcccccttcctggtataaagtgttcgatccctcctgccctggatggtctgccatggtgtag

SEQ ID NO: 65831 - DNA, 374 bp, Artificial Sequence
  derived and/or modified sequence
agttactttcaggctcggggagtgaaggcctcgttgagagaaggtctcattcggtgttttgggaagagagtcgtgtgggcccaggtatcgtagcggcgacacgagagagacgggcggtgtgacagccttccactacctgcacgagtgtattggtctgtctgctatcagctatgccgctgcccgttgcgctgcagacccgcttggccaagagaggcatcctcaaacatctggagcctgaaccagaggaagagatcattgccgaggactatgacgatgatcctgtggactacgaggccaccaggttggagggcctaccaccaagctggtacaaggtgttcgacccttcctgcccgggctggagtgcaatggtgtga

SEQ ID NO: 65832 - DNA, 204 bp, Artificial Sequence
  derived and/or modified sequence
atgccattgcccgtcgctctgcagacgcgtctggctaagcgcggtattctgaagcacctggagcctgagccagaggaggaaatcatcgctgaagattacgacgatgaccccgttgactacgaagctaccaggctggagggccttccaccaagctggtacaaggtttttgacccttcctgccccggttggagcgcgatggtgtag

SEQ ID NO: 65833 - DNA, 204 bp, Artificial Sequence
  derived and/or modified sequence
atgcccctgcccgtggccctgcagaccagactggccaagagaggcatcctgaagcacctggagcccgagcccgaggaggagatcatcgccgaggactacgacgacgaccccgtggactacgaggccaccagactggagggcctgccccccagctggtacaaggtgttcgaccccagctgccccggctggagcgccatggtgtag

SEQ ID NO: 65834 - DNA, 480 bp, Artificial Sequence
  derived and/or modified sequence
atggagcaagattggcaaccaggagaggaagtgaccccagggcctgaaccctgcagcaagggacaggctcccctgtacccaattgtgcacgtcaccgagctcaaacacactgacccaaactttccgtctaattctaatgctgtgggtacatccagtggatggaatcgcatcggaaccggatgctcccacacctgggattggagattttcctgtactcagcaggctttgttgcccctcctgggtgcctgggaatggagtattgatactgaagcaggagggggaagacgggagcaaagtcagaagccatgttcaaacggagggcctgcggcagctggtgagggccgtgtactaccaagtccctgcttcccctggtcaacgtgtcaagcagctatccacaaggtttgtaggtggcagggctgcactcgtcccgctctgctcgccccttcacttgctactctgaaagaacactcttatccctag

SEQ ID NO: 65835 - protein, 1161 aa, Artificial Sequence
  derived and/or modified sequence
MGQQVGRVGEAPGLQQPQPRGIRGSSAARPSGRRRDPAGRTTETGFNIFTQHEALHRPYGCDVEPQALNEAIRWSSKENLLGATESDPNLFVALYDFVASGDNTLSITKGEKLRVLGYNQNGEWSEVRSKNGQGWVPSNYITPVNSLEKHSWYHGPVSRSAAEYLLSSLINGSFLVRESESSPGQLSISLRYEGRVYHYRINTTADGKVYVTAESRFSTLAELVHHHSTVADGLVTTLHYPAPKCNKPTVYGVSPIHDKWEMERTDITMKHKLGGGQYGEVYVGVWKKYSLTVAVKTLKEDTMEVEEFLKEAAVMKEIKHPNLVQLLGVCTLEPPFYIVTEYMPYGNLLDYLRECNREEVTAVVLLYMATQISSAMEYLEKKNFIHRDLAARNCLVGENHVVKVADFGLSRLMTGDTYTAHAGAKFPIKWTAPESLAYNTFSIKSDVWAFGVLLWEIATYGMSPYPGIDLSQVYDLLEKGYRMEQPEGCPPKVYELMRACWKWSPADRPSFAETHQAFETMFHDSSISEEVAEELGRAASSSSVVPYLPRLPILPSKTRTLKKQVENKENIEGAQDATENSASSLAPGFIRGAQASSGSPALPRKQRDKSPSSLLEDAKETCFTRDRKGGFFSSFMKKRNAPTPPKRSSSFREMENQPHKKYELTGNFSSVASLQHADGFSFTPAQQEANLVPPKCYGGSFAQRNLCNDDGGGGGGSGTAGGGWSGITGFFTPRLIKKTLGLRAGKPTASDDTSKPFPRSNSTSSMSSGLPEQDRMAMTLPRNCQRSKLQLERTVSTSSQPEENVDRANDMLPKKSEESAAPSRERPKAKLLPRGATALPLRTPSGDLAITEKDPPGVGVAGVAAAPKGKEKNGGARLGMAGVPEDGEQPGWPSPAKAAPVLPTTHNHKVPVLISPTLKHTPADVQLIGTDSQGNKFKLLSEHQVTSSGDKDRPRRVKPKCAPPPPPVMRLLQHPSICSDPTEEPTALTAGQSTSETQEGGKKAALGAVPISGKAGRPVMPPPQVPLPTSSISPAKMANGTAGTKVALRKTKQAAEKISADKISKEALLECADLLSSALTEPVPNSQLVDTGHQLLDYCSGYVDCIPQTRNKFAFREAVSKLELSLQELQVSSAAAGVPGTNPVLNNLLSCVQEISDVVQR

SEQ ID NO: 65836 - DNA, 3486 bp, Artificial Sequence
  derived and/or modified sequence
atgggccagcaggtgggcagagtgggcgaggcccccggcctgcagcagccccagcccagaggcatcagaggcagcagcgccgccagacccagcggcagaagaagagaccccgccggcagaaccaccgagaccggcttcaacatcttcacccagcacgaggccctgcacagaccctacggctgcgacgtggagccccaggccctgaacgaggccatcagatggagcagcaaggagaacctgctgggcgccaccgagagcgaccccaacctgttcgtggccctgtacgacttcgtggccagcggcgacaacaccctgagcatcaccaagggcgagaagctgagagtgctgggctacaaccagaacggcgagtggagcgaggtgagaagcaagaacggccagggctgggtgcccagcaactacatcacccccgtgaacagcctggagaagcacagctggtaccacggccccgtgagcagaagcgccgccgagtacctgctgagcagcctgatcaacggcagcttcctggtgagagagagcgagagcagccccggccagctgagcatcagcctgagatacgagggcagagtgtaccactacagaatcaacaccaccgccgacggcaaggtgtacgtgaccgccgagagcagattcagcaccctggccgagctggtgcaccaccacagcaccgtggccgacggcctggtgaccaccctgcactaccccgcccccaagtgcaacaagcccaccgtgtacggcgtgagccccatccacgacaagtgggagatggagagaaccgacatcaccatgaagcacaagctgggcggcggccagtacggcgaggtgtacgtgggcgtgtggaagaagtacagcctgaccgtggccgtgaagaccctgaaggaggacaccatggaggtggaggagttcctgaaggaggccgccgtgatgaaggagatcaagcaccccaacctggtgcagctgctgggcgtgtgcaccctggagccccccttctacatcgtgaccgagtacatgccctacggcaacctgctggactacctgagagagtgcaacagagaggaggtgaccgccgtggtgctgctgtacatggccacccagatcagcagcgccatggagtacctggagaagaagaacttcatccacagagacctggccgccagaaactgcctggtgggcgagaaccacgtggtgaaggtggccgacttcggcctgagcagactgatgaccggcgacacctacaccgcccacgccggcgccaagttccccatcaagtggaccgcccccgagagcctggcctacaacaccttcagcatcaagagcgacgtgtgggccttcggcgtgctgctgtgggagatcgccacctacggcatgagcccctaccccggcatcgacctgagccaggtgtacgacctgctggagaagggctacagaatggagcagcccgagggctgcccccccaaggtgtacgagctgatgagagcctgctggaagtggagccccgccgacagacccagcttcgccgagacccaccaggccttcgagaccatgttccacgacagcagcatcagcgaggaggtggccgaggagctgggcagagccgccagcagcagcagcgtggtgccctacctgcccagactgcccatcctgcccagcaagaccagaaccctgaagaagcaggtggagaacaaggagaacatcgagggcgcccaggacgccaccgagaacagcgccagcagcctggcccccggcttcatcagaggcgcccaggccagcagcggcagccccgccctgcccagaaagcagagagacaagagccccagcagcctgctggaggacgccaaggagacctgcttcaccagagacagaaagggcggcttcttcagcagcttcatgaagaagagaaacgcccccaccccccccaagagaagcagcagcttcagagagatggagaaccagccccacaagaagtacgagctgaccggcaacttcagcagcgtggccagcctgcagcacgccgacggcttcagcttcacccccgcccagcaggaggccaacctggtgccccccaagtgctacggcggcagcttcgcccagagaaacctgtgcaacgacgacggcggcggcggcggcggcagcggcaccgccggcggcggctggagcggcatcaccggcttcttcacccccagactgatcaagaagaccctgggcctgagagccggcaagcccaccgccagcgacgacaccagcaagcccttccccagaagcaacagcaccagcagcatgagcagcggcctgcccgagcaggacagaatggccatgaccctgcccagaaactgccagagaagcaagctgcagctggagagaaccgtgagcaccagcagccagcccgaggagaacgtggacagagccaacgacatgctgcccaagaagagcgaggagagcgccgcccccagcagagagagacccaaggccaagctgctgcccagaggcgccaccgccctgcccctgagaacccccagcggcgacctggccatcaccgagaaggacccccccggcgtgggcgtggccggcgtggccgccgcccccaagggcaaggagaagaacggcggcgccagactgggcatggccggcgtgcccgaggacggcgagcagcccggctggcccagccccgccaaggccgcccccgtgctgcccaccacccacaaccacaaggtgcccgtgctgatcagccccaccctgaagcacacccccgccgacgtgcagctgatcggcaccgacagccagggcaacaagttcaagctgctgagcgagcaccaggtgaccagcagcggcgacaaggacagacccagaagagtgaagcccaagtgcgcccccccccccccccccgtgatgagactgctgcagcaccccagcatctgcagcgaccccaccgaggagcccaccgccctgaccgccggccagagcaccagcgagacccaggagggcggcaagaaggccgccctgggcgccgtgcccatcagcggcaaggccggcagacccgtgatgccccccccccaggtgcccctgcccaccagcagcatcagccccgccaagatggccaacggcaccgccggcaccaaggtggccctgagaaagaccaagcaggccgccgagaagatcagcgccgacaagatcagcaaggaggccctgctggagtgcgccgacctgctgagcagcgccctgaccgagcccgtgcccaacagccagctggtggacaccggccaccagctgctggactactgcagcggctacgtggactgcatcccccagaccagaaacaagttcgccttcagagaggccgtgagcaagctggagctgagcctgcaggagctgcaggtgagcagcgccgccgccggcgtgcccggcaccaaccccgtgctgaacaacctgctgagctgcgtgcaggagatcagcgacgtggtgcagagatag

SEQ ID NO: 65837 - DNA, 3486 bp, Artificial Sequence
  derived and/or modified sequence
atggggcagcaggttggtcgcgtgggggaggcccccggactgcagcagccacagccccgagggatcagaggaagctccgccgctagaccctcgggccgacggcgggatccagcgggacgcacaactgagacaggattcaatatcttcacccagcacgaggcactccaccgcccttatggatgtgatgtagagcctcaagcattgaacgaggccatccgatggtcaagtaaggagaatctgctgggcgcaaccgaaagcgacccaaatcttttcgttgcactgtacgatttcgtcgcttcaggggataacaccctgagcatcactaagggcgaaaagctgcgggtgctcggctacaaccaaaacggcgagtggagcgaagttcgcagtaaaaatggccaaggctgggttccctcaaactacatcacacctgttaattcactggaaaaacatagctggtaccacgggccagtctcccggtcggcagcagagtacttgttgtcaagcctgatcaatggatctttcctggttcgcgaatccgaatcgagcccaggtcagttgtctatttccttaagatacgaaggccgggtgtaccactatcgtattaacaccacagctgacggaaaggtgtacgttaccgctgaatccaggtttagtacactggccgagctggtacatcaccacagcaccgttgcggatggcctcgtcacaactctgcattatccagctcccaagtgtaataagccaacggtctacggtgtctctcccatacacgacaagtgggagatggaaagaacggacataactatgaaacataagttgggtggcgggcaatatggagaggtgtatgttggagtatggaagaaatactccctgaccgtggctgtgaaaacgctcaaagaggatacaatggaggtggaggaattcctgaaagaagccgccgtcatgaaggagatcaagcaccctaacctggtgcagctcctgggtgtatgcactcttgagccccccttttatatcgtgaccgagtatatgccgtatgggaacctcctggattatctccgggagtgtaatagagaagaggtaaccgccgtcgtcctactatatatggctacacagatctcttccgcaatggagtacctggaaaagaagaactttattcatagggacctcgccgccagaaactgcctggtgggcgagaaccatgtggtgaaagtggccgacttcgggctatcccggctgatgactggagatacatacaccgctcatgcaggtgccaaattccccatcaaatggacagccccagaatctctggcatacaatactttcagcatcaaatccgacgtgtgggcctttggtgtgcttctgtgggaaattgccacctatggaatgagcccttacccgggaatcgatctgagtcaggtgtatgacctcctggagaaaggctatcgtatggagcagccagagggctgtcctccaaaggtctacgagttgatgcgcgcatgttggaaatggagccccgcggatcggcctagctttgcggaaacccatcaggcctttgaaacgatgttccatgatagctccattagcgaagaagtggccgaggagctggggagagcggcttcctcatcctccgttgtcccttacctcccacgtctgcccatccttccaagcaagactagaaccctcaaaaagcaggtcgagaacaaggagaatatagagggagcccaggacgcaacagaaaattccgcctcttcactggccccagggttcatcagaggcgcccaggctagctctggctcgcccgcgctgccaagaaagcagcgagataaatcaccttcatccttgctggaggatgcaaaggagacatgcttcacgcgcgatcgaaaaggggggttcttctccagcttcatgaagaagaggaatgcacctaccccacctaagcgctcttccagtttcagggagatggaaaaccagcctcacaagaagtatgagctgacagggaacttttcctcagtggcttctctgcagcacgccgacggatttagcttcacacccgctcagcaggaggctaatctagtgccccccaagtgctacggaggtagcttcgcccagcgaaacctctgtaacgacgacggaggtggggggggcggaagcgggaccgcgggtggagggtggagcggcatcacggggtttttcactccacgtctgatcaaaaagacccttggtctcagggcaggaaagccaacggcatcagatgacacttctaaaccattcccgagatcaaatagtacttcttctatgagctccggccttcctgaacaagaccgaatggcaatgacactcccccggaattgtcagcgctccaaactgcaattggaacgcaccgtgagcacttcatcccagcccgaggagaatgtagatcgtgctaacgatatgcttccgaaaaaatccgaggagagcgcagccccgtcgagggagaggcctaaggcgaaactgctgcccaggggggcgaccgcgctgccactacgaacccccagcggtgacctagctattaccgagaaagatcccccgggagtgggggtggccggagtggctgcggcgcccaagggtaaggagaaaaatgggggcgcacggctgggtatggctggtgtgcctgaggacggcgaacagcctggctggccaagccctgcaaaggccgctccagtcctgccgactacccacaaccacaaggtgcccgtcttgataagtccaactttgaaacacacaccggctgatgtacaattgataggcactgattctcaaggtaataagttcaagctcctgagtgagcatcaggtaacctctagcggagataaggacaggcccaggcgcgtgaaaccaaagtgtgcacctcccccaccgcccgtgatgaggcttctccaacacccctccatctgtagcgaccctactgaggaacctacggccctgacagcgggtcaatctactagtgagacccaagagggagggaagaaagctgctctgggagccgtgccaattagcgggaaggccggtaggccggtcatgccaccaccccaggtgccgctccctacatcttccataagtcccgccaagatggccaacggcactgctggaaccaaagtggcgctgcgcaaaacaaagcaagccgccgaaaagataagcgccgacaaaatcagtaaggaggcactgcttgagtgtgcggacttgttgagctccgccttaaccgaaccggtgccaaactctcagcttgtcgataccggacaccagctgttggattattgtagtggttatgtggattgtattccccaaacccgcaacaaatttgcgtttcgagaagccgtgtccaagttggagctgtcgcttcaggaactccaggtctcatccgccgccgccggagtcccaggaacaaacccagtgcttaataacctcctgagttgtgtacaggaaatctccgatgtagtgcaaagatag

SEQ ID NO: 65838 - DNA, 3486 bp, Artificial Sequence
  derived and/or modified sequence
atgggccagcaggtgggccgggtgggggaggcccctggcctgcagcagccccagccccggggcatccggggcagcagcgctgcccggcccagcggcagaagaagagatcctgctggccgcaccacagagaccggcttcaacatcttcacccagcacgaggccctgcaccggccctacggctgtgatgtggagccccaggccctgaatgaggccatccgctggagcagcaaggagaacctgctgggcgccacagaaagtgaccccaacctgtttgtggccctgtatgactttgtggccagcggggacaacaccctgagcatcaccaagggggagaagctgcgggtgctgggctacaaccagaatggagagtggagcgaggtgcgcagcaagaatggccagggctgggtgcccagcaactacatcacccctgtgaacagcctggagaagcacagctggtaccacggccctgtgagccgctctgctgctgagtacctgctgagcagcctcatcaatggcagcttcctggtgcgggagagcgagagcagccctggccagctgagcatcagcctgcgctatgagggccgggtgtaccactaccgcatcaacaccacagcagatggcaaggtgtatgtgacagctgagagccgcttcagcaccctggccgagctggtgcaccaccacagcacagtggctgatggcctggtgaccaccctgcactacccagcccccaagtgcaacaagcccaccgtgtatggagtgagccccatccatgacaagtgggagatggagaggacagacatcaccatgaagcacaagctgggcggcggccagtacggggaggtgtatgtgggcgtgtggaagaagtacagcctgactgtggccgtgaagaccctgaaggaggacaccatggaggtggaggagttcctgaaggaggccgctgtgatgaaggagatcaagcaccccaacctggtgcagctgctgggcgtgtgcaccctggagccccccttctacatcgtgacagagtacatgccctacggcaacctgctggactacctgcgggagtgcaaccgggaggaggtgacagctgtggtgctgctgtacatggccacccagatcagcagcgccatggagtacctggagaagaagaacttcatccaccgggacctggccgccaggaactgcctggtgggggagaaccacgtggtgaaggtggccgactttggcctgagccggctgatgaccggggacacctacacagcccacgccggggccaagttccccatcaagtggacagcccctgagagcctggcctacaacaccttcagcatcaagagtgatgtgtgggccttcggcgtgctgctgtgggagatcgccacctacggcatgagcccctacccaggcatcgacctgagccaggtgtatgacctgctggagaagggctacaggatggagcagcctgagggctgcccccccaaggtgtatgagctgatgagggcctgctggaagtggagccctgctgaccggcccagctttgctgagacccaccaggcctttgagaccatgtttcatgacagcagcatcagcgaggaggtggccgaggagctgggccgggccgccagcagcagctctgtggtgccctacctgccccggctgcccatcctgcccagcaagaccaggaccctgaagaagcaggtggagaacaaggaaaatattgaaggagcccaggatgccacagaaaattctgccagcagcctggcccctggcttcatccggggggcccaggccagcagcggcagccctgccctgcccaggaagcagagggacaagagccccagcagcctgctggaggatgccaaggagacctgcttcacccgggacaggaagggcggcttcttcagcagcttcatgaagaagagaaatgcccccaccccacccaagaggagcagcagcttccgggagatggagaaccagccccacaagaagtatgagctgactggaaacttcagctctgtggccagcctgcagcacgcagatggcttctccttcaccccagcccagcaggaggccaacctggtgccccccaagtgctatggaggcagctttgcccagaggaacctgtgcaatgatgatggcggcggcggcggcggcagcggcacagctgggggcggctggagcggcatcaccggcttcttcacccccaggctcatcaagaagaccctgggcctgcgggccggcaagcccacagccagtgatgacaccagcaagcccttccccaggagcaacagcaccagctccatgagcagcggcctgcctgagcaggacaggatggccatgaccctgcccaggaactgccagaggagcaagctgcagctggagaggacagtgtccaccagcagccagccagaagaaaatgtggaccgggccaatgacatgctgcccaagaagtctgaggagagcgctgcccccagccgggagcggcccaaggccaagctgctgcccaggggggccacagccctgcccctgcggaccccatctggggacctggccatcacagagaaggaccccccaggagtgggcgtggccggcgtggccgccgcccccaagggcaaggagaagaatggaggagcccggctgggcatggccggcgtgcctgaagatggagagcagcccggctggcccagccctgccaaggccgcccctgtgctgcccaccacccacaaccacaaggtgcctgtgctgatcagccccaccctgaagcacaccccagcagatgtgcagctgattggaacagacagccagggcaacaagttcaagctgctgtctgagcaccaggtgaccagcagcggggacaaggaccggcccaggagagtgaagcccaagtgtgcccctcctcctcctcctgtgatgaggctgctgcagcaccccagcatctgcagcgaccccacagaggagcccacagccctgacagctggccagagcaccagcgagacccaggagggcggcaagaaggccgccctgggcgctgtgcccatcagcggcaaggccggccggcctgtgatgcccccaccccaggtgcccctgcccaccagcagcatcagccctgccaagatggccaatggaacagctggcaccaaggtggccctgaggaagaccaagcaggccgctgagaagatctctgctgacaagatcagcaaggaggccctgctggagtgtgccgacctgctgagcagcgccctgacagagcctgtgcccaacagccagctggtggacaccggccaccagctgctggactactgcagcggctacgtggactgcatcccccagaccaggaacaagtttgccttccgggaggccgtgtccaagctggagctgagcctgcaggagctgcaggtgtcctctgctgctgctggggtgcccggcaccaaccctgtgctgaacaacctgctgagctgtgtgcaggagatcagtgatgtggtgcagaggtag

SEQ ID NO: 65839 - DNA, 3486 bp, Artificial Sequence
  derived and/or modified sequence
atgggccagcaggtgggccgggtgggcgaggcccccggcctgcagcagccccaaccccgtggcattaggggctcttctgccgcccgcccaagtggacggaggcgcgaccccgcgggtcggacgaccgagactggcttcaatatctttactcagcatgaagcgttgcacaggccttacggctgcgatgtggagcctcaggccctgaatgaggcaatacgctggtcaagcaaagagaatcttttaggggctacagaaagcgatccgaatctttttgtggctctgtacgatttcgtggcgagcggcgataacacgttgtcaatcacaaaaggcgagaaactgagggttctgggatacaatcagaatggcgagtggagcgaggttcgttccaagaatggccaggggtgggtgccttcaaattatatcacgcctgtgaatagcctggaaaagcacagctggtatcatgggcctgtgtcaagaagcgcagctgagtatcttctctcatcgctgatcaatgggagcttcctggtccgcgagagcgagtcctcacccgggcagttatcgatctctctgcggtacgagggccgtgtttaccactatagaattaataccacagctgatggcaaggtgtacgtcactgccgagtcacggttttcaaccctagccgaacttgtccatcatcactccaccgtggccgatggcctggtgacgacactccattacccagctccaaagtgcaacaaacccacagtgtatggtgtgagtccgatccacgataaatgggagatggaaagaaccgatatcactatgaagcacaagttaggaggcggacagtacggcgaagtgtatgtcggcgtgtggaaaaagtattctcttacggtggcagtaaagacgctcaaagaggacactatggaggtcgaggagttcctaaaggaagctgccgtaatgaaggagattaaacacccaaatctcgtgcagctgcttggcgtttgtaccctcgagcctccattttacatcgtgaccgagtacatgccctatggcaatctgttggactacctgcgcgagtgtaaccgcgaagaggtgacagctgtcgtactgctgtatatggcaactcagatatcaagcgctatggaatacctggaaaagaagaactttatccacagagatctagctgcgcgtaattgcttggtcggggaaaaccacgtggtaaaagttgccgactttggcctgtctcggctgatgacgggcgatacctataccgcccacgccggggccaagttcccaattaagtggacagccccagagagccttgcgtataatactttttccatcaagtccgatgtgtgggcctttggcgtcctgctttgggaaatcgcgacatatggaatgtcaccataccccggcatagatctctcccaagtgtacgacttgctggagaagggctacagaatggaacaaccagaaggctgccccccgaaagtgtatgaactgatgcgggcctgttggaagtggagccctgccgatcgtccctcttttgccgaaactcaccaggctttcgaaacaatgttccatgacagctcaatctctgaggaggttgcagaggaattaggaagggctgcttcatcatcgtccgtggtcccctacctccctcgtcttcccatcctcccatccaagacacggacccttaaaaaacaggtcgagaataaagagaatattgagggtgctcaggacgccaccgagaattctgcttcaagtctcgcccctggtttcattcgtggagctcaagccagttctggctccccagctctccctcgtaagcaacgcgataaaagccccagctcgctgttagaagacgccaaagagacatgcttcactagagatcgtaagggtggcttcttctcttcctttatgaaaaagcgtaacgcaccaacaccccctaagagaagttcttcattccgggagatggagaatcagcctcacaaaaagtatgaactgacggggaatttttccagtgtagcctctcttcagcatgctgacggcttttccttcacacccgcccaacaagaagcgaaccttgtccctccgaaatgctatggaggatcctttgcccagcgtaacctctgcaacgatgatggcggagggggaggggggagcggtaccgccggcgggggctggtccggaataaccggcttctttacaccaaggctgatcaagaagactctgggcctgagggcagggaaaccaaccgctagcgacgataccagtaagccttttccaagatcaaattcaacaagctctatgagctcaggcttacccgagcaggaccggatggcgatgacattgccccgcaattgtcagaggtcgaagttgcagctggaacggaccgttagcacatccagtcagccggaggagaacgttgatagggccaatgacatgctgcccaaaaagagtgaagaatccgccgctccttctcgggagcggccaaaggctaagctgctgccgaggggggccaccgccttacccctgcggaccccatctggcgatctggccattaccgagaaggacccaccaggagtgggcgtggcaggagtggctgcggctccaaagggcaaggaaaagaacggcggagcacggctcggcatggctggtgtgcctgaggacggggagcagccaggatggccctcccctgcaaaggctgctcccgttcttccaaccactcacaaccacaaggttcctgttctcatctctcccaccctgaagcacacgccagctgatgtgcaactcataggcacagacagccagggaaataaattcaaactcttgagcgagcaccaagtaaccagcagcggcgacaaggatcggcccaggcgggttaagcccaaatgcgcccctcctccacccccagtcatgaggctcctgcagcatccttccatttgcagtgatcctactgaagagccaaccgcattaaccgccggtcagtctacttccgagacccaagagggggggaaaaaggcggcgctgggtgctgtgcctatatctggaaaggccggaaggcccgttatgccccccccacaggtaccgctcccaaccagctccattagtcccgctaagatggccaacggcaccgccggaacaaaggtggcactcagaaaaaccaagcaggcagctgagaagatttctgcggacaagatcagcaaggaggctctgctggagtgcgccgatttgctgagtagcgcactcaccgagccggtgccgaacagccagctggtggacaccggccaccagctacttgactattgttcaggatacgttgattgcattccccaaacacgcaacaagttcgcgtttagagaggccgtgagtaagctggaactgagcttacaggaattgcaggtttctagtgccgccgccggggtgcccggtactaacccagtgcttaataacctcctttcttgtgtgcaagaaatctctgacgtggtacagagatag

SEQ ID NO: 65840 - DNA, 3486 bp, Artificial Sequence
  derived and/or modified sequence
atgggtcagcaggtaggtagagtgggtgaggctcccggactgcagcagccccagcccaggggaattagggggtccagcgcagctaggccgtctggaagacggcgtgacccagcagggaggacaactgagaccgggtttaacatcttcactcagcacgaggccctgcacaggccatatggttgtgacgtggaacctcaggccctgaatgaagccattcgatggtccagcaaagagaatttactgggggcaaccgaatctgatcctaacttgtttgtagcactctatgattttgtggctagcggggacaatactctcagtatcaccaagggggaaaaactgcgggttttaggatacaaccaaaacggagagtggtcagaggttagatcaaagaatggccaggggtgggtgcccagcaactacattacccccgtaaattctttggaaaaacattcctggtaccacggcccagtctctagatctgcggctgagtatctgctctctagcctcatcaatggctcctttttagtacgcgaaagcgagtcttcccccggacagttgtcaattagcttacgatacgagggcagggtttaccattaccgcattaacaccaccgccgacggtaaagtgtacgtgactgccgaaagccgattcagcactctggccgagttggtgcaccatcatagcacggtggccgatggcctcgtgacaacgttacactatcctgcacccaagtgtaataaacccaccgtatatggcgtttctcccattcatgataaatgggagatggagaggactgacataaccatgaagcataaacttgggggtggtcagtatggcgaagtgtacgtgggggtgtggaagaagtattccttaaccgtggcggtgaagacccttaaggaggacacaatggaggtcgaagagtttctgaaggaagctgctgtgatgaaagagattaagcaccccaatttagtgcagctactgggtgtttgcacgctggaacctccattctacatcgtcacagagtacatgccctacggcaatctgcttgattatctgcgggagtgtaaccgtgaggaggtgacagccgtcgttctgctgtatatggccactcaaatctccagtgcgatggaatacctcgagaaaaaaaacttcattcacagggatctagccgcacggaactgtttggtaggcgagaaccacgtggtaaaagttgcagacttcggattgtccaggctcatgacgggggatacatacacggctcatgccggagccaagttccctattaaatggacagccccagagtcgcttgcctataacacgttttccatcaaatcagatgtgtgggcctttggagtcctcctgtgggaaattgccacttacgggatgagcccttatccaggaatcgacctgagtcaagtatatgatcttctcgagaaaggctacagaatggaacagccagaagggtgcccgcctaaggtgtacgagctcatgcgagcctgttggaagtggagccccgctgaccggccaagcttcgccgaaacacaccaagcctttgaaacaatgttccacgattcatctatcagcgaggaggttgccgaggagctgggtcgcgcagcctcttccagctccgtggtgccgtacctgcctaggctaccaattcttccatctaaaacgaggacgctaaaaaaacaagtggaaaataaggaaaacatagaaggagcccaagatgcgacagaaaattcggccagctcattggccccaggtttcattcggggtgcacaggccagcagcggttcaccggcacttcctcgaaaacagcgagacaaatctcccagtagtctcctggaggacgcgaaagagacatgtttcacccgggacagaaagggcggatttttttccagcttcatgaagaaaaggaatgccccaacaccaccaaaacgatcaagttcattccgggagatggaaaatcagccgcataaaaagtacgaactgacaggaaatttttcatccgtggcttcattgcagcatgctgatgggttttcatttacacctgcacagcaagaggctaacctggtcccacccaagtgttacggcggatcatttgcccagaggaatctttgtaacgacgacggcggaggcggtggcggaagcgggaccgccggtgggggttggagcggtatcactggttttttcacgccacggctgattaagaaaaccctgggactgagggctggcaagccaaccgccagcgacgacacaagcaagccttttccacgttccaattctactagttccatgagcagcggcctgcccgaacaggacaggatggctatgaccctgcctagaaattgccaacgatctaaactgcagctcgaaaggacggtctcaacttccagccaaccagaagaaaacgtggacagagctaacgatatgctgccaaaaaagtccgaagagtccgccgctccatccagggagcgccctaaggccaaattgcttcccagaggggcaactgcgctccctttgagaacacccagcggtgatctcgctatcacagagaaggatcctccaggggtgggtgtggcaggtgtagctgccgcacctaaagggaaggagaagaacggcggtgcaagacttggcatggccggtgtgccagaagacggggagcagcctggatggccctccccagctaaagctgcgcctgtgctaccgactacccataaccataaggttccagtcttgattagtcccacacttaaacacacgcctgccgatgtacagctcatcggcacagacagccagggcaacaagttcaaactgttaagcgaacaccaagtaacaagctccggggataaggaccgcccacgcagagtgaaacccaaatgcgcccctccgccaccaccggttatgcggttgttgcagcatccttccatttgcagtgatcccactgaagaacctactgctctgaccgcgggtcagtctaccagcgagacacaagaaggaggcaagaaggcagccttgggggcagtgcccatttctggcaaggctgggaggcctgtcatgccaccccctcaggtgcccttgcccacctcctccatttcacctgccaaaatggccaatggaacagccggaacaaaggtagcgctgcgcaagactaagcaagccgcagaaaagataagcgccgataagatctccaaggaggctcttcttgaatgtgccgatctgctctcctcagctcttacagaacctgtgcccaattcccagctggtggataccgggcaccaacttcttgattactgcagcggctatgtcgactgtatcccgcagacacggaacaagttcgccttccgggaggctgtgagcaagttggagttgtcactgcaggaactccaggtcagttcggccgcagccggagttcctggaacaaaccccgtgctcaacaacttgctcagctgcgtgcaggaaatttccgacgttgtccagagatag

SEQ ID NO: 65841 - DNA, 3486 bp, Artificial Sequence
  derived and/or modified sequence
atggggcagcaggtgggccgcgtcggggaagctccggggctccagcagcctcagccccgcgggatccggggcagcagtgcagccaggccctccggccgcaggcgggacccggcggggcgcaccacagagaccggcttcaatatcttcacccagcatgaagctttgcatcgtccctatggttgtgatgttgaaccccaggcactaaatgaggctatcaggtggagctccaaggagaacttgctcggagccactgagagtgaccctaatctcttcgttgcactttatgattttgtagcaagtggtgataacacactcagcatcactaaaggtgaaaagctacgagtccttggttacaaccagaatggtgagtggagtgaagttcgctctaagaatgggcagggctgggtgccaagcaactacatcaccccagtgaacagcctggaaaaacactcctggtaccatggacctgtgtcacgcagtgcagctgagtatctgctcagcagtctaatcaatggcagcttcctggtgcgagaaagtgagagtagccctgggcagctgtccatctcgctcaggtacgagggacgtgtgtatcactacaggatcaataccactgcagatggcaaggtgtatgtgactgctgagagccgcttcagcaccttggcagagcttgtacaccatcactccacagtggctgatgggctggtgacaacattacactacccagcacccaagtgtaataagcctacagtctatggtgtgtcccccatccacgacaaatgggaaatggagcgaacagatattaccatgaagcacaaacttgggggcggtcagtatggagaggtttacgttggcgtctggaagaaatacagccttacagttgctgtgaaaacattgaaggaagataccatggaggtagaagaattcctgaaagaagctgcagtaatgaaggaaatcaagcatcctaatctggtacaacttttaggtgtgtgtactttggagccaccattttacattgtgactgaatacatgccatacgggaatttgctggattacctccgagaatgcaaccgagaagaggtgactgcagttgtgctgctctacatggccactcagatttcttctgcaatggagtacttagagaagaagaatttcatccatagagatcttgcagctcgtaactgcctagtgggagaaaaccatgtggtaaaagtggctgactttggcttaagtagattgatgactggagacacttatactgctcatgctggagccaaatttcctattaagtggacagcaccagagagtcttgcctacaataccttctcaattaaatctgacgtctgggcttttggggtattgttgtgggaaattgctacctatggaatgtcaccatatccaggtattgacctgtctcaggtctatgacctactagaaaaaggatatcgaatggaacagcctgagggatgcccccctaaggtttatgaacttatgagagcatgctggaagtggagccctgccgataggccctcttttgctgaaacacaccaagcttttgaaaccatgttccatgactccagcatttctgaagaggtagctgaggagcttgggagagccgcctcctcgtcatctgttgttccatacctgccccggctacctatacttccttccaagactcggacactgaagaaacaggtggagaacaaggagaacattgaaggggcacaagatgccacagaaaattctgcttccagtttagcaccagggttcatcagaggtgcacaggcctctagtggatccccagcactgcctcgaaagcaaagagacaagtcacccagcagcctcttggaagatgccaaagagacatgcttcaccagggataggaaggggggcttcttcagctccttcatgaagaagagaaatgctcctacaccccccaaacgcagcagctccttccgagaaatggagaatcagccccataagaaatacgaactcacgggtaacttctcatctgttgcttctctacagcatgctgatgggttctctttcactcctgcccagcaagaggcgaatctggtgccacccaagtgctatggggggagctttgcacagaggaacctctgtaatgacgacggtggtgggggtgggggcagtggcactgctgggggtgggtggtctggcatcacaggcttctttacaccacgcttaatcaaaaagacactgggcttacgagcaggtaaacccacagccagtgatgacacttccaagccttttccaaggtcaaactctacatcttccatgtcctcagggcttccagagcaggataggatggcaatgacccttcccaggaactgccagaggtccaaactccagctggaaaggacagtgtccacctcttctcagccagaagagaatgtggacagggccaatgacatgcttccaaaaaaatcagaggaaagtgctgctccaagcagggagagaccaaaagccaagttattgcccagaggagccacagctcttcctctcagaacaccctctggggatctagccattacagagaaggaccctccaggggtgggagtggctggagtggcagctgcccccaagggtaaagagaagaatggtggggcacgacttgggatggctggagttccagaggatggagagcagccgggctggccttctccagccaaggctgcccccgtcctcccaaccactcacaaccacaaagtgccagtccttatctcacccactctgaaacacactccagctgacgtgcagctcattggcacagactctcaggggaataaattcaagctcttatctgagcatcaggtcacatcctctggagacaaggaccgaccccgacgggtaaaaccaaagtgtgccccacccccaccaccagtgatgagactactgcagcatccgtccatctgctcagaccctacagaagagccaactgccctaactgcaggacagtccacatcagaaacacaggaaggaggaaagaaggcagctctgggcgcagtgcccatcagtgggaaagctgggaggccagtgatgcctccacctcaagtgcctctgcccacatcttccatctcgccagccaaaatggccaatggcacagcaggtactaaagtggctctgagaaaaaccaaacaggccgctgagaaaatctcagcagacaaaatcagcaaagaggccctgctggaatgtgctgacctactgtccagtgcactcacggaacctgtgcccaacagccagctggtagacactggacaccagctgcttgactactgctcaggctatgtggactgcatccctcaaactcgcaacaaatttgccttccgagaggctgtgagcaaactggaactcagcctgcaggagctacaggtttcttcagcagctgctggtgtgcccgggacaaaccctgtccttaataacttattgtcatgtgtacaggaaatcagtgatgtggtgcagaggtag

SEQ ID NO: 65842 - protein, 1079 aa, Artificial Sequence
  derived and/or modified sequence
MGQQVGRVGEAPGLQQPQPRGIRGSSAARPSGRRRDPAGRTTETGFNIFTQHDHFASCVEDGFEGDKTGGSSPEALHRPYGCDVEPQALNEAIRWSSKENLLGATESDPNLFVALYDFVASGDNTLSITKGEKLRVLGYNQNGEWSEVRSKNGQGWVPSNYITPVNSLEKHSWYHGPVSRSAAEYLLSSLINGSFLVRESESSPGQLSISLRYEGRVYHYRINTTADGKVYVTAESRFSTLAELVHHHSTVADGLVTTLHYPAPKCNKPTVYGVSPIHDKWEMERTDITMKHKLGGGQYGEVYVGVWKKYSLTVAVKTLKEDTMEVEEFLKEAAVMKEIKHPNLVQLLGVCTLEPPFYIVTEYMPYGNLLDYLRECNREEVTAVVLLYMATQISSAMEYLEKKNFIHRDLAARNCLVGENHVVKVADFGLSRLMTGDTYTAHAGAKFPIKWTAPESLAYNTFSIKSDVWAFGVLLWEIATYGMSPYPGIDLSQVYDLLEKGYRMEQPEGCPPKVYELMRACWKWSPADRPSFAETHQAFETMFHDSSISEEVAEELGRAASSSSVVPYLPRLPILPSKTRTLKKQVENKENIEGAQDATENSASSLAPGFIRGAQASSGSPALPRKQRDKSPSSLLEDAKETCFTRDRKGGFFSSFMKKRNAPTPPKRSSSFREMENQPHKKYELTGLPEQDRMAMTLPRNCQRSKLQLERTVSTSSQPEENVDRANDMLPKKSEESAAPSRERPKAKLLPRGATALPLRTPSGDLAITEKDPPGVGVAGVAAAPKGKEKNGGARLGMAGVPEDGEQPGWPSPAKAAPVLPTTHNHKVPVLISPTLKHTPADVQLIGTDSQGNKFKLLSEHQVTSSGDKDRPRRVKPKCAPPPPPVMRLLQHPSICSDPTEEPTALTAGQSTSETQEGGKKAALGAVPISGKAGRPVMPPPQVPLPTSSISPAKMANGTAGTKVALRKTKQAAEKISADKISKEALLECADLLSSALTEPVPNSQLVDTGHQLLDYCSGYVDCIPQTRNKFAFREAVSKLELSLQELQVSSAAAGVPGTNPVLNNLLSCVQEISDVVQR

SEQ ID NO: 65843 - DNA, 3240 bp, Artificial Sequence
  derived and/or modified sequence
atgggccagcaggtgggcagagtgggcgaggcccccggcctgcagcagccccagcccagaggcatcagaggcagcagcgccgccagacccagcggcagaagaagagaccccgccggcagaaccaccgagaccggcttcaacatcttcacccagcacgaccacttcgccagctgcgtggaggacggcttcgagggcgacaagaccggcggcagcagccccgaggccctgcacagaccctacggctgcgacgtggagccccaggccctgaacgaggccatcagatggagcagcaaggagaacctgctgggcgccaccgagagcgaccccaacctgttcgtggccctgtacgacttcgtggccagcggcgacaacaccctgagcatcaccaagggcgagaagctgagagtgctgggctacaaccagaacggcgagtggagcgaggtgagaagcaagaacggccagggctgggtgcccagcaactacatcacccccgtgaacagcctggagaagcacagctggtaccacggccccgtgagcagaagcgccgccgagtacctgctgagcagcctgatcaacggcagcttcctggtgagagagagcgagagcagccccggccagctgagcatcagcctgagatacgagggcagagtgtaccactacagaatcaacaccaccgccgacggcaaggtgtacgtgaccgccgagagcagattcagcaccctggccgagctggtgcaccaccacagcaccgtggccgacggcctggtgaccaccctgcactaccccgcccccaagtgcaacaagcccaccgtgtacggcgtgagccccatccacgacaagtgggagatggagagaaccgacatcaccatgaagcacaagctgggcggcggccagtacggcgaggtgtacgtgggcgtgtggaagaagtacagcctgaccgtggccgtgaagaccctgaaggaggacaccatggaggtggaggagttcctgaaggaggccgccgtgatgaaggagatcaagcaccccaacctggtgcagctgctgggcgtgtgcaccctggagccccccttctacatcgtgaccgagtacatgccctacggcaacctgctggactacctgagagagtgcaacagagaggaggtgaccgccgtggtgctgctgtacatggccacccagatcagcagcgccatggagtacctggagaagaagaacttcatccacagagacctggccgccagaaactgcctggtgggcgagaaccacgtggtgaaggtggccgacttcggcctgagcagactgatgaccggcgacacctacaccgcccacgccggcgccaagttccccatcaagtggaccgcccccgagagcctggcctacaacaccttcagcatcaagagcgacgtgtgggccttcggcgtgctgctgtgggagatcgccacctacggcatgagcccctaccccggcatcgacctgagccaggtgtacgacctgctggagaagggctacagaatggagcagcccgagggctgcccccccaaggtgtacgagctgatgagagcctgctggaagtggagccccgccgacagacccagcttcgccgagacccaccaggccttcgagaccatgttccacgacagcagcatcagcgaggaggtggccgaggagctgggcagagccgccagcagcagcagcgtggtgccctacctgcccagactgcccatcctgcccagcaagaccagaaccctgaagaagcaggtggagaacaaggagaacatcgagggcgcccaggacgccaccgagaacagcgccagcagcctggcccccggcttcatcagaggcgcccaggccagcagcggcagccccgccctgcccagaaagcagagagacaagagccccagcagcctgctggaggacgccaaggagacctgcttcaccagagacagaaagggcggcttcttcagcagcttcatgaagaagagaaacgcccccaccccccccaagagaagcagcagcttcagagagatggagaaccagccccacaagaagtacgagctgaccggcctgcccgagcaggacagaatggccatgaccctgcccagaaactgccagagaagcaagctgcagctggagagaaccgtgagcaccagcagccagcccgaggagaacgtggacagagccaacgacatgctgcccaagaagagcgaggagagcgccgcccccagcagagagagacccaaggccaagctgctgcccagaggcgccaccgccctgcccctgagaacccccagcggcgacctggccatcaccgagaaggacccccccggcgtgggcgtggccggcgtggccgccgcccccaagggcaaggagaagaacggcggcgccagactgggcatggccggcgtgcccgaggacggcgagcagcccggctggcccagccccgccaaggccgcccccgtgctgcccaccacccacaaccacaaggtgcccgtgctgatcagccccaccctgaagcacacccccgccgacgtgcagctgatcggcaccgacagccagggcaacaagttcaagctgctgagcgagcaccaggtgaccagcagcggcgacaaggacagacccagaagagtgaagcccaagtgcgcccccccccccccccccgtgatgagactgctgcagcaccccagcatctgcagcgaccccaccgaggagcccaccgccctgaccgccggccagagcaccagcgagacccaggagggcggcaagaaggccgccctgggcgccgtgcccatcagcggcaaggccggcagacccgtgatgccccccccccaggtgcccctgcccaccagcagcatcagccccgccaagatggccaacggcaccgccggcaccaaggtggccctgagaaagaccaagcaggccgccgagaagatcagcgccgacaagatcagcaaggaggccctgctggagtgcgccgacctgctgagcagcgccctgaccgagcccgtgcccaacagccagctggtggacaccggccaccagctgctggactactgcagcggctacgtggactgcatcccccagaccagaaacaagttcgccttcagagaggccgtgagcaagctggagctgagcctgcaggagctgcaggtgagcagcgccgccgccggcgtgcccggcaccaaccccgtgctgaacaacctgctgagctgcgtgcaggagatcagcgacgtggtgcagagatag

SEQ ID NO: 65844 - DNA, 3240 bp, Artificial Sequence
  derived and/or modified sequence
atgggccagcaagtggggagagtcggagaggctcctgggctgcagcagcctcaacctagaggcatccgcgggtcatctgccgctcgaccctccggtcgacgccgggatccagctgggaggaccacagagaccggctttaacatattcacacaacacgatcactttgcgtcctgcgttgaggacggctttgaaggagacaaaactgggggctcttccccagaggccttacaccggccttacggatgcgacgtcgaacctcaagccctgaatgaagccatccggtggagctccaaagagaacctgcttggagctaccgagagcgacccaaatcttttcgtggctttgtacgatttcgttgcttctggggataacacactcagcatcacgaaaggcgagaaacttcgcgtgctggggtataatcagaatggcgagtggagcgaagtgcgtagtaagaacggacaggggtgggtcccctcaaactatatcaccccagtgaattcactggagaaacactcctggtaccacgggcctgtgagccgctctgcagctgaatatttactatcaagcctgatcaatggctcgtttctggtgcgggaaagtgagagctctccaggccagctgtctatctctctccgctatgaaggtagggtgtatcactatagaatcaacaccactgctgatgggaaggtgtatgtgaccgctgagtcccggttcagcactctcgctgaactggtccaccaccattcgacagtggctgatgggctggtgaccaccttgcactatcctgccccaaagtgcaataagcccacagtttatggagtcagccccatacacgacaagtgggaaatggagcgaacagacattaccatgaaacacaaactgggtggcggtcagtacggggaagtctacgtcggggtgtggaagaagtacagcctcactgtcgccgttaaaacgctgaaggaggacaccatggaggtcgaagaattcctgaaggaggccgcggtcatgaaggagattaagcatcccaatttagtccagctgctcggtgtttgcacactggagccacccttttacatcgtaacagagtacatgccttatggcaatctgctggattacctgagagagtgtaatcgggaggaagtcacagctgtcgtgctgctctacatggccacacagattagtagcgctatggagtatttggaaaaaaaaaatttcatacaccgggacctcgctgcacgcaattgtttagttggcgaaaatcatgtggttaaagttgcagatttcgggctcagccgcttgatgacaggggacacctatactgctcacgccggcgctaaatttcccatcaagtggaccgctcccgaaagcctcgcttacaacacgttttcaattaagtctgatgtttgggcatttggagtgctactctgggagatagccacctacgggatgtccccctatcctggcattgacctgtctcaggtgtacgacctgctcgaaaagggataccggatggagcaacccgagggatgcccccccaaggtttacgagctgatgcgagcctgttggaaatggtctcctgccgatcggccaagttttgctgagactcatcaggcttttgaaacaatgttccacgattccagtatcagcgaagaggtagcggaagaactgggtagggctgcatcctcatcatccgtggtgccttacttaccgcggctgcctatcttgccaagtaagaccaggaccctgaagaagcaggttgagaacaaagaaaacatcgagggcgcccaagacgctaccgaaaactcagcctccagtctggcccccggatttatccgaggcgcacaagcttccagcggtagcccagcattgcctaggaaacagcgcgacaagagccccagctccctcctagaagacgccaaggagacatgttttacccgggacagaaagggtggattcttctcttcttttatgaagaaaagaaatgcaccgacgcccccaaagagatcttctagttttagagaaatggagaatcagccacacaagaaatacgagctaacaggcctgccggagcaggaccgaatggctatgacactcccacgcaactgccagcggagtaagctgcaactcgaacgcacagtgagtacgagttcacagcctgaggaaaatgttgatagggctaatgatatgttacctaaaaagagcgaggagtctgcagctccgtctcgagagaggcccaaagctaagctgctgcctcgcggcgccacagccttgcctctacgcacacccagtggcgacctcgcaattactgaaaaagatccccccggagtgggggttgctggagtggctgctgccccaaaaggcaaggagaagaatggcggggcccgccttgggatggcaggcgtcccggaggacggggagcagccaggctggccctcgccagctaaagctgcccctgtattgccaaccacgcataatcataaggttcccgtgctcattagcccaaccttgaagcacactcccgcagatgttcagttaatcgggaccgacagtcaagggaacaagttcaaactgctgagcgaacatcaggtgactagttcaggggacaaagacagaccaaggcgagtgaaaccaaaatgtgcccccccccctccacccgttatgcggttactgcagcacccgagcatctgcagtgatcctacagaggagcctacagctctgacagccgggcagtccactagcgagacgcaggaaggtggaaaaaaggcagcattgggagcggtgccgatcagcgggaaagccggaaggcccgtgatgcccccaccacaagttccactgccgacctcgagcatctctcccgctaagatggcaaatggcacggcagggacaaaggtcgccctacggaaaaccaaacaggctgccgagaagatctctgccgataaaatctcaaaggaggccctgctggagtgcgctgaccttctgtcgtctgccctaacagagcccgtcccaaacagccagctcgtcgataccgggcaccagcttttagattactgctccggttacgtcgattgcatccctcagactaggaacaaattcgcttttagggaagccgtctcaaagctggagctgtcccttcaggagctccaagtgagttctgccgccgccggcgtgcccggtaccaatcccgtgctcaacaacctgctctcttgcgtccaagagatttctgacgtggtccaacgctag

SEQ ID NO: 65845 - DNA, 3240 bp, Artificial Sequence
  derived and/or modified sequence
atgggccagcaggtgggccgggtgggggaggcccctggcctgcagcagccccagccccggggcatccggggcagcagcgctgcccggcccagcggcagaagaagagatcctgctggccgcaccacagagaccggcttcaacatcttcacccagcacgaccactttgccagctgtgtggaggatggctttgaaggagacaagacaggaggcagcagccctgaggccctgcaccggccctacggctgtgatgtggagccccaggccctgaatgaggccatccgctggagcagcaaagaaaacctgctgggcgccacagaaagtgaccccaacctgtttgtggccctgtatgactttgtggccagcggggacaacaccctgagcatcaccaagggggagaagctgcgggtgctgggctacaaccagaatggagagtggagcgaggtgcgcagcaagaatggccagggctgggtgcccagcaactacatcacccctgtgaacagcctggagaagcacagctggtaccacggccctgtgagccgctctgctgctgagtacctgctgagcagcctcatcaatggcagcttcctggtgcgggagagcgagagcagccctggccagctgagcatcagcctgcgctatgagggccgggtgtaccactaccgcatcaacaccacagcagatggcaaggtgtatgtgacagctgagagccgcttcagcaccctggccgagctggtgcaccaccacagcacagtggctgatggcctggtgaccaccctgcactacccagcccccaagtgcaacaagcccaccgtgtatggagtgagccccatccatgacaagtgggagatggagaggacagacatcaccatgaagcacaagctgggcggcggccagtatggagaggtgtatgtgggcgtgtggaagaagtacagcctgactgtggccgtgaagaccctgaaggaggacaccatggaggtggaggagttcctgaaggaggccgctgtgatgaaggagatcaagcaccccaacctggtgcagctgctgggcgtgtgcaccctggagccccccttctacatcgtgacagagtacatgccctacggcaacctgctggactacctgcgggagtgcaaccgggaggaggtgacagctgtggtgctgctgtacatggccacccagatcagcagcgccatggagtacctggagaagaagaacttcatccaccgggacctggccgccaggaactgcctggtgggagaaaatcatgtggtgaaggtggccgactttggcctgagccggctgatgactggagacacctacacagcccatgctggggccaagttccccatcaagtggacagcccctgagagcctggcctacaacaccttcagcatcaagagtgatgtgtgggcctttggagtgctgctgtgggagatcgccacctacggcatgagcccctacccaggcatcgacctgagccaggtgtatgacctgctggagaagggctacaggatggagcagcctgagggctgcccccccaaggtgtatgagctgatgagggcctgctggaagtggagccctgctgaccggcccagctttgctgagacccaccaggcctttgagaccatgtttcatgacagcagcatcagcgaggaggtggccgaggagctgggccgggccgccagcagcagctctgtggtgccctacctgccccggctgcccatcctgcccagcaagaccaggaccctgaagaagcaggtggagaacaaggagaacatcgagggcgcccaggatgccacagagaacagcgccagcagcctggcccctggcttcatccggggggcccaggccagcagcggcagccctgccctgcccaggaagcagagggacaagagccccagcagcctgctggaggatgccaaggagacctgcttcacccgggacagaaaaggaggcttcttcagcagcttcatgaagaagagaaatgcccccaccccacccaagaggagcagcagcttccgggagatggagaaccagccccacaagaagtatgagctgaccggcctgcctgagcaggacaggatggccatgaccctgcccaggaactgccagaggagcaagctgcagctggagaggacagtgtccaccagcagccagccagaagaaaatgtggaccgggccaatgacatgctgcccaagaagtctgaggagagcgctgcccccagccgggagcggcccaaggccaagctgctgcccaggggggccacagccctgcccctgcggaccccatctggggacctggccatcacagagaaggaccccccaggagtgggcgtggccggcgtggccgccgcccccaagggcaaggagaagaatggaggagcccggctgggcatggccggcgtgcctgaagatggagagcagcccggctggcccagccctgccaaggccgcccctgtgctgcccaccacccacaaccacaaggtgcctgtgctgatcagccccaccctgaagcacaccccagcagatgtgcagctgattggaacagacagccagggcaacaagttcaagctgctgtctgagcaccaggtgaccagcagcggggacaaggaccggcccaggagagtgaagcccaagtgtgcccctcctcctcctcctgtgatgaggctgctgcagcaccccagcatctgcagcgaccccacagaggagcccacagccctgacagctggccagagcaccagcgagacccaggagggcggcaagaaggccgccctgggcgctgtgcccatcagcggcaaggccggccggcctgtgatgcccccaccccaggtgcccctgcccaccagcagcatcagccctgccaagatggccaatggaacagctggcaccaaggtggccctgaggaagaccaagcaggccgctgagaagatctctgctgacaagatcagcaaggaggccctgctggagtgtgccgacctgctgagcagcgccctgacagagcctgtgcccaacagccagctggtggacaccggccaccagctgctggactactgcagcggctacgtggactgcatcccccagaccaggaacaagtttgccttccgggaggccgtgtccaagctggagctgagcctgcaggagctgcaggtgtcctctgctgctgctggggtgcccggcaccaaccctgtgctgaacaacctgctgagctgtgtgcaggagatcagtgatgtggtgcagaggtag

SEQ ID NO: 65846 - DNA, 3240 bp, Artificial Sequence
  derived and/or modified sequence
atgggccagcaggtgggccgggtgggcgaggcccccggcctgcagcaacctcagcctcgtggtatacgcggttcttcagccgccagaccttccggccgcagaagagaccctgcaggtcgaacgactgaaaccggatttaacatatttactcagcatgaccattttgctagttgcgtggaagacggctttgagggggataagacaggcgggtcctcacccgaagctctgcaccgcccatatgggtgcgatgtggagccacaagccctaaatgaagctataagatggtcatctaaggaaaacctcctaggagcaaccgagtctgacccaaatctgtttgtggcactttacgattttgtagccagtggcgataacaccttgtccatcactaaaggagagaaactgagagtgctaggctacaatcagaacggagaatggtccgaggttagatctaaaaacggacaggggtgggtgccttcaaattacatcacgccagtaaacagtctcgagaagcactcctggtatcacggcccagtctcacggtcagcagccgaatatctcctttcctcccttattaacggcagctttctggtgagagaatctgagtcttcacctggccagctgagcatttccctgcgatatgagggccgggtctaccactataggatcaacacaacagcagatggaaaagtttacgtcaccgcagagtcccggttcagcacattggctgaactagttcatcaccactcaaccgtcgcagatggcctggtgactacccttcattacccagcaccaaaatgcaataagcctacggtatatggcgtgtctcccatccacgataaatgggagatggaacggaccgacatcaccatgaagcataaactggggggcggacaatacggcgaagtctacgtcggggtatggaagaaatacagtttaacagtggcggtaaagacactcaaggaagacactatggaggtagaagagtttctgaaagaggccgccgtgatgaaggagatcaagcacccaaatttggtgcaacttctaggtgtttgtaccctggagcctccattctacatcgtcaccgagtacatgccttacggaaatctgctggactacctccgggaatgcaacagagaggaggtgacagctgtggtgctgctttacatggctacccagatcagctccgccatggagtatctggagaagaagaacttcatacaccgagatctagccgcccgcaattgcctcgtcggggagaaccatgtggtcaaggtggcagatttcggcttgtctcgccttatgaccggggatacctatacagcccatgccggagccaaatttcccatcaaatggacggcccccgagtcacttgcatataacaccttttctattaagagcgacgtgtgggccttcggcgtgctgctttgggagatcgcgacttatggtatgtctccttacccgggtatcgacttatcacaggtgtatgacctcttggaaaaggggtataggatggaacaacctgagggctgcccaccaaaggtctatgaactgatgagagcctgctggaagtggagccccgccgatcgtcctagtttcgccgagacccaccaggcgtttgaaacaatgtttcacgattcctcaatctcagaagaggtggcagaggagctcggccgcgccgccagcagcagtagtgtagtgccgtacctgccacggttacccatcctcccgtctaagaccaggacgctgaagaaacaggtagagaacaaagagaatatagagggtgctcaggacgccacggaaaattctgccagctccctggcccctggcttcatccgaggggcccaggcctcctctgggtctcccgcactacccaggaagcagagggataaatcaccctcgagtcttcttgaagatgcaaaagaaacttgcttcactagagaccggaagggagggttcttctcgagtttcatgaaaaagaggaatgctcctacccctccaaaacgctccagcagctttcgtgagatggagaaccagccgcacaagaaatatgaacttacagggctacccgaacaggataggatggccatgacgttaccgcgcaattgccagcgctcgaagctacagctggagcgtactgtgagcacaagctcccaacccgaggagaacgtcgaccgggctaacgacatgttacctaaaaagtcagaggaaagtgcagccccctcgagagaacgccctaaagctaagctgctccctcggggggccacagccctgcccctcagaaccccttccggagatctggccattaccgagaaggatcccccgggcgttggagtggcaggagtggcagccgcacccaaaggcaaggagaagaatgggggcgctcgcttgggcatggccggggttccagaggacggggaacaacccgggtggccttccccagctaaagctgctccggtgctcccaaccacacacaatcacaaagttccggtgcttattagccctaccctgaagcatacccccgcagacgtgcaactgattggaaccgacagtcagggcaacaaattcaagctgctctccgagcaccaggttaccagttctggggataaagacagaccgagaagagtgaaaccgaaatgcgcaccacctcccccacctgtgatgaggttacttcagcacccatcaatctgcagtgaccctacagaagaaccaaccgccctcaccgctggtcaatcaacttcagagacccaggaaggcggcaaaaaagccgcattaggggccgttcctatctcaggaaaagcgggtcgccctgtaatgccccctccgcaagtgcctctgcccactagcagcattagccccgctaagatggcaaacggaaccgctgggactaaggtggcactgcggaagactaagcaggcggccgagaagatttccgccgacaaaatttctaaagaggcactgctagagtgcgccgatctcctctccagtgcactaacggaaccagtgccaaattcacaactggtcgacaccggacatcaacttctggattattgctcagggtatgttgactgcatacctcaaacaagaaataagtttgcattccgggaggccgtttctaagctagaattgtccctccaagagctccaggtaagctccgcggcggctggtgttccgggcactaatccggtgctgaacaatctcctctcttgtgttcaggaaatttccgacgtcgttcagagatag

SEQ ID NO: 65847 - DNA, 3240 bp, Artificial Sequence
  derived and/or modified sequence
atgggacagcaggtaggtcgggtcggagaagcgcctggattacagcaaccgcagccacggggaatccgtggttcgagcgccgctcgaccaagcgggcgtagacgtgaccccgcaggcaggacaactgagaccggatttaatattttcacacagcatgatcacttcgcctcttgcgttgaagacgggttcgaaggggacaaaactggcggtagcagtcccgaagccctgcatcgcccttatggatgcgacgtggagccacaggcattgaatgaggctatccggtggagttctaaagaaaacttgctgggagcaacggaatccgatcccaatctcttcgtggccctgtacgatttcgtcgccagcggcgataacacactgtctatcactaagggcgagaagcttcgagtactcggctacaatcaaaatggggaatggagtgaagtgcgctccaaaaatggtcaagggtgggtccctagcaattatattacgcctgtgaactcactggagaagcattcgtggtatcatggcccagtctcccggtccgccgctgagtacctgctctccagcctgataaacgggagcttcttggtacgcgagtccgagtcctctcctggacagctgtcaatcagcctgcgttatgaaggacgtgtgtatcactatcgcatcaacacaaccgccgatggcaaggtttatgtcactgctgaaagtaggttcagtacactcgccgaacttgtacaccaccattccaccgtcgctgatggcctggtcacaaccctccactaccctgcgccaaagtgcaataagccaacagtgtacggagtctcgcctatccatgacaagtgggagatggaacggacagacatcactatgaagcacaaactgggcggtggccagtatggcgaggtgtacgtaggtgtttggaaaaaatattccttaactgtggctgttaaaactcttaaggaagatactatggaagtggaagaattcttaaaggaggctgcggtcatgaaagagattaaacatcctaatcttgtgcaattacttggggtctgtaccctggaaccgcctttttacatcgtcaccgaatatatgccttatgggaacctccttgactacctgcgtgagtgtaatcgcgaagaggtaacagctgttgttctcctgtatatggcaactcagatatcatcagctatggaatacctggagaagaaaaacttcatccatagggacttggcagccaggaactgtctggtgggagagaaccacgtagttaaggtagctgatttcggactctcacgtttgatgactggtgacacctacacggcacatgctggtgccaagttcccgatcaagtggaccgcccctgagtccctggcgtataacactttctcgatcaagagtgacgtgtgggctttcggcgtgctcttgtgggagatcgcgacctacgggatgtcaccctatcccggtatcgacttatcccaggtgtatgacttgcttgagaaaggctaccggatggaacaaccggagggatgtcccccaaaggtgtacgagctgatgcgcgcatgctggaaatggagccccgctgaccggcctagctttgctgagacacaccaggctttcgagaccatgtttcatgacagctcaatctcggaggaggtcgcagaggagctggggagagctgcgtctagttcctcagttgttccctatttgcccagactgccaattcttccaagtaagacacgcacgctgaagaagcaagttgaaaacaaggaaaacatcgagggcgctcaagatgctacagagaactccgcctctagtctggcgcctggctttatccgaggcgcacaagccagcagcggcagtccagctctgccccgaaaacagagggataaaagtccgtcctcactcctggaagatgctaaggaaacttgctttactcgggacagaaagggaggtttttttagctctttcatgaagaagaggaatgcccctacgccacccaagagatcctcttctttcagggagatggaaaaccagcctcataagaaatatgagctgacaggtctgccagaacaggatcgcatggcaatgacccttcccagaaattgtcaacggagtaaattacagctggagagaacggtttctacatcttctcaacccgaggaaaatgtggaccgggctaacgacatgctgcccaaaaagtccgaggaatccgctgcccctagccgagagcgccctaaggctaagctgctcccccgaggggcaacggccttacctctcaggacaccctccggcgatttggccatcacggaaaaggatccacctggtgtgggcgtggcgggagtggctgctgcaccaaaaggcaaggagaaaaatggcggtgccagattgggaatggctggggtacctgaggacggggaacaacctggctggcctagccccgcaaaagccgctcccgtgctgccaacaacacataaccacaaggtgccggtcctgatcagtcccactctgaagcatacccccgctgacgtgcaactcattggaacggactcccagggcaacaagtttaagctgctgtccgaacatcaggtgacctctagcggtgataaggacagaccaaggcgagtgaagcccaaatgtgcaccgccaccacctccagtcatgaggcttctgcaacatccgtcaatctgctccgacccaacggaagagccaaccgccctcacagccggtcaaagtacttccgaaacccaggaagggggaaaaaaggcagccctcggtgcggtgcccattagtggaaaggccggaaggccggtgatgcctccgcctcaggtgccactacccacatcctctatttcacccgctaaaatggccaacgggaccgcgggaaccaaggtggcgctacgcaagacaaagcaggccgctgagaaaatttccgcggataagatctcaaaggaggcactcctcgagtgtgctgatttgcttagctcagcgttaaccgagccagtacccaattcccagctagttgataccgggcatcagctcctggattattgtagtgggtatgttgattgcatccctcaaaccaggaacaagttcgcctttcgggaggccgtgtctaaattggagctgtctctgcaggaactccaggtatcatcagctgccgcaggtgtccccggaacaaatcctgtgctaaataaccttctttcctgtgtgcaggaaatctccgacgtagtgcagagatag

SEQ ID NO: 65848 - DNA, 3240 bp, Artificial Sequence
  derived and/or modified sequence
atggggcagcaggtgggccgcgtcggggaagctccggggctccagcagcctcagccccgcgggatccggggcagcagtgcagccaggccctccggccgcaggcgggacccggcggggcgcaccacagagaccggcttcaatatcttcacccagcatgatcactttgccagctgtgtggaggatggatttgagggagacaagactggaggcagtagtccagaagctttgcatcgtccctatggttgtgatgttgaaccccaggcactaaatgaggctatcaggtggagctccaaggagaacttgctcggagccactgagagtgaccctaatctcttcgttgcactttatgattttgtagcaagtggtgataacacactcagcatcactaaaggtgaaaagctacgagtccttggttacaaccagaatggtgagtggagtgaagttcgctctaagaatgggcagggctgggtgccaagcaactacatcaccccagtgaacagcctggaaaaacactcctggtaccatggacctgtgtcacgcagtgcagctgagtatctgctcagcagtctaatcaatggcagcttcctggtgcgagaaagtgagagtagccctgggcagctgtccatctcgctcaggtacgagggacgtgtgtatcactacaggatcaataccactgcagatggcaaggtgtatgtgactgctgagagccgcttcagcaccttggcagagcttgtacaccatcactccacagtggctgatgggctggtgacaacattacactacccagcacccaagtgtaataagcctacagtctatggtgtgtcccccatccacgacaaatgggaaatggagcgaacagatattaccatgaagcacaaacttgggggcggtcagtatggagaggtttacgttggcgtctggaagaaatacagccttacagttgctgtgaaaacattgaaggaagataccatggaggtagaagaattcctgaaagaagctgcagtaatgaaggaaatcaagcatcctaatctggtacaacttttaggtgtgtgtactttggagccaccattttacattgtgactgaatacatgccatacgggaatttgctggattacctccgagaatgcaaccgagaagaggtgactgcagttgtgctgctctacatggccactcagatttcttctgcaatggagtacttagagaagaagaatttcatccatagagatcttgcagctcgtaactgcctagtgggagaaaaccatgtggtaaaagtggctgactttggcttaagtagattgatgactggagacacttatactgctcatgctggagccaaatttcctattaagtggacagcaccagagagtcttgcctacaataccttctcaattaaatctgacgtctgggcttttggggtattgttgtgggaaattgctacctatggaatgtcaccatatccaggtattgacctgtctcaggtctatgacctactagaaaaaggatatcgaatggaacagcctgagggatgcccccctaaggtttatgaacttatgagagcatgctggaagtggagccctgccgataggccctcttttgctgaaacacaccaagcttttgaaaccatgttccatgactccagcatttctgaagaggtagctgaggagcttgggagagccgcctcctcgtcatctgttgttccatacctgccccggctacctatacttccttccaagactcggacactgaagaaacaggtggagaacaaggagaacattgaaggggcacaagatgccacagaaaattctgcttccagtttagcaccagggttcatcagaggtgcacaggcctctagtggatccccagcactgcctcgaaagcaaagagacaagtcacccagcagcctcttggaagatgccaaagagacatgcttcaccagggataggaaggggggcttcttcagctccttcatgaagaagagaaatgctcctacaccccccaaacgcagcagctccttccgagaaatggagaatcagccccataagaaatacgaactcacggggcttccagagcaggataggatggcaatgacccttcccaggaactgccagaggtccaaactccagctggaaaggacagtgtccacctcttctcagccagaagagaatgtggacagggccaatgacatgcttccaaaaaaatcagaggaaagtgctgctccaagcagggagagaccaaaagccaagttattgcccagaggagccacagctcttcctctcagaacaccctctggggatctagccattacagagaaggaccctccaggggtgggagtggctggagtggcagctgcccccaagggtaaagagaagaatggtggggcacgacttgggatggctggagttccagaggatggagagcagccgggctggccttctccagccaaggctgcccccgtcctcccaaccactcacaaccacaaagtgccagtccttatctcacccactctgaaacacactccagctgacgtgcagctcattggcacagactctcaggggaataaattcaagctcttatctgagcatcaggtcacatcctctggagacaaggaccgaccccgacgggtaaaaccaaagtgtgccccacccccaccaccagtgatgagactactgcagcatccgtccatctgctcagaccctacagaagagccaactgccctaactgcaggacagtccacatcagaaacacaggaaggaggaaagaaggcagctctgggcgcagtgcccatcagtgggaaagctgggaggccagtgatgcctccacctcaagtgcctctgcccacatcttccatctcgccagccaaaatggccaatggcacagcaggtactaaagtggctctgagaaaaaccaaacaggccgctgagaaaatctcagcagacaaaatcagcaaagaggccctgctggaatgtgctgacctactgtccagtgcactcacggaacctgtgcccaacagccagctggtagacactggacaccagctgcttgactactgctcaggctatgtggactgcatccctcaaactcgcaacaaatttgccttccgagaggctgtgagcaaactggaactcagcctgcaggagctacaggtttcttcagcagctgctggtgtgcccgggacaaaccctgtccttaataacttattgtcatgtgtacaggaaatcagtgatgtggtgcagaggtag

SEQ ID NO: 65849 - protein, 1058 aa, Artificial Sequence
  derived and/or modified sequence
MGQQVGRVGEAPGLQQPQPRGIRGSSAARPSGRRRDPAGRTTETGFNIFTQHEALHRPYGCDVEPQALNEAIRWSSKENLLGATESDPNLFVALYDFVASGDNTLSITKGEKLRVLGYNQNGEWSEVRSKNGQGWVPSNYITPVNSLEKHSWYHGPVSRSAAEYLLSSLINGSFLVRESESSPGQLSISLRYEGRVYHYRINTTADGKVYVTAESRFSTLAELVHHHSTVADGLVTTLHYPAPKCNKPTVYGVSPIHDKWEMERTDITMKHKLGGGQYGEVYVGVWKKYSLTVAVKTLKEDTMEVEEFLKEAAVMKEIKHPNLVQLLGVCTLEPPFYIVTEYMPYGNLLDYLRECNREEVTAVVLLYMATQISSAMEYLEKKNFIHRDLAARNCLVGENHVVKVADFGLSRLMTGDTYTAHAGAKFPIKWTAPESLAYNTFSIKSDVWAFGVLLWEIATYGMSPYPGIDLSQVYDLLEKGYRMEQPEGCPPKVYELMRACWKWSPADRPSFAETHQAFETMFHDSSISEEVAEELGRAASSSSVVPYLPRLPILPSKTRTLKKQVENKENIEGAQDATENSASSLAPGFIRGAQASSGSPALPRKQRDKSPSSLLEDAKETCFTRDRKGGFFSSFMKKRNAPTPPKRSSSFREMENQPHKKYELTGLPEQDRMAMTLPRNCQRSKLQLERTVSTSSQPEENVDRANDMLPKKSEESAAPSRERPKAKLLPRGATALPLRTPSGDLAITEKDPPGVGVAGVAAAPKGKEKNGGARLGMAGVPEDGEQPGWPSPAKAAPVLPTTHNHKVPVLISPTLKHTPADVQLIGTDSQGNKFKLLSEHQVTSSGDKDRPRRVKPKCAPPPPPVMRLLQHPSICSDPTEEPTALTAGQSTSETQEGGKKAALGAVPISGKAGRPVMPPPQVPLPTSSISPAKMANGTAGTKVALRKTKQAAEKISADKISKEALLECADLLSSALTEPVPNSQLVDTGHQLLDYCSGYVDCIPQTRNKFAFREAVSKLELSLQELQVSSAAAGVPGTNPVLNNLLSCVQEISDVVQR

SEQ ID NO: 65850 - DNA, 3177 bp, Artificial Sequence
  derived and/or modified sequence
atgggccagcaggtgggcagagtgggcgaggcccccggcctgcagcagccccagcccagaggcatcagaggcagcagcgccgccagacccagcggcagaagaagagaccccgccggcagaaccaccgagaccggcttcaacatcttcacccagcacgaggccctgcacagaccctacggctgcgacgtggagccccaggccctgaacgaggccatcagatggagcagcaaggagaacctgctgggcgccaccgagagcgaccccaacctgttcgtggccctgtacgacttcgtggccagcggcgacaacaccctgagcatcaccaagggcgagaagctgagagtgctgggctacaaccagaacggcgagtggagcgaggtgagaagcaagaacggccagggctgggtgcccagcaactacatcacccccgtgaacagcctggagaagcacagctggtaccacggccccgtgagcagaagcgccgccgagtacctgctgagcagcctgatcaacggcagcttcctggtgagagagagcgagagcagccccggccagctgagcatcagcctgagatacgagggcagagtgtaccactacagaatcaacaccaccgccgacggcaaggtgtacgtgaccgccgagagcagattcagcaccctggccgagctggtgcaccaccacagcaccgtggccgacggcctggtgaccaccctgcactaccccgcccccaagtgcaacaagcccaccgtgtacggcgtgagccccatccacgacaagtgggagatggagagaaccgacatcaccatgaagcacaagctgggcggcggccagtacggcgaggtgtacgtgggcgtgtggaagaagtacagcctgaccgtggccgtgaagaccctgaaggaggacaccatggaggtggaggagttcctgaaggaggccgccgtgatgaaggagatcaagcaccccaacctggtgcagctgctgggcgtgtgcaccctggagccccccttctacatcgtgaccgagtacatgccctacggcaacctgctggactacctgagagagtgcaacagagaggaggtgaccgccgtggtgctgctgtacatggccacccagatcagcagcgccatggagtacctggagaagaagaacttcatccacagagacctggccgccagaaactgcctggtgggcgagaaccacgtggtgaaggtggccgacttcggcctgagcagactgatgaccggcgacacctacaccgcccacgccggcgccaagttccccatcaagtggaccgcccccgagagcctggcctacaacaccttcagcatcaagagcgacgtgtgggccttcggcgtgctgctgtgggagatcgccacctacggcatgagcccctaccccggcatcgacctgagccaggtgtacgacctgctggagaagggctacagaatggagcagcccgagggctgcccccccaaggtgtacgagctgatgagagcctgctggaagtggagccccgccgacagacccagcttcgccgagacccaccaggccttcgagaccatgttccacgacagcagcatcagcgaggaggtggccgaggagctgggcagagccgccagcagcagcagcgtggtgccctacctgcccagactgcccatcctgcccagcaagaccagaaccctgaagaagcaggtggagaacaaggagaacatcgagggcgcccaggacgccaccgagaacagcgccagcagcctggcccccggcttcatcagaggcgcccaggccagcagcggcagccccgccctgcccagaaagcagagagacaagagccccagcagcctgctggaggacgccaaggagacctgcttcaccagagacagaaagggcggcttcttcagcagcttcatgaagaagagaaacgcccccaccccccccaagagaagcagcagcttcagagagatggagaaccagccccacaagaagtacgagctgaccggcctgcccgagcaggacagaatggccatgaccctgcccagaaactgccagagaagcaagctgcagctggagagaaccgtgagcaccagcagccagcccgaggagaacgtggacagagccaacgacatgctgcccaagaagagcgaggagagcgccgcccccagcagagagagacccaaggccaagctgctgcccagaggcgccaccgccctgcccctgagaacccccagcggcgacctggccatcaccgagaaggacccccccggcgtgggcgtggccggcgtggccgccgcccccaagggcaaggagaagaacggcggcgccagactgggcatggccggcgtgcccgaggacggcgagcagcccggctggcccagccccgccaaggccgcccccgtgctgcccaccacccacaaccacaaggtgcccgtgctgatcagccccaccctgaagcacacccccgccgacgtgcagctgatcggcaccgacagccagggcaacaagttcaagctgctgagcgagcaccaggtgaccagcagcggcgacaaggacagacccagaagagtgaagcccaagtgcgcccccccccccccccccgtgatgagactgctgcagcaccccagcatctgcagcgaccccaccgaggagcccaccgccctgaccgccggccagagcaccagcgagacccaggagggcggcaagaaggccgccctgggcgccgtgcccatcagcggcaaggccggcagacccgtgatgccccccccccaggtgcccctgcccaccagcagcatcagccccgccaagatggccaacggcaccgccggcaccaaggtggccctgagaaagaccaagcaggccgccgagaagatcagcgccgacaagatcagcaaggaggccctgctggagtgcgccgacctgctgagcagcgccctgaccgagcccgtgcccaacagccagctggtggacaccggccaccagctgctggactactgcagcggctacgtggactgcatcccccagaccagaaacaagttcgccttcagagaggccgtgagcaagctggagctgagcctgcaggagctgcaggtgagcagcgccgccgccggcgtgcccggcaccaaccccgtgctgaacaacctgctgagctgcgtgcaggagatcagcgacgtggtgcagagatag

SEQ ID NO: 65851 - DNA, 3177 bp, Artificial Sequence
  derived and/or modified sequence
atggggcagcaggtcgggcgagttggcgaagctccaggtctgcagcaaccacaaccccgtggcattaggggaagctctgctgcccggccaagtggacgcaggagagacccggccggacgaaccaccgagaccgggtttaacatatttacacagcacgaggccctgcaccggccttacggatgcgatgtggagccacaggcactgaacgaggccatcaggtggtctagtaaagaaaaccttctgggtgctacagaaagcgacccaaacttgtttgtagccctgtatgatttcgtcgccagcggagataacacactgtctattactaagggcgagaaactacgagtgttaggctataatcaaaacggagaatggagcgaggtccgtagcaaaaacggccagggatgggttccttccaactatattacccctgttaattccttggagaaacactcgtggtaccacggcccagtgtccaggagcgcggccgagtacctgctcagctccctcatcaacggcagttttctggtccgggagtccgaatcaagtcctggacagctcagtatttccttgcggtatgagggccgcgtctatcattatcggattaatactacagccgatggaaaggtttatgttactgcggagagcagattcagcactctcgctgagctcgtgcatcaccacagcactgtcgctgacgggttagtgaccacactgcactaccctgcccccaagtgtaataagccgaccgtttatggtgtcagtcctatccacgacaagtgggagatggaacgcacagacatcaccatgaagcataaattaggcggcggtcagtacggagaagtgtacgtcggggtttggaagaagtatagcctgacagtggccgtgaagaccttgaaggaggatacgatggaggtcgaagagtttctgaaggaggccgcagtgatgaaagagataaagcacccaaacctggtccagctgctaggagtctgcacccttgagcccccattctatattgttaccgagtatatgccctatggtaatctgctggattatctgagggagtgcaaccgggaggaggtgaccgcagtcgtgttactttacatggcgactcagatttctagcgccatggaatacctagaaaagaaaaattttatccatagagacctcgccgctcggaactgcctggttggcgaaaatcacgtcgttaaggtcgccgattttggcctgagccgcctcatgacaggggatacctatacagctcatgcaggcgccaagttcccaatcaagtggacagctcccgagtccctcgcctacaatacttttagtatcaaatctgatgtatgggcatttggtgtcctcctctgggaaatagcgacgtatggaatgtctccttatccggggatcgatctctcacaagtgtacgatttattggagaaaggctacagaatggagcagcccgaaggttgtcccccaaaagtgtacgaactcatgagggcctgctggaaatggagccctgcggacagaccttcatttgccgagacacatcaggcctttgagaccatgtttcatgactcctcaattagcgaggaggtggcagaggagctgggtagggcagctagtagctcttccgtggtgccctacctgcctcgcctgccaattctcccctccaagacacggacccttaaaaagcaggtggaaaacaaagagaacatagaaggagcacaggacgcaactgaaaattcagcttcaagcttggccccgggctttattagaggcgctcaggcttctagcggaagtccagcactgcccaggaagcagagggataaaagccccagctccctcctagaggacgccaaagagacttgtttcacgcgtgatcgaaaaggaggttttttttcatcctttatgaagaagagaaatgcacccacacctcccaaaaggtccagttcgttccgcgagatggaaaaccaacctcacaaaaaatatgagttaaccggactccccgaacaggaccgaatggctatgactcttcctaggaactgtcagaggtcaaaactgcaactcgaacggaccgttagcacatcctcccagccagaagaaaacgtggatagggccaatgatatgctgcccaaaaaatccgaggagagcgcagcccccagcagagagagacccaaggccaagttactgcctagaggggcgacagctctgccactgcgcacaccttctggcgacttagccataacagaaaaagacccccctggagtcggcgttgccggcgtggcagccgcaccgaaaggtaaagagaagaacggaggcgcacggttgggcatggctggggtccccgaggacggcgaacagcccggttggcctagcccggcaaaggccgctccggtcttgcccaccacacacaatcataaggtgcccgtcctgattagcccaactctgaaacacactcccgctgacgtccagttgattggcactgactcacaaggtaacaaatttaagctgctctcagagcaccaggtgaccagttctggcgacaaggaccggccacgacgggttaagccaaagtgtgccccacctcctccacccgtgatgagattactccagcacccaagtatttgctcagatcccacagaagagcccacagcattaacagccggccaatccacctcagagactcaggaggggggaaagaaagccgctttaggggccgttcccatttcaggtaaggcgggaagacctgtgatgccaccgccacaggtgccactacctacatccagcatctcccccgctaagatggccaatgggacagctggaaccaaggtcgccctgcgcaagaccaagcaggccgctgaaaagatctctgcggacaaaataagtaaagaggcgctcctcgagtgtgccgatctcctttctagtgctctgactgagccagtccctaatagccaactcgttgataccggacaccaacttcttgactactgttcagggtacgttgactgtatcccccagactagaaataagtttgcgtttcgggaagctgtgagtaagctcgaactttcattgcaggaactgcaagtctcatctgctgccgcgggagttccaggaaccaaccccgtgctgaacaatctacttagttgtgtgcaggagatatccgatgtcgtgcaaaggtag

SEQ ID NO: 65852 - DNA, 3177 bp, Artificial Sequence
  derived and/or modified sequence
atgggccagcaggtgggccgggtgggggaggcccctggcctgcagcagccccagccccggggcatccggggcagcagcgctgcccggcccagcggcagaagaagagatcctgctggccgcaccacagagaccggcttcaacatcttcacccagcacgaggccctgcaccggccctacggctgtgatgtggagccccaggccctgaatgaggccatccgctggagcagcaaggagaacctgctgggcgccacagaaagtgaccccaacctgtttgtggccctgtatgactttgtggccagcggggacaacaccctgagcatcaccaagggggagaagctgcgggtgctgggctacaaccagaatggagagtggagcgaggtgcgcagcaagaatggccagggctgggtgcccagcaactacatcacccctgtgaacagcctggagaagcacagctggtaccacggccctgtgagccgctctgctgctgagtacctgctgagcagcctcatcaatggcagcttcctggtgcgggagagcgagagcagccctggccagctgagcatcagcctgcgctatgagggccgggtgtaccactaccgcatcaacaccacagcagatggcaaggtgtatgtgacagctgagagccgcttcagcaccctggccgagctggtgcaccaccacagcacagtggctgatggcctggtgaccaccctgcactacccagcccccaagtgcaacaagcccaccgtgtatggagtgagccccatccatgacaagtgggagatggagaggacagacatcaccatgaagcacaagctgggcggcggccagtacggggaggtgtatgtgggcgtgtggaagaagtacagcctgactgtggccgtgaagaccctgaaggaggacaccatggaggtggaggagttcctgaaggaggccgctgtgatgaaggagatcaagcaccccaacctggtgcagctgctgggcgtgtgcaccctggagccccccttctacatcgtgacagagtacatgccctacggcaacctgctggactacctgcgggagtgcaaccgggaggaggtgacagctgtggtgctgctgtacatggccacccagatcagcagcgccatggagtacctggagaagaagaacttcatccaccgggacctggccgccaggaactgcctggtgggggagaaccacgtggtgaaggtggccgactttggcctgagccggctgatgaccggggacacctacacagcccacgccggggccaagttccccatcaagtggacagcccctgagagcctggcctacaacaccttcagcatcaagagtgatgtgtgggccttcggcgtgctgctgtgggagatcgccacctacggcatgagcccctacccaggcatcgacctgagccaggtgtatgacctgctggagaagggctacaggatggagcagcctgagggctgcccccccaaggtgtatgagctgatgagggcctgctggaagtggagccctgctgaccggcccagctttgctgagacccaccaggcctttgagaccatgtttcatgacagcagcatcagcgaggaggtggccgaggagctgggccgggccgccagcagcagctctgtggtgccctacctgccccggctgcccatcctgcccagcaagaccaggaccctgaagaagcaggtggagaacaaggaaaatattgaaggagcccaggatgccacagaaaattctgccagcagcctggcccctggcttcatccggggggcccaggccagcagcggcagccctgccctgcccaggaagcagagggacaagagccccagcagcctgctggaggatgccaaggagacctgcttcacccgggacaggaagggcggcttcttcagcagcttcatgaagaagagaaatgcccccaccccacccaagaggagcagcagcttccgggagatggagaaccagccccacaagaagtatgagctgaccggcctgcctgagcaggacaggatggccatgaccctgcccaggaactgccagaggagcaagctgcagctggagaggacagtgtccaccagcagccagcctgaggagaatgtggaccgggccaatgacatgctgcccaagaagtctgaggagagcgctgcccccagccgggagcggcccaaggccaagctgctgcccaggggggccacagccctgcccctgcggacccccagcggggacctggccatcacagagaaggaccccccaggagtgggcgtggccggcgtggccgccgcccccaagggcaaggagaagaatggaggagcccggctgggcatggccggcgtgcctgaagatggagagcagcccggctggcccagccctgccaaggccgcccctgtgctgcccaccacccacaaccacaaggtgcctgtgctgatcagccccaccctgaagcacaccccagcagatgtgcagctgattggaacagacagccagggcaacaagttcaagctgctgtctgagcaccaggtgaccagcagcggggacaaggaccggccccggcgggtgaagcccaagtgtgcccctcctcctcctcctgtgatgaggctgctgcagcaccccagcatctgcagcgaccccacagaggagcccacagccctgacagctggccagagcaccagcgagacccaggagggcggcaagaaggccgccctgggcgctgtgcccatcagcggcaaggccggccggcctgtgatgcccccaccccaggtgcccctgcccaccagcagcatcagccctgccaagatggccaacggcacagctggcaccaaggtggccctgaggaagaccaagcaggccgctgagaagatctctgctgacaagatcagcaaggaggccctgctggagtgtgccgacctgctgagcagcgccctgacagagcctgtgcccaacagccagctggtggacaccggccaccagctgctggactactgcagcggctacgtggactgcatcccccagaccaggaacaagtttgccttccgggaggccgtgtccaagctggagctgagcctgcaggagctgcaggtgagcagcgctgctgctggggtgcccggcaccaaccctgtgctgaacaacctgctgagctgtgtgcaggagatcagtgatgtggtgcagaggtag

SEQ ID NO: 65853 - DNA, 3177 bp, Artificial Sequence
  derived and/or modified sequence
atgggccagcaggtgggccgggtgggcgaggcccccggcctgcagcagcctcagccccgaggcatacggggctcatcagcggccagaccaagcggtcggcgacgggaccctgccggaaggactactgagaccgggtttaatatcttcacccagcacgaagcactccatagaccatacggatgtgatgtcgagcctcaggcactgaacgaagccatccgctggagcagcaaggagaatcttctaggggctaccgagtccgatcctaatttgttcgtcgcactttatgatttcgtggctagcggtgataacactctgtctatcacaaagggggagaagttacgggtgttgggttataatcagaatggcgaatggtcagaggtgagaagcaagaatggccagggctgggtgccaagcaactacatcacccccgtgaactcactggagaagcactcatggtaccacggaccggtcagtcgaagcgccgcagagtacctcctctcatctttaataaatggtagctttctggttcgtgaaagcgaatcgtctccgggtcagctttccatttcactgcggtacgaggggagggtgtatcattataggattaatactacagcagacggcaaggtctatgtgactgcggagtctcgtttcagtacccttgctgagctggtccatcatcacagcactgtcgctgatggactggtcacaacactgcattaccccgcccccaaatgtaacaaacccacggtgtatggagtgtccccaatacacgacaagtgggagatggagcgaacagatattacgatgaagcacaaactgggaggtggacagtacggagaagtgtacgtcggcgtctggaaaaaatattccctaaccgtcgccgtcaagaccctaaaggaagatactatggaggtggaggaattcctgaaggaagctgccgtgatgaaggagatcaagcaccccaacctcgtccagttgctgggcgtgtgcacacttgaaccgccgttctatatagtgacggagtacatgccatacgggaatctccttgattacctgcgggagtgtaatcgcgaggaggtgaccgctgtggtgctgctgtacatggcgacgcaaatttcatctgcaatggaatacctggaaaagaagaatttcattcacagagatctggcggcccgaaactgcctggttggtgagaaccacgtcgttaaagttgccgacttcggcctgtccaggctgatgacaggtgacacttacaccgcacacgccggggccaaatttcccatcaaatggaccgcacctgaatcactcgcctacaataccttttccatcaagtcggatgtgtgggcctttggcgtcctcctttgggaaattgcaacttatggtatgtctccctatccaggcatcgacctgtcacaggtctatgatttgctagagaagggatacagaatggaacagcccgaagggtgtccaccaaaggtttatgaacttatgagggcatgctggaagtggagtcctgcagaccggccgtctttcgccgaaacacaccaggccttcgaaaccatgttccacgatagctctatctccgaagaggtggccgaggagctggggcgcgccgcttctagcagttcagtggtgccttacctgcccaggttgcctatcctgccttcaaagacacggaccttaaaaaaacaggtcgaaaacaaagagaatatagagggagcccaggatgcgacagaaaacagtgcctcatctttggcacccggattcattaggggcgcgcaggcctcaagtggaagccctgccctgcctcgcaagcagcgggataagtcccccagtagcttgttagaagacgccaaggagacttgtttcactcgggataggaaaggaggcttcttctcctcattcatgaaaaagagaaacgctcccactcccccaaagaggtcttccagttttcgggagatggagaaccagccccataagaaatatgagctgacgggattgccagagcaggaccgaatggcaatgaccctacctaggaattgccagcgatctaagttgcaactagaaaggactgtgtccacctcatcacaacccgaggaaaatgtggacagagctaatgacatgctgcccaaaaaatctgaggaatctgctgctccctcccgggagcgcccaaaggctaagttgctccctcggggggctactgctctgccactgcgaacaccttccggcgacctcgccatcaccgagaaagatcccccgggagtcggcgtcgcgggggtggcagcagcacccaaggggaaggagaaaaatggaggggcgaggcttggaatggccggagtacctgaggatggcgagcagcctggatggcctagtcctgcaaaggctgcgccagtgctgccaacgacccacaatcacaaagttcccgtcctgatatcacctacacttaagcatactccagcagatgtgcaactaattggaactgattctcagggcaataaatttaaactcctgtccgagcaccaggtcacctctagcggagataaggatagaccgcggcgggtgaagcccaagtgcgctcccccccctccacctgtgatgaggctcctgcagcacccgtccatctgcagtgaccctacggaggaacctacagctttgaccgcaggtcagtccacatccgaaactcaggagggaggtaagaaggccgcattgggcgctgtccctatctcagggaaagctggccgccctgtaatgccgcccccacaggtgcccctgcccacttcctctatttcacccgccaagatggcgaatggaacagcaggcaccaaagtcgcccttaggaagactaagcaggcagcagaaaagatttcagctgacaaaatatcaaaggaagctctcctggagtgtgctgacctcttgagctccgcattgaccgagcctgtgcccaactcacagctggtggataccggccaccagcttctcgattactgctctggctatgtagactgtatcccgcagaccaggaataaattcgctttcagagaggctgtctccaaactggagttgagcctacaggagctgcaggtgagctcagccgccgccggagtcccaggtaccaaccccgtgttaaacaacttgttatcatgcgttcaggaaataagtgacgtggttcagaggtag

SEQ ID NO: 65854 - DNA, 3177 bp, Artificial Sequence
  derived and/or modified sequence
atgggacagcaggtgggacgggtgggtgaggcgcctggcctccagcagccacagccgcgtggcatacgcggtagctctgctgccaggccttctggaagaaggagggatcctgccggacggaccactgaaaccggattcaacatttttacgcagcatgaggccctacacaggccatatgggtgcgacgtcgagccacaggccctgaatgaggccataaggtggagctccaaggaaaatcttctaggggctactgaaagtgatccgaacctcttcgtcgccctgtatgactttgtcgccagcggagataatacactatctatcacgaaaggggagaagctcagggttctgggatataaccagaacggtgaatggagtgaggtaagatctaaaaacgggcaaggctgggtgcccagcaactacattacccctgttaacagcctggaaaagcacagctggtaccatgggcctgtgtcgagaagcgcagctgagtacctgttgtcatcgctcatcaatggaagcttcctcgtgagagaatctgaatcatctccagggcaattaagcatcagcctccggtacgaaggtcgggtgtaccactatcgcattaataccaccgcagatgggaaggtgtacgtgaccgcagagtctaggttcagtaccctggccgagctggtgcaccaccattccacggtggctgatggtcttgtgacaaccctccactatccagctcccaagtgtaataaaccgaccgtatatggtgtcagccctattcatgataagtgggaaatggagcggaccgacattaccatgaagcacaagttgggcggtggacagtacggcgaagtttacgttggcgtctggaaaaaatacagcctaacagtggccgtcaagactctgaaagaagacacaatggaggtggaagaattcctgaaggaggccgcagtaatgaaagagatcaaacacccgaacctggtccagttactgggagtttgtactctcgaaccgccattctatatcgtgaccgaatacatgccttatggtaatctgctggactatctgcgcgagtgtaacagggaggaagtgaccgcggtggtactcctatacatggctacccagatttcgtccgcgatggaatacctcgaaaagaaaaatttcattcatcgagacctggcagcccgaaactgcctggtgggcgaaaaccacgtcgtaaaagtggctgatttcggtctatcaaggttgatgacgggtgacacttacacagcccacgctggtgccaaatttccaattaaatggacggccccagaatccctggcttacaataccttctcaataaaatcggacgtgtgggcctttggggtactgctctgggaaattgccacctacggaatgagcccttaccccggaatcgatctgtcccaagtgtacgacctactggagaaaggctatcggatggaacaacccgaaggctgccctcctaaggtgtacgaactgatgagggcttgttggaagtggagtcccgctgatcgccctagttttgcagagacacaccaggccttcgagaccatgtttcacgattctagcatttccgaagaggtcgccgaagagcttgggcgagccgcatcttcaagttccgtagttccatatctcccacgtctccctatactgccctcaaagactagaacgctgaagaagcaggtggaaaacaaagaaaacattgagggagcgcaggacgccactgagaacagcgcctcttctctggccccaggcttcatcagaggcgctcaggcaagtagtggaagccctgcactacctagaaagcagagagataagtcaccgtcaagcctgttagaggacgctaaagagacatgcttcacaagagatagaaaggggggtttcttcagttcatttatgaagaaaagaaacgctcctactccaccaaaacgaagctccagcttcagagagatggagaatcagcctcacaaaaaatatgaattaaccggattgcctgagcaagaccgcatggctatgacactgccaagaaattgccaaagaagtaaactgcaactggagcgcactgtatcaacaagttcgcagcctgaggagaatgtggatagagctaatgacatgctgccaaaaaaaagcgaggagtctgccgctccctcaagggagcgccctaaagccaaattactgccccgtggagccacggctttacccctccgtactccctccggcgacctggccatcaccgagaaggacccccctggagtgggggttgccggtgtggcagctgccccaaaagggaaggaaaagaacgggggagcaaggctcggaatggcaggcgtgcctgaagatggggaacagcccggttggccatcacccgcaaaggccgcaccagtgttgccgacaacacataaccataaagttccagtgctgatctcccccacattaaagcacaccccagctgatgttcagctgatcggaaccgattctcagggtaacaagtttaagctcctgagcgagcatcaggtaacatctagtggggacaaggatagaccacgtagggtaaagccaaaatgcgcacctccccctccaccagtgatgagattgttacagcatccgtctatttgttcagacccaactgaagagcctacagctctgaccgctggtcaatccacaagcgagacccaggaagggggaaaaaaagctgccctgggcgcagtcccaatttctggcaaagctggaaggccagttatgccgcctcctcaagtccccctccccaccagctccatttcacccgcaaagatggccaatgggacggctgggactaaagtggctctgagaaaaaccaagcaggccgctgaaaaaatctcggcggacaagatctctaaggaggcattgctagaatgtgctgatctcctgtcaagcgccctgaccgaacccgtacctaactctcagctggtagacaccgggcatcaactgctggactactgtagtgggtatgtggactgcattccgcagacaaggaataagtttgccttccgcgaagctgtgtcgaagctggaattgtctctccaggaactacaggtgtcatccgcagccgcaggcgtgcctgggaccaatcctgtacttaacaacctgctgtcctgtgtccaagagatctccgacgtggtgcagcggtag

SEQ ID NO: 65855 - DNA, 3177 bp, Artificial Sequence
  derived and/or modified sequence
atggggcagcaggtgggccgcgtcggggaagctccggggctccagcagcctcagccccgcgggatccggggcagcagtgcagccaggccctccggccgcaggcgggacccggcggggcgcaccacagagaccggcttcaatatcttcacccagcatgaagctttgcatcgtccctatggttgtgatgttgaaccccaggcactaaatgaggctatcaggtggagctccaaggagaacttgctcggagccactgagagtgaccctaatctcttcgttgcactttatgattttgtagcaagtggtgataacacactcagcatcactaaaggtgaaaagctacgagtccttggttacaaccagaatggtgagtggagtgaagttcgctctaagaatgggcagggctgggtgccaagcaactacatcaccccagtgaacagcctggaaaaacactcctggtaccatggacctgtgtcacgcagtgcagctgagtatctgctcagcagtctaatcaatggcagcttcctggtgcgagaaagtgagagtagccctgggcagctgtccatctcgctcaggtacgagggacgtgtgtatcactacaggatcaataccactgcagatggcaaggtgtatgtgactgctgagagccgcttcagcaccttggcagagcttgtacaccatcactccacagtggctgatgggctggtgacaacattacactacccagcacccaagtgtaataagcctacagtctatggtgtgtcccccatccacgacaaatgggaaatggagcgaacagatattaccatgaagcacaaacttgggggcggtcagtatggagaggtttacgttggcgtctggaagaaatacagccttacagttgctgtgaaaacattgaaggaagataccatggaggtagaagaattcctgaaagaagctgcagtaatgaaggaaatcaagcatcctaatctggtacaacttttaggtgtgtgtactttggagccaccattttacattgtgactgaatacatgccatacgggaatttgctggattacctccgagaatgcaaccgagaagaggtgactgcagttgtgctgctctacatggccactcagatttcttctgcaatggagtacttagagaagaagaatttcatccatagagatcttgcagctcgtaactgcctagtgggagaaaaccatgtggtaaaagtggctgactttggcttaagtagattgatgactggagacacttatactgctcatgctggagccaaatttcctattaagtggacagcaccagagagtcttgcctacaataccttctcaattaaatctgacgtctgggcttttggggtattgttgtgggaaattgctacctatggaatgtcaccatatccaggtattgacctgtctcaggtctatgacctactagaaaaaggatatcgaatggaacagcctgagggatgcccccctaaggtttatgaacttatgagagcatgctggaagtggagccctgccgataggccctcttttgctgaaacacaccaagcttttgaaaccatgttccatgactccagcatttctgaagaggtagctgaggagcttgggagagccgcctcctcgtcatctgttgttccatacctgccccggctacctatacttccttccaagactcggacactgaagaaacaggtggagaacaaggagaacattgaaggggcacaagatgccacagaaaattctgcttccagtttagcaccagggttcatcagaggtgcacaggcctctagtggatccccagcactgcctcgaaagcaaagagacaagtcacccagcagcctcttggaagatgccaaagagacatgcttcaccagggataggaaggggggcttcttcagctccttcatgaagaagagaaatgctcctacaccccccaaacgcagcagctccttccgagaaatggagaatcagccccataagaaatacgaactcacggggcttccagagcaggataggatggcaatgacccttcccaggaactgccagaggtccaaactccagctggaaaggacagtgtccacctcttctcagccagaagagaatgtggacagggccaatgacatgcttccaaaaaaatcagaggaaagtgctgctccaagcagggagagaccaaaagccaagttattgcccagaggagccacagctcttcctctcagaacaccctctggggatctagccattacagagaaggaccctccaggggtgggagtggctggagtggcagctgcccccaagggtaaagagaagaatggtggggcacgacttgggatggctggagttccagaggatggagagcagccgggctggccttctccagccaaggctgcccccgtcctcccaaccactcacaaccacaaagtgccagtccttatctcacccactctgaaacacactccagctgacgtgcagctcattggcacagactctcaggggaataaattcaagctcttatctgagcatcaggtcacatcctctggagacaaggaccgaccccgacgggtaaaaccaaagtgtgccccacccccaccaccagtgatgagactactgcagcatccgtccatctgctcagaccctacagaagagccaactgccctaactgcaggacagtccacatcagaaacacaggaaggaggaaagaaggcagctctgggcgcagtgcccatcagtgggaaagctgggaggccagtgatgcctccacctcaagtgcctctgcccacatcttccatctcgccagccaaaatggccaatggcacagcaggtactaaagtggctctgagaaaaaccaaacaggccgctgagaaaatctcagcagacaaaatcagcaaagaggccctgctggaatgtgctgacctactgtccagtgcactcacggaacctgtgcccaacagccagctggtagacactggacaccagctgcttgactactgctcaggctatgtggactgcatccctcaaactcgcaacaaatttgccttccgagaggctgtgagcaaactggaactcagcctgcaggagctacaggtttcttcagcagctgctggtgtgcccgggacaaaccctgtccttaataacttattgtcatgtgtacaggaaatcagtgatgtggtgcagaggtag

SEQ ID NO: 65856 - protein, 1043 aa, Artificial Sequence
  derived and/or modified sequence
MVLGTVLLPPNSYGRDQDTSLCCLCTEASESALPDLTEALHRPYGCDVEPQALNEAIRWSSKENLLGATESDPNLFVALYDFVASGDNTLSITKGEKLRVLGYNQNGEWSEVRSKNGQGWVPSNYITPVNSLEKHSWYHGPVSRSAAEYLLSSLINGSFLVRESESSPGQLSISLRYEGRVYHYRINTTADGKVYVTAESRFSTLAELVHHHSTVADGLVTTLHYPAPKCNKPTVYGVSPIHDKWEMERTDITMKHKLGGGQYGEVYVGVWKKYSLTVAVKTLKEDTMEVEEFLKEAAVMKEIKHPNLVQLLGVCTLEPPFYIVTEYMPYGNLLDYLRECNREEVTAVVLLYMATQISSAMEYLEKKNFIHRDLAARNCLVGENHVVKVADFGLSRLMTGDTYTAHAGAKFPIKWTAPESLAYNTFSIKSDVWAFGVLLWEIATYGMSPYPGIDLSQVYDLLEKGYRMEQPEGCPPKVYELMRACWKWSPADRPSFAETHQAFETMFHDSSISEEVAEELGRAASSSSVVPYLPRLPILPSKTRTLKKQVENKENIEGAQDATENSASSLAPGFIRGAQASSGSPALPRKQRDKSPSSLLEDAKETCFTRDRKGGFFSSFMKKRNAPTPPKRSSSFREMENQPHKKYELTGLPEQDRMAMTLPRNCQRSKLQLERTVSTSSQPEENVDRANDMLPKKSEESAAPSRERPKAKLLPRGATALPLRTPSGDLAITEKDPPGVGVAGVAAAPKGKEKNGGARLGMAGVPEDGEQPGWPSPAKAAPVLPTTHNHKVPVLISPTLKHTPADVQLIGTDSQGNKFKLLSEHQVTSSGDKDRPRRVKPKCAPPPPPVMRLLQHPSICSDPTEEPTALTAGQSTSETQEGGKKAALGAVPISGKAGRPVMPPPQVPLPTSSISPAKMANGTAGTKVALRKTKQAAEKISADKISKEALLECADLLSSALTEPVPNSQLVDTGHQLLDYCSGYVDCIPQTRNKFAFREAVSKLELSLQELQVSSAAAGVPGTNPVLNNLLSCVQEISDVVQR

SEQ ID NO: 65857 - DNA, 3132 bp, Artificial Sequence
  derived and/or modified sequence
atggtgctgggcaccgtgctgctgccccccaacagctacggcagagaccaggacaccagcctgtgctgcctgtgcaccgaggccagcgagagcgccctgcccgacctgaccgaggccctgcacagaccctacggctgcgacgtggagccccaggccctgaacgaggccatcagatggagcagcaaggagaacctgctgggcgccaccgagagcgaccccaacctgttcgtggccctgtacgacttcgtggccagcggcgacaacaccctgagcatcaccaagggcgagaagctgagagtgctgggctacaaccagaacggcgagtggagcgaggtgagaagcaagaacggccagggctgggtgcccagcaactacatcacccccgtgaacagcctggagaagcacagctggtaccacggccccgtgagcagaagcgccgccgagtacctgctgagcagcctgatcaacggcagcttcctggtgagagagagcgagagcagccccggccagctgagcatcagcctgagatacgagggcagagtgtaccactacagaatcaacaccaccgccgacggcaaggtgtacgtgaccgccgagagcagattcagcaccctggccgagctggtgcaccaccacagcaccgtggccgacggcctggtgaccaccctgcactaccccgcccccaagtgcaacaagcccaccgtgtacggcgtgagccccatccacgacaagtgggagatggagagaaccgacatcaccatgaagcacaagctgggcggcggccagtacggcgaggtgtacgtgggcgtgtggaagaagtacagcctgaccgtggccgtgaagaccctgaaggaggacaccatggaggtggaggagttcctgaaggaggccgccgtgatgaaggagatcaagcaccccaacctggtgcagctgctgggcgtgtgcaccctggagccccccttctacatcgtgaccgagtacatgccctacggcaacctgctggactacctgagagagtgcaacagagaggaggtgaccgccgtggtgctgctgtacatggccacccagatcagcagcgccatggagtacctggagaagaagaacttcatccacagagacctggccgccagaaactgcctggtgggcgagaaccacgtggtgaaggtggccgacttcggcctgagcagactgatgaccggcgacacctacaccgcccacgccggcgccaagttccccatcaagtggaccgcccccgagagcctggcctacaacaccttcagcatcaagagcgacgtgtgggccttcggcgtgctgctgtgggagatcgccacctacggcatgagcccctaccccggcatcgacctgagccaggtgtacgacctgctggagaagggctacagaatggagcagcccgagggctgcccccccaaggtgtacgagctgatgagagcctgctggaagtggagccccgccgacagacccagcttcgccgagacccaccaggccttcgagaccatgttccacgacagcagcatcagcgaggaggtggccgaggagctgggcagagccgccagcagcagcagcgtggtgccctacctgcccagactgcccatcctgcccagcaagaccagaaccctgaagaagcaggtggagaacaaggagaacatcgagggcgcccaggacgccaccgagaacagcgccagcagcctggcccccggcttcatcagaggcgcccaggccagcagcggcagccccgccctgcccagaaagcagagagacaagagccccagcagcctgctggaggacgccaaggagacctgcttcaccagagacagaaagggcggcttcttcagcagcttcatgaagaagagaaacgcccccaccccccccaagagaagcagcagcttcagagagatggagaaccagccccacaagaagtacgagctgaccggcctgcccgagcaggacagaatggccatgaccctgcccagaaactgccagagaagcaagctgcagctggagagaaccgtgagcaccagcagccagcccgaggagaacgtggacagagccaacgacatgctgcccaagaagagcgaggagagcgccgcccccagcagagagagacccaaggccaagctgctgcccagaggcgccaccgccctgcccctgagaacccccagcggcgacctggccatcaccgagaaggacccccccggcgtgggcgtggccggcgtggccgccgcccccaagggcaaggagaagaacggcggcgccagactgggcatggccggcgtgcccgaggacggcgagcagcccggctggcccagccccgccaaggccgcccccgtgctgcccaccacccacaaccacaaggtgcccgtgctgatcagccccaccctgaagcacacccccgccgacgtgcagctgatcggcaccgacagccagggcaacaagttcaagctgctgagcgagcaccaggtgaccagcagcggcgacaaggacagacccagaagagtgaagcccaagtgcgcccccccccccccccccgtgatgagactgctgcagcaccccagcatctgcagcgaccccaccgaggagcccaccgccctgaccgccggccagagcaccagcgagacccaggagggcggcaagaaggccgccctgggcgccgtgcccatcagcggcaaggccggcagacccgtgatgccccccccccaggtgcccctgcccaccagcagcatcagccccgccaagatggccaacggcaccgccggcaccaaggtggccctgagaaagaccaagcaggccgccgagaagatcagcgccgacaagatcagcaaggaggccctgctggagtgcgccgacctgctgagcagcgccctgaccgagcccgtgcccaacagccagctggtggacaccggccaccagctgctggactactgcagcggctacgtggactgcatcccccagaccagaaacaagttcgccttcagagaggccgtgagcaagctggagctgagcctgcaggagctgcaggtgagcagcgccgccgccggcgtgcccggcaccaaccccgtgctgaacaacctgctgagctgcgtgcaggagatcagcgacgtggtgcagagatag

SEQ ID NO: 65858 - DNA, 3132 bp, Artificial Sequence
  derived and/or modified sequence
atggtcctcggtactgtccttctgccgcctaattcatatggaagggaccaggacacaagtctctgttgtttgtgcactgaggcctcagagagtgccctaccagatctaactgaggctctccacagaccgtacggttgtgacgtggagccgcaggcacttaacgaagccataagatggtctagtaaagagaatctgctgggtgccactgaatctgatcccaacctgtttgttgccctctacgacttcgtggcttctggcgacaataccctgtccatcaccaaaggtgagaaactgagagtcctcggctacaatcagaacggcgagtggtctgaggtcaggagtaagaacggccaggggtgggttccttctaactacattactccagttaacagccttgaaaaacacagctggtaccatgggcctgtatctcgctccgctgccgaatatctgctaagcagcctgatcaatggctcattcctggtgcgggaatcagagtcatcccctggacagctctccattagtctgcgatatgagggccgggtctatcattacagaatcaacaccacggctgacggcaaggtatacgtgacggccgaaagcaggttttccaccctggctgaactggtccatcatcattctaccgttgccgatggcctggttaccactctacattatcccgctccaaagtgtaataagcccacagtctacggcgtgtcacccattcacgacaagtgggagatggaacgaaccgatattaccatgaaacacaagctgggggggggccaatatggggaagtgtatgtgggggtgtggaaaaagtactccctgactgtggctgtcaagactctgaaagaagacactatggaagtcgaggagttcctgaaagaagcagccgtgatgaaggagattaaacaccctaatttagtccagttacttggggtctgcaccttagagccccctttctatatcgtgacagagtacatgccgtacggcaatctgctggattacctgagagaatgcaacagggaagaggtgaccgcagttgtgttgctctatatggcgactcaaatcagttcggccatggagtatctcgagaaaaagaatttcatccatcgcgacctcgccgctcgtaattgtctggtaggcgagaaccacgtcgttaaggtcgcggacttcggtctgtccaggcttatgactggcgacacttacactgcccacgccggcgccaaatttcctataaagtggacagcacctgagagtctggcatacaacacattcagcatcaaatccgacgtttgggcctttggcgtcctgctctgggagattgcgacctatggcatgtcaccatacccagggatcgacctcagccaagtatacgatttgctggagaaaggctaccggatggagcagccagagggatgtcctcctaaagtatacgaactgatgcgggcctgctggaaatggagtcctgccgaccggccatccttcgcggaaacccaccaagcttttgaaaccatgtttcatgattcatccatatccgaggaggtcgctgaggaactcggacgggccgcctcttccagctctgtggtgccttatctgccacgtcttcctattctcccttcaaagactcggacactgaaaaagcaggtcgagaataaggagaatattgaaggcgcccaggacgcaacggaaaacagcgcgtcaagcctcgcacccggattcattcggggagctcaggctagctccggatcgcccgctctccctaggaaacaacgagataagagtcccagctctctcctggaagacgccaaggagacctgctttacccgcgatcggaagggaggctttttcagttctttcatgaagaagagaaacgcccccactcctcccaaaaggagctcctcgttccgtgaaatggaaaatcagcctcataagaagtacgagctaacgggactgccagaacaggatagaatggccatgacactgcctaggaattgtcagaggtcaaagttgcagctggagaggaccgttagcacatcctctcaaccagaagagaatgtggatagagctaatgatatgctgcccaagaagtccgaggagtcagctgccccatctcgggaacgtccaaaagccaaattgctaccaaggggcgccacagctctgcctctgagaactccttctggcgatttggccatcaccgagaaggatccgcccggagtgggagtggccggcgtcgccgcagcccccaaggggaaagagaagaacggcggggcacgcctgggtatggccggggtgcccgaggatggggagcagccaggatggcccagccccgcaaaggccgcaccagtcctgcccaccacccacaatcacaaagtgcccgtactgatttccccgaccttaaaacacacccccgcagatgtccaactaattgggaccgattcccaggggaataaatttaaactgctcagtgagcatcaggtcacttccagtggcgacaaggatagaccacgtcgcgtcaagccaaaatgcgctcctccacctcctccagtgatgaggctcctacaacacccctccatttgcagtgatccgaccgaggagccaaccgcgctgacggccggccagtctacctccgagacacaggagggtgggaagaaggccgctttgggcgcagttccgatctccgggaaagccggccggccagtaatgccacctccccaggtgcctctgcccaccagctccatctctcccgcaaagatggccaatggtacagcaggtactaaagtagccttacggaagacgaaacaggcagctgagaagatctctgcagacaaaatttccaaggaggcccttcttgaatgtgctgacctgctgtcgtccgccctgacagagcccgtgccgaactctcagctggtggacaccgggcatcagctgctggattattgctccggctacgtggactgtataccgcagacacgaaacaagttcgcgttccgcgaggcggtgagtaaactggagctgtcactgcaagagctgcaggtctccagcgcggcagcaggcgtgccgggcaccaaccccgttctgaataacctgctctcctgtgtgcaggaaatatctgatgtggttcagagatag

SEQ ID NO: 65859 - DNA, 3132 bp, Artificial Sequence
  derived and/or modified sequence
atggtgctgggcaccgtgctgctgccccccaacagctatggccgggaccaggacaccagcctgtgctgcctgtgcacagaggccagcgagagcgccctgcctgacctgacagaggccctgcaccggccctacggctgtgatgtggagccccaggccctgaatgaggccatccgctggagcagcaaagaaaacctgctgggcgccacagaaagtgaccccaacctgtttgtggccctgtatgactttgtggccagcggggacaacaccctgagcatcaccaagggggagaagctgcgggtgctgggctacaaccagaatggagagtggagcgaggtgcgcagcaagaatggccagggctgggtgcccagcaactacatcacccctgtgaacagcctggagaagcacagctggtaccacggccctgtgagccgctctgctgctgagtacctgctgagcagcctcatcaatggcagcttcctggtgcgggagagcgagagcagccctggccagctgagcatcagcctgcgctatgagggccgggtgtaccactaccgcatcaacaccacagcagatggcaaggtgtatgtgacagctgagagccgcttcagcaccctggccgagctggtgcaccaccacagcacagtggctgatggcctggtgaccaccctgcactacccagcccccaagtgcaacaagcccaccgtgtatggagtgagccccatccatgacaagtgggagatggagaggacagacatcaccatgaagcacaagctgggcggcggccagtatggagaggtgtatgtgggcgtgtggaagaagtacagcctgactgtggccgtgaagaccctgaaggaggacaccatggaggtggaggagttcctgaaggaggccgctgtgatgaaggagatcaagcaccccaacctggtgcagctgctgggcgtgtgcaccctggagccccccttctacatcgtgacagagtacatgccctacggcaacctgctggactacctgcgggagtgcaaccgggaggaggtgacagctgtggtgctgctgtacatggccacccagatcagcagcgccatggagtacctggagaagaagaacttcatccaccgggacctggccgccaggaactgcctggtgggagaaaatcatgtggtgaaggtggccgactttggcctgagccggctgatgactggagacacctacacagcccatgctggggccaagttccccatcaagtggacagcccctgagagcctggcctacaacaccttcagcatcaagagtgatgtgtgggcctttggagtgctgctgtgggagatcgccacctacggcatgagcccctacccaggcatcgacctgagccaggtgtatgacctgctggagaagggctacaggatggagcagcctgagggctgcccccccaaggtgtatgagctgatgagggcctgctggaagtggagccctgctgaccggcccagctttgctgagacccaccaggcctttgagaccatgtttcatgacagcagcatcagcgaggaggtggccgaggagctgggccgggccgccagcagcagctctgtggtgccctacctgccccggctgcccatcctgcccagcaagaccaggaccctgaagaagcaggtggagaacaaggagaacatcgagggcgcccaggatgccacagagaacagcgccagcagcctggcccctggcttcatccggggggcccaggccagcagcggcagccctgccctgcccaggaagcagagggacaagagccccagcagcctgctggaggatgccaaggagacctgcttcacccgggacagaaaaggaggcttcttcagcagcttcatgaagaagagaaatgcccccaccccacccaagaggagcagcagcttccgggagatggagaaccagccccacaagaagtatgagctgaccggcctgcctgagcaggacaggatggccatgaccctgcccaggaactgccagaggagcaagctgcagctggagaggacagtgtccaccagcagccagccagaagaaaatgtggaccgggccaatgacatgctgcccaagaagtctgaggagagcgctgcccccagccgggagcggcccaaggccaagctgctgcccaggggggccacagccctgcccctgcggaccccatctggggacctggccatcacagagaaggaccccccaggagtgggcgtggccggcgtggccgccgcccccaagggcaaggagaagaatggaggagcccggctgggcatggccggcgtgcctgaagatggagagcagcccggctggcccagccctgccaaggccgcccctgtgctgcccaccacccacaaccacaaggtgcctgtgctgatcagccccaccctgaagcacaccccagcagatgtgcagctgattggaacagacagccagggcaacaagttcaagctgctgtctgagcaccaggtgaccagcagcggggacaaggaccggcccaggagagtgaagcccaagtgtgcccctcctcctcctcctgtgatgaggctgctgcagcaccccagcatctgcagcgaccccacagaggagcccacagccctgacagctggccagagcaccagcgagacccaggagggcggcaagaaggccgccctgggcgctgtgcccatcagcggcaaggccggccggcctgtgatgcccccaccccaggtgcccctgcccaccagcagcatcagccctgccaagatggccaatggaacagctggcaccaaggtggccctgaggaagaccaagcaggccgctgagaagatctctgctgacaagatcagcaaggaggccctgctggagtgtgccgacctgctgagcagcgccctgacagagcctgtgcccaacagccagctggtggacaccggccaccagctgctggactactgcagcggctacgtggactgcatcccccagaccaggaacaagtttgccttccgggaggccgtgtccaagctggagctgagcctgcaggagctgcaggtgtcctctgctgctgctggggtgcccggcaccaaccctgtgctgaacaacctgctgagctgtgtgcaggagatcagtgatgtggtgcagaggtag

SEQ ID NO: 65860 - DNA, 3132 bp, Artificial Sequence
  derived and/or modified sequence
atggtgctgggcaccgtgctgctgccccccaacagctacggccgggaccaggacacttctctctgttgtctatgtactgaggcgagtgagagcgcattgccagatctgacagaggctcttcatcgcccttacgggtgcgatgtggaaccccaggcgctgaatgaggctattaggtggagttctaaagaaaatttgctcggagccacagagagcgatccaaaccttttcgtggccttgtatgattttgttgcttctggtgacaatactctgtcaatcactaagggggaaaagttgagggtcctgggctataatcagaacggcgagtggagcgaggttcggtccaaaaatggccaaggttgggtcccaagcaactatatcacaccggtgaattctctggaaaagcactcctggtaccatggccccgtgtcgcggtccgctgcagagtatctgctgagttccctcatcaatggttccttcttggtgcgtgagtccgaaagcagccctggacagttaagcatctccctacgttatgaaggcagggtttatcactaccgtatcaacaccactgcagatggaaaagtatatgtaactgccgaaagtcgcttttcaacgttggccgagctggtgcaccaccatagcaccgtcgccgatggtttggtcaccacactgcactatcctgcccctaagtgtaacaaacccacggtgtacggggtttcccccattcacgataaatgggaaatggagagaacagatattaccatgaaacataagttggggggtggtcagtatggagaggtatacgttggcgtgtggaagaaatactctcttacagtggccgttaaaacactgaaagaagacactatggaggtggaggaattcctgaaagaggctgctgtgatgaaagaaatcaagcatcctaatctggtacagctacttggagtgtgtactcttgagcctcccttttacattgtgacagagtacatgccttatgggaacctgctggattacctaagggaatgcaaccgtgaagaagtgactgctgtggtgctactgtacatggcgacgcaaataagtagtgccatggagtacttagaaaaaaagaattttatccatagagacctggccgcacgtaattgcctggtgggggagaatcatgtggtcaaggttgctgactttggactttctagacttatgacgggtgacacctataccgcccatgctggggctaagttccctatcaaatggactgcaccagagtccttggcatacaacactttttccatcaagtccgacgtctgggccttcggcgtgctgctctgggagatcgcaacatatgggatgtccccctatcctgggatagatctgtcccaggtgtatgatttgctcgagaaagggtacaggatggagcagccagagggatgccctcctaaggtgtacgagcttatgcgggcttgctggaagtggtcaccagccgacaggccgtcattcgccgaaacacatcaagcttttgaaacaatgttccacgattcttccatcagcgaagaggttgccgaggagttaggcagagctgcatcatccagctcagtggtaccctatttgcctcggctgcccattctgccttctaagacccgaacactgaagaagcaggtcgaaaataaggagaatatcgagggcgcacaggacgcaactgagaacagtgcatctagcttggcccctggatttatacggggggcacaggcctcgtctggatcacccgctctgccccggaagcagagagacaaatcacctagtagtcttctcgaggacgccaaagagacttgctttacacgagatcggaaaggtggcttcttttcatcattcatgaagaaaaggaatgcacccacccccccgaaaagatcgtcctcttttcgggagatggagaatcagccccacaagaagtatgaactgacaggattgcccgaacaggatagaatggccatgacgcttccgcgtaattgtcaaagatccaaattgcagctggagagaacggtctccacttcctctcaacctgaggaaaacgtcgatcgggcaaacgatatgctgcctaagaagtccgaggaaagcgctgcacctagcagggagagacccaaagccaaactgctgccaaggggagctactgctctgccactgcgcacaccctctggagacctggctattaccgagaaggacccaccgggggtgggggtggccggtgtagccgccgcgccaaaagggaaggaaaagaacgggggtgcgagacttggcatggctggggtgcccgaggatggggaacagccaggatggccctccccagccaaggccgccccagtactgcctaccactcataaccacaaggtgccagtgctcatcagcccaactcttaagcacacacccgcggatgttcaacttattggaactgactcccagggaaataagttcaagctcctttctgagcaccaggtgacatcaagcggagataaagacaggccgcgccgggtgaaaccgaaatgcgctccccctccacccccggtaatgcgactgttgcaacatccttccatatgctccgatccaacagaggaaccaaccgccctgacagcaggccagagcacctcagaaacgcaggaaggcggaaaaaaggctgcattaggtgccgtacccatttccggcaaagccggccggcccgtgatgccgccccctcaggtgcctcttcccacaagtagcatatcccccgctaaaatggccaacggaacggcgggaaccaaggtggccctccggaagaccaaacaagccgctgaaaaaatttccgcggataaaatctcaaaagaggccctcctggagtgtgcggacctgctatcatctgccttaactgagccagttcctaactcacagctggtcgacacaggacatcaactgcttgactactgttcaggatacgtagactgcattccccaaaccagaaataagttcgcatttcgggaagccgttagtaaactggagttaagcttgcaggaattacaggtgagttcagctgccgctggtgtcccggggacaaatcccgttctcaataatctcctgagttgcgtgcaagaaatatccgacgttgtgcaacggtag

SEQ ID NO: 65861 - DNA, 3132 bp, Artificial Sequence
  derived and/or modified sequence
atggtcctggggacagtgttactccctcccaacagctacgggagagaccaggacacaagtctgtgttgcctgtgtaccgaagcttcagagtcagcgctgccagatctgacagaggcactgcaccggccttatggatgcgatgtcgaacctcaggctctgaacgaggccatccgttggtcctctaaggagaatctcctcggcgcaaccgaaagtgatccaaatctctttgtcgccctttatgatttcgtagcctccggagacaatactctgagcataactaagggggagaaactgcgagtcctaggatacaaccagaatggagaatggagcgaggtccggagcaagaacggccaaggttgggtaccatccaattacattacgccagtcaactctctcgaaaagcactcgtggtaccacggtccagtctcccgaagcgcagcagaatatcttctgtcaagcctcattaacggctcatttctggtgcgcgagagtgagtccagcccaggtcagctttcaatctcactcagatacgaaggtcgcgtgtatcactaccgaatcaatacgactgcagatgggaaggtttatgtgacagctgagtcgaggttctctaccctggcggaactagtccaccaccatagtacagttgctgacggactcgtgaccactctccattatccagcgccaaaatgcaacaaaccaactgtctatggcgtgtcgcccatccatgataaatgggaaatggagcggactgatatcaccatgaagcataaattgggtggcggacaatacggggaggtgtatgtgggcgtctggaagaagtactcactgaccgtcgccgttaaaacgctgaaagaggacacaatggaggtggaagaattcttgaaagaggcagctgtgatgaaagagattaaacacccaaatctggtgcagctgctcggtgtctgtacgcttgagccaccattttacatagtgactgagtatatgccatacgggaatcttttggactacttgagagagtgtaacagagaggaagtcactgccgtcgttcttctgtacatggcaacccagattagctctgcaatggagtatcttgagaaaaaaaatttcattcatcgcgacctcgctgctagaaactgccttgtcggggaaaatcacgttgtgaaggtagcagactttggcctctccaggctcatgaccggagatacatatactgcacatgcaggcgcaaaatttccaatcaagtggactgcgcctgagtcacttgcatacaacaccttcagtatcaagagtgacgtttgggcctttggcgtgctgctatgggaaatcgctacatatggtatgtctccatatcccggtatagacctgtcacaggtatatgacttgctcgagaagggatacagaatggaacagccagagggctgcccccctaaagtctacgaactcatgcgcgcttgctggaaatggtctccagcggaccggccttcatttgccgagacccaccaagcgtttgagaccatgtttcatgactcttctatttctgaggaggtcgctgaggagttgggacgagctgctagttctagttccgtggtgccttacttgccacgactgccaatccttccgagtaagactcgtactctcaagaagcaagtagagaacaaggaaaatatcgagggagcccaggacgccactgaaaactcagcctccagtttggcgccaggattcattcggggagcccaggcaagtagtggaagtcctgccttgcctagaaagcagagagacaagagccctagttcactgctggaagacgcgaaggagacctgtttcacaagggacaggaagggagggttcttttctagtttcatgaagaagagaaatgcgcctacacccccaaaaagatcctcttcctttcgggagatggagaatcagccccacaaaaagtacgaattgaccggcttgccagagcaggatcggatggccatgaccctacccagaaactgtcagagatctaagctgcaactggaaagaactgtcagtacaagctcccaacctgaggaaaacgtagaccgcgcaaacgacatgcttcccaaaaagtcggaagaatccgcggcaccgtcccgagaaagacccaaggcgaaactgctgccgaggggtgcgacagccctccctctaagaacccctagtggggatcttgctattaccgaaaaagaccctccaggcgtgggtgtggccggtgttgccgctgctcctaaaggaaaggaaaaaaacggtggtgctcgcttgggcatggcaggggtgccagaggacggagagcaacccggatggccatcaccggcaaaggcagctcccgttctccctacaacccacaatcataaggtcccagtcctaatttcccctacgctaaaacatacgccagctgatgtgcaactcatcggaaccgactcccagggcaacaagttcaagctcctttccgaacaccaagtgacttcctccggcgataaagaccggccacgtagggtcaagcccaagtgtgcccctcctccacccccagtcatgagattgcttcagcaccccagcatctgcagtgacccaaccgaggagcctacagctctgacagctggacagtctacgtccgagacacaggaggggggaaagaaagctgccctgggcgcagtgcccattagcggtaaagccggaaggccagtgatgcctcctcctcaggtccccctgcctacaagttcaatctctcccgcaaagatggccaacggaacagcaggcacaaaagtggcactgaggaaaacgaagcaggccgctgaaaagatatctgccgataaaataagcaaagaggccttgctcgaatgtgccgacctgttgtctagcgcgctgactgagccagtgcccaactcacaactggtagatactgggcatcagctgctcgattactgctccggctatgtagattgcattccacagacccggaacaagttcgctttccgcgaagctgtgtcaaagttggaattaagcctgcaagagctacaagtgtcaagcgcggcagccggtgtgcctggcaccaaccctgtgcttaataacctgctctcatgcgtgcaggagatttcagacgtggttcagcgctag

SEQ ID NO: 65862 - DNA, 3132 bp, Artificial Sequence
  derived and/or modified sequence
atggtccttgggacagttctccttccacctaatagttatggcagagatcaggacacttcactttgctgcctgtgcactgaggcctcagaatctgctctacccgacttaacagaagctttgcatcgtccctatggttgtgatgttgaaccccaggcactaaatgaggctatcaggtggagctccaaggagaacttgctcggagccactgagagtgaccctaatctcttcgttgcactttatgattttgtagcaagtggtgataacacactcagcatcactaaaggtgaaaagctacgagtccttggttacaaccagaatggtgagtggagtgaagttcgctctaagaatgggcagggctgggtgccaagcaactacatcaccccagtgaacagcctggaaaaacactcctggtaccatggacctgtgtcacgcagtgcagctgagtatctgctcagcagtctaatcaatggcagcttcctggtgcgagaaagtgagagtagccctgggcagctgtccatctcgctcaggtacgagggacgtgtgtatcactacaggatcaataccactgcagatggcaaggtgtatgtgactgctgagagccgcttcagcaccttggcagagcttgtacaccatcactccacagtggctgatgggctggtgacaacattacactacccagcacccaagtgtaataagcctacagtctatggtgtgtcccccatccacgacaaatgggaaatggagcgaacagatattaccatgaagcacaaacttgggggcggtcagtatggagaggtttacgttggcgtctggaagaaatacagccttacagttgctgtgaaaacattgaaggaagataccatggaggtagaagaattcctgaaagaagctgcagtaatgaaggaaatcaagcatcctaatctggtacaacttttaggtgtgtgtactttggagccaccattttacattgtgactgaatacatgccatacgggaatttgctggattacctccgagaatgcaaccgagaagaggtgactgcagttgtgctgctctacatggccactcagatttcttctgcaatggagtacttagagaagaagaatttcatccatagagatcttgcagctcgtaactgcctagtgggagaaaaccatgtggtaaaagtggctgactttggcttaagtagattgatgactggagacacttatactgctcatgctggagccaaatttcctattaagtggacagcaccagagagtcttgcctacaataccttctcaattaaatctgacgtctgggcttttggggtattgttgtgggaaattgctacctatggaatgtcaccatatccaggtattgacctgtctcaggtctatgacctactagaaaaaggatatcgaatggaacagcctgagggatgcccccctaaggtttatgaacttatgagagcatgctggaagtggagccctgccgataggccctcttttgctgaaacacaccaagcttttgaaaccatgttccatgactccagcatttctgaagaggtagctgaggagcttgggagagccgcctcctcgtcatctgttgttccatacctgccccggctacctatacttccttccaagactcggacactgaagaaacaggtggagaacaaggagaacattgaaggggcacaagatgccacagaaaattctgcttccagtttagcaccagggttcatcagaggtgcacaggcctctagtggatccccagcactgcctcgaaagcaaagagacaagtcacccagcagcctcttggaagatgccaaagagacatgcttcaccagggataggaaggggggcttcttcagctccttcatgaagaagagaaatgctcctacaccccccaaacgcagcagctccttccgagaaatggagaatcagccccataagaaatacgaactcacggggcttccagagcaggataggatggcaatgacccttcccaggaactgccagaggtccaaactccagctggaaaggacagtgtccacctcttctcagccagaagagaatgtggacagggccaatgacatgcttccaaaaaaatcagaggaaagtgctgctccaagcagggagagaccaaaagccaagttattgcccagaggagccacagctcttcctctcagaacaccctctggggatctagccattacagagaaggaccctccaggggtgggagtggctggagtggcagctgcccccaagggtaaagagaagaatggtggggcacgacttgggatggctggagttccagaggatggagagcagccgggctggccttctccagccaaggctgcccccgtcctcccaaccactcacaaccacaaagtgccagtccttatctcacccactctgaaacacactccagctgacgtgcagctcattggcacagactctcaggggaataaattcaagctcttatctgagcatcaggtcacatcctctggagacaaggaccgaccccgacgggtaaaaccaaagtgtgccccacccccaccaccagtgatgagactactgcagcatccgtccatctgctcagaccctacagaagagccaactgccctaactgcaggacagtccacatcagaaacacaggaaggaggaaagaaggcagctctgggcgcagtgcccatcagtgggaaagctgggaggccagtgatgcctccacctcaagtgcctctgcccacatcttccatctcgccagccaaaatggccaatggcacagcaggtactaaagtggctctgagaaaaaccaaacaggccgctgagaaaatctcagcagacaaaatcagcaaagaggccctgctggaatgtgctgacctactgtccagtgcactcacggaacctgtgcccaacagccagctggtagacactggacaccagctgcttgactactgctcaggctatgtggactgcatccctcaaactcgcaacaaatttgccttccgagaggctgtgagcaaactggaactcagcctgcaggagctacaggtttcttcagcagctgctggtgtgcccgggacaaaccctgtccttaataacttattgtcatgtgtacaggaaatcagtgatgtggtgcagaggtag

SEQ ID NO: 65863 - protein, 139 aa, Artificial Sequence
  derived and/or modified sequence
MGNPGGVGSERMRVARRTRNVCRCPRAAGPGVPEPRAAPLPLLAMAPPPACRSPMSPPPPPLLLLLLSLALLGARARAEPAGSAVPAQSRPCVDCHAFEFMQRALQDLRKTACSLDARTETLLLQAERRALCACWPAGH

SEQ ID NO: 65864 - protein, 128 aa, Artificial Sequence
  derived and/or modified sequence
MRVARRTRNVCRCPRAAGPGVPEPRAAPLPLLAMAPPPACRSPMSPPPPPLLLLLLSLALLGARARAEPAGSAVPAQSRPCVDCHAFEFMQRALQDLRKTACSLDARTETLLLQAERRALCACWPAGH

SEQ ID NO: 65865 - DNA, 420 bp, Artificial Sequence
  derived and/or modified sequence
atggggaatcccggaggagtcggcagcgaacggatgagagttgctcgcaggacgcgtaacgtttgtcgatgtcccagggctgccggacctggcgtacctgagccccgtgccgcacctctgcctttactcgcaatggcacctcccccagcctgccggtcaccaatgtcgccgccacctcctcccctgctgttgctattgctgtcgctcgctttacttggcgcaagggctagagctgaacccgcaggctctgccgtaccagcccaaagcagaccctgtgttgactgccatgcattcgagttcatgcagagagccctgcaggacctgcgcaaaacagcttgttccctcgacgcacggactgagacactgctgttgcaagcagaaaggagggctctttgtgcgtgctggcctgcaggccattag

SEQ ID NO: 65866 - DNA, 387 bp, Artificial Sequence
  derived and/or modified sequence
atgcgggtggccaggcgcactagaaacgtctgtaggtgccccagggccgcaggcccaggggtcccggaaccccgtgccgctccccttccattgctggcaatggcaccccctccagcttgtcgatcccccatgtctcctcctcctcctccacttttgctactcctgctatcgctggctttgctcggagctagagcaagggcggagcccgctggatctgccgtgccagcacagtccaggccctgcgttgactgtcacgcattcgaatttatgcagagagccctgcaagatttgaggaagacagcgtgctctcttgatgctagaacagaaactctgctcctccaggccgagcgcagagccctatgcgcatgctggcctgccggacactag

SEQ ID NO: 65867 - DNA, 427 bp, Artificial Sequence
  derived and/or modified sequence
gcatgcgcgttgcgcgccggacgcggaacgtctgccggtgtccccgcgctgctggtcccggggtccctgaaccgcgggcggccccgctccctctgctggccatggcccccccgcccgcgtgccggtccccgatgtcaccgccgccgccgccgctgctgctgctgctgctgagtctggcgctgctgggcgcccgggcccgcgccgagcccgccgggagtgccgtccccgcgcagagccgcccatgcgtggactgccacgccttcgagttcatgcagcgcgccctgcaggacctgcggaagacagcctgcagcctggacgcgcggacggagaccctactgctgcaggcagagcgccgtgccctgtgtgcctgctggccagcggggcactgaggaccacgctgctccgtgtgaataaatgcccagtggca

SEQ ID NO: 65868 - DNA, 420 bp, Artificial Sequence
  derived and/or modified sequence
atgggaaacccaggtggcgtcggctccgaacgtatgagagtggcccgaaggacgagaaacgtctgtcgttgccccagagccgcgggccctggcgtccctgaacccagagctgccccgctcccccttctcgctatggctcccccccccgcctgtagatctccgatgtcaccaccccctccacctctgttgctgctactcctcagcttggctttactgggcgcccgcgccagagccgaacccgccggatccgccgtacccgcccagtcccgcccctgtgtagactgccatgcatttgagttcatgcagcgagcactccaggacctcagaaaaacagcctgcagtctcgacgcccgcacagagaccttattgctgcaagccgaacgtcgggcgctatgtgcgtgctggcctgcaggccactag

SEQ ID NO: 65869 - DNA, 387 bp, Artificial Sequence
  derived and/or modified sequence
atgcgggtggctagacggacacggaacgtgtgtagatgtccccgcgcggccggcccgggcgtccctgagcccagagccgctcccttacctctgctcgctatggcgcctcctccagcctgccggagtcctatgagtcctcccccccccccccttttgcttcttctgctatcactcgctctgcttggagctcgggccagggccgaacctgctgggtctgccgtacctgctcagagccgtccatgtgtcgattgccatgccttcgagtttatgcaacgcgccctacaagatctacgaaaaactgcatgctctcttgacgcgagaaccgaaactctgctgctccaagccgaaaggagagcactgtgtgcttgttggcctgcaggacactag

SEQ ID NO: 65870 - DNA, 420 bp, Artificial Sequence
  derived and/or modified sequence
atgggcaatccaggtggagttggcagcgaacgcatgagagttgctaggcgtacaagaaatgtctgtagatgccctagggccgcaggaccaggagtccccgaacccagagccgctcccctcccactcctggctatggctcccccgcctgcgtgccgatcccccatgtctcccccgcctccgccgctactgctgttactgctgagccttgccctgctgggtgctcgtgcccgcgctgaacctgcaggatctgccgtgccagcccagtctagaccatgcgtggattgtcacgcgtttgagtttatgcagcgggcactccaggaccttagaaagacagcctgttcactggacgcaagaaccgagacattgcttcttcaggctgagagacgagctctttgtgcatgctggcccgccggacactag

SEQ ID NO: 65871 - DNA, 387 bp, Artificial Sequence
  derived and/or modified sequence
atgcgtgttgcaagaaggacgcgcaacgtttgtagatgtccccgagccgccggcccaggagtgccagagcccagagcagcaccactcccgctcctcgcaatggccccgcctccggcctgccgtagcccgatgtctcctccacctccacccctcctgttactcttattatccctggcactacttggtgctagagcacgagcagaacccgcgggatcagctgtacctgcccagagccgcccctgcgtagattgccacgcctttgagttcatgcagcgagccctgcaagatctccggaagacggcatgtagtctggatgctcgaactgaaacgctgctcttacaggctgaacgtagggccctttgtgcttgttggcccgcgggacattag

SEQ ID NO: 65872 - DNA, 420 bp, Artificial Sequence
  derived and/or modified sequence
atgggcaaccccggcggcgtgggcagcgagagaatgagagtggccagaagaaccagaaacgtgtgcagatgccccagagccgccggccccggcgtgcccgagcccagagccgcccccctgcccctgctggccatggcccccccccccgcctgcagaagccccatgagccccccccccccccccctgctgctgctgctgctgagcctggccctgctgggcgccagagccagagccgagcccgccggcagcgccgtgcccgcccagagcagaccctgcgtggactgccacgccttcgagttcatgcagagagccctgcaggacctgagaaagaccgcctgcagcctggacgccagaaccgagaccctgctgctgcaggccgagagaagagccctgtgcgcctgctggcccgccggccactag

SEQ ID NO: 65873 - DNA, 387 bp, Artificial Sequence
  derived and/or modified sequence
atgagagtggccagaagaaccagaaacgtgtgcagatgccccagagccgccggccccggcgtgcccgagcccagagccgcccccctgcccctgctggccatggcccccccccccgcctgcagaagccccatgagccccccccccccccccctgctgctgctgctgctgagcctggccctgctgggcgccagagccagagccgagcccgccggcagcgccgtgcccgcccagagcagaccctgcgtggactgccacgccttcgagttcatgcagagagccctgcaggacctgagaaagaccgcctgcagcctggacgccagaaccgagaccctgctgctgcaggccgagagaagagccctgtgcgcctgctggcccgccggccactag

SEQ ID NO: 65874 - DNA, 420 bp, Artificial Sequence
  derived and/or modified sequence
atgggaaaccctggcggggttggatctgaaaggatgagggtcgcacggcgtacccggaatgtttgccgctgcccaagggctgctgggcccggggtaccggagccaagggccgcgcccttacccttgctcgcgatggcccctccacctgcctgtaggagccccatgtctcccccaccgccacctctgttactgctgctgctcagcctggccttgctgggcgctcgggctcgggctgaacccgccgggtccgctgtacctgcccagagtcggccctgcgtggactgtcatgcgttcgagtttatgcagagggctctgcaggacctgagaaagacagcgtgctcattagatgcaagaactgagactttattgcttcaggctgaaaggcgcgctctgtgcgcttgctggccagctggccattag

SEQ ID NO: 65875 - DNA, 387 bp, Artificial Sequence
  derived and/or modified sequence
atgcgtgttgctcggagaacccggaatgtgtgcagatgcccaagggcggccggccccggcgtccctgaaccaagagcagctccgctgcccctcctggctatggccccacctcctgcttgtagatcaccaatgtcccctccgcccccgccactgcttctactgctgctgtctctggctctcctgggcgcccgcgctcgtgccgagccggcggggagtgccgtccctgcacagtctaggccttgcgtggattgtcatgcctttgagtttatgcaaagggctctccaagatctcagaaaaaccgcctgttctcttgatgcccggaccgaaacactgctgcttcaagccgaacgccgagcgctgtgcgcctgttggccagcaggccattag

SEQ ID NO: 65876 - DNA, 420 bp, Artificial Sequence
  derived and/or modified sequence
atgggcaaccctgggggcgtgggcagcgagaggatgagggtggcccggaggaccagaaatgtgtgccgctgccccagggctgctggccctggggtgcctgagcccagggctgcccccctgcccctgctggccatggcccctcctccagcctgccgcagccccatgagccccccacctccacccctgctgctgctgctgctgagcctggccctgctgggcgcccgggcccgggcagagcctgctggcagcgctgtgcctgcccagagccggccctgtgtggactgccacgcctttgagttcatgcagagggccctgcaggacctgaggaagacagcctgcagcctggatgccaggacagagaccctgctgctgcaggccgagcggcgggccctgtgtgcctgctggccagctggccactag

SEQ ID NO: 65877 - DNA, 387 bp, Artificial Sequence
  derived and/or modified sequence
atgagggtggcccggaggaccagaaatgtgtgccgctgccccagggctgctggccctggggtgcctgagccccgggccgcccccctgcccctgctggccatggcccctcctccagcctgccgcagccccatgagccccccacctccacccctgctgctgctgctgctgagcctggccctgctgggcgcccgggcccgggcagagcccgccggcagcgctgtgcctgcccagagccggccctgtgtggactgccacgcctttgagttcatgcagagggccctgcaggacctgaggaagacagcctgcagcctggatgccaggacagagaccctgctgctgcaggccgagcggcgggccctgtgtgcctgctggccagctggccactag

SEQ ID NO: 65878 - DNA, 464 bp, Artificial Sequence
  derived and/or modified sequence
atggggaacccgggcggggtcgggtcggagcgcatgcgcgttgcgcgccggacgcggaacgtctgccggtgtccccgcgctgctggtcccggggtccctgaaccgcgggcggccccgctccctctgctggccatggcccccccgcccgcgtgccggtccccgatgtcaccgccgccgccgccgctgctgctgctgctgctgagtctggcgctgctgggcgcccgggcccgcgccgagcccgccgggagtgccgtccccgcgcagagccgcccatgcgtggactgccacgccttcgagttcatgcagcgcgccctgcaggacctgcggaagacagcctgcagcctggacgcgcggacggagaccctactgctgcaggcagagcgccgtgccctgtgtgcctgctggccagcggggcactgaggaccacgctgctccgtgtgaataaatgcccagtggcacgcctg

SEQ ID NO: 65879 - DNA, 420 bp, Artificial Sequence
  derived and/or modified sequence
atgggcaaccccggcggcgtgggcagcgagcggatgcgggtggcccgtagaacccgaaacgtctgccgctgtcccagagccgctgggcccggggtgccagagcccagggctgcaccactgccactgttagctatggcaccacccccggcttgccgttcgccgatgtccccaccacctccaccgttgctgctgctgctgctatccctggccctgctgggcgcacgggctagggcagaacctgccggcagcgcggtgccagcccagagccggccgtgcgttgattgtcatgcctttgaattcatgcagcgagcattgcaggatctgcgcaaaactgcatgctccctagacgcccggaccgagacccttctattgcaggccgagcgaagagcgctgtgtgcatgctggcctgcagggcattag

SEQ ID NO: 65880 - DNA, 387 bp, Artificial Sequence
  derived and/or modified sequence
atgcgggtggcccggcggacccggaacgtgtgccggtgcccccgggctgctggccccggagtcccagagcccagggccgccccactgccactgctcgccatggcccccccccctgcatgcagatcccctatgagtcccccgcccccacccttgcttttgcttctgctcagtctcgcgctcctgggagcacgagctagagcagaaccagcaggatctgctgtgcctgcgcaatcacgtccttgcgtggattgtcacgccttcgagttcatgcagagagctcttcaggatctcaggaagacagcatgttccttagatgccaggaccgaaaccctcctgctgcaggccgagcggagagcactatgcgcctgctggccagcaggacactag

SEQ ID NO: 65881 - RNA, 420 nt, Artificial Sequence
  derived and/or modified sequence
augggaaacccagguggcgucggcuccgaacguaugagaguggcccgaaggacgagaaacgucugucguugccccagagccgcgggcccuggcgucccugaacccagagcugccccgcucccccuucucgcuauggcucccccccccgccuguagaucuccgaugucaccacccccuccaccucuguugcugcuacuccucagcuuggcuuuacugggcgcccgcgccagagccgaacccgccggauccgccguacccgcccagucccgccccuguguagacugccaugcauuugaguucaugcagcgagcacuccaggaccucagaaaaacagccugcagucucgacgcccgcacagagaccuuauugcugcaagccgaacgucgggcgcuaugugcgugcuggccugcaggccacuag

SEQ ID NO: 65882 - RNA, 387 nt, Artificial Sequence
  derived and/or modified sequence
augcggguggcuagacggacacggaacguguguagauguccccgcgcggccggcccgggcgucccugagcccagagccgcucccuuaccucugcucgcuauggcgccuccuccagccugccggaguccuaugaguccucccccccccccccuuuugcuucuucugcuaucacucgcucugcuuggagcucgggccagggccgaaccugcugggucugccguaccugcucagagccguccaugugucgauugccaugccuucgaguuuaugcaacgcgcccuacaagaucuacgaaaaacugcaugcucucuugacgcgagaaccgaaacucugcugcuccaagccgaaaggagagcacugugugcuuguuggccugcaggacacuag

SEQ ID NO: 65883 - RNA, 420 nt, Artificial Sequence
  derived and/or modified sequence
augggcaauccagguggaguuggcagcgaacgcaugagaguugcuaggcguacaagaaaugucuguagaugcccuagggccgcaggaccaggaguccccgaacccagagccgcuccccucccacuccuggcuauggcucccccgccugcgugccgaucccccaugucucccccgccuccgccgcuacugcuguuacugcugagccuugcccugcugggugcucgugcccgcgcugaaccugcaggaucugccgugccagcccagucuagaccaugcguggauugucacgcguuugaguuuaugcagcgggcacuccaggaccuuagaaagacagccuguucacuggacgcaagaaccgagacauugcuucuucaggcugagagacgagcucuuugugcaugcuggcccgccggacacuag

SEQ ID NO: 65884 - RNA, 387 nt, Artificial Sequence
  derived and/or modified sequence
augcguguugcaagaaggacgcgcaacguuuguagauguccccgagccgccggcccaggagugccagagcccagagcagcaccacucccgcuccucgcaauggccccgccuccggccugccguagcccgaugucuccuccaccuccaccccuccuguuacucuuauuaucccuggcacuacuuggugcuagagcacgagcagaacccgcgggaucagcuguaccugcccagagccgccccugcguagauugccacgccuuugaguucaugcagcgagcccugcaagaucuccggaagacggcauguagucuggaugcucgaacugaaacgcugcucuuacaggcugaacguagggcccuuugugcuuguuggcccgcgggacauuag

SEQ ID NO: 65885 - DNA, 1594 bp, Artificial Sequence
  derived and/or modified sequence
ttttgagcccctgtctggatgacttcttgcggctgttctacccctccccctccccgcggtaccttgcacttttctccctccctgccccctctcgagtccaccctccgggccttctgcccctgatcgcttggttttccttgcagtcgcctgctgctgtcgtcgggaggtgggtgaggtgacgcaaacagccccgttgttgccctccgcgtatcccctcaccacctttgcggccatccacgactttcgcaccttccgccattttcctgcctgtgagggtggacagatcgcgctcgggtctcggcctcctgagtgccggtgactgcgggaggcgacggagtgcttctgggggtgtgagctggggaagttcgtggtcacggatgcgtgtggggttgctgctcagtctgtaacggcaggaaagatgaatgggagggctgattttcgagagccgaatgcagaggttccaagaccaattccccacatagggcctgattacattccaacagaggaagaaaggagagtcttcgcagaatgcaatgatgaaagcttctggttcagatctgtgcctttggctgcaacaagtatgttgattactcaaggattaattagtaaaggaatactttcaagtcatcccaaatatggttccatccctaaacttatacttgcttgtatcatgggatactttgctggaaaactttcttatgtgaaaacttgccaagagaaattcaagaaacttgaaaattccccccttggagaagctttacgatcaggacaagcacgacgatcttcaccacctgggcactattatcaaaagtcaaaatatgactcaagtgtgagtggtcaatcatcttttgtgacatccccagcagcagacaacatagaaatgcttcctcattatgagccaattccattcagttcttctatgaatgaatctgctcccactggtattactgatcatattgtccaaggacctgatcccaaccttgaagaaagtcctaaaagaaaaaatattacatatgaggaattaaggaataagaacagagagtcatatgaagtatctttaacacaaaagactgacccctcagtcaggcctatgcatgaaagagtgccaaaaaaagaagtcaaagtaaacaagtatggagatacttgggatgagtgaaaaattacatcattggacatgaaggagtttcaacatccagcttcatctaggtggtcatgattacctgcatgctttgagctcagcagcagtcttcataaacacatttaaaacaagatcctgggtttttgtggtttgacttctatggtgttttaaaaaaacacagatttttagtgttaatattgtgtaaatgtactcaccttagggattcatttgaatgatggtattataccatgattgtatacagtttgtgaaattgttgcaagggcaaagataactcttaaaaaaccgtcgagattacaatgctctagaatcagcatataagaaaataaatgatatctgcatgttgaattggggtggatggggggagcaagcataatttttaagtgtgaagctttgcatcaagaaattattaaaaagctttttttctccagtattttc

SEQ ID NO: 65886 - DNA, 1423 bp, Artificial Sequence
  derived and/or modified sequence
ctttgcggccatccacgactttcgcaccttccgccattttcctgcctgtgagggtggacagatcgcgctcgggtctcggcctcctgagtgccggtgactgcgggaggcgacggagtgcttctgggggtgtgagctggggaagttcgtggtcacggatgcgtgtggggttgctgctcagtctgtaacggcaggtgggagacggacactgggtggaggatggagtgcggaaagatgaatgggagggctgattttcgagagccgaatgcagaggttccaagaccaattccccacatagggcctgattacattccaacagaggaagaaaggagagtcttcgcagaatgcaatgatgaaagcttctggttcagatctgtgcctttggctgcaacaagtatgttgattactcaaggattaattagtaaaggaatactttcaagtcatcccaaatatggttccatccctaaacttatacttgcttgtatcatgggatactttgctggaaaactttcttatgtgaaaacttgccaagagaaattcaagaaacttgaaaattccccccttggagaagctttacgatcaggacaagcacgacgatcttcaccacctgggcactattatcaaaagtcaaaatatgactcaagtgtgagtggtcaatcatcttttgtgacatccccagcagcagacaacatagaaatgcttcctcattatgagccaattccattcagttcttctatgaatgaatctgctcccactggtattactgatcatattgtccaaggacctgatcccaaccttgaagaaagtcctaaaagaaaaaatattacatatgaggaattaaggaataagaacagagagtcatatgaagtatctttaacacaaaagactgacccctcagtcaggcctatgcatgaaagagtgccaaaaaaagaagtcaaagtaaacaagtatggagatacttgggatgagtgaaaaattacatcattggacatgaaggagtttcaacatccagcttcatctaggtggtcatgattacctgcatgctttgagctcagcagcagtcttcataaacacatttaaaacaagatcctgggtttttgtggtttgacttctatggtgttttaaaaaaacacagatttttagtgttaatattgtgtaaatgtactcaccttagggattcatttgaatgatggtattataccatgattgtatacagtttgtgaaattgttgcaagggcaaagataactcttaaaaaaccgtcgagattacaatgctctagaatcagcatataagaaaataaatgatatctgcatgttgaattggggtggatggggggagcaagcataatttttaagtgtgaagctttgcatcaagaaattattaaaaagctttttttctccagtattttctgtattatcttaatgt

SEQ ID NO: 65887 - DNA, 348 bp, Artificial Sequence
  derived and/or modified sequence
agtgcctccgggtcgcggtcattttgagcccctgtctggatgacttcttgcggctgttctacccctccccctccccgcgtcgcctgctgctgtcgtcgggaggaaagatgaatgggagggctgattttcgagagccgaatgcagaggttccaagaccaattccccacatagggcctgattacattccaacagaggaagaaaggagagtcttcgcagaatgcaatgatgaaagcttctggttcagatctgtgcctttggctgcaacaagtatgttgattactcaaggattaattagtaaaggaatactttcaagtcatcccaaatatggttccatccctaaacttatac

SEQ ID NO: 65888 - DNA, 1204 bp, Artificial Sequence
  derived and/or modified sequence
attcctaggctgctggctctcagacccgcagtgaggtctgacgtcatttcctgccgaaagatgaatgggagggctgattttcgagagccgaatgcagaggttccaagaccaattccccctgtgcctttggctgcaacaagtatgttgattactcaaggattaattagtaaaggaatactttcaagtcatcccaaatatggttccatccctaaacttatacttgcttgtatcatgggatactttgctggaaaactttcttatgtgaaaacttgccaagagaaattcaagaaacttgaaaattccccccttggagaagctttacgatcaggacaagcacgacgatcttcaccacctgggcactattatcaaaagtcaaaatatgactcaagtgtgagtggtcaatcatcttttgtgacatccccagcagcagacaacatagaaatgcttcctcattatgagccaattccattcagttcttctatgaatgaatctgctcccactggtattactgatcatattgtccaaggacctgatcccaaccttgaagaaagtcctaaaagaaaaaatattacatatgaggaattaaggaataagaacagagagtcatatgaagtatctttaacacaaaagactgacccctcagtcaggcctatgcatgaaagagtgccaaaaaaagaagtcaaagtaaacaagtatggagatacttgggatgagtgaaaaattacatcattggacatgaaggagtttcaacatccagcttcatctaggtggtcatgattacctgcatgctttgagctcagcagcagtcttcataaacacatttaaaacaagatcctgggtttttgtggtttgacttctatggtgttttaaaaaaacacagatttttagtgttaatattgtgtaaatgtactcaccttagggattcatttgaatgatggtattataccatgattgtatacagtttgtgaaattgttgcaagggcaaagataactcttaaaaaaccgtcgagattacaatgctctagaatcagcatataagaaaataaatgatatctgcatgttgaattggggtggatggggggagcaagcataatttttaagtgtgaagctttgcatcaagaaattattaaaaagctttttttctccagtattttctgtattatcttaatgtttatggcaaataaaatgtaaaggaacatgcaac

SEQ ID NO: 65889 - DNA, 563 bp, Artificial Sequence
  derived and/or modified sequence
cattttgagcccctgtctggatgacttcttgcggctgttctacccctccccctccccgcggtaccttgcacttttctccctccctgccccctctcgagtccaccctccgggccttctgcccctgatcgcttggttttccttgcagtcgcctgctgctgtcgtcgggaggtgggtgaggtgacgcaaacagccccgttgttgccctccgcgtatcccctcaccacctttgcggccatccacgactttcgcaccttccgccattttcctgcctgtgagggtggacagatcgcgctcgggtctcggcctcctgagtgccggaaagatgaatgggagggctgattttcgagagccgaatgcagaggttccaagaccaattccccacatagggcctgattacattccaacagaggaagaaaggagagtcttcgcagaatgcaatgatgaaagcttctggttcagatctgtgcctttggctgcaacaagtatgttgattactcaaggattaattagtaaaggaatactttcaagtcatcccaaatatggttccatccctaaacttatac

SEQ ID NO: 65890 - DNA, 441 bp, Artificial Sequence
  derived and/or modified sequence
agtgcctccgggtcgcggtcattttgagcccctgtctggatgacttcttgcggctgttctacccctccccctccccgcgtcgcctgctgctgtcgtcgggaggtgggtgaggtgacgcaaacagccccgttgttgccctccgcgtatcccctcaccacctttgcggccatccacgactttcgcaccttccgccattttcctgcctgtgagggtggacagatcgcgctcgggtctcggcctcctgagtgccggtgactgcgggaggcgacggagtgcttctgggggtgtgagctggggaagttcgtggtcacggatgcgtgtggggttgctgctcagtctgtaacggcaggaaagatgaatgggagggctgattttcgagagccgaatgcagaggttccaagaccaattccccacatagggcctgattacattccaacagag

SEQ ID NO: 65891 - DNA, 594 bp, Artificial Sequence
  derived and/or modified sequence
gcctccgggtcgcggtcattttgagcccctgtctggatgacttcttgcggctgttctacccctccccctccccgcggaaagatgaatgggagggctgattttcgagagccgaatgcagaggttccaagaccaattccccacatagggcctgattacattccaacagaggaagaaaggagagtcttcgcagaatgcaatgatgaaagcttctggttcagatctgtgcctttggctgcaacaagtatgttgattactcaaggattaattagtaaaggaatactttcaagtcatcccaaatatggttccatccctaaacttatacttgcttgtatcatgggatactttgctggaaaactttcttatgtgaaaacttgccaagagaaattcaagaaacttgaaaattccccccttggagaagctttacgatcaggacaagcacgacgatcttcaccacctgggcactattatcaaaagtcaaaatatgactcaagtgtgagtggtcaatcatcttttgtgacatccccagcagcagacaacatagaaatgcttcctcattatgagccaattccattcagttcttctatgaatgaatct

SEQ ID NO: 65892 - DNA, 1288 bp, Artificial Sequence
  derived and/or modified sequence
ttttcctgcctgtgagggtggacagatcgcgctcgggtctcggcctcctgagtgccggaaagatgaatgggagggctgattttcgagagccgaatgcagaggttccaagaccaattccccacatagggcctgattacattccaacagaggaagaaaggagagtcttcgcagaatgcaatgatgaaagcttctggttcagatctgtgcctttggctgcaacaagtatgttgattactcaaggattaattagtaaaggaatactttcaagtcatcccaaatatggttccatccctaaacttatacttgcttgtatcatgggatactttgctggaaaactttcttatgtgaaaacttgccaagagaaattcaagaaacttgaaaattccccccttggagaagctttacgatcaggacaagcacgacgatcttcaccacctgggcactattatcaaaagtcaaaatatgactcaagtgtgagtggtcaatcatcttttgtgacatccccagcagcagacaacatagaaatgcttcctcattatgagccaattccattcagttcttctatgaatgaatctgctcccactggtattactgatcatattgtccaaggacctgatcccaaccttgaagaaagtcctaaaagaaaaaatattacatatgaggaattaaggaataagaacagagagtcatatgaagtatctttaacacaaaagactgacccctcagtcaggcctatgcatgaaagagtgccaaaaaaagaagtcaaagtaaacaagtatggagatacttgggatgagtgaaaaattacatcattggacatgaaggagtttcaacatccagcttcatctaggtggtcatgattacctgcatgctttgagctcagcagcagtcttcataaacacatttaaaacaagatcctgggtttttgtggtttgacttctatggtgttttaaaaaaacacagatttttagtgttaatattgtgtaaatgtactcaccttagggattcatttgaatgatggtattataccatgattgtatacagtttgtgaaattgttgcaagggcaaagataactcttaaaaaaccgtcgagattacaatgctctagaatcagcatataagaaaataaatgatatctgcatgttgaattggggtggatggggggagcaagcataatttttaagtgtgaagctttgcatcaagaaattattaaaaagctttttttctccagtattttctgtattatcttaatgtttatggcaaataaaatgtaaaggaacatgcaaca

SEQ ID NO: 65893 - DNA, 653 bp, Artificial Sequence
  derived and/or modified sequence
tttcctgccgtaagtatacagtgcctccgggtcgcggtcattttgagcccctgtctggatgacttcttgcggctgttctacccctccccctccccgcgtcgcctgctgctgtcgtcgggaggtgggtgaggtgacgcaaacagccccgttgttgccctccgcgtatcccctcaccacctttgcggccatccacgactttcgcaccttccgccattttcctgcctgtgagggtggacagatcgcgctcgggtctcggcctcctgagtgccggaaagatgaatgggagggctgattttcgagagccgaatgcagaggttccaagaccaattccccacatagggcctgattacattccaacagaggaagaaaggagagtcttcgcagaatgcaatgatgaaagcttctggttcagatctgtgcctttggctgcaacaagtatgttgattactcaaggattaattagtaaaggaatactttcaagtcatcccaaatatggttccatccctaaacttatacttgcttgtatcatgggatactttgctggaaaactttcttatgtgaaaacttgccaagagaaattcaagaaacttgaaaattccccccttggagaagctttacgatcaggacaagcacgacgatcttcaccacctggg

SEQ ID NO: 65894 - DNA, 1414 bp, Artificial Sequence
  derived and/or modified sequence
tgcctccgggtcgcggtcattttgagcccctgtctggatgacttcttgcggctgttctacccctccccctccccgcggtaccttgcacttttctccctccctgccccctctcgagtccaccctccgggccttctgcccctgatcgcttggttttccttgcagtcgcctgctgctgtcgtcgggaggaaagatgaatgggagggctgattttcgagagccgaatgcagaggttccaagaccaattccccacatagggcctgattacattccaacagaggaagaaaggagagtcttcgcagaatgcaatgatgaaagcttctggttcagatctgtgcctttggctgcaacaagtatgttgattactcaaggattaattagtaaaggaatactttcaagtcatcccaaatatggttccatccctaaacttatacttgcttgtatcatgggatactttgctggaaaactttcttatgtgaaaacttgccaagagaaattcaagaaacttgaaaattccccccttggagaagctttacgatcaggacaagcacgacgatcttcaccacctgggcactattatcaaaagtcaaaatatgactcaagtgtgagtggtcaatcatcttttgtgacatccccagcagcagacaacatagaaatgcttcctcattatgagccaattccattcagttcttctatgaatgaatctgctcccactggtattactgatcatattgtccaaggacctgatcccaaccttgaagaaagtcctaaaagaaaaaatattacatatgaggaattaaggaataagaacagagagtcatatgaagtatctttaacacaaaagactgacccctcagtcaggcctatgcatgaaagagtgccaaaaaaagaagtcaaagtaaacaagtatggagatacttgggatgagtgaaaaattacatcattggacatgaaggagtttcaacatccagcttcatctaggtggtcatgattacctgcatgctttgagctcagcagcagtcttcataaacacatttaaaacaagatcctgggtttttgtggtttgacttctatggtgttttaaaaaaacacagatttttagtgttaatattgtgtaaatgtactcaccttagggattcatttgaatgatggtattataccatgattgtatacagtttgtgaaattgttgcaagggcaaagataactcttaaaaaaccgtcgagattacaatgctctagaatcagcatataagaaaataaatgatatctgcatgttgaattggggtggatggggggagcaagcataatttttaagtgtgaagctttgcatcaagaaattattaaaaagctttttttctccagtattttctgtattatcttaatgtttatggcaaataaaatgtaaaggaacatgcaa

SEQ ID NO: 65895 - protein, 810 aa, Artificial Sequence
  derived and/or modified sequence
MEPEINCSELCDSFPGQELDRRPLHDLCKTTITSSHHSSKTISSLSPVLLGIVWTFLSCGLLLILFFLAFTIHCRKNRIVKMSSPNLNIVTLLGSCLTYSSAYLFGIQDVLVGSSMETLIQTRLSMLCIGTSLVFGPILGKSWRLYKVFTQRVPDKRVIIKDLQLLGLVAALLMADVILLMTWVLTDPIQCLQILSVTGKDVSCTSTSTHFCASRYSDVWIALIWGCKGLLLLYGAYLAGLTGHVSSPPVNQSLTIMVGVNLLVLAAGLLFVVTRYLHSWPNLVFGLTSGGIFVCTTTINCFIFIPQLKQWKAFEEENQTIRRMAKYFSTPNKSFHTQYGEEENCHPRGEKSSMERLLTEKNAVIESLQEQVNNAKEKIVRLMSAECTYDLPEGAAPPASSPNKDVQAVASVHTLAAAQGPSGHLSDFQNDPGMAARDSQCTSGPSSYAQSLEGPGKDSSFSPGKEEKISDSKDFSDHLDSGCSQKPWTEQSLGPERGDQVPMNPSQSLLPERGGSDPQRQRHLENSEEPPERRSRVSSVIREKLQEVLQDLGLGPEASLSTAPSCHQQTWKNSAAFSPQKMPLSKELGFSPYMVRRRRAAQRARSHFPGSAPSSVGHRANRTVPGAHSRLHVQNGDSPSLAPQTTDSRVRRPSSRKPSLPSDPQDRPGTLEGSKQSQTEPEGARGSKAAFLRQPSGSGRAPSPAAPCLSKASPDLPEQWQLWPPVPSGCASLSSQHSYFDTESSSSDEFFCRCHRPYCEICFQSSSDSSDSGTSDTDPEPTGGLASWEKLWARSKPIVNFKDDLKPTLV

SEQ ID NO: 65896 - DNA, 2525 bp, Artificial Sequence
  derived and/or modified sequence
acaggggcatgtggtgacatggagcctgaaataaactgctctgaattgtgtgacagttttcctggccaggagctggatcggagaccccttcatgatctctgcaagacaacaattacatcttcccaccacagcagtaagaccatctcttcattatctcctgtcctcttgggtattgtttggacttttctcagctgtggacttctgctgatacttttctttcttgcctttacaattcactgcaggaagaacaggattgtgaagatgtccagtcccaatctgaacattgtgaccttactgggcagttgtctcacttacagtagcgcttacctctttgggattcaggatgttttagtggggagctcaatggaaactctcattcagacaagactgtccatgctgtgcattgggacctcccttgtgtttggccccattctgggaaagagctggcgactctacaaggtgtttacccaaagggtcccggacaagagagtgattatcaaagacctgcagttgctggggttggtggcagccctgttgatggctgatgtgatcctgctcatgacgtgggtgctgactgatcccatccagtgcctccagattctcagtgtgacagggaaagacgtgtcctgcacttcgaccagcacccacttctgtgcttcccggtattccgatgtttggattgctctcatttggggatgcaagggtctgctcctgctgtatggtgcctacctggctggcctgactggccatgtcagctcccctcctgtgaatcagtccttaaccatcatggtgggggtcaacctccttgtactggctgctgggctgctttttgtagtcaccagatacttgcattcctggcccaacctggtctttggactcacatctggagggatctttgtttgtacaactacaatcaactgcttcatcttcattccccagctgaagcaatggaaggcatttgaagaggaaaaccaaacaatcagacgcatggccaaatatttcagcactcccaacaaaagcttccatacccagtatggtgaggaggagaactgccacccgaggggagagaaaagctccatggagaggctcctcacagaaaaaaatgctgtgattgaaagcctgcaggaacaagtaaacaacgccaaagagaagattgtgaggctgatgtcagctgagtgcacctatgacctcccagagggggctgccccacctgcctcttccccgaacaaggacgtccaggcggtagcctcggtccacaccctggcagctgctcaggggccttcgggtcacctctctgactttcagaatgatcctggcatggctgcccgggattcccagtgcacttcagggccctcctcatatgcacaaagccttgaggggcctgggaaggactccagcttctccccagggaaggaggagaagatatctgactcaaaagacttttctgatcatttagactcaggttgtagccagaagccatggactgagcaaagcctgggtccagaaagaggagaccaagtccccatgaaccccagccagagtctcctaccagaaagaggcggctcagatccccagagacagaggcatctggagaactcagaggagcccccagagcggcggtcacgggttagttcagtaatcagggagaaacttcaggaggtcttacaagatctgggcctgggccctgaggcttccctctccaccgccccctcttgtcatcagcaaacctggaagaacagtgctgccttcagcccccaaaagatgcccctctccaaggagctcggctttagcccttacatggtgaggagaaggcgggcagctcagcgggcccgctcacactttcctggctctgcaccctcatctgtggggcatcgggcaaacaggactgttcctggggcacacagcaggctacatgtgcagaatggggacagccccagcctggccccacaaactactgattccagagtacgaagaccttcttccaggaagccttcactaccttcagatcctcaagacagaccaggtaccctggagggcagcaaacaaagccagacagagcccgagggggctagagggagcaaagcagcctttcttcgccagccttctggttctggccgggccccaagtcctgctgccccatgcctctccaaagcctcacctgacttgcctgaacagtggcagctgtggcccccagtgccctcaggctgtgcctccctgtcttctcaacacagctattttgatactgagtccagcagctcagatgagttcttctgccgctgccaccggccctactgtgaaatctgcttccagagctcttctgactctagtgacagtggcacatcagacactgaccctgagcctactggggggctggcttcctgggaaaagctgtgggcccgctccaagcctattgtgaacttcaaagatgacttgaaacccacgctggtgtgaaaagcaacagagctggtctagacacagaggtcagtccaagagaagctgtaccaaggcccacaggagaagagcca

SEQ ID NO: 65897 - DNA, 2433 bp, Artificial Sequence
  derived and/or modified sequence
atggagcccgagatcaactgcagtgaactctgcgattcatttcctggccaggagctcgataggagaccactgcacgatctctgtaagacaactatcacttcgtcccaccattccagcaaaacaatctctagccttagcccggtactcctcggcatcgtgtggacatttctttcctgtgggttactgctgatcctgttctttctggcgtttacaattcactgccggaaaaataggattgtaaagatgagtagccccaatctgaacatagtaacattacttggcagttgcctgacttattcatctgcctacctgttcggaattcaggacgtgctcgttggtagcagtatggaaacattgatccagacgagattatctatgctgtgcataggcacatcgcttgtatttggccccattttgggtaaatcttggcgactctacaaagtgttcacccagcgagtgccggacaagagggtgattattaaggaccttcagctgcttggcctggtagccgcccttctaatggctgacgtaatcctcttaatgacttgggtgctcactgacccaatccagtgccttcagatactgagtgtaactggtaaagacgttagctgcacatcgactagtacacatttctgtgcgtccagatattcagatgtgtggatcgccctgatttggggatgcaaaggcttgctactcttatacggagcataccttgctggcctgactggtcatgtgtccagtccccctgtgaatcagagtctgactatcatggtgggagtgaatcttctcgtccttgcagccgggctgctgtttgtggtgaccagatacctccactcgtggcccaatctcgtatttgggctgacaagcgggggtatcttcgtatgcaccactacaattaactgcttcatattcattcctcagctgaaacagtggaaggcttttgaagaagagaatcaaaccattcgccggatggctaagtatttctccaccccaaacaagtccttccatacgcaatatggggaggaggaaaactgccatccccgaggcgaaaaatcttccatggaaaggctgctgacggaaaagaatgccgtgatagaaagcctccaggagcaggttaataacgcaaaagagaagattgtacggctaatgtccgccgagtgcacgtacgacctgccagaaggcgccgctccccccgcctccagtcctaataaagacgttcaagccgtcgcctcggtgcatacactcgctgctgctcaaggaccatcaggacatttatctgatttccagaacgaccccggcatggcagcccgagacagtcagtgtacctctggtcccagctcttacgcccaatccttagaaggacctggtaaagatagctcattcagccctggaaaggaagagaagatctctgattccaaggacttctccgaccatctggattcaggatgtagccaaaagccctggactgaacagagtctcggtccagagagaggagatcaagtgcccatgaatccttctcagagtttattgcccgagagagggggtagcgaccctcaacgacagcgtcatctcgaaaacagtgaagaacctcctgagagacgatccagagtctcgagtgtgattcgggagaagcttcaagaagtgctgcaggacctcggtctcgggcctgaagcctctctatcaacggccccaagttgtcaccagcagacttggaaaaactcggccgcattttcaccccagaaaatgcccttgagtaaagaattgggattctcgccctatatggtcagacggagacgcgcggcccagcgagctcgctcccacttccccgggagcgcaccctccagcgtggggcacagggctaaccgtactgtccccggagcccactcacgcttgcacgtgcaaaatggggacagtcccagtctggcgccccagactacagactctcgggttaggcgcccttctagtaggaaacccagcctgccgtcagatcctcaagatcgccctggcactctggaaggatctaagcagtcccagactgaaccagagggggccagaggctcaaaagccgcttttctcaggcagccttcgggcagcggccgcgccccttcaccggcggcaccttgtctttccaaagcttcacctgatttaccagaacaatggcaactatggccccccgtaccttccgggtgcgctagtctgtccagtcagcacagttactttgacacggagtcaagctcttctgacgagttcttctgccgttgtcacaggccttattgtgaaatctgttttcaatcttcgtccgactcatccgattcaggtacaagcgatactgatccagaacccactggcggcttggcctcttgggagaagttgtgggcaagatcaaaaccaatcgtcaactttaaagacgacctgaagcctacgctagtgtag

SEQ ID NO: 65898 - DNA, 2433 bp, Artificial Sequence
  derived and/or modified sequence
atggagcctgagatcaactgcagcgagctgtgtgacagcttccctggccaggagctggacagaagacccctgcatgacctgtgcaagaccaccatcaccagcagccaccacagcagcaagaccatcagcagcctgagccctgtgctgctgggcatcgtgtggaccttcctgagctgtggcctgctgctgatcctcttcttcctggccttcaccatccactgcaggaagaacagaattgtgaagatgagcagccccaacctgaacatcgtgaccctgctgggcagctgcctgacctacagcagcgcctacctgtttggcatccaggatgtgctggtgggcagctccatggagaccctcatccagacccggctgtccatgctgtgcatcggcaccagcctggtgtttggccccatcctgggcaagtcctggaggctgtacaaggtgttcacccagagggtgcctgacaagagggtcatcatcaaggacctgcagctgctgggcctggtggccgccctgctgatggctgatgtgatcctgctgatgacctgggtgctgacagaccccatccagtgcctgcagatcctgtctgtgacaggcaaggatgtgtcctgcaccagcaccagcacccacttctgtgccagccgctacagtgatgtgtggatcgccctgatctggggctgcaagggcctgctgctgctgtatggagcctacctggccggcctgaccggccacgtgagcagcccccctgtgaaccagagcctgaccatcatggtgggcgtgaacctgctggtgctggccgccggcctgctgtttgtggtgacccgctacctgcacagctggcccaacctggtgtttggcctgaccagcggcggcatctttgtgtgcaccaccaccatcaactgcttcatcttcatcccccagctgaagcagtggaaggcctttgaggaggagaaccagaccatccggaggatggccaagtacttcagcacccccaacaagagcttccacacccagtatggagaggaggagaactgccaccccagaggagagaagagctccatggagcggctgctgacagagaagaatgctgtgattgagagcctgcaggagcaggtgaacaatgccaaggagaagatcgtgcggctgatgtctgctgagtgcacctatgacctgcctgagggcgccgcccccccagccagcagccccaacaaggatgtgcaggccgtggcctctgtgcacaccctggccgccgcccagggccccagcggccacctgagtgacttccagaatgaccccggcatggccgcccgggacagccagtgcaccagcggccccagcagctatgcccagagcctggagggccctgggaaggacagcagcttcagccctgggaaggaggagaagatcagtgacagcaaggacttcagtgaccacctggacagcggctgcagccagaagccctggacagagcagagcctgggccctgagcggggggaccaggtgcccatgaaccccagccagagcctgctgcctgagcggggcggcagtgacccccagaggcagaggcacctggagaacagcgaggagcccccagagaggaggagccgggtgtcctctgtcatccgggagaagctgcaggaggtgctgcaggacctgggcctgggccctgaggccagcctgagcacagcccccagctgccaccagcagacctggaagaacagcgctgccttcagcccccagaagatgcccctgagcaaggagctgggcttcagcccctacatggtgagaagaagaagagctgcccagagggcccggagccacttccctggcagcgcccccagctctgtgggccaccgggccaacagaacagtgcctggggcccacagccggctgcacgtgcagaatggagacagccccagcctggccccccagaccacagacagccgggtgagaagacccagcagcaggaagcccagcctgcccagcgacccccaggaccggcccggcaccctggagggcagcaagcagagccagacagagcctgagggcgcccggggcagcaaggccgccttcctgcggcagcccagcggcagcggccgggcccccagccctgctgccccctgcctgagcaaggccagcccagacctgcctgagcagtggcagctgtggccccctgtgcccagcggctgtgccagcctgagcagccagcacagctactttgacacagagagcagcagcagtgatgagttcttctgccgctgccaccggccctactgtgagatctgcttccagagcagcagtgacagcagtgacagcggcaccagtgacacagatcctgagcccaccggcggcctggcctcctgggagaagctgtgggcccggagcaagcccatcgtgaacttcaaggatgacctgaagcccaccctggtgtag

SEQ ID NO: 65899 - DNA, 2433 bp, Artificial Sequence
  derived and/or modified sequence
atggagcccgagatcaactgcagcgagctgtgcgacagcttccccggccaggagctggatcgtcgaccgctgcatgacctttgcaaaacgaccatcacctcttcccatcattcctctaagactatctctagcctctcgcccgtactcctggggatcgtttggacctttctaagctgcggtctccttctgattcttttcttccttgcttttactatacattgcaggaagaacagaattgtgaagatgtccagtcccaacctgaacatcgtgaccttactcggatcttgtctaacttattcgtccgcttacctgtttggaattcaagatgtgttagtgggctccagcatggaaactttaatacagacccgattgagcatgctctgcatcggaacatctttagttttcggtccaatccttggcaagtcatggagactctataaggtcttcacccaaagggttcctgataagagggtgatcatcaaagacctgcaactgctcggattagtggctgctctgctcatggcagatgtgatcctactgatgacctgggttcttactgatcccattcaatgccttcagattctttcagtcaccggaaaagatgtctcttgcactagtacctccactcacttttgtgccagtcgatatagcgacgtgtggattgccctgatttggggttgcaaaggattgttgttgctgtacggggcgtatctggcggggctaacaggtcatgtatcctcccctccagtgaaccagtccctgacgatcatggtgggtgtgaacttgctggttcttgccgctggtctcttattcgtggttacccggtacctccacagctggcctaaccttgtgttcgggctaacatcaggtggaatcttcgtctgcacgaccacaataaattgtttcatatttataccacagttgaagcagtggaaggccttcgaagaagagaatcaaaccattcgcagaatggccaagtacttctccacccccaataagagttttcatacacagtatggtgaggaggagaactgtcacccaagaggagagaagtcgtcaatggagcgattgcttacggagaaaaacgccgtcatagagtctctccaggaacaggttaacaatgctaaagagaaaatagttagactgatgtcggccgaatgcacatacgatctccctgaaggcgccgcgccacctgcctcctcacccaataaagatgtgcaggcagtcgcctccgtgcacaccctggcagccgcccagggaccttctggccacctatcagactttcagaacgaccctgggatggcggccagggacagccagtgcactagcggtcccagttcatatgcacaatcccttgaaggacctggtaaagattcttcattctctccaggcaaagaagagaagatttcggactccaaggactttagcgaccatcttgactcaggatgcagccaaaaaccttggaccgagcagtctcttggccccgagcgcggtgaccaagtacccatgaatccctcccagtcgttgctccccgagcgcggcggcagcgaccctcagcgacagcgccacctggagaactccgaagagccccctgagcgtcgcagtcgagtgtcctctgttattcgagagaaactgcaggaggtgcttcaggacttggggctgggacccgaggctagcctctcgacagcgccatcgtgccaccaacaaacatggaaaaattccgccgcctttagcccccaaaagatgcctttgagcaaggagctggggttcagtccctatatggtgagaagaaggagggcggcacagagagccagaagtcattttcccgggtccgccccttccagtgttgggcaccgtgcgaaccgcaccgtccccggggcccattcgcgactacacgtccagaatggggacagccctagcctagccccccagaccaccgactcacgggtcagaaggcctagcagccggaagccatccttacccagtgatccgcaggatcgacccgggacattggagggcagcaaacaatcgcagacagagcccgagggcgcgcgaggctcaaaagcggcgtttctcagacagccgtctggcagcggccgcgccccttcgcccgcggctccttgcctgtcaaaggcctcccccgacctcccagagcaatggcagctatggccacctgtaccctccggatgtgcctccttaagtagccagcattcctacttcgacaccgagagttccagtagtgacgaatttttttgccgttgccatcgcccttattgcgagatttgcttccagtcatccagtgacagctcagattctgggacctcagatacagacccagagccaacaggaggtctggcctcatgggagaagctctgggccagaagcaaaccaatcgtaaattttaaggatgaccttaagcccacactcgtgtag

SEQ ID NO: 65900 - DNA, 2433 bp, Artificial Sequence
  derived and/or modified sequence
atggagcccgagataaattgtagcgaactctgcgattcattccccggacaggaactggaccgtcgtcctctgcacgatctgtgtaaaactaccatcactagctcccatcattcatcaaagacaatctctagcctcagccccgtgttgctgggaatagtatggacttttttgtcatgcggtcttctgctcatcctgttctttttggcctttactattcattgccgcaaaaatcgaatagttaagatgtcgtctcccaatctaaacatcgtcaccttgctcggctcatgcctgacttatagtagtgcctacctctttggaatccaagatgtcctggtgggatcttccatggagacacttatccagacacgcctgagcatgctgtgtatcgggaccagccttgtgtttgggcctatcctcggcaaaagttggcgcttgtacaaagtctttactcagagagttccggacaagagagtaattatcaaagaccttcagcttctcgggctcgtggctgccttacttatggcagatgtgatcctccttatgacctgggtcttgaccgatcctatccagtgcctgcagattctcagcgtaaccggcaaggacgttagctgcacaagcacctctacacacttctgtgctagcaggtattcagacgtatggatcgccctgatctggggctgcaaaggtttgttactactttatggagcgtacctggctgggttaacaggacacgtctccagtcctccagtgaatcagagcctcaccatcatggtcggggtcaacctgcttgtcctcgctgccggactgctattcgtcgtaacaaggtacctccactcatggcccaacctcgttttcggactaacttcaggagggatcttcgtttgtacgaccaccatcaactgttttattttcatcccccagcttaaacagtggaaagctttcgaggaggagaaccagacaattcgacggatggcaaaatactttagcaccccaaacaagagttttcatacacagtacggcgaagaggagaattgtcaccctcgcggagaaaagagtagcatggaacgcctgctcactgaaaaaaacgcagtgatcgaatccttgcaagaacaagtgaataacgccaaggagaaaattgtgagacttatgtccgctgagtgcacgtatgacctgcctgaaggcgcagccccacctgccagctcaccaaacaaggacgttcaggctgtggcatccgtccacacgctcgccgcagcccaagggccttccggtcaccttagcgatttccagaatgatcctggtatggccgctagagactctcagtgtacgtccgggccttcctcttatgcccagagcctcgaggggcctggaaaagattcaagcttcagccctggaaaagaagagaaaattagtgatagcaaggacttctccgaccatctcgactccgggtgctcacaaaaaccgtggaccgagcagtcactgggacctgaaagaggagaccaggtaccaatgaatccttcacagagcctactccctgagaggggcggaagcgatcctcagcgccagaggcatctggagaacagtgaagagccacctgagcgacgtagccgggtgtcgagcgtcatccgcgagaagcttcaggaagttctgcaagacctagggctgggacctgaggcatcactctctacggccccttcgtgtcaccagcagacgtggaaaaattcagcggctttcagcccacagaagatgccactgtctaaagaactcgggtttagcccttatatggtccgcagacgcagggcagcacaaagggctcgctctcatttccctggctccgcaccaagcagcgtaggacatagagctaatcgaactgtgcccggagctcactctcggttgcacgtgcaaaacggagattcaccttctttagctccacagacaaccgacagccgcgtacgcaggcccagcagccgcaaacctagcctgcccagcgatcctcaggaccggcctgggaccttggaaggatccaagcagtcccagactgaaccagaaggcgctagagggtctaaggctgcgttcctgcggcaacccagcggcagcgggcgagccccatcacccgcagcaccatgtctctctaaggcttcgccagacttaccagagcaatggcagctgtggccaccagtcccgtcaggatgcgcctcattgtccagtcaacactcatactttgacaccgaaagctcaagtagtgacgaattcttctgtcgttgtcaccgcccttactgtgaaatttgtttccagtcttcaagcgactccagcgactccggcacatctgacaccgaccctgagcctaccggtggcctcgcctcttgggagaagctttgggctagatctaagcccatcgtgaattttaaagatgatctaaagcctactcttgtctag

SEQ ID NO: 65901 - DNA, 2433 bp, Artificial Sequence
  derived and/or modified sequence
atggagcccgagatcaactgcagcgagctgtgcgacagcttccccggccaggagctggacagaagacccctgcacgacctgtgcaagaccaccatcaccagcagccaccacagcagcaagaccatcagcagcctgagccccgtgctgctgggcatcgtgtggaccttcctgagctgcggcctgctgctgatcctgttcttcctggccttcaccatccactgcagaaagaacagaatcgtgaagatgagcagccccaacctgaacatcgtgaccctgctgggcagctgcctgacctacagcagcgcctacctgttcggcatccaggacgtgctggtgggcagcagcatggagaccctgatccagaccagactgagcatgctgtgcatcggcaccagcctggtgttcggccccatcctgggcaagagctggagactgtacaaggtgttcacccagagagtgcccgacaagagagtgatcatcaaggacctgcagctgctgggcctggtggccgccctgctgatggccgacgtgatcctgctgatgacctgggtgctgaccgaccccatccagtgcctgcagatcctgagcgtgaccggcaaggacgtgagctgcaccagcaccagcacccacttctgcgccagcagatacagcgacgtgtggatcgccctgatctggggctgcaagggcctgctgctgctgtacggcgcctacctggccggcctgaccggccacgtgagcagcccccccgtgaaccagagcctgaccatcatggtgggcgtgaacctgctggtgctggccgccggcctgctgttcgtggtgaccagatacctgcacagctggcccaacctggtgttcggcctgaccagcggcggcatcttcgtgtgcaccaccaccatcaactgcttcatcttcatcccccagctgaagcagtggaaggccttcgaggaggagaaccagaccatcagaagaatggccaagtacttcagcacccccaacaagagcttccacacccagtacggcgaggaggagaactgccaccccagaggcgagaagagcagcatggagagactgctgaccgagaagaacgccgtgatcgagagcctgcaggagcaggtgaacaacgccaaggagaagatcgtgagactgatgagcgccgagtgcacctacgacctgcccgagggcgccgccccccccgccagcagccccaacaaggacgtgcaggccgtggccagcgtgcacaccctggccgccgcccagggccccagcggccacctgagcgacttccagaacgaccccggcatggccgccagagacagccagtgcaccagcggccccagcagctacgcccagagcctggagggccccggcaaggacagcagcttcagccccggcaaggaggagaagatcagcgacagcaaggacttcagcgaccacctggacagcggctgcagccagaagccctggaccgagcagagcctgggccccgagagaggcgaccaggtgcccatgaaccccagccagagcctgctgcccgagagaggcggcagcgacccccagagacagagacacctggagaacagcgaggagccccccgagagaagaagcagagtgagcagcgtgatcagagagaagctgcaggaggtgctgcaggacctgggcctgggccccgaggccagcctgagcaccgcccccagctgccaccagcagacctggaagaacagcgccgccttcagcccccagaagatgcccctgagcaaggagctgggcttcagcccctacatggtgagaagaagaagagccgcccagagagccagaagccacttccccggcagcgcccccagcagcgtgggccacagagccaacagaaccgtgcccggcgcccacagcagactgcacgtgcagaacggcgacagccccagcctggccccccagaccaccgacagcagagtgagaagacccagcagcagaaagcccagcctgcccagcgacccccaggacagacccggcaccctggagggcagcaagcagagccagaccgagcccgagggcgccagaggcagcaaggccgccttcctgagacagcccagcggcagcggcagagcccccagccccgccgccccctgcctgagcaaggccagccccgacctgcccgagcagtggcagctgtggccccccgtgcccagcggctgcgccagcctgagcagccagcacagctacttcgacaccgagagcagcagcagcgacgagttcttctgcagatgccacagaccctactgcgagatctgcttccagagcagcagcgacagcagcgacagcggcaccagcgacaccgaccccgagcccaccggcggcctggccagctgggagaagctgtgggccagaagcaagcccatcgtgaacttcaaggacgacctgaagcccaccctggtgtag

SEQ ID NO: 65902 - protein, 2743 aa, Artificial Sequence
  derived and/or modified sequence
MSDKMSSFLHIGDICSLYAEGSTNGFISTLGLVDDRCVVQPETGDLNNPPKKFRDCLFKLCPMNRYSAQKQFWKAAKPGANSTTDAVLLNKLHHAADLEKKQNETENRKLLGTVIQYGNVIQLLHLKSNKYLTVNKRLPALLEKNAMRVTLDEAGNEGSWFYIQPFYKLRSIGDSVVIGDKVVLNPVNAGQPLHASSHQLVDNPGCNEVNSVNCNTSWKIVLFMKWSDNKDDILKGGDVVRLFHAEQEKFLTCDEHRKKQHVFLRTTGRQSATSATSSKALWEVEVVQHDPCRGGAGYWNSLFRFKHLATGHYLAAEVDPDQDASRSRLRNAQEKMVYSLVSVPEGNDISSIFELDPTTLRGGDSLVPRNSYVRLRHLCTNTWVHSTNIPIDKEEEKPVMLKIGTSPVKEDKEAFAIVPVSPAEVRDLDFANDASKVLGSIAGKLEKGTITQNERRSVTKLLEDLVYFVTGGTNSGQDVLEVVFSKPNRERQKLMREQNILKQIFKLLQAPFTDCGDGPMLRLEELGDQRHAPFRHICRLCYRVLRHSQQDYRKNQEYIAKQFGFMQKQIGYDVLAEDTITALLHNNRKLLEKHITAAEIDTFVSLVRKNREPRFLDYLSDLCVSMNKSIPVTQELICKAVLNPTNADILIETKLVLSRFEFEGVSSTGENALEAGEDEEEVWLFWRDSNKEIRSKSVRELAQDAKEGQKEDRDVLSYYRYQLNLFARMCLDRQYLAINEISGQLDVDLILRCMSDENLPYDLRASFCRLMLHMHVDRDPQEQVTPVKYARLWSEIPSEIAIDDYDSSGASKDEIKERFAQTMEFVEEYLRDVVCQRFPFSDKEKNKLTFEVVNLARNLIYFGFYNFSDLLRLTKILLAILDCVHVTTIFPISKMAKGEENKGNNDVEKLKSSNVMRSIHGVGELMTQVVLRGGGFLPMTPMAAAPEGNVKQAEPEKEDIMVMDTKLKIIEILQFILNVRLDYRISCLLCIFKREFDESNSQTSETSSGNSSQEGPSNVPGALDFEHIEEQAEGIFGGSEENTPLDLDDHGGRTFLRVLLHLTMHDYPPLVSGALQLLFRHFSQRQEVLQAFKQVQLLVTSQDVDNYKQIKQDLDQLRSIVEKSELWVYKGQGPDETMDGASGENEHKKTEEGNNKPQKHESTSSYNYRVVKEILIRLSKLCVQESASVRKSRKQQQRLLRNMGAHAVVLELLQIPYEKAEDTKMQEIMRLAHEFLQNFCAGNQQNQALLHKHINLFLNPGILEAVTMQHIFMNNFQLCSEINERVVQHFVHCIETHGRNVQYIKFLQTIVKAEGKFIKKCQDMVMAELVNSGEDVLVFYNDRASFQTLIQMMRSERDRMDENSPLMYHIHLVELLAVCTEGKNVYTEIKCNSLLPLDDIVRVVTHEDCIPEVKIAYINFLNHCYVDTEVEMKEIYTSNHMWKLFENFLVDICRACNNTSDRKHADSILEKYVTEIVMSIVTTFFSSPFSDQSTTLQTRQPVFVQLLQGVFRVYHCNWLMPSQKASVESCIRVLSDVAKSRAIAIPVDLDSQVNNLFLKSHSIVQKTAMNWRLSARNAARRDSVLAASRDYRNIIERLQDIVSALEDRLRPLVQAELSVLVDVLHRPELLFPENTDARRKCESGGFICKLIKHTKQLLEENEEKLCIKVLQTLREMMTKDRGYGEKLISIDELDNAELPPAPDSENATEELEPSPPLRQLEDHKRGEALRQVLVNRYYGNVRPSGRRESLTSFGNGPLSAGGPGKPGGGGGGSGSSSMSRGEMSLAEVQCHLDKEGASNLVIDLIMNASSDRVFHESILLAIALLEGGNTTIQHSFFCRLTEDKKSEKFFKVFYDRMKVAQQEIKATVTVNTSDLGNKKKDDEVDRDAPSRKKAKEPTTQITEEVRDQLLEASAATRKAFTTFRREADPDDHYQPGEGTQATADKAKDDLEMSAVITIMQPILRFLQLLCENHNRDLQNFLRCQNNKTNYNLVCETLQFLDCICGSTTGGLGLLGLYINEKNVALINQTLESLTEYCQGPCHENQNCIATHESNGIDIITALILNDINPLGKKRMDLVLELKNNASKLLLAIMESRHDSENAERILYNMRPKELVEVIKKAYMQGEVEFEDGENGEDGAASPRNVGHNIYILAHQLARHNKELQSMLKPGGQVDGDEALEFYAKHTAQIEIVRLDRTMEQIVFPVPSICEFLTKESKLRIYYTTERDEQGSKINDFFLRSEDLFNEMNWQKKLRAQPVLYWCARNMSFWSSISFNLAVLMNLLVAFFYPFKGVRGGTLEPHWSGLLWTAMLISLAIVIALPKPHGIRALIASTILRLIFSVGLQPTLFLLGAFNVCNKIIFLMSFVGNCGTFTRGYRAMVLDVEFLYHLLYLVICAMGLFVHEFFYSLLLFDLVYREETLLNVIKSVTRNGRSIILTAVLALILVYLFSIVGYLFFKDDFILEVDRLPNETAVPETGESLASEFLFSDVCRVESGENCSSPAPREELVPAEETEQDKEHTCETLLMCIVTVLSHGLRSGGGVGDVLRKPSKEEPLFAARVIYDLLFFFMVIIIVLNLIFGVIIDTFADLRSEKQKKEEILKTTCFICGLERDKFDNKTVTFEEHIKEEHNMWHYLCFIVLVKVKDSTEYTGPESYVAEMIKERNLDWFPRMRAMSLVSSDSEGEQNELRNLQEKLESTMKLVTNLSGQLSELKDQMTEQRKQKQRIGLLGHPPHMNVNPQQPA

SEQ ID NO: 65903 - DNA, 8232 bp, Artificial Sequence
  derived and/or modified sequence
atgtctgacaaaatgagctctttcctacacatcggggatatctgttctctctacgcggagggatccactaacggcttcatctcaacgctcgggctggtggatgacagatgcgtcgtccaaccagagacaggggatctaaacaaccctccaaagaaattccgggactgcctcttcaagctgtgccccatgaaccgatatagcgcccagaaacaattttggaaagcagccaagcccggcgctaactcgactacagacgcggtcctcttaaataagctccatcatgctgccgaccttgagaagaagcaaaatgagactgagaataggaagctcctgggtaccgtgattcagtacggcaatgtgattcagttgttgcatctcaaatcaaacaagtatctgacagttaataagagactgccagcattgctggagaagaatgccatgagagtgactctcgatgaggccgggaatgagggaagttggttttacattcagccattctacaaactgcggagtattggagactcagtagtgatcggggataaagtggtcctcaatcccgtaaatgccggccagccgctgcacgcgtcaagtcaccagcttgtagacaatccaggatgtaatgaagtgaatagcgttaactgcaacacctcatggaagattgtgctatttatgaagtggagcgacaacaaggacgatattcttaagggaggcgacgtcgttcgtctgttccacgccgagcaggagaagtttctgacctgtgacgagcatcgcaaaaagcagcacgtgttcctgagaacaacggggagacagtcagccactagcgcgacctcaagtaaggctctgtgggaggtcgaggtggtccagcacgacccctgcagagggggcgccggctactggaacagtctgtttcgcttcaaacacctggcaaccggtcactacttggcagccgaagtggaccctgatcaggatgcttcaaggtcacgattacggaacgctcaggagaaaatggtctactcccttgtgtctgtccccgaaggtaacgatatttccagtatcttcgaattggaccccacgacccttaggggaggtgattccctcgtgccccggaacagttatgtgaggctgaggcatctgtgcaccaatacatgggttcactccacaaacatcccgatcgataaagaagaggagaagccagtcatgctgaagatcggcacctcaccagtcaaagaggataaggaagccttcgccattgtgccagtgtctcctgctgaggtgagagacctggatttcgccaatgatgcctcaaaggttctcggatccatcgccggaaagttagagaagggtacgataacccagaatgagaggcgcagtgtgactaagctgttggaggatctggtctatttcgtcacagggggaactaactccggccaggacgtccttgaggtggtgttcagcaagccaaaccgcgaaagacaaaagcttatgagagaacagaacatccttaaacagatcttcaagctgcttcaggcacccttcacagattgcggcgacggtcccatgctgagacttgaagaacttggcgaccaaagacacgcccctttccgacatatctgtcgtctgtgctacagggtgctgaggcactcacaacaggactaccgtaagaatcaagaatacatcgccaaacagttcgggttcatgcagaagcagattggatacgacgttttggcagaggacaccatcacagccttacttcacaacaaccgtaagctcttggaaaagcatattaccgcggccgagatcgacacatttgtatcactggttcggaagaatagggagcccaggtttttggactatttaagcgatctgtgcgtgagcatgaacaaatccatccccgtcacccaggagttgatatgcaaagcagtgcttaatccaaccaacgccgacatccttattgaaaccaaactggtgctgagcagatttgagtttgaaggggtcagctctactggagaaaacgcccttgaggcaggcgaggacgaggaggaggtttggttgttttggcgagactctaataaggaaataagatctaaaagcgtccgcgagctggctcaagatgccaaagagggacagaaggaggatcgcgacgtgttgagttattaccggtaccaactgaacttgttcgctcggatgtgcctggacaggcaatatttagcaataaacgagatctccgggcagctggacgtcgaccttatcctccgctgtatgtccgatgagaatctcccatacgatctgcgcgccagcttttgcagacttatgctgcacatgcatgttgacagggacccccaggaacaggtgactcccgtcaagtatgctagattgtggtcggagatcccaagcgaaattgctatagatgactacgactcttccggcgcttctaaggacgagatcaaagagaggttcgcccagacaatggagttcgttgaagagtacttgagggatgttgtatgtcagcggttcccattttctgacaaagaaaaaaataagcttactttcgaggttgtgaacctggcgaggaacttgatctactttggcttttacaatttctccgatcttctgcgcctcaccaaaattttgctggccatcctggactgtgtgcacgtcacaaccatattcccaatcagcaagatggccaaaggagaggagaataaagggaataacgatgtcgaaaaactgaaaagcagtaacgtgatgcgctcaattcatggtgtgggcgaactcatgacccaggtcgtccttcgcggtggaggcttcctccctatgactcctatggctgctgcaccagaaggcaacgtcaagcaagcagaaccagagaaggaggatattatggtgatggatactaagcttaagattattgagatcctgcagtttattctgaacgtaaggctggattataggatttcttgtctcttgtgtattttcaagagggagttcgacgagtcaaattcacaaacctccgagacgagctctggcaattcatcccaggagggtccgagcaacgtgcccggtgcattggatttcgaacatatcgaggaacaggcggaggggatttttggagggagcgaagagaatacccccctggacctggatgaccacggtggccgtacattcctacgtgtcttactgcacttgactatgcatgactatccaccactggtcagcggagccctgcaattattattcaggcatttctcacagagacaagaggttttacaggccttcaaacaagtacagctgctggtgacgtctcaggacgtagacaactacaaacagataaagcaggaccttgaccagctccgaagcattgtggaaaagtcagagctttgggtgtataaggggcagggacccgatgaaacaatggacggcgcaagcggtgagaatgagcacaaaaagacggaggaaggcaacaacaagcctcagaaacatgagagcacaagttcctataactatcgcgtagtgaaagagatcctgatccgtctgtctaaactgtgcgtgcaagagtcagcttctgtgagaaaatcaaggaagcagcagcagcggctgcttcgaaacatgggcgcgcatgccgtcgtgttagagctactgcaaattccttacgagaaggcagaagacaccaaaatgcaagagattatgcgattggcgcacgagtttctgcagaatttctgcgccgggaaccagcagaatcaggctttgctgcacaaacacatcaacctattcttaaacccaggcattttggaggcggtgacaatgcagcacatattcatgaacaattttcagctctgctcggaaatcaacgagcgtgtcgtgcaacactttgtgcactgtatcgagacacacggacgtaatgtgcagtacatcaagttcctccagactattgtgaaggcagagggtaagtttattaagaaatgtcaggacatggtgatggctgaacttgttaactccggggaagacgtgttagtgttctataatgatagagcttcttttcagacacttatacagatgatgcggagtgagcgcgatcgtatggacgaaaacagccctctcatgtatcatatccaccttgtagagctgctcgccgtgtgcactgaaggtaaaaatgtttacacagagatcaagtgtaactctctcctcccactggacgatatagttagggtggtgacgcatgaggattgcatccctgaggtgaaaatcgcctacatcaactttctcaatcactgctacgtggacactgaggttgaaatgaaggagatctacacttccaatcacatgtggaagctttttgagaatttcttagttgatatttgccgcgcttgtaataatacatctgacagaaagcatgctgattcaatcttagagaagtatgttactgaaatcgtgatgagcattgtgactacgttcttctcctctccattcagcgatcagtcgacaaccctgcagactcgtcaacctgtcttcgttcagcttctgcagggcgttttcagggtgtaccattgcaactggctgatgccgagtcagaaagcgtctgtggagtcatgcatacgggtgctcagcgatgtcgcaaagagccgagcaatcgccatacctgttgatttggattcacaggttaacaacctctttctcaaaagtcatagtattgtgcaaaaaaccgctatgaactggcgattatccgctaggaacgctgctaggagggactcagtgcttgcagccagccgtgactataggaacatcatcgagcgcttacaggatatcgtgagcgccctggaggatagattacgaccactggtgcaagcagaattgtctgttttggtcgacgtgcttcacagacccgagctgctattccccgagaacaccgacgcccggagaaaatgtgaatctgggggttttatatgtaaattgatcaagcacacaaagcagctgttggaagaaaatgaggaaaaattatgcatcaaggtcctacaaaccctccgggagatgatgaccaaagaccggggatacggagagaagttaatttctatcgacgagctcgataatgccgaactgcctcctgcacctgacagtgagaacgccacagaggaactggaaccttcacctcccctgaggcagcttgaagatcataaacggggcgaggcactgcggcaggtcttggtcaacagatattacggaaacgtacgaccatcaggtcgtagggagtcactgaccagcttcgggaacggccccctctccgcaggcggaccgggaaaaccgggaggcggaggcggcggcagcggatcttctagcatgtcgaggggcgaaatgtctctcgccgaagtgcagtgccacctcgacaaggaaggcgcaagcaatctggttattgacctgataatgaacgcgagttcggaccgagtgtttcacgaatccatcctgcttgcgatcgcattgctggagggcggaaacacgacaatccagcacagtttcttttgtaggctgaccgaggataagaagtctgagaagttttttaaggtgttttatgatcgaatgaaagttgcgcagcaggagattaaggccacggtgaccgtcaacaccagcgacctgggaaataagaagaaagacgacgaagtggatagggacgccccctcacgcaagaaggcaaaggagcctactacgcagataaccgaggaagtccgggaccagcttctggaagcatcggcagccactaggaaagccttcacgacattccgacgtgaggcagaccctgacgaccactaccagccaggcgaaggcacccaggcaacggcagataaggccaaagatgacctcgaaatgtccgctgtcattaccattatgcagcccatcctgcgttttttacagttactttgcgagaaccacaacagagatttgcagaattttctcagatgccagaataacaagactaactacaatctggtgtgtgaaaccctgcagtttctggactgcatctgcggatcaactacagggggactgggacttctgggcctttacattaatgaaaagaacgtcgcccttattaatcagactctcgagagtctgacggagtattgccaggggccatgtcacgagaatcaaaattgtatagcaacccacgagtctaatggaattgacatcataacagccctgatacttaacgatattaatcccttgggtaaaaagagaatggatcttgtgctcgaactgaaaaacaacgcgagcaaactgctgttggccattatggagagcaggcatgattccgagaatgcggagaggatcttgtataatatgcgccctaaagagctggtggaagtgatcaagaaagcttatatgcagggcgaagttgaatttgaggacggtgaaaatggggaggacggtgcagcgagcccacgtaacgttggacacaatatctatattctcgctcaccagctggctcgccataacaaagagctgcagtccatgttaaagcctggtggtcaggtcgatggggatgaggccctggagttttacgccaagcacacagctcaaattgagatcgtaagactagatcgaacaatggagcagattgtgtttccggtgccctccatctgcgaatttttgacaaaagaatctaaactgaggatctattatacaacggaaagggacgagcagggatccaagattaacgacttttttctgaggtctgaagatctgttcaacgagatgaattggcagaagaagttgagagctcagccggtcctgtactggtgtgcacgcaacatgtccttttggtcttcaatatctttcaacctggccgtcttgatgaatcttctagtggcattcttctacccctttaaaggtgtgcgcggtggaaccctcgagcctcactggagtggactgttgtggacagctatgttgatctcccttgccattgtcattgcgctgccgaaaccacacgggatccgggcactgattgcgtctaccatacttcgcttgatatttagcgtgggccttcaaccaaccctatttctacttggagccttcaatgtgtgcaataaaataatctttctaatgtcttttgtcggcaactgcggcacatttacgcgaggatatcgggctatggtgcttgacgtggagtttctttatcacctgctgtatcttgtcatctgcgcgatgggcctctttgtgcatgaattcttttacagtctcctgctcttcgatttggtctacagagaggagaccctcttaaacgtgatcaagtctgtcaccaggaatggccgttctataatactcacagcagtgctcgcactcatactggtatacctgtttagtatcgtggggtacctattcttcaaagatgactttattttagaagtcgatagactgcctaacgagaccgctgtgcccgaaaccggggagtcactggctagcgagttcctgttctctgatgtctgcagggtcgaatcaggtgagaattgcagctcccccgcccctagggaagagctagtgcctgccgaggaaacggagcaggacaaggaacacacttgcgaaaccttattgatgtgtattgtaacagtactgagtcacggactgagatccggaggcggtgtgggggacgtgcttaggaaaccatcaaaggaggagccgctgttcgctgccagagtaatatacgacttgctttttttctttatggtgatcatcattgtcttaaacttaatcttcggcgtaatcatcgatacatttgcggatctccgatcggaaaagcaaaaaaaagaggagatccttaagacgacttgctttatctgcggcttggagagagataaattcgataacaagaccgtcacattcgaggagcacatcaaagaggagcacaacatgtggcactacctttgcttcatcgtcctcgtcaaggtgaaggactccacagaatataccggtcccgagtcctacgtggccgagatgataaaggagcgcaatctggactggttcccaaggatgcgcgccatgtctctcgtgtcctccgatagcgagggcgagcagaacgaactgcggaatttgcaagaaaagctcgagtccaccatgaagctcgtgacaaacctgtctggccagcttagcgagctcaaggaccagatgaccgagcagcggaaacagaagcaaagaattggactcctgggtcaccccccacatatgaacgtgaatccccagcaacctgcatag

SEQ ID NO: 65904 - DNA, 8232 bp, Artificial Sequence
  derived and/or modified sequence
atgagtgataaaatgagtagttttttacatattggagatatttgttccctgtacgccgaggggtctactaatggcttcatcagcaccctcggactggtcgatgaccgatgtgtagtccagcctgagacaggtgatcttaacaacccacctaaaaaatttcgcgactgcttgtttaagctgtgccctatgaacaggtattctgctcagaaacagttctggaaagctgccaagccgggcgcaaatagtacaacggatgctgtgctcctgaataagttacaccatgccgccgatttggagaaaaaacagaacgagaccgaaaaccggaaattgcttggcaccgtgatccagtatggaaatgttattcagctactccacctgaagagtaataagtacttgactgttaataaacgattgcctgctttgcttgaaaagaatgccatgagagtaactctagacgaagccggcaacgaggggtcgtggttctatattcagcccttttacaaattgaggtcaataggagattcggtggtgattggagataaggtagttttgaatcccgttaatgctggtcaaccactccatgccagctctcaccagctcgtggataacccgggctgcaatgaggtaaatagtgtcaattgcaataccagctggaagatagtgctattcatgaagtggtctgacaacaaggacgacattctgaagggcggcgacgtggtgagactattccacgcagagcaggaaaaattcttgacctgcgacgagcataggaagaagcagcatgttttcttgcgtacgaccgggagacagagcgctacaagcgccactagctcaaaggccctgtgggaggtggaggtggtccagcatgacccctgccgcggcggtgccggatactggaattcactattccgattcaagcacctggccacaggccactaccttgccgcagaagtggacccagatcaggatgcctctagatccagacttagaaacgcccaggagaaaatggtgtattctcttgttagcgtaccagaaggtaatgatatctcttctatctttgagcttgacccaacaacactgcgtgggggcgactcattagtacctcgtaactcttatgtgcgactgcgccacctgtgcaccaatacatgggtgcactctaccaacattccgatcgacaaagaggaggagaaacccgtgatgctcaagataggtacctcaccagtcaaggaggacaaagaggcctttgccatcgtccctgtgtcgcccgccgaggtgagggatctcgattttgcaaatgacgcttccaaagtgctgggtagcatcgctggcaaactggaaaaggggactattacacagaacgagaggaggtcagtcacaaaactgctggaagatcttgtttattttgtaaccggggggaccaactctgggcaggatgtgctggaagtggtcttctccaagcccaatagagagcgacagaaactgatgagagagcagaacattcttaagcaaatctttaagctgttgcaggcaccgttcaccgactgcggcgatggtcctatgcttagattagaggaattaggtgaccagcgccatgcaccatttcgccacatttgccggttgtgttaccgcgtgcttagacatagtcagcaagactatcgtaaaaaccaagagtatatcgctaagcaattcggttttatgcagaagcagatcggttacgatgttttggccgaggataccattaccgctctgcttcacaacaaccgtaagctgctcgaaaagcatataaccgccgctgaaatagatacttttgtttcccttgtaaggaagaatagggagccacgtttcctggattatcttagtgacctctgcgtgagcatgaataaatctattcctgttacacaggagctcatttgcaaagccgtgctcaacccaaccaacgccgatattctgatcgaaactaaactcgtgctgtctaggtttgagtttgagggcgtcagttctactggggagaatgctttggaggcaggcgaagacgaggaagaggtatggctcttctggagggacagcaacaaagaaatccggagtaaatcagtgcgtgaactggcccaagacgctaaggaaggtcagaaggaggaccgtgacgtgctctcttattatcgataccagctgaacctgtttgcgcggatgtgcctggataggcaatatttggccatcaatgagatctcgggtcagctggatgtcgacctgattctgagatgcatgtccgatgagaacttgccgtacgatctgcgcgcaagcttttgcagactgatgctgcacatgcatgtcgaccgagacccacaggagcaggtaactcctgtgaagtacgcgaggctctggagtgagataccctctgagattgccatcgacgattacgattcaagtggggcaagcaaagacgaaatcaaggagcggttcgctcagaccatggagttcgtggaggaatacttaagagatgtggtctgccagcgcttcccatttagcgataaggagaagaacaaacttaccttcgaggtagtgaatttggcacgcaatctgatctacttcggtttttacaatttctctgacctgcttagattgacaaagattttacttgcgatcctggactgtgtgcatgttacgactatatttccgattagcaagatggccaagggggaggagaataagggaaacaacgacgtggaaaagttaaaatcttcaaacgttatgagatctattcacggagtgggagagctaatgacacaagtggttctcagaggaggcgggttcctgccaatgacgcctatggctgcggcacctgagggcaatgtcaagcaagccgagccggagaaggaggacattatggttatggatactaagctgaaaattatcgagattttacagttcattttaaatgtgcgactggattaccgtatctcctgcctgctgtgcattttcaaaagagaattcgacgaatcaaacagccagaccagtgagacctcttcgggaaatagttcacaggaaggaccttcaaatgtccccggagcactcgactttgaacatattgaggaacaggctgaaggtatattcggagggtcagaagagaatacacccctagatttggacgatcatgggggcaggacctttctgagagttcttcttcacctgacaatgcatgattaccctcccctcgttagcggcgccttgcaacttcttttcagacatttttcccaaaggcaggaggttctgcaggctttcaagcaggtgcaactgcttgttacatctcaggacgtcgacaactacaagcagatcaaacaggatcttgatcaactgcgctccatagttgagaagtccgagctatgggtgtataaaggccaaggccctgatgagactatggacggggctagtggcgaaaacgagcacaagaagaccgaagagggcaataacaagccccagaaacacgagtctaccagttcttacaactaccgtgttgtcaaggagattctcattaggctcagtaagctttgcgtgcaggagtccgccagcgtccggaagtcccgaaaacagcaacagcgtctccttcggaacatgggggcacatgccgtggtgctagaactattgcagatcccatatgaaaaggcggaagacaccaagatgcaggagatcatgcgattggcccacgaattcctgcagaacttttgcgccggaaaccagcagaaccaggccctcctacataaacacatcaatctgttcttgaatcctgggatcctggaagcagtgaccatgcaacacatcttcatgaacaacttccagctgtgctccgagattaacgagagggttgtccagcactttgtccactgcattgagacacacggccgtaatgtgcagtatattaaatttttacaaaccatcgttaaggcagagggaaaatttattaagaagtgccaggatatggtgatggccgagctagtgaactctggggaggatgtgctggtgttctataatgacagagcaagcttccaaactcttattcagatgatgaggagcgagagagatagaatggatgagaattcccctctgatgtatcatattcacctggttgagttactggccgtttgcaccgaggggaagaatgtttacacagaaatcaaatgcaatagcttgttaccgttagatgatattgtccgagtggtgactcacgaggactgcattccggaggtcaaaatcgcctacatcaatttcctcaatcattgttatgtagacacagaggttgaaatgaaagaaatttacaccagcaatcacatgtggaagctgttcgagaatttccttgtcgatatttgtagagcatgcaacaatacaagcgacagaaagcacgccgacagtattctagaaaaatacgtgaccgaaatagttatgtccattgtgaccacgttcttctcaagtcccttctctgaccagagcacaaccttacagacccgacagcccgtctttgtgcagctcctgcagggcgtgtttcgtgtttatcactgcaactggctgatgccctctcagaaggccagtgtggaaagttgtattcgtgtgctgagcgacgttgccaaatctcgcgcaattgcgatcccagtggacctggacagccaggttaataacctctttcttaagtctcatagcatcgtgcaaaagactgccatgaactggcgactttcagctcgcaacgccgcaagacgggatagtgtcctcgcagcttctagggactacagaaatatcattgagcggctgcaggatattgtatccgcgctggaggatcgtctgcgaccactggtccaagctgaactttcggttcttgtggacgttcttcaccgaccagagctgctctttcccgaaaacaccgatgcccgcagaaaatgcgaaagtgggggttttatttgcaagcttattaaacataccaaacagctactagaagagaatgaagagaagctatgcataaaggtgttacagacactgagggaaatgatgacaaaagatagaggctatggagagaaactgatctctatcgatgagctggataacgccgagttgccaccagcccctgactcagaaaacgccacagaggagctggagccgtctcccccactccggcagctggaagaccataagcggggtgaggcgctgcggcaggtgctggtcaacagatattatggaaatgtacggccctcgggaaggcgagagagcttgacatccttcggcaatggccccctgtctgctggaggccctggaaaaccaggaggggggggcgggggttctgggtcgtctagtatgtccaggggcgaaatgtctctggctgaagtccagtgtcatctggataaggaaggtgctagcaacttagtcatcgacctaatcatgaacgcttcatccgatcgggtatttcacgagagcatattgttggccatcgccttacttgaggggggcaatactaccatccagcactcatttttttgcaggctcacggaggacaaaaagtccgaaaaattcttcaaggttttctatgacaggatgaaggtggcacaacaggagattaaggcaacggtgacagtgaacacaagtgacctgggcaataagaagaaagacgatgaggttgatcgggatgctcccagcaggaagaaggcaaaggaaccaaccactcagataaccgaggaggtgcgcgatcagctcctagaggcctccgcggctacccgaaaggccttcaccacgttcagacgggaggctgacccggacgaccactaccagccaggtgagggtacacaagctacagcggacaaagccaaagacgacctggagatgtctgcagttattacaattatgcagccgatcttgcgcttcctccagctgctgtgtgaaaaccataaccgggatctccaaaactttctcaggtgtcagaacaacaaaactaactacaatcttgtgtgcgagacccttcaatttttggactgcatctgcggttccacgactggaggtctgggcctcctgggactgtacatcaacgaaaaaaatgtcgccctgatcaatcagaccttggagagcttgaccgagtattgccagggaccatgccacgaaaatcagaattgcattgccactcacgaatcgaatggtattgatattatcaccgctctgattctcaacgatatcaatcctctgggaaagaagaggatggacctggtgctcgagctcaagaataacgcatcaaagttgctcctcgcgataatggaatctaggcacgattcggaaaacgcagagcgtatcctttataatatgaggccgaaagaattggtcgaggtgataaaaaaggcctatatgcagggcgaggtagagtttgaggatggcgaaaatggagaggatggagcggcatctccacggaatgtagggcacaacatctatatactcgcacaccagctggccaggcataataaggagttgcagtcaatgctgaaacccggtgggcaggtcgatggcgatgaggccctggagttctacgccaagcacacagcccaaatcgaaattgtgcgccttgatcgcacaatggagcagattgtcttcccagttccctctatctgtgaattcctgaccaaagaatcaaaacttcgtatctactacaccacagagagggacgagcaggggtccaaaatcaacgacttctttttgcgctcagaggacctgttcaatgagatgaactggcagaagaagcttcgcgcacagccagtcctgtattggtgtgcccgaaacatgtcgttctggtctagtataagctttaatctcgcagttttgatgaacctcctggtcgctttcttctaccctttcaaaggtgttcgggggggaacccttgaaccacactggtccgggttactatggaccgctatgctgatttctctggccatcgtaatcgctctgccaaagcctcacggaatacgtgctctcatcgcttccaccatcttgcgcctgattttttcggtcggcctgcaacccaccctgttccttctgggcgcattcaacgtttgcaacaagatcattttcctcatgtcgttcgtgggcaattgtggcaccttcacccgaggttatagggcaatggtgctggacgtggagttcctctatcaccttctgtacctcgtcatttgcgccatggggctcttcgtccatgagtttttctacagcctgttgctcttcgatcttgtctacagagaggagacccttttgaacgtcattaagtctgtgactagaaatggacggagcattattctgacagccgtgctggcactgattctggtgtacttgttctctattgtcggctatctcttttttaaagacgactttatactagaagtcgatcgcttacctaacgaaactgcggtgcctgagacgggggaatcattggcaagtgaattcctgttttctgacgtatgtagagtcgagagcggcgaaaactgtagctccccggctcctagagaagaattggttcctgcagaggaaaccgagcaggataaagaacatacatgtgagactcttctgatgtgcattgtgacagtgctgtcacacgggctaaggtccggcggaggtgtcggggacgttcttagaaaacccagtaaagaagagccactgttcgctgcccgcgtgatatacgaccttctgttcttcttcatggtgatcataatagttctcaatcttatcttcggagtgataattgacactttcgctgatctgcgctctgagaagcaaaagaaagaggaaattcttaaaaccacttgttttatttgcgggcttgagagggataaattcgacaataagaccgttacttttgaggagcacattaaggaagaacacaacatgtggcactacctttgcttcatcgttctggtgaaggtgaaggattccaccgaatatacagggccagagtcgtatgttgccgagatgatcaaagagcgaaatttggactggtttccccgcatgagggccatgtcactggtgtcatcagactccgaaggcgagcaaaacgaactaaggaatctgcaggaaaagctagaatcaaccatgaagctggttaccaatctctccggtcagctaagcgagctaaaggaccaaatgaccgagcagcggaagcagaagcagagaatcggcctgctggggcaccccccacatatgaacgtcaatcctcagcaacctgcgtag

SEQ ID NO: 65905 - DNA, 10197 bp, Artificial Sequence
  derived and/or modified sequence
gcagtaaccatgtggatgtgctgctgaagcgtttcctcaagctcgctggggtgggaggagaggaggaggaggaggtggtggtggaggaggaggcagggggtggagagagagaaagcgcacgccgagaggaggtgtgggtgttccgcttccatcctaacggaacgagctccctcttcgcggacatgggattacccagcggctgctaacccctctcctcgccctgctcccccaaaccggcgtggctccccgggcaccaaggagctgactacagaggagcaggatttgcacccctcgctgggcttgctttggcaacagagtgcctgacccaggtcaggattttcaagaaagacatgtctgacaaaatgtctagcttcctacatattggagacatttgttctctgtacgcggagggatcgacaaatggatttattagcaccttgggcctggttgatgatcgttgtgttgtacagccagaaaccggggaccttaacaatccacctaagaaattcagagactgcctctttaagctatgtcccatgaaccgctactctgcccaaaagcagttctggaaagccgctaagcctggggccaacagcaccacagacgcagtgctactcaacaaactgcaccacgctgcagacttggaaaagaagcagaatgagacagaaaacaggaaattgctggggaccgtaatccagtatggcaatgtgatccagctcctgcatttgaaaagtaataaatacctaacagtgaataagaggcttcctgctctgttggagaagaatgccatgagagtcacattggacgaggctggaaatgaagggtcctggttttatattcagccattctacaagctgcgatccattggagacagcgtggtcataggtgacaaggtggttctgaaccccgtcaatgctggtcagcccctacatgctagcagccatcaactggtagataacccaggctgcaatgaggtcaattccgtcaactgcaatacaagctggaaaatagtccttttcatgaaatggagtgataacaaagacgacatattaaaggggggtgacgtggtgaggctgtttcatgctgagcaggagaagtttctcacctgtgacgaacacaggaagaagcagcacgtcttcctgagaaccacgggccggcagtcggccacatctgccaccagttcaaaagccctgtgggaggtggaggtggtccagcatgacccatgtcggggcggagcagggtattggaacagccttttccgtttcaagcatctggccacggggcattacttggcagcagaggtggaccctgatcaggacgcctctcgaagtaggttgcggaatgcccaagaaaagatggtatactccctggtctctgtgcctgaaggcaatgacatctcctccattttcgagctagatcccaccactctgcgtggaggtgacagccttgtcccaaggaactcttatgttcggctcagacacctatgtactaatacctgggttcacagcacaaatattcctattgacaaggaagaagaaaagcccgtgatgctgaaaattggcacctctcctgtgaaggaggataaggaagcatttgccatagttccggtttctcctgctgaagttcgggacctggactttgccaatgatgccagcaaggtgctgggctccattgctgggaagctagagaagggcaccatcacccagaatgaaaggaggtctgtaaccaagctgctagaagatttggtttacttcgtcactggtggaactaattctggtcaagatgttctcgaagttgtcttctccaagcccaacagagaacggcagaaactgatgagagaacagaatattctcaagcagatcttcaagttgttacaagccccattcacagactgcggtgatggcccaatgcttcggctggaagagctcggggaccagcggcacgctcctttcagacacatctgccggctctgctacagggtgctgagacactcgcagcaagactacaggaagaaccaggagtatatagccaagcagtttggcttcatgcagaagcagattggctatgatgtgttggctgaagacactatcactgccctgctccacaataatcggaaactcctggaaaaacacattaccgcggcagagattgacacatttgtcagcctggtgcgaaagaacagggagcccagattcttagattacctctccgacctctgtgtctccatgaacaaatcaattccagtgacccaggaactgatatgtaaagctgtgctgaaccccaccaacgctgacatcctgattgagaccaagttggttctttctcgttttgaatttgaaggtgtctcttccactggagagaatgctctggaggcaggagaagacgaggaagaggtgtggctgttttggagggacagcaacaaagagattcgcagcaagagtgtgagggaattggctcaggatgctaaagaagggcagaaggaggaccgagacgttctcagctactacagatatcagctgaacctctttgcgaggatgtgtctggaccgccaatacctggccatcaacgaaatctcaggccagctggatgtcgatctcattctccgctgcatgtctgacgagaacctgccctatgacctcagggcgtccttctgccgcctcatgcttcacatgcatgtggaccgagatccccaggaacaagtcacccccgtgaaatatgcccgcctctggtcggagattccctcggagatcgccattgacgactatgatagtagtggagcttccaaagatgaaattaaggagagatttgctcagaccatggagtttgtggaggagtatttaagagatgtggtttgtcagaggttccctttctctgataaagagaagaataagcttacgtttgaggttgtaaatttagctaggaatctcatatactttggtttctacaacttctctgaccttctacgattaactaagatccttctggccatattggactgtgtacatgtgacaacaatcttccccattagcaagatggcgaaaggagaagagaataaaggtaacaatgatgtggagaagctgaagagcagtaacgtgatgagatctattcatggcgtgggagagctgatgacccaggtggtgctccggggaggaggctttttgcccatgactcccatggctgctgcccctgaaggcaatgtgaagcaggcagagcctgagaaggaggacatcatggtcatggacaccaagctgaagatcattgagatactccagtttattttgaatgtgaggttggattataggatctcctgcctcctgtgtatatttaagcgagagtttgatgaaagcaattcccagacttcagaaacatcctccggaaacagcagccaagaagggccaagtaatgtaccaggtgctcttgactttgaacacattgaagaacaagcagaaggcatctttggaggaagtgaggagaacaccccactggacttggatgaccacggcggcagaacctttctccgtgtcctgctccacttgacgatgcatgactacccacccctggtgtcaggggccctgcagctcctcttccggcacttcagccagaggcaggaggtgctccaggccttcaaacaggttcaactgctggttaccagccaagatgtggacaactacaaacagatcaaacaagacttggatcaactgaggtccatcgtggaaaagtcagagctttgggtgtacaaagggcagggccccgatgagactatggatggtgcatctggagaaaatgaacataagaaaacggaggagggaaataacaagccacaaaagcatgaaagcaccagcagctacaactacagagtggtcaaagagattttgattcggcttagcaaactctgtgttcaagagagtgcctcagtgagaaagagcaggaagcagcaacagcgtctgctccggaacatgggcgcgcacgccgtggtgctggagctgctgcagattccctatgagaaggccgaagataccaagatgcaagagataatgaggttggctcatgaatttttgcagaatttctgcgcaggcaaccagcagaatcaagctttgctacataaacacataaacctgtttctcaacccagggatcctggaggcagtaaccatgcagcacatcttcatgaacaatttccagctttgcagtgagatcaacgagagagttgttcagcacttcgttcactgcatagagactcacggtcggaatgtccagtatataaagttcttacagacaattgtcaaggcagaagggaaatttattaaaaaatgccaagacatggttatggccgagctggtcaattcgggagaggatgtcctcgtgttctacaacgacagagcctctttccagactctgatccagatgatgcggtcagaacgggatcggatggatgagaacagccctctcatgtaccacatccacttggtcgagctcctggctgtgtgcacggagggtaagaatgtctacacagagatcaagtgcaactccctgctcccgctggatgacatcgttcgcgtggtgacccacgaggactgcatccctgaggttaaaattgcatacattaacttcctgaatcactgctatgtggatacagaggtggaaatgaaggagatttataccagcaatcacatgtggaaattgtttgagaatttccttgtagacatctgcagggcctgtaacaacactagtgacaggaaacatgcagactcgattttggagaagtatgtcaccgaaatcgtcatgagtattgttactactttcttcagctctcccttctcagaccagagtacgactttgcagactcgccagcctgtctttgtgcaactgctgcaaggcgtgttcagggtttaccactgcaactggttaatgccaagccaaaaagcctccgtggagagctgtattcgggtgctgtctgatgtagccaagagccgggccattgccattcccgtggacctggacagccaagtcaacaacctctttctcaagtcccacagcattgtgcagaaaacagccatgaactggcggctctcagcccgcaatgccgcacgcagggactctgttctggcagcttccagagactaccggaatatcattgagagattgcaggacatcgtctccgcgctggaggaccgtctcaggcccctggtgcaggcagagttatctgtgctcgtggatgttctccacagacccgagctgcttttcccagagaacacagacgccagaaggaaatgtgaaagtggcggtttcatttgcaagttaataaagcatacaaaacagctgctagaagaaaatgaagagaagctctgcattaaggtcctacagaccctgagggaaatgatgaccaaagatagaggctatggagaaaagctaatttccattgatgaattggataatgctgagcttcctccagctccggattctgagaacgccactgaggagcttgaaccaagtccacccctgcggcagctggaagaccataaaaggggtgaggcgctcaggcaagttctggtcaaccgttactatggaaacgtcagaccttcgggacgaagagagagccttaccagctttggcaatggcccactgtcagcaggaggacccggcaagcccgggggaggagggggaggttccggatccagctctatgagcaggggtgagatgagtctggccgaggttcagtgtcaccttgacaaggagggggcttccaatctagttatcgacctcatcatgaacgcatccagtgaccgagtgttccatgaaagcattctcctggccattgcccttctggaaggaggcaacaccaccatccagcactcctttttctgtcgcttgacagaagataagaagtcagagaaattctttaaggtgttttatgaccggatgaaggtggcccagcaagaaatcaaagcaacagtgacagtgaacaccagtgacttgggaaataaaaagaaagacgatgaggtagacagggatgccccatcacggaaaaaagctaaagagcccacaacacagataacagaagaggtccgggatcagctcctggaggcctccgctgccaccaggaaagccttcaccactttcaggagggaggctgatcccgacgaccactaccagcctggagagggcacccaggccactgccgacaaggccaaggacgacctggagatgagcgcggtcatcaccatcatgcagcccatcctccgcttccttcagctcctgtgtgaaaaccacaaccgagacctgcagaacttcctccgttgccaaaataacaagaccaactacaatttggtatgtgagaccctgcagtttctggactgtatttgtggaagcacaactggaggccttggtcttctgggcttgtatataaatgaaaagaatgtagcgcttatcaaccaaaccctggaaagtctgaccgaatactgtcaaggaccttgccatgagaaccagaactgcatagccacccatgaatccaatggcattgacatcatcacagccctgatcctcaatgatatcaatcctttgggaaagaagaggatggaccttgtgttagaactgaagaacaatgcctcgaagttgctcctggccatcatggaaagcaggcacgacagtgaaaacgcagagaggatactttataacatgaggcccaaggaactggtggaagtgatcaagaaagcctacatgcaaggtgaagtggaatttgaggatggagaaaacggtgaggatggggcggcgtcccccaggaacgtggggcacaacatctacatattagcccatcagttggctcggcataacaaagaacttcagagcatgctgaaacctggtggccaagtggacggagatgaagccctggagttttatgccaagcacacggcgcagatagagattgtcagattagaccgaacaatggaacagatagtctttcccgtgcccagcatatgtgaattcctaaccaaggagtcaaaactacgaatttactatactacagagagagacgaacaaggcagcaaaatcaatgatttctttctgcggtctgaagacctcttcaatgaaatgaattggcagaagaaactgagagcccagcccgtgttgtactggtgtgcccgcaacatgtctttctggagcagcatttcgtttaacctggccgtcctgatgaacctgctggtggcgtttttctacccgtttaagggagtccgaggaggaaccctggagccccactggtcgggactcctgtggacagccatgctcatctctctggccatcgtcattgccctccccaagccccatggcatccgggccttaattgcctccacaattctacgactgatattttcagtcgggttacaacccacgttgtttcttctgggcgctttcaatgtatgcaataaaatcatctttctaatgagctttgtgggcaactgtgggacattcacaagaggctaccgagccatggttctggatgttgagttcctctatcatttgttgtatctggtgatctgtgccatggggctctttgtccatgaattcttctacagtctgctgctttttgatttagtgtacagagaagagactttgcttaatgtcattaaaagtgtcactcgcaatggacggtccatcatcctgacagcagttctggctctgatcctcgtttacctgttctcaatagtgggctatcttttcttcaaggatgactttatcttggaagtagataggctgcccaatgaaacagctgttccagaaaccggcgagagtttggcaagcgagttcctgttctccgatgtgtgtagggtggagagtggggagaactgctcctctcctgcacccagagaagagctggtccctgcagaagagacggaacaggataaagagcacacatgtgagacgctgctgatgtgcattgtcactgtgctgagtcacgggctgcggagcgggggtggagtaggagatgtactcaggaagccgtccaaagaggaacccctgtttgctgctagagttatttatgacctcttgttcttcttcatggtcatcatcattgttcttaacctgatttttggggttatcattgacacttttgctgacctgaggagtgagaagcagaagaaggaagagatcttgaagaccacgtgctttatctgtggcttggaaagagacaagtttgacaacaagactgtcacctttgaagagcacatcaaggaagaacacaacatgtggcactatctgtgcttcatcgtcctggtgaaagtaaaggactccaccgaatatactgggcctgagagttacgtggcagaaatgatcaaggaaagaaaccttgactggttccccaggatgagagccatgtcattggtcagcagtgattctgaaggagaacagaatgagctgagaaacctgcaggagaagctggagtccaccatgaaacttgtcacgaacctttctggccagctgtcggaattaaaggatcagatgacagaacaaaggaagcagaaacaaagaattggtcttctaggacatcctcctcacatgaatgtcaacccacaacaaccagcataagcaaatgaaagaaaggaattgtatttaccttttataattattattagtgtgggtatggctaatgagttctgattcacccacgaaggttacatttatgctgaatacatttgtaaatactcagttttatactgtatgtatatgattgctactctaaaggtttggatatatgtattgtaattagaattgttggcatgatgacatttcatttgtgccaaaaatattaaaaatgccttttttggaaggactaacagaaagcacctgatttgcacttgaaccagattatagatttaaaagtatatgacatgtattttgtatttaaaactagaatagccagtatttatgttttttataaaactgtgcaatacgaattatgcaatcacaatacatttgtagctcccgagtgtcctaaagggagtgcacttctttgaagctggtgtgttaatactatgtaataaatggttaactttcaaatgatgctgctgccaaaattatattaatagtgagtttcaggcccctgggcattttgtaccatgtaattatcctctggtgatgctgtttctcgttagtggcagtagtgcctccgtctcctagtgataatgctccaagtctatgaactgttaaatcagcattcattttaagaaaagcaactttagtttcaaagatacttttaagcttctaaattgatcatttaaactatttctttaaataagagagccaaattagaggctcatactttagcttgtgaagaagataatgaattttttaaagggaactttctatgcaatgttcaggataaatgcatactgctggccaatcagtgtcatctcctgggtaaattttgatgtcgcattataaagacatgcataattgatggtttctagattatctagtccaaacaatagagtttattttttcttcatctgaaccaacatgctacagtagctaagaagtattaaaactatatacatccatataaagatgaaatatgaactatctcattagaagtcatagttgaccacagacatgttattcttctgaaagagccacattttggttttatttcttgtcacatgatttcttttcttgatggatgaaaaatatgaaaggaaacttttatatctgttgcctagttttgtacatggatctcattttacaagagaatctctctgcaaaaaaaaaaaaaacagtttaaaaatgcattgaaagcagagttctgaaatgagtaaagtttgtaaatgcatatataaaaatatttaataaatgatgcagaatatacagtgactggttggtggctttcatttggcatttgtgacttaactgctattccatttatgtactttctttaggatcagtttgaagtacagtcggtttgattaccaggttaattcagaaaatgtttacctgattatttaaaaaaacacttgctgttgttatgacagctctgaggagaattattagaacaaacattggggagtatttagtacaacattcattcattcttctggattagtgactgccagccaggctgtcgggagcgccctactaaatctcctgtctcttctgcttttactgggggatctttaatttgctgtgtgccatgtggaagtatcgggaa

SEQ ID NO: 65906 - DNA, 9402 bp, Artificial Sequence
  derived and/or modified sequence
atgtctgacaaaatgtctagcttcctacatattggagacatttgttctctgtacgcggagggatcgacaaatggatttattagcaccttgggcctggttgatgatcgttgtgttgtacagccagaaaccggggaccttaacaatccacctaagaaattcagagactgcctctttaagctatgtcccatgaaccgctactctgcccaaaagcagttctggaaagccgctaagcctggggccaacagcaccacagacgcagtgctactcaacaaactgcaccacgctgcagacttggaaaagaagcagaatgagacagaaaacaggaaattgctggggaccgtaatccagtatggcaatgtgatccagctcctgcatttgaaaagtaataaatacctaacagtgaataagaggcttcctgctctgttggagaagaatgccatgagagtcacattggacgaggctggaaatgaagggtcctggttttatattcagccattctacaagctgcgatccattggagacagcgtggtcataggtgacaaggtggttctgaaccccgtcaatgctggtcagcccctacatgctagcagccatcaactggtagataacccaggctgcaatgaggtcaattccgtcaactgcaatacaagctggaaaatagtccttttcatgaaatggagtgataacaaagacgacatattaaaggggggtgacgtggtgaggctgtttcatgctgagcaggagaagtttctcacctgtgacgaacacaggaagaagcagcacgtcttcctgagaaccacgggccggcagtcggccacatctgccaccagttcaaaagccctgtgggaggtggaggtggtccagcatgacccatgtcggggcggagcagggtattggaacagccttttccgtttcaagcatctggccacggggcattacttggcagcagaggtggaccctgatcaggacgcctctcgaagtaggttgcggaatgcccaagaaaagatggtatactccctggtctctgtgcctgaaggcaatgacatctcctccattttcgagctagatcccaccactctgcgtggaggtgacagccttgtcccaaggaactcttatgttcggctcagacacctatgtactaatacctgggttcacagcacaaatattcctattgacaaggaagaagaaaagcccgtgatgctgaaaattggcacctctcctgtgaaggaggataaggaagcatttgccatagttccggtttctcctgctgaagttcgggacctggactttgccaatgatgccagcaaggtgctgggctccattgctgggaagctagagaagggcaccatcacccagaatgaaaggaggtctgtaaccaagctgctagaagatttggtttacttcgtcactggtggaactaattctggtcaagatgttctcgaagttgtcttctccaagcccaacagagaacggcagaaactgatgagagaacagaatattctcaagcagatcttcaagttgttacaagccccattcacagactgcggtgatggcccaatgcttcggctggaagagctcggggaccagcggcacgctcctttcagacacatctgccggctctgctacagggtgctgagacactcgcagcaagactacaggaagaaccaggagtatatagccaagcagtttggcttcatgcagaagcagattggctatgatgtgttggctgaagacactatcactgccctgctccacaataatcggaaactcctggaaaaacacattaccgcggcagagattgacacatttgtcagcctggtgcgaaagaacagggagcccagattcttagattacctctccgacctctgtgtctccatgaacaaatcaattccagtgacccaggaactgatatgtaaagctgtgctgaaccccaccaacgctgacatcctgattgagaccaagttggttctttctcgttttgaatttgaaggtgtctcttccactggagagaatgctctggaggcaggagaagacgaggaagaggtgtggctgttttggagggacagcaacaaagagattcgcagcaagagtgtgagggaattggctcaggatgctaaagaagggcagaaggaggaccgagacgttctcagctactacagatatcagctgaacctctttgcgaggatgtgtctggaccgccaatacctggccatcaacgaaatctcaggccagctggatgtcgatctcattctccgctgcatgtctgacgagaacctgccctatgacctcagggcgtccttctgccgcctcatgcttcacatgcatgtggaccgagatccccaggaacaagtcacccccgtgaaatatgcccgcctctggtcggagattccctcggagatcgccattgacgactatgatagtagtggagcttccaaagatgaaattaaggagagatttgctcagaccatggagtttgtggaggagtatttaagagatgtggtttgtcagaggttccctttctctgataaagagaagaataagcttacgtttgaggttgtaaatttagctaggaatctcatatactttggtttctacaacttctctgaccttctacgattaactaagatccttctggccatattggactgtgtacatgtgacaacaatcttccccattagcaagatggcgaaaggagaagagaataaaggtaacaatgatgtggagaagctgaagagcagtaacgtgatgagatctattcatggcgtgggagagctgatgacccaggtggtgctccggggaggaggctttttgcccatgactcccatggctgctgcccctgaaggcaatgtgaagcaggcagagcctgagaaggaggacatcatggtcatggacaccaagctgaagatcattgagatactccagtttattttgaatgtgaggttggattataggatctcctgcctcctgtgtatatttaagcgagagtttgatgaaagcaattcccagacttcagaaacatcctccggaaacagcagccaagaagggccaagtaatgtaccaggtgctcttgactttgaacacattgaagaacaagcagaaggcatctttggaggaagtgaggagaacaccccactggacttggatgaccacggcggcagaacctttctccgtgtcctgctccacttgacgatgcatgactacccacccctggtgtcaggggccctgcagctcctcttccggcacttcagccagaggcaggaggtgctccaggccttcaaacaggttcaactgctggttaccagccaagatgtggacaactacaaacagatcaaacaagacttggatcaactgaggtccatcgtggaaaagtcagagctttgggtgtacaaagggcagggccccgatgagactatggatggtgcatctggagaaaatgaacataagaaaacggaggagggaaataacaagccacaaaagcatgaaagcaccagcagctacaactacagagtggtcaaagagattttgattcggcttagcaaactctgtgttcaagagagtgcctcagtgagaaagagcaggaagcagcaacagcgtctgctccggaacatgggcgcgcacgccgtggtgctggagctgctgcagattccctatgagaaggccgaagataccaagatgcaagagataatgaggttggctcatgaatttttgcagaatttctgcgcaggcaaccagcagaatcaagctttgctacataaacacataaacctgtttctcaacccagggatcctggaggcagtaaccatgcagcacatcttcatgaacaatttccagctttgcagtgagatcaacgagagagttgttcagcacttcgttcactgcatagagactcacggtcggaatgtccagtatataaagttcttacagacaattgtcaaggcagaagggaaatttattaaaaaatgccaagacatggttatggccgagctggtcaattcgggagaggatgtcctcgtgttctacaacgacagagcctctttccagactctgatccagatgatgcggtcagaacgggatcggatggatgagaacagccctctcatgtaccacatccacttggtcgagctcctggctgtgtgcacggagggtaagaatgtctacacagagatcaagtgcaactccctgctcccgctggatgacatcgttcgcgtggtgacccacgaggactgcatccctgaggttaaaattgcatacattaacttcctgaatcactgctatgtggatacagaggtggaaatgaaggagatttataccagcaatcacatgtggaaattgtttgagaatttccttgtagacatctgcagggcctgtaacaacactagtgacaggaaacatgcagactcgattttggagaagtatgtcaccgaaatcgtcatgagtattgttactactttcttcagctctcccttctcagaccagagtacgactttgcagactcgccagcctgtctttgtgcaactgctgcaaggcgtgttcagggtttaccactgcaactggttaatgccaagccaaaaagcctccgtggagagctgtattcgggtgctgtctgatgtagccaagagccgggccattgccattcccgtggacctggacagccaagtcaacaacctctttctcaagtcccacagcattgtgcagaaaacagccatgaactggcggctctcagcccgcaatgccgcacgcagggactctgttctggcagcttccagagactaccggaatatcattgagagattgcaggacatcgtctccgcgctggaggaccgtctcaggcccctggtgcaggcagagttatctgtgctcgtggatgttctccacagacccgagctgcttttcccagagaacacagacgccagaaggaaatgtgaaagtggcggtttcatttgcaagttaataaagcatacaaaacagctgctagaagaaaatgaagagaagctctgcattaaggtcctacagaccctgagggaaatgatgaccaaagatagaggctatggagaaaagctaatttccattgatgaattggataatgctgagcttcctccagctccggattctgagaacgccactgaggagcttgaaccaagtccacccctgcggcagctggaagaccataaaaggggtgaggcgctcaggcaagttctggtcaaccgttactatggaaacgtcagaccttcgggacgaagagagagccttaccagctttggcaatggcccactgtcagcaggaggacccggcaagcccgggggaggagggggaggttccggatccagctctatgagcaggggtgagatgagtctggccgaggttcagtgtcaccttgacaaggagggggcttccaatctagttatcgacctcatcatgaacgcatccagtgaccgagtgttccatgaaagcattctcctggccattgcccttctggaaggaggcaacaccaccatccagcactcctttttctgtcgcttgacagaagataagaagtcagagaaattctttaaggtgttttatgaccggatgaaggtggcccagcaagaaatcaaagcaacagtgacagtgaacaccagtgacttgggaaataaaaagaaagacgatgaggtagacagggatgccccatcacggaaaaaagctaaagagcccacaacacagataacagaagaggtccgggatcagctcctggaggcctccgctgccaccaggaaagccttcaccactttcaggagggaggctgatcccgacgaccactaccagcctggagagggcacccaggccactgccgacaaggccaaggacgacctggagatgagcgcggtcatcaccatcatgcagcccatcctccgcttccttcagctcctgtgtgaaaaccacaaccgagacctgcagaacttcctccgttgccaaaataacaagaccaactacaatttggtatgtgagaccctgcagtttctggactgtatttgtggaagcacaactggaggccttggtcttctgggcttgtatataaatgaaaagaatgtagcgcttatcaaccaaaccctggaaagtctgaccgaatactgtcaaggaccttgccatgagaaccagaactgcatagccacccatgaatccaatggcattgacatcatcacagccctgatcctcaatgatatcaatcctttgggaaagaagaggatggaccttgtgttagaactgaagaacaatgcctcgaagttgctcctggccatcatggaaagcaggcacgacagtgaaaacgcagagaggatactttataacatgaggcccaaggaactggtggaagtgatcaagaaagcctacatgcaaggtgaagtggaatttgaggatggagaaaacggtgaggatggggcggcgtcccccaggaacgtggggcacaacatctacatattagcccatcagttggctcggcataacaaagaacttcagagcatgctgaaacctggtggccaagtggacggagatgaagccctggagttttatgccaagcacacggcgcagatagagattgtcagattagaccgaacaatggaacagatagtctttcccgtgcccagcatatgtgaattcctaaccaaggagtcaaaactacgaatttactatactacagagagagacgaacaaggcagcaaaatcaatgatttctttctgcggtctgaagacctcttcaatgaaatgaattggcagaagaaactgagagcccagcccgtgttgtactggtgtgcccgcaacatgtctttctggagcagcatttcgtttaacctggccgtcctgatgaacctgctggtggcgtttttctacccgtttaagggagtccgaggaggaaccctggagccccactggtcgggactcctgtggacagccatgctcatctctctggccatcgtcattgccctccccaagccccatggcatccgggccttaattgcctccacaattctacgactgatattttcagtcgggttacaacccacgttgtttcttctgggcgctttcaatgtatgcaataaaatcatctttctaatgagctttgtgggcaactgtgggacattcacaagaggctaccgagccatggttctggatgttgagttcctctatcatttgttgtatctggtgatctgtgccatggggctctttgtccatgaattcttctacagtctgctgctttttgatttagtgtacagagaagagactttgcttaatgtcattaaaagtgtcactcgcaatggacggtccatcatcctgacagcagttctggctctgatcctcgtttacctgttctcaatagtgggctatcttttcttcaaggatgactttatcttggaagtagataggctgcccaatgaaacagctgttccagaaaccggcgagagtttggcaagcgagttcctgttctccgatgtgtgtagggtggagagtggggagaactgctcctctcctgcacccagagaagagctggtccctgcagaagagacggaacaggataaagagcacacatgtgagacgctgctgatgtgcattgtcactgtgctgagtcacgggctgcggagcgggggtggagtaggagatgtactcaggaagccgtccaaagaggaacccctgtttgctgctagagttatttatgacctcttgttcttcttcatggtcatcatcattgttcttaacctgatttttggggttatcattgacacttttgctgacctgaggagtgagaagcagaagaaggaagagatcttgaagaccacgtgctttatctgtggcttggaaagagacaagtttgacaacaagactgtcacctttgaagagcacatcaaggaagaacacaacatgtggcactatctgtgcttcatcgtcctggtgaaagtaaaggactccaccgaatatactgggcctgagagttacgtggcagaaatgatcaaggaaagaaaccttgactggttccccaggatgagagccatgtcattggtcagcagtgattctgaaggagaacagaatgagctgagaaacctgcaggagaagctggagtccaccatgaaacttgtcacgaacctttctggccagctgtcggaattaaaggatcagatgacagaacaaaggaagcagaaacaaagaattggtcttctaggacatcctcctcacatgaatgtcaacccacaacaaccagcataagcaaatgaaagaaaggaattgtatttaccttttataattattattagtgtgggtatggctaatgagttctgattcacccacgaaggttacatttatgctgaatacatttgtaaatactcagttttatactgtatgtatatgattgctactctaaaggtttggatatatgtattgtaattagaattgttggcatgatgacatttcatttgtgccaaaaatattaaaaatgccttttttggaaggactaacagaaagcacctgatttgcacttgaaccagattatagatttaaaagtatatgacatgtattttgtatttaaaactagaatagccagtatttatgttttttataaaactgtgcaatacgaattatgcaatcacaatacatttgtagctcccgagtgtcctaaagggagtgcacttctttgaagctggtgtgttaatactatgtaataaatggttaactttcaaatgatgctgctgccaaaattatattaatagtgagtttcaggcccctgggcattttgtaccatgtaattatcctctggtgatgctgtttctcgttagtggcagtagtgcctccgtctcctagtgataatgctccaagtctatgaactgttaaatcagcattcattttaagaaaagcaactttagtttcaaagatacttttaagcttctaaattgatcatttaaactatttctttaaataagagagccaaattagaggctcatactttagcttgtgaagaagataatgaattttttaaagggaactttctatgcaatgttcaggataaatgcatactgctggccaatcagtgtcatctcctgggtaaattttgatgtcgcattataaagacatgcataattgatggtttctagattatctagtccaaacaatagagtttattttttcttcatctgaaccaacatgctacagtagctaagaagtattaaaactatatacatccatataaagatgaaatatgaactatctcattagaagtcatagttgaccacagacatgttattcttctgaaagagccacattttggttttatttcttgtcacatgatttcttttcttgatggatgaaaaatatgaaaggaaacttttatatctgttgcctagttttgtacatggatctcattttacaagagaatctctctgc

SEQ ID NO: 65907 - DNA, 8232 bp, Artificial Sequence
  derived and/or modified sequence
atgtctgacaagatgagcagcttcctgcacatcggggacatctgcagcctgtatgcagagggcagcaccaacggcttcatcagcaccctgggcctggtggatgacagatgtgtggtgcagcctgagactggagacctgaacaacccccccaagaagttccgggactgcctcttcaagctgtgccccatgaaccgctacagcgcccagaagcagttctggaaggccgccaagccaggggccaacagcaccacagatgctgtgctgctgaacaagctgcaccacgccgctgacctggagaagaagcagaatgaaacagagaacaggaagctgctgggcaccgtcatccagtatggaaatgtcatccagctgctgcacctgaagagcaacaagtacctgactgtgaacaagaggctgcctgccctgctggagaagaatgccatgagggtgaccctggatgaggccggaaatgaaggctcctggttctacatccagcccttctacaagctgcggagcatcggggacagcgtggtgattggagacaaggtggtgctgaaccctgtgaatgccggccagcccctgcacgccagcagccaccagctggtggacaaccctggctgcaatgaggtgaacagcgtgaactgcaacacctcctggaagatcgtgctcttcatgaagtggagcgacaacaaggatgacatcctgaagggaggagatgtggtgcggctcttccacgccgagcaggagaagttcctgacctgtgatgagcacaggaagaagcagcacgtgttcctgcggaccaccggccggcagagcgccaccagcgccaccagcagcaaggccctgtgggaggtggaggtggtgcagcacgacccctgccggggcggggccggctactggaacagcctcttccgcttcaagcacctggccaccggccactacctggccgctgaggtggaccctgaccaggatgccagccgcagccggctgagaaatgcccaggagaagatggtgtacagcctggtgtctgtgcctgagggcaatgacatcagcagcatctttgagctggaccccaccaccctgcggggcggggacagcctggtgcccagaaattcctatgtgcggctgcggcacctgtgcaccaacacctgggtgcacagcaccaacatccccatcgacaaggaggaggagaagcctgtgatgctgaagattggcaccagccctgtgaaggaggacaaggaggcctttgccatcgtgcctgtgtccccagctgaggtgcgggacctggactttgccaatgatgccagcaaggtgctgggcagcattgctgggaagctggagaagggcaccatcacccagaatgaaagaagatctgtgaccaagctgctggaggacctggtgtactttgtgactggaggcaccaacagcggccaggatgtgctggaggtggtgttcagcaagcccaaccgggagcggcagaagctgatgagggagcagaacatcctgaagcagatcttcaagctgctgcaggcccccttcacagactgtggagatggccccatgctgcggctggaggagctgggggaccagagacatgcccccttccgccacatctgccgcctgtgctacagagtgctgcggcacagccagcaggactacaggaagaaccaggagtacatcgccaagcagtttggcttcatgcagaagcagatcggctatgatgtgctggccgaggacaccatcacagccctgctgcacaacaacaggaagctgctggagaagcacatcacagctgctgagattgacacctttgtgtccctggtgaggaagaaccgggagccccgcttcctggactacctgagtgacctgtgtgtgtccatgaacaagagcatccctgtgacccaggagctgatctgcaaggctgtgctgaaccccaccaatgctgacatcctgattgagaccaagctggtgctgagcagatttgaatttgagggcgtgagcagcactggagaaaatgccctggaggccggagaagatgaggaggaggtgtggctgttctggagggacagcaacaaggagatccgcagcaagtctgtgcgggagctggcccaggatgccaaggagggccagaaggaggacagagatgtgctgagctactaccgctaccagctgaacctgtttgccaggatgtgcctggaccggcagtacctggccatcaatgagatcagcggccagctggatgtggacctgatcctgcgctgcatgtctgatgagaacctgccctatgacctgcgggccagcttctgccgcctgatgctgcacatgcacgtggaccgggacccccaggagcaggtgacccctgtgaagtatgcccggctgtggagcgagatccccagcgagatcgccattgatgattatgacagcagcggggccagcaaggatgagatcaaggagagatttgcccagaccatggagtttgtggaggagtacctgagagatgtggtgtgccagcgcttccccttcagtgacaaggagaagaacaagctgacctttgaggtggtgaacctggccaggaacctgatctacttcggcttctacaacttcagtgacctgctgcggctgaccaagatcctgctggccatcctggactgtgtgcacgtgaccaccatcttccccatcagcaagatggccaagggggaggagaacaagggcaacaatgatgtggagaagctgaagagcagcaatgtgatgaggagcatccacggcgtgggggagctgatgacccaggtggtgctgcggggcggcggcttcctgcccatgacccccatggccgccgcccctgagggcaatgtgaagcaggccgagcctgagaaggaggacatcatggtgatggacaccaagctgaagatcatcgagatcctgcagttcatcctgaatgtgcggctggactaccgcatcagctgcctgctgtgcatcttcaagcgggagtttgatgagagcaacagccagaccagcgagaccagcagcggcaacagcagccaggagggccccagcaatgtgcctggggccctggactttgagcacatcgaggagcaggccgagggcatctttggaggcagcgaggagaacacccccctggacctggatgaccacggcggccgcaccttcctgcgggtgctgctgcacctgaccatgcatgactacccacccctggtgtctggggccctgcagctgctcttccgccacttcagccagaggcaggaggtgctgcaggccttcaagcaggtgcagctgctggtgaccagccaggatgtggacaactacaagcagatcaagcaggacctggaccagctgcggagcatcgtggagaagtctgagctgtgggtgtacaagggccagggcccagatgagaccatggatggagccagcggggagaatgagcacaagaagacagaggagggcaacaacaagccccagaagcatgagagcaccagcagctacaactacagagtggtgaaggagatcctgatccggctgagcaagctgtgtgtgcaggagagcgcctctgtgaggaagagcaggaagcagcagcagaggctgctgaggaacatgggcgcccatgctgtggtgctggagctgctgcagatcccctatgagaaggccgaggacaccaagatgcaggagatcatgaggctggcccacgagttcctgcagaacttctgtgccggcaaccagcagaaccaggccctgctgcacaagcacatcaacctcttcctgaaccctggcatcctggaggccgtgaccatgcagcacatcttcatgaacaacttccagctgtgcagcgagatcaatgaaagagtggtgcagcactttgtgcactgcatcgagacccatggaagaaatgtgcagtacatcaagttcctgcagaccatcgtgaaggccgagggcaagttcatcaagaagtgccaggacatggtgatggccgagctggtgaacagcggggaggatgtgctggtgttctacaatgaccgggccagcttccagaccctcatccagatgatgaggtctgagcgggacaggatggatgagaacagccccctgatgtaccacatccacctggtggagctgctggccgtgtgcacagagggcaagaatgtgtacacagagatcaagtgcaacagcctgctgcccctggatgacatcgtgcgggtggtgacccatgaggactgcatccctgaggtgaagatcgcctacatcaacttcctgaaccactgctacgtggacacagaggtggagatgaaggagatctacaccagcaaccacatgtggaagctgtttgagaacttcctggtggacatctgccgggcctgcaacaacaccagtgacaggaagcatgctgacagcatcctggagaagtatgtgacagagatcgtgatgagcatcgtgaccaccttcttcagcagccccttcagtgaccagagcaccaccctgcagacccggcagcctgtgtttgtgcagctgctgcagggcgtcttccgggtgtaccactgcaactggctgatgcccagccagaaggcctctgtggagagctgcatccgggtgctgagtgatgtggccaagagccgggccatcgccatccctgtggacctggacagccaggtgaacaacctcttcctgaagagccacagcatcgtgcagaagacagccatgaactggaggctgagcgccagaaatgctgcccggcgggacagcgtgctggccgccagccgggactacagaaacatcatcgagcggctgcaggacatcgtgtctgccctggaggaccggctgcggcccctggtgcaggccgagctgtctgtgctggtggatgtgctgcacaggcctgagctgctcttcccagaaaatacagatgcccggaggaaatgtgagagcggcggcttcatctgcaagctgatcaagcacaccaagcagctgctggaggagaatgaggagaagctgtgcatcaaggtgctgcagaccctgcgggagatgatgaccaaggaccggggctatggagagaagctgatcagcattgatgagctggacaatgctgagctgcccccagccccagacagtgaaaatgccacagaggagctggagcccagcccccccctgcggcagctggaggaccacaagagaggagaggccctgcggcaggtgctggtgaaccgctactatggaaatgtgcggcccagcggccggcgggagagcctgaccagctttggaaatggccccctgtctgctgggggccctgggaagccaggcggcggcggcggcggcagcggcagcagctccatgagcagaggagagatgagcctggccgaggtgcagtgccacctggacaaggagggcgccagcaacctggtgattgacctgatcatgaatgccagcagtgacagagtcttccacgagagcatcctgctggccatcgccctgctggagggcggcaacaccaccatccagcacagcttcttctgccgcctgacagaggacaagaagtctgagaagttcttcaaggtgttctatgacaggatgaaggtggcccagcaggagatcaaggccaccgtgacagtgaacaccagtgacctgggcaacaagaagaaggatgatgaggtggacagagatgcccccagcaggaagaaggccaaggagcccaccacccagatcacagaggaggtgcgggaccagctgctggaggccagcgctgccaccaggaaggccttcaccaccttccggcgggaggccgaccctgatgaccactaccagcctggagagggcacccaggccacagctgacaaggccaaggatgacctggagatgtctgctgtgatcaccatcatgcagcccatcctgcgcttcctgcagctgctgtgtgagaaccacaacagagacctgcagaacttcctgcgctgccagaacaacaagaccaactacaacctggtgtgtgagaccctgcagttcctggactgcatctgtggcagcaccaccggcggcctgggcctgctgggcctgtacatcaatgagaagaatgtggccctgatcaaccagaccctggagagcctgacagagtactgccagggcccctgccacgagaaccagaactgcatcgccacccatgagagcaatggcatcgacatcatcacagccctgatcctgaatgacatcaaccccctgggcaagaagaggatggacctggtgctggagctgaagaacaatgccagcaagctgctgctggccatcatggagagcagacatgattctgaaaatgctgagcgcatcctgtacaacatgaggcccaaggagctggtggaggtgatcaagaaggcctacatgcagggcgaggtggagtttgaagatggagaaaatggagaagatggagctgccagccccagaaatgtgggccacaacatctacatcctggcccaccagctggcccggcacaacaaggagctgcagagcatgctgaagccaggcggccaggtggatggagatgaggccctggagttctacgccaagcacacagcccagattgaaattgtgcggctggacaggaccatggagcagatcgtgtttcctgtgcccagcatctgtgagttcctgaccaaggagagcaagctgcgcatctactacaccacagaaagagatgagcagggcagcaagatcaatgacttcttcctgcggagtgaagatctcttcaatgagatgaactggcagaagaagctgcgggcccagcctgtgctgtactggtgtgccaggaacatgtccttctggagcagcatctccttcaacctggccgtgctgatgaacctgctggtggccttcttctaccccttcaagggcgtgcggggcggcaccctggagccccactggagcggcctgctgtggacagccatgctgatcagcctggccatcgtcatcgccctgcccaagccccacggcatccgggccctgattgccagcaccatcctgcggctcatcttctctgtgggcctgcagcccaccctcttcctgctgggcgccttcaacgtgtgcaacaagatcatcttcctgatgagctttgtgggcaactgtggcaccttcacccggggctaccgggccatggtgctggatgtggagttcctgtaccacctgctgtacctggtgatctgtgccatgggcctgtttgtgcatgagttcttctacagcctgctgctgtttgacctggtgtaccgggaggagaccctgctgaatgtcatcaagtctgtgaccagaaatggccgcagcatcatcctgacagctgtgctggccctgatcctggtgtacctgttcagcatcgtgggctacctgttcttcaaggatgacttcatcctggaggtggaccggctgcccaatgaaacagctgtgcctgagaccggggagagcctggccagcgagttcctgttcagtgatgtgtgccgggtggagagcggggagaactgcagcagccctgccccccgggaggagctggtgcctgctgaggagacagagcaggacaaggagcacacctgtgagaccctgctgatgtgcatcgtgacagtgctgagccacggcctgcggagcggcggcggcgtgggagatgtgctgaggaagcccagcaaggaggagcccctgtttgctgcccgggtcatctatgacctgctcttcttcttcatggtgatcatcatcgtgctgaacctgatctttggagtcatcatcgacacctttgctgacctgcggtctgagaagcagaagaaggaggagatcctgaagaccacctgcttcatctgtggcctggagcgggacaagtttgacaacaagacagtgacctttgaggagcacatcaaggaggagcacaacatgtggcactacctgtgcttcatcgtgctggtgaaggtgaaggacagcacagagtacacaggccctgagagctatgtggccgagatgatcaaggagaggaacctggactggttccccaggatgagggccatgagcctggtgtccagtgacagcgagggggagcagaatgagctgaggaacctgcaggagaagctggagagcaccatgaagctggtgaccaacctgagcggccagctgtctgagctgaaggaccagatgacagagcagaggaagcagaagcagagaattggcctgctgggccaccccccccacatgaatgtgaacccccagcagcctgcctag

SEQ ID NO: 65908 - DNA, 8232 bp, Artificial Sequence
  derived and/or modified sequence
atgagcgacaagatgagcagcttcctgcacatcggcgacatctgcagcctctacgccgaaggatccactaacggatttatctctacattgggcctggttgacgacagatgcgttgtccagccagaaaccggcgacctaaataatcctccaaagaagttccgtgattgtcttttcaagctgtgtccaatgaacagatattcagctcagaaacaattctggaaggctgccaagccaggcgccaattcaaccaccgatgcggttctcctgaacaaacttcaccatgccgccgacctggagaagaagcagaatgaaaccgaaaaccgcaagctactgggtaccgtgatccagtacggaaatgtaatccagttgctgcacttgaagtctaacaagtatctgaccgtcaacaaaagactccctgcgttgttggagaagaacgccatgagagtgactttagatgaagcaggcaatgagggctcctggttctacatccagcctttctacaagctcaggagtattggtgacagcgtggtgatcggggacaaggtcgtcttgaacccggtgaacgccgggcaaccactgcacgcttcttcccaccagcttgtcgataaccccgggtgcaacgaggtcaattccgtgaactgtaatacgtcgtggaaaatcgtgctatttatgaagtggtccgataataaagatgacatccttaaaggaggcgacgtggtgagactatttcacgctgagcaagagaaatttcttacttgtgacgagcatcggaaaaaacagcacgtgttcctaaggacaaccgggaggcagtcagcaacatccgccacgagctctaaggcactgtgggaggtcgaggtggttcagcatgacccttgcaggggtggcgcagggtattggaattcactctttcgctttaaacatttggccactggccattacttggccgctgaagtcgaccctgaccaggacgcttctagatcccgtcttcgaaacgcacaggaaaaaatggtttatagtctcgtgtcggtccctgagggcaacgatatcagtagcatcttcgagcttgaccccaccaccctgagggggggcgatagtcttgttccacggaattcatatgtcaggcttcgacatctgtgtactaatacctgggtccacagtacgaatattcccattgataaggaggaggagaaaccagttatgctaaagattggcacatccccagtgaaagaggataaagaggcgtttgctatcgtcccagtgtcacccgcggaggtccgggatctggatttcgctaacgacgcgtctaaggtcctaggatcaatcgctggcaaactggaaaaaggaactataactcagaacgaaaggcggtcagtcacaaaactcctggaagaccttgtctatttcgtgacaggcggtacgaactcagggcaagacgtgttagaagtggtattttcaaagcccaaccgcgagcggcagaaactgatgcgggaacagaatattctgaagcaaatatttaagcttctacaggccccttttacagattgcggtgacggcccaatgctgagactggaagagctgggcgaccagagacacgccccatttaggcacatctgcaggttgtgttaccgcgttctgagacactcacagcaggattaccgtaagaatcaggaatacatagcaaaacagttcggcttcatgcaaaagcagattggatatgatgtgctggccgaagacactatcacagctctgctgcacaacaacagaaaactgctcgagaagcacatcaccgctgccgaaattgacaccttcgtttcactagtccgcaaaaatagggagccacggtttctagactacctgagtgacttgtgtgttagtatgaataaaagtatcccagttacccaggagctaatatgtaaggccgttctgaacccgactaacgccgacatcctaattgagacaaagctagtgttgtcacggtttgagtttgaaggcgtgtcatccaccggcgagaatgcactcgaagccggtgaagacgaggaggaggtgtggctgttttggagggattccaataaggaaataaggtccaagagtgttagggaactggcacaagacgctaaagagggccagaaggaagatcgggacgtactctcctattatcgttatcagttgaacctgttcgcgagaatgtgtttggataggcaatacctggctattaatgaaatcagcggacaactcgacgtggacttgattttgcgctgcatgagcgacgagaacctgccttacgacctgcgagctagtttctgtcgcctgatgcttcatatgcatgtggacagagacccccaagaacaagtgacccccgtaaagtatgccaggctgtggtctgagatcccatctgaaatcgccattgatgattatgattccagtggcgccagcaaggatgaaataaaagagaggttcgctcagactatggagttcgtggaagagtacctgcgtgacgttgtatgccagcgatttccctttagcgataaggaaaagaataaactgacatttgaggtggtaaacctggccaggaatttaatctactttggtttctataatttctctgatctgctccgtctgactaaaatcctcctggccatcctggattgtgtccatgttaccaccatttttcccatttccaagatggccaagggagaagaaaataaaggcaataacgatgtggaaaagttgaagtcctccaatgtcatgcgcagcatacatggagttggcgaactaatgactcaggtggtgctgcgcggtggtggcttcttacccatgaccccgatggcagctgcgccggagggaaacgtgaaacaggctgagcccgaaaaggaagacattatggttatggacacgaagctcaaaatcattgagatcctgcagttcattttgaatgttcgcctcgactaccgcatcagctgccttttgtgcatcttcaaacgtgagttcgatgaatctaacagccaaacgagtgaaacctccagcggaaattccagccaggaggggccatccaacgtcccaggtgcactggactttgagcatatcgaagagcaggctgaagggatcttcggcggatctgaagagaatacacccttagacctagatgaccacggaggccgtacgttcctgagagtgctgctgcatctgactatgcatgactatcctcccctggttagcggcgctctacagctgctgtttcgtcatttctcgcagcggcaggaggtcctccaagctttcaagcaggtgcagctcctggtcacgagccaagacgttgacaattataagcagatcaaacaagacttggaccagttgcgttcgattgtggaaaagtctgagttgtgggtgtacaagggtcagggacccgatgagacaatggatggggccagcggtgaaaatgagcataaaaagactgaagaagggaataacaaacctcagaaacacgaatccacgtcatcttacaattatcgcgtcgtgaaggaaatactaatcaggctgtcaaagctgtgcgttcaggaaagcgcttcagtgcggaaatcgagaaagcagcagcaacgcctactgcggaatatgggtgctcacgctgttgtcctcgaactcctccagatcccgtatgagaaagccgaagacacaaagatgcaagaaataatgcgcctcgctcacgaattcctccagaacttttgcgccggcaatcagcagaatcaggcacttctccacaagcatatcaatctgttcctgaaccctggaatcctcgaggcggtcacgatgcaacatatcttcatgaacaattttcagctgtgctcagagatcaacgagagggtggtgcagcattttgttcactgcattgaaacccatggaaggaacgtacagtatataaagttccttcagacaatcgtgaaggcagagggaaaattcattaagaagtgtcaggatatggtaatggctgagctagttaactcgggcgaggatgtcttggtcttctataatgatcgagcatcattccagacgcttatccaaatgatgcgatccgaacgagaccgcatggacgagaattctcccctcatgtatcatattcacttggtggagttgctcgctgtctgcaccgagggcaagaatgtctacaccgaaatcaaatgcaattctttgctgcccttggatgatattgtcagagttgtcacgcacgaagactgtattcccgaggtgaagatcgcatacattaattttctcaatcattgttacgtggataccgaagttgagatgaaagagatctatacaagcaaccatatgtggaaactgtttgagaacttccttgtcgacatttgccgtgcttgtaataacacaagtgacagaaaacacgcagactctattctggagaaatacgtaacagagattgttatgtccattgttacaaccttctttagctcgccattcagcgaccaatccaccactctccaaaccagacaacctgtcttcgttcagctgctccagggtgttttcagggtctaccattgcaactggctgatgcccagccagaaagccagcgtagaatcctgcattagggtactgtctgatgttgcgaagtctagggccatcgccatccctgtagatctggattctcaggttaacaacctgttcttgaagtcccactctatagtccagaagactgccatgaattggaggctgagcgcgaggaacgcagcacgtcgggatagcgtcctggcagcgtctcgcgactaccggaatattattgagaggctgcaggatatcgtctcggctcttgaagacaggctcaggcccctcgtccaggccgaactgtcagtgcttgtggacgtgctccataggccagaattgctcttccccgaaaataccgatgcccggcggaagtgtgagtctgggggcttcatatgcaaacttataaaacacaccaaacaactgcttgaagagaacgaggagaagctgtgcatcaaggtgctgcagactctcagggagatgatgacaaaggataggggctacggcgaaaaattaatctctatcgatgagctggacaacgcggagttgcctcctgctcctgactcagaaaacgccactgaggagctggagccatccccacccctccgtcaactggaggaccataagaggggagaggccctccggcaggtactcgttaatcggtactacggtaatgtgcgcccatccgggcgccgggagagcttgacctctttcggcaatggccccttgagcgctggcggccccggcaagccggggggcggcggcggaggttctggatcaagcagcatgagtcggggagaaatgtccctggccgaagtgcagtgtcacctcgataaggagggtgcttctaacctggtgattgatttgattatgaacgcctcctcagaccgtgtttttcacgagagcattttgttagccattgccctcttagagggaggtaacaccacaatccagcactcttttttctgcaggcttactgaagataaaaaaagtgaaaaattcttcaaggttttttacgataggatgaaagtggcgcagcaagaaatcaaggcaaccgtcacagtgaatactagcgaccttggtaacaagaagaaggacgacgaagtcgatagggacgctccctcaagaaagaaggccaaggagccaaccacccaaattacagaggaagttcgcgaccaattgctcgaggcctctgcagccaccagaaaggctttcacgaccttccggagggaggccgacccggacgatcactatcagcccggagaaggaacccaagcgacagccgataaggccaaagatgacctagaaatgtctgccgtgatcacaattatgcaacctattctgcgcttcttgcagctactttgtgaaaatcacaatagagacctgcaaaatttcctgagatgccagaacaataaaacgaactacaatctggtctgcgaaaccctgcaatttctggattgcatctgcggctctacaacagggggactgggtctcctcggtctgtacattaacgagaagaacgtcgcactgattaatcagactttggagtcccttacagagtattgccagggtccgtgtcacgaaaaccagaactgtatcgccacacacgagagcaatggcatcgacatcattaccgctctcattctgaacgacatcaaccctttaggcaaaaagcggatggacctggttctggaattgaagaacaatgcttctaaactcctgctcgctatcatggagtctaggcacgactctgagaatgctgaaaggatcctgtacaacatgcgaccaaaggaactggtagaggtaattaagaaagcatacatgcagggcgaggtagagttcgaagacggagaaaatggcgaggatggtgccgcttcgcctcgtaacgtgggccacaacatatatattctcgctcatcagttggcaagacataataaggagctgcagagtatgttgaagccaggaggtcaggtcgatggggatgaagctctggaattttatgctaaacatactgcacagattgaaatcgtcagacttgaccgcacaatggaacagattgtcttccctgtgcctagcatctgtgagtttctcactaaagaatccaaattgcggatttactacactacagagcgcgacgaacaagggtcgaagataaatgatttctttctcagatctgaagacttgtttaacgagatgaattggcaaaagaagctgagggcccagcctgtgctctattggtgtgctaggaacatgtccttctggtcatcaattagtttcaatttggctgtgctcatgaatctcctcgtcgcattcttctatcctttcaagggcgtccgcggagggactttagaacctcactggtctggactgctttggactgccatgctgatatccctggcaatcgtgattgcccttcctaaaccacacggcattcgtgcactgatcgcatccacgatacttcggttgatttttagcgttggcctgcagcccaccctgttcctgctgggcgctttcaatgtttgcaataagatcattttcctgatgtcttttgtgggaaactgtggtacattcaccaggggctacagggctatggtgctggacgtggagtttctgtaccacctactgtacctggttatttgcgctatgggcctcttcgtgcatgaattcttttacagtttgctgctcttcgacttagtttacagggaggagactttattaaacgtgataaaaagcgtaacgcggaacgggcgcagtatcatactcaccgcagtgctggcactaattctcgtctatctcttctcaatcgtgggatacctgttcttcaaggatgacttcatcctcgaagtcgacagacttcctaacgaaaccgcggttcccgaaacaggggagtcgctggcctcagagtttttgttttcagatgtgtgtcgggtcgagtctggagaaaattgcagtagtcctgcaccaagggaagaattggtcccagctgaagaaacagaacaggataaggagcatacatgtgaaaccctgctgatgtgcattgtgactgtgctgtctcacgggctccggtcaggtggtggggtaggtgacgtgctgagaaagccgtcaaaagaagagcccctgtttgctgcgagagtcatctacgatctgctgtttttttttatggtaattatcatcgtcttgaatctgatctttggcgtgatcatagatacatttgccgatcttaggtccgagaagcaaaaaaaagaggaaattctaaagacaacatgttttatatgcggcctggagcgcgacaaatttgacaacaagaccgtcaccttcgaagaacatatcaaggaagaacacaacatgtggcactatctgtgttttatcgtactagtcaaagtcaaggactccaccgagtataccggccctgagagctatgtggcagaaatgatcaaggagcgtaatctagactggtttcctaggatgagggccatgagcttggtaagctctgattccgagggcgaacagaatgaactcaggaacctgcaagagaaactagaatccacaatgaaactggtgacaaacttgtccggtcaactgagcgaactaaaggaccagatgacagagcagaggaagcaaaagcaaaggattgggctgctggggcaccctcctcacatgaacgtgaatccgcagcagccagcctag

SEQ ID NO: 65909 - DNA, 8232 bp, Artificial Sequence
  derived and/or modified sequence
atgagcgacaagatgagcagcttcctgcacatcggcgacatctgctctctctatgcagaaggatctactaatggatttatatccacgctcgggcttgtcgacgacagatgcgtggtgcagcctgaaacaggagatctgaacaatccccctaagaagtttagggattgcctgttcaagctctgtcccatgaataggtattctgcccagaagcagttttggaaagccgctaaacctggcgctaattccaccactgatgccgttctattgaataaactgcatcatgccgctgatctggagaaaaagcagaatgagacagagaatcgaaagcttctgggcactgtgattcagtacggcaatgtcattcagctgctgcaccttaaaagcaataaatacctgactgtcaacaagagacttccagccctgctcgaaaaaaatgccatgagggtcacactcgacgaagccggtaacgaggggagctggttttatatccagcctttttataaattgaggtctatcggagattccgtggtgatcggagacaaggtggttctgaatcctgtaaacgctggccagccactgcatgcatcgagccaccaactggtggacaatcccggttgcaatgaggtgaactcagtaaattgcaataccagttggaaaattgtgttgtttatgaaatggagtgacaacaaggacgacattctgaaggggggagacgtggtccggctgtttcacgctgaacaggagaagtttcttacatgtgacgaacataggaaaaaacagcacgtattccttaggaccacggggagacagagcgccactagtgccacatctagtaaggccctctgggaagttgaggtcgtgcagcacgatccttgtcgcgggggtgccggctactggaatagcctgttcaggttcaaacacctggccacgggccactaccttgctgcagaagtggaccccgaccaggacgcgagccgctcccgcctgcggaacgcccaggagaagatggtttactccctagtgtccgtacccgaaggaaacgatatctctagcatcttcgagctcgatcctactacccttagagggggcgatagtctcgtgcccagaaatagttacgtacgtctgcgccatctctgcacaaatacatgggtgcactccacaaacattccaatcgataaggaagaagagaagccagtgatgctcaaaattggaacctctccagtgaaggaggacaaagaggcctttgccatcgtgcccgtgtcccctgccgaagtaagggacctggactttgcgaacgacgcttcaaaagtgctgggtagtattgccggcaagttggagaaaggcacaataactcagaacgaacgtagatccgtcactaaactgctggaggacctcgtgtatttcgtgacagggggcactaattccggccaggacgtactggaggtagtcttctctaagccaaatcgtgagaggcagaagctgatgagggagcagaatatactaaaacaaatcttcaaacttctgcaggcaccgtttacagactgcggagacggacctatgctaaggctggaggaactgggtgaccagcggcatgctcccttccgacatatctgtagactttgctaccgggtgcttcgccatagtcaacaagactaccgcaagaatcaggaatacatcgctaagcaatttgggttcatgcagaagcaaatcgggtatgatgtgctagctgaggatacaataaccgctctcctgcataacaatagaaagctgttggagaaacacattaccgctgccgaaatagacacttttgtcagccttgtcagaaagaatcgggaaccccgttttctggattatctcagcgacctgtgcgtgagcatgaacaaaagtattcctgttactcaagaactgatttgtaaagctgtgttaaatccaacaaatgctgatattctgatcgagacgaagctggttctatcacgctttgagttcgagggcgtgagttccactggcgagaacgccctggaggcaggggaggacgaggaagaagtctggctgttctggagagatagcaacaaagagattcgctccaagtcagtccgcgaattggctcaggacgccaaagaagggcagaaggaagacagagatgtgctgtcatattatcgctatcagctgaacctgtttgcccgaatgtgtctagatcgccagtacctggctatcaacgaaatcagcggccaactggatgtggatctgatcctgagatgcatgtctgacgagaacctgccctatgacttgcgggcatccttttgtcgccttatgctgcacatgcatgtggatcgtgacccccaggagcaggtgacacctgtaaaatacgctcgcctctggtctgagataccttctgagatcgcaattgatgattacgactctagcggggccagcaaggatgagattaaggaacgcttcgctcagaccatggaatttgtcgaggaatatctgagagatgtggtgtgtcaaagatttcccttcagtgacaaggaaaaaaacaagctgactttcgaggtggtcaacctcgcccgcaatctgatttattttggtttttataacttttcggatctgcttcgcctgactaaaatcctcctggccattttggactgcgtgcatgtgaccacgatattcccaatctccaagatggccaaaggtgaagagaataagggcaacaacgacgttgagaaactgaagtcctcaaatgttatgcgcagcatccacggagtgggcgagttgatgacacaggtcgttctgcggggtggcggatttctccctatgacaccgatggccgccgctccagaaggaaacgtgaaacaagcagagccagaaaaggaggatattatggtgatggataccaaactcaagattattgaaatccttcagttcatcctgaatgttagacttgattatcgaatatcgtgccttctctgtatatttaaaagggagtttgatgagtccaactcccagacctcagagacctcttccggcaactcttctcaggagggcccgagcaacgtccctggggccctggactttgaacatattgaagagcaggcagagggcattttcggcggctccgaggaaaacacacccttggatttagatgatcatggcggccggacattcctgcgggttctgctgcacctgaccatgcacgactaccctcccctggtttccggcgccctgcagttactgttccgccatttttcccagcgccaggaggtgcttcaggcattcaagcaggtgcagttgctagtcacatcacaagacgtggacaactacaagcagattaaacaggatctcgatcagcttcgcagtattgtggaaaagagcgagctctgggtctacaagggacagggacccgacgaaactatggatggggctagtggcgagaatgagcataagaagactgaggaggggaataacaagccgcaaaagcacgagtccacatctagctacaactaccgggtagtaaaagagatccttatccgactgagcaaactgtgtgtccaggaatctgctagcgtgagaaaaagtcgaaagcagcagcaacgtctcctcaggaatatgggtgcacacgccgtggtgctagagttgttacagataccgtatgaaaaagcagaagacacgaagatgcaggaaatcatgcggttggcccacgaatttctgcagaacttctgtgccggaaatcagcagaatcaagccctccttcataagcacattaacctgtttttgaaccctggcattcttgaagccgttacaatgcagcacatcttcatgaacaactttcagctgtgctccgagatcaacgagcgcgttgtgcagcacttcgtccactgcatagagacccatggtcgcaacgtacagtatattaagttcttacagactatcgttaaggccgaaggcaaattcattaaaaagtgccaggatatggtaatggcggaattagtcaatagtggcgaagatgtgctggtgttctacaacgatcgtgcttctttccagaccttaatccagatgatgcggtctgagagggacaggatggatgagaacagcccactgatgtatcatatccacttggtcgaactgttggcagtgtgtaccgaggggaagaatgtgtacaccgaaattaaatgcaacagtctgctcccactcgacgacattgttcgcgtggtcacccacgaagactgcattcccgaggtaaagatagcgtacattaattttttgaaccactgctatgtggatactgaagtggaaatgaaggaaatctacacatctaaccatatgtggaaactgttcgagaacttcctggtagatatttgcagagcatgcaacaatacttccgataggaaacacgctgactccattctggaaaaatacgttaccgagatcgtcatgagtatcgtaacaacgttcttctcatctcctttttccgatcagtccacgacactgcagactcgccaaccggtcttcgtccagctgctgcagggtgtgtttagggtttaccattgcaactggctgatgccctctcagaaggcatcagtagagagctgtatccgcgtgctgagcgatgtagccaaaagtcgcgccatagccattccggtagacctcgacagccaagtgaacaatctgtttctgaaaagccattcgattgtccaaaagaccgccatgaactggagactgtctgcacggaatgctgctcgcagggatagtgtgctcgccgcaagtcgagattaccggaacataatagaaagactccaggatatcgtttcagctctggaggataggctccggcctcttgtacaagcggagctgtctgtgctcgtggatgtactgcatagacctgagctgctcttcccagagaacactgacgcccgtcggaaatgtgaatccggcggcttcatttgcaagctgatcaagcacactaagcagctgttggaggagaacgaggagaaactttgcataaaagtgctacaaaccctgcgcgaaatgatgaccaaagatagagggtatggagagaagctcatatccattgatgagctggataacgcagagctgccgcctgcccccgactcagagaatgccaccgaagaactggagccaagcccccctctgaggcagttggaggatcacaagcgcggcgaagcattgagacaggtgctggtaaaccgatactatggaaatgtgcgtcccagtggacgccgtgagtcacttacatcattcggcaacggtcctctgagcgcgggcggtcccggtaaacccggggggggcggaggtggatctggctcttccagcatgagtcggggcgaaatgtcactggctgaagtccaatgccatctggacaaggagggggcttcaaacctagtcatcgatttgattatgaacgcttcatctgatcgcgtgttccacgagtccatcctgctcgctatagccctcctggaaggaggcaatactaccatccagcactccttcttctgccggttgacagaagataagaagtctgaaaaattcttcaaggtgttctacgatcgcatgaaggtcgcgcagcaggagattaaagcaactgttaccgttaatactagtgacttgggcaacaaaaagaaagacgacgaggtggaccgcgacgcgcctagcagaaaaaaggcaaaagagcctaccacccagataaccgaagaggtgcgcgatcagttgttggaggcaagcgctgccacgcgaaaagcgttcaccacattccggcgagaagccgaccccgatgaccattaccagccaggagaaggtacgcaggccacagctgataaagccaaggatgatctggagatgagtgccgtgatcacaatcatgcaacctatactgcggtttctgcagctcctatgtgaaaaccataacagagatctccagaacttcctcagatgccagaataacaagaccaattataatctggtgtgcgagaccttacagtttctcgactgcatttgtggctccactacaggcggcctaggtctcttgggcctgtatattaacgaaaaaaacgtcgctctaatcaatcagaccctcgagtccctgaccgagtattgtcaggggccctgccacgagaatcaaaactgtatcgctacccacgagtctaatggcattgacatcattaccgccctgatactcaatgacattaacccccttggcaagaaaagaatggatctggttctagagttaaagaacaacgcctcaaagctcctcctcgcgattatggaatctagacatgactcggagaatgccgagcgcatcctctacaacatgagaccaaaggagctcgtggaagtaattaaaaaggcctatatgcaaggggaagtcgagtttgaggatggggaaaacggtgaggatggtgcggcctcccctagaaatgtgggccacaatatttatatccttgcacaccagctggcacgtcacaataaggaactacaatctatgctcaagccaggaggccaagttgatggtgacgaggcactggaattttacgctaagcatactgctcaaatcgagatcgtgcggctggaccggacaatggagcaaatcgtattccctgtgcctagcatctgcgaatttctgacgaaagaatccaaacttagaatttattacacgaccgaacgagacgaacagggttctaaaatcaatgattttttcctgcgatctgaagacctcttcaacgaaatgaactggcaaaagaagctgcgtgcccagcccgtgctgtattggtgtgcaaggaatatgagtttttggtcttctatcagttttaacctcgctgtcctcatgaacttgttggttgcgttcttctaccctttcaaaggagtcagaggcggcaccttggagccacattggtccggactgctgtggaccgctatgctcattagtcttgccatcgtgatagctctgcctaagccccacggcattcgggcactgatcgcatcaaccatcttgagactcatattttccgtgggactgcaaccgactctgttcctgctcggcgcctttaatgtctgcaacaagataatcttcctgatgtcctttgtgggaaattgcggcacttttacacgcggctatagggcaatggttctagacgtggagtttctgtaccacctactttatctggttatttgcgcaatggggctgtttgtgcacgaattcttttacagtctgctgctgtttgacctggtctatagagaagagacgctcctgaatgtgattaaatcagtaacccgcaatggtcgttccataatcctcactgctgttctcgcccttatcctggtgtatctgttcagtattgtcggctacctgttctttaaggacgacttcatactggaggttgaccggctcccaaacgaaactgctgtcccggagaccggggagtcgcttgccagcgagtttctgttcagcgacgtgtgtagagtcgaaagtggcgaaaactgcagctctcccgctcctagggaggaattggtgcccgctgaagagactgagcaagacaaagaacacacctgcgagacgctcctgatgtgcatagtcacagtcttgtcccacggactcaggtctggcggcggggtgggagacgtgctgcggaagccatctaaggaagaacctctcttcgctgcccgcgtgatttatgatctgctgttcttttttatggtgattataatcgtgctcaacctcatttttggcgttatcattgatacttttgcagatctacgctctgagaagcaaaagaaagaagagatcttgaaaacaacttgtttcatttgcggcctggaacgggacaagttcgataataaaaccgtgactttcgaggagcatattaaagaagaacacaatatgtggcactatctgtgttttatcgtgttggtcaaggtgaaggattcgacagaatacacaggaccagagtcctatgtggcggagatgatcaaggagagaaacctcgattggtttccacggatgagagccatgagtctggtgtcttcagattccgagggggagcagaacgagctcaggaatctgcaggaaaaattggagagcaccatgaaacttgtgactaatctcagcggacagctaagcgagctgaaagaccaaatgacagaacagagaaagcaaaagcaacgcatcggccttttgggacaccccccccacatgaatgtgaatcctcaacagccagcgtag

SEQ ID NO: 65910 - DNA, 8231 bp, Artificial Sequence
  derived and/or modified sequence
atgtccgataaaatgagtagtttcctgcacatcggggatatatgcagtctgtatgcggaaggctcaacgaatggctttataagcactctgggcctcgtggacgacaggtgcgtggtgcagccagagactggcgatttgaataatcctcctaagaagttccgcgattgcctgtttaagctgtgcccaatgaaccgatacagtgctcagaaacagttttggaaagccgctaagccaggcgcaaattctacgaccgatgctgtcctgctcaataagcttcatcatgctgcagatttagaaaagaagcagaatgaaacagaaaatcgaaaattgctgggcacagtcatccagtacggcaatgtgattcagctgctgcaccttaaatcgaacaaatatttgaccgtgaataagcggttacccgctctactcgaaaaaaacgcaatgcgtgtgaccttggacgaggcaggaaacgagggatcctggttctacatccagccattctacaaactgaggtcaatcggggatagtgtggtgataggagataaagtggtgctgaacccagtgaacgctggtcaacctctgcacgccagcagccatcaactggtggacaaccccggttgcaatgaagtcaactccgttaactgcaatacttcatggaaaatagttctgtttatgaagtggtcagataacaaggacgacatacttaaaggcggagatgtggtacggctctttcacgccgagcaagagaaattcctgacatgtgacgagcacaggaaaaagcagcacgtgttccttcggactacaggacggcagtccgcaacatcggctaccagctccaaagccctctgggaagttgaggtggtacagcacgatccttgtagaggcggagctggctattggaacagtctatttaggttcaaacacctggcaactggtcattatcttgccgctgaggtggaccctgaccaagatgcgtcccgcagtaggctgcgcaacgctcaggagaagatggtctactccctcgtatcagtgccagagggcaatgacatcagtagtatatttgagctcgatcctacaaccttaagaggcggagatagcctggtacctaggaactcatatgtgcgtttgcggcatttgtgcaccaatacgtgggttcacagtacaaatattcccattgataaagaggaggagaaacctgtgatgctgaagatcggcacctctcccgtgaaggaggataaggaagctttcgccatagtgcctgtgtcaccagccgaggtgcgagaccttgactttgcaaatgatgcgtcgaaggtgctaggaagtattgctgggaaattggagaaaggcacaataacgcagaacgaaaggcgcagcgttacaaagctcctggaagatctagtttatttcgtgacgggcggtaccaattctggccaagacgtgttggaggtcgtcttctccaaaccgaacagggagcggcagaaactgatgcgcgaacagaacatccttaagcagatattcaagctactccaagcacctttcaccgactgtggcgatggaccaatgctgaggctcgaagagcttggcgaccagcggcacgcccctttccggcatatctgccggctgtgctatcgggttctgcgtcatagccagcaagattatcggaagaatcaggagtatatcgccaaacagttcggctttatgcagaagcaaatagggtatgacgtactcgctgaggacaccatcaccgcactcttacacaataacaggaagttactggagaaacatattacagctgcagagatcgacaccttcgtgtcattggtgaggaagaatagggagccccgtttcctggactatctgtccgatctgtgcgtgtctatgaacaagtcaataccagtcacccaggaattaatctgcaaagccgtcctcaatccaaccaacgcggatatactcatcgaaaccaaactcgtgctatctcgattcgagtttgagggcgttagttccacgggagagaacgccctggaggcaggcgaagacgaagaggaggtttggcttttctggagagactcaaataaagagatcagatcaaaaagtgtgagagaactcgcgcaagacgctaaagaggggcaaaaagaagaccgggacgttcttagctattatcgctatcagttgaatctgttcgccaggatgtgccttgatcgccagtatctggctatcaacgaaattagcggtcagctggatgttgatctgatcctgcggtgcatgagtgacgagaatctcccatacgatctgagagcatcattctgccgactgatgttgcacatgcacgtggaccgcgacccccaagaacaggtgaccccagtcaaatatgcgaggttgtggtccgagataccgtctgagattgccattgacgactatgactcaagcggcgcttccaaggatgagataaaagaacgctttgcccaaaccatggagtttgtggaggagtatctgagagacgtagtgtgccagcgattcccgttctcggacaaggaaaaaaacaagctgacatttgaggtggtgaacctagccaggaaccttatttatttcggcttttataacttcagcgatctccttcggttaaccaagatattgctcgctattctggattgcgtccacgtgacaacaatatttccaattagcaagatggccaagggtgaggaaaataagggaaataacgacgttgagaagctgaaatcctctaacgttatgagaagcattcatggtgtgggcgagctgatgacacaggtggtgctcagaggaggtggctttttgcccatgacccccatggcggctgcaccggaagggaacgtaaaacaggccgagcccgaaaaggaggatataatggtcatggacactaagcttaaaatcatcgagattcttcagtttatactgaacgtaaggctggattatcggatttcctgccttctgtgcatttttaagcgggagttcgatgagagcaactcccagacatcagagacatcgtccggcaattcttctcaggaaggaccctcgaatgtccccggagcccttgatttcgagcatatcgaagagcaggcagaagggatttttggcggatccgaggaaaataccccccttgacctggatgatcacgggggacgcacgttcctgcgggtcttgctgcatctgactatgcacgattatccacccttagtttccggagctcttcagcttctcttcagacatttttcccagaggcaagaagtactgcaggcctttaaacaggtacagcttctggtgacctcgcaggatgttgataattacaagcaaataaaacaggatttggaccagctcagatcaatcgtggaaaagtcagagttatgggtatacaagggccagggtcccgatgagacaatggatggcgcatctggcgaaaacgagcacaagaaaaccgaggagggcaacaataaaccccagaagcacgagtctacctccagctacaactaccgtgtggtgaaggagatccttattcgtctgtcaaaactctgcgtgcaggagtctgcctctgttcgcaagtctagaaagcagcagcagcggttgctgagaaacatgggcgcacatgccgtggtcctagaactgttgcagattccttatgaaaaagcagaagataccaaaatgcaggagatcatgagacttgcccacgagtttctacaaaacttctgtgcgggtaaccaacagaatcaagccctgctccataagcatatcaatctgttcctaaacccgggaatactggaggcagtaactatgcaacacatctttatgaacaacttccagctgtgttctgaaataaatgagcgcgttgttcagcacttcgttcactgtatcgaaacacacggtcgcaatgttcagtacattaagtttttacagaccattgtgaaggctgagggcaagttcatcaaaaagtgtcaggatatggtaatggcagaactggtgaacagcggcgaggacgtcctggtgttctacaatgaccgcgctagcttccagactctgatacagatgatgcgaagtgagcgagatcggatggacgaaaactcacctctgatgtaccacatacacctggtggagctgctggctgtgtgcactgaggggaaaaatgtgtacaccgaaattaaatgtaattcactcctcccgcttgacgatatcgtgcgtgttgtcacacacgaggactgtattcccgaagttaagatcgcctatatcaattttctaaaccactgctatgtagacacagaggtagagatgaaagaaatatatacttccaaccatatgtggaagctgttcgagaatttcctggttgatatttgccgtgcatgcaataacacgagtgatagaaaacacgccgattctatcctcgagaaatacgtcaccgaaattgtcatgagtattgtaacaacgttcttcagctcccccttctccgatcagagcacaaccttacagactcggcaaccagtcttcgtccagttactgcagggcgtattcagggtctatcactgcaattggctgatgccttcccagaaggctagtgtggaatcatgcatcagagttctgtccgacgtggcgaagtctagagccattgcaatccccgtcgacctggactcacaggtgaataatctgtttctcaagtctcatagcatcgtccagaagacagcaatgaattggagactgtcagcccgaaacgctgccagacgtgattctgtgctggctgcttcccgggactatagaaacataattgagcgtttgcaagacatcgtaagcgcactggaggatcgactgagacccctagtgcaagcagaactctcggtcctggtcgatgtcctgcacaggcccgaactgctcttccccgagaacactgacgctcgcaggaagtgtgaatccggaggcttcatctgtaagttgattaagcatactaaacagctgttagaggagaacgaagagaaactgtgcattaaggtgctacaaacacttcgggagatgatgacaaaggacagagggtacggagaaaaactcatttcgatagatgagctggataacgccgagttaccacccgctcctgactcagagaacgctacagaggagctggagccctcacccccactgagacaactggaggatcacaaacgaggtgaagcactcaggcaagtcctggtgaacaggtactacggaaacgtaagacccagcggaaggagggagtcactaacatctttcgggaatggtcctttgagcgccggaggaccaggcaaaccaggcggtggcggtgggggatctggatcttcgtctatgagcagaggagagatgagcctggccgaagtgcagtgccaccttgacaaagaaggagcctccaacctagtcattgatctgattatgaatgcgtcttccgatagagtgttccacgaatcaattctgttggccatcgcactgttggaaggtggcaacactactatccagcattcattcttctgccgactgacggaggataagaaaagtgagaagtttttcaaagtcttttacgacagaatgaaggttgctcaacaagagatcaaagccacagtgaccgtcaacacgtcggatttaggcaataaaaagaaagacgatgaggtagatcgagatgccccttcccggaaaaaggcaaaggagcccacaacccaaatcaccgaagaagtgcgggatcagctgttggaagcttcagccgcaacacgcaaagcctttaccaccttccggcgagaggccgacccagatgaccactatcagccaggcgaaggaactcaggccacagcagataaagccaaggacgatctcgaaatgtccgccgtgattaccatcatgcagccgatactgagatttctacaattactgtgcgaaaatcacaacagagatctacaaaactttctgagatgccagaacaataaaaccaattataacctggtgtgcgagactctgcagtttctggactgcatatgtgggagcactacgggaggcttgggcttgctgggtctctatattaacgagaagaacgttgccctcattaaccagactctggaatccttaaccgagtattgtcagggcccatgtcacgagaaccagaattgtattgcaacccatgaaagtaatggtatagacatcatcactgctctgattctgaacgatatcaatcccttggggaagaagcgcatggatctggtgcttgaactgaagaacaatgcctctaagttgctgctggctattatggaatcccgccatgatagcgagaacgctgagaggatcttgtataatatgcgccctaaagaactggtggaggttattaaaaaggcatacatgcaaggagaggtggaatttgaggacggtgaaaacggcgaagacggggcagcttcaccgcgaaacgtcggccataatatctatatcctagcacatcagctggcgagacataataaggagctgcagtcgatgctaaagcccggaggtcaagtagatggggacgaagccttagaattttacgcgaagcacaccgcacagattgaaattgtcaggttggacagaaccatggagcagatcgtgtttcctgtaccgtcaatctgtgagttcctgacaaaagaaagcaaactgcgaatatactacaccaccgaaagagacgagcaaggcagcaagattaatgatttcttcctcaggtcagaagacctcttcaacgagatgaactggcagaagaagttacgagctcagcccgtgctatattggtgtgctcgcaatatgtccttttggagctccattagttttaacctggctgtgctgatgaacctattagttgcctttttctacccatttaagggggtgcgcggaggaacgctcgagccgcactggtccggcttgctctggaccgctatgctcatcagccttgcaatcgtgatcgccttacctaaaccccacggaatacgcgctctcatagcctcgacgatcttgcggctgatattttccgtgggtctacaacccaccctgttcctgctcggagcctttaatgtctgcaataagataatcttcctcatgagtttcgtgggcaactgtggtacgttcactagggggtaccgagccatggtgttggacgtagagtttctgtatcatctgctgtacttagtcatttgcgctatgggccttttcgtccacgagtttttctactcactgttactgttcgacctggtttatcgggaagaaactctgttgaacgtgattaagagtgtgacaaggaacggacgaagtatcatcttgacggcagtccttgctctgattctcgtgtacctcttctctatcgtgggctacctgttctttaaggacgacttcatcctggaggtagatcggttaccgaatgagacagccgtcccggagacaggggagagtctggcttctgaattccttttcagtgatgtatgtcgcgtagagagtggtgagaactgctccagccctgcaccccgtgaagagttagtacctgccgaagaaacggagcaggacaaggagcacacgtgcgagactcttttgatgtgcattgtgacagtactgtcacatggcctcaggtcaggaggtggggtcggcgacgtgctgcgtaaaccatccaaggaggagcccctctttgctgccagagtaatatacgatctgctcttcttctttatggtcattataatcgtcttgaatttaatttttggcgtaatcatcgataccttcgcagacctccgctctgagaagcaaaagaaggaggagattctcaagactacctgcttcatatgcggcctcgaaagggacaaatttgacaataaaacagtaacttttgaggagcacattaaggaggagcacaacatgtggcattatttgtgttttatagtgttggttaaggtgaaagatagcacagaatacacaggacccgagagttatgttgccgagatgattaaagagaggaatttggattggtttccaaggatgcgggctatgagccttgtaagctctgatagtgagggtgagcagaatgaactacggaatctccaggagaaactcgaatcgaccatgaaactggtcactaatctgtccggccagctgagcgaactcaaagatcaaatgaccgaacaaaggaaacaaaagcagcgaattgggttgctcgggcatcccccacatatgaacgttaatccccagcagcccgctta

SEQ ID NO: 65911 - DNA, 8231 bp, Artificial Sequence
  derived and/or modified sequence
atgagcgacaaaatgagctccttcctccacataggcgatatttgctccctttacgccgaaggtagcaccaacggatttatttcgactttgggcctggtggacgacaggtgtgtagtgcagcccgaaaccggagacctgaacaatcctcccaaaaaattccgcgactgtctctttaagctttgcccaatgaaccggtatagcgctcagaagcagttctggaaggctgcaaagcccggagccaattccactacggatgccgtgcttctcaataagctacaccatgccgctgatctcgagaagaagcaaaatgaaactgagaacagaaagctgctcggtaccgttatccagtacgggaacgtcatacagctgttgcacctgaagtcgaacaagtatctgacagtgaataagcgactgcctgcactcctcgagaaaaatgcaatgcgcgtcactcttgatgaggccggaaacgaaggatcttggttttatattcagccgttttataagctgagaagtatcggggattccgtcgtgatcggggacaaggtggtgctgaatccagttaacgctggccagcctcttcacgcatcttcacaccaattagtggacaacccaggctgtaacgaagttaacagtgtcaattgcaacacaagttggaaaatcgtgctcttcatgaagtggtccgacaacaaagacgacatactgaagggcggagatgtggtccgcttgtttcacgcagaacaggagaagtttcttacctgtgatgaacaccgtaagaaacagcacgtgtttctgcgcacaacagggagacaatctgccactagcgcgacttctagcaaggcactgtgggaagttgaggtggtgcagcacgacccgtgtaggggcggagccggttactggaatagcctgtttaggttcaagcacctcgccactggacattatctggccgcagaagtagacccagaccaagacgcctctagaagccgcctccgaaacgcccaagaaaagatggtgtacagtctggtctccgtccccgagggcaacgacatttcttctatattcgaactggacccaaccactctgcgcggtggcgactcgctcgtgccaagaaactcctacgtgcgtctccggcacctgtgtacaaatacgtgggtacactccacgaacatcccaatagacaaagaagaagaaaagccagtgatgctgaagatcggaacatcacctgtgaaggaagacaaggaagccttcgcaattgtgcctgtgtcccctgcagaagtgagagatcttgacttcgcaaacgatgcaagcaaggtgttaggctccatagccggtaaactggagaaaggaacaattacgcagaatgaacggaggagtgtcaccaagctgcttgaggatctagtgtacttcgtgactggcggaacaaattccggtcaagatgtcttagaggtggtgtttagtaagcctaatcgcgaacgccagaaactgatgcgagaacagaatatccttaaacagatctttaaactgctgcaggctcctttcaccgactgtggagacggccctatgctccgcctggaggagttgggggatcagagacatgccccattccgacatatttgccggctctgttacagagtgttgaggcatagtcagcaggattaccgaaaaaaccaggagtatatcgcaaaacagttcggattcatgcagaagcagattggctacgacgtgctcgccgaagatacaatcaccgctctgcttcataataatcggaagctgctggagaagcacattaccgccgcagagattgacacgttcgtgtcgctggtgcgtaagaaccgagagcctcggttcttggattacttgtccgacctttgtgtgtcaatgaacaaatccatacctgtaacgcaggagctaatctgtaaggcagtcctaaatccgacaaatgctgacatcttaatcgagacaaaactcgtgctaagccgatttgagtttgagggtgtttcctctaccggggagaatgcattggaggccggagaagacgaagaggaggtgtggctgttctggcgcgacagtaacaaagagatccggtcaaaatctgtgagggagctggctcaggacgccaaagaaggacagaaagaagacagggacgtgctgtcttattaccgttaccagttgaatctgttcgcccgaatgtgcctggaccgccagtatttggccattaacgaaatcagcggccagctcgacgtggatcttattctcagatgtatgtccgacgagaacctgccttatgacttgcgggcatcgttttgtcggctcatgctgcatatgcacgttgacagggacccacaggagcaggtgactcccgtgaagtatgctcggctttggtctgaaattccctccgaaatcgccattgacgattacgacagttcaggggcatccaaggatgaaatcaaggaaaggttcgcccagacgatggagtttgttgaagaatatctgcgggacgttgtatgtcagcggtttcccttctctgataaagagaaaaataagttgacattcgaagtcgtgaaccttgccaggaacctgatctactttgggttttataacttcagtgacctgctacggttaaccaaaatactgctcgccatacttgattgcgttcacgttacaaccatctttcccatatcgaaaatggctaaaggggaagagaacaaaggcaacaatgacgtggaaaaactgaagagtagtaacgtgatgcggtctatacacggcgtgggcgagcttatgacccaggtcgtattgcgaggcggaggttttcttccgatgactcctatggcggcagctcccgaaggcaatgtcaagcaagccgagccagaaaaagaggacatcatggtgatggataccaagctgaagattattgagattctgcagttcatattgaacgtaaggcttgactatcgcatatcatgtctgctgtgcatcttcaagagggagttcgatgagagcaatagtcagactagtgagacttcttcaggcaactcttcccaggaaggacctagtaatgtgcctggggcacttgactttgagcatatcgaggagcaggcagaaggcatctttggcggatccgaagagaataccccgcttgacctcgatgatcacggaggtaggacttttctccgcgtgctgctccacctcacaatgcacgattacccacccctggtctcaggtgcactgcagctcctttttaggcatttctcccagcgccaggaggtcctgcaggcttttaagcaagtacagttgctcgtaacatcacaggatgtggacaattataagcagatcaagcaagaccttgaccagttgcgtagcattgtggaaaagagtgagttatgggtctataaggggcagggccctgatgagactatggacggagcaagcggggagaacgaacataagaagaccgaagagggaaataataagccccagaaacatgagagtacttctagttataactacagagtagtgaaagagatccttatcaggctgtctaagctttgtgtccaggaatcagcgagtgtgagaaaatccagaaagcagcagcagcgattgctgcgcaatatgggtgctcatgcagtcgtgttggagctactccagataccttatgaaaaggccgaggacacgaagatgcaggaaattatgaggctcgcgcatgaattcctccaaaatttttgtgctggaaatcagcagaaccaggcactgctccacaaacacattaacctttttctcaaccccggtatcctggaggccgtcaccatgcaacatatctttatgaataacttccagctgtgtagcgagattaatgaacgtgtggtacagcactttgttcactgcattgagacccacgggcgaaacgtgcagtacattaagtttctgcagaccattgtgaaagctgagggcaagtttatcaaaaagtgccaggatatggtaatggccgaattagttaactccggcgaggacgtcctggtgttctataacgatcgggcatccttccagactttaattcagatgatgcggagcgaaagagaccggatggacgaaaacagcccgctcatgtatcacatccacctcgttgaattgctagctgtatgtacagaaggcaagaatgtgtataccgaaataaagtgcaactcgttacttccactagatgacattgtgcgtgttgtaactcacgaagattgtattccggaagtgaagatcgcatatattaacttcctgaatcattgctacgtcgacactgaagtcgagatgaaagaaatttacaccagcaatcatatgtggaaacttttcgagaactttctggtggatatttgtcgggcatgcaacaatacatctgatagaaaacacgcggattccattctggagaagtacgtgaccgagatcgttatgtccattgtaacaacttttttcagctctcctttctcagatcaatccaccacattacaaactcgccaacctgtgttcgtgcagctgctgcagggcgttttcagagtgtaccactgcaactggcttatgcccagtcaaaaagcctccgtggaaagctgcatccgcgtgctttctgatgtggcaaaaagtagggctattgcaatccccgttgatctggactctcaagtgaacaacttatttctgaaatcacatagtatagtccagaagaccgctatgaactggagattaagcgcaaggaatgccgctcgacgggactctgtacttgccgcaagccgcgattataggaacattatcgagcgccttcaggacattgtgtccgccctggaggacaggcttaggcccttggtgcaggctgagttgagcgtgctggtggatgtcttgcatcggccagagctattgtttccagagaacaccgacgctaggaggaaatgtgagagcgggggatttatttgcaagctaatcaaacacactaagcagctgcttgaggaaaatgaagagaagctttgtatcaaggtcttacaaacactccgagagatgatgaccaaagaccggggatatggagaaaaactaatatcaattgacgaactcgacaacgcagaactcccacccgcacccgattccgagaatgcaaccgaggagctcgaaccctctcctcccctgcggcagctcgaggaccataaacgaggagaagctcttcggcaggttcttgttaaccgatactacggcaacgttaggccatccggcagacgagaaagcttgacttctttcggaaacggacccttgtccgcgggtggcccaggcaaaccaggtggaggcggtggaggcagtggatcctctagcatgtcgcgcggtgagatgtccctcgcagaggtgcagtgccacctcgacaaggagggagcctctaacctagtcatagacctaattatgaacgcaagtagtgaccgcgttttccacgagagcatcctgctggccatcgcattgctcgagggaggcaatactaccatccagcatagctttttttgccgcctcactgaggataagaaatccgaaaaatttttcaaggtattctacgataggatgaaagtagctcagcaggagatcaaggccacggtaacagtgaatacaagcgatctcggcaataaaaaaaaggacgacgaggtggaccgggacgctccctctcgcaagaaagccaaggagccaacaacccagataactgaagaagtgagggaccagctgctggaagcctccgccgctacaagaaaggcattcactactttcagaagagaagctgaccccgacgaccactatcagcctggagaggggacccaggccacagcggacaaggcaaaggatgacctggagatgagcgccgttatcaccatcatgcagcccatcctgcggttcctgcagctcctttgcgagaaccacaaccgcgatctgcagaattttctgcgctgtcagaacaataaaacgaactataacctggtgtgcgagaccctccagtttcttgattgcatatgcggcagcactactggcggactaggtctgctgggtctgtacatcaatgagaaaaacgtggcactcattaatcaaacactggagtctctgacggagtactgccagggcccatgccatgaaaatcagaattgcatcgctacacatgagtccaacggcatcgacataatcacagcccttatcctcaatgatatcaatcccctcggtaagaagcgaatggatctagtattggaactgaaaaacaacgcaagtaaactattgctggcaattatggagtcgaggcacgactcggagaacgccgaacgtatcttgtacaacatgcgcccaaaggaactggtagaagttattaagaaggcctacatgcagggagaagtggaattcgaagatggcgaaaacggtgaagatggcgcagcttccccgagaaacgttggtcacaatatctatatcctcgcacaccagctggctaggcacaataaggagctgcaatccatgctgaaaccaggcggacaggtggatggcgacgaggctttggagttttatgccaagcatactgctcagattgaaatagtacgcctggatcggactatggaacagatcgtattccctgttccctctatttgcgagtttcttacaaaagagagcaagcttaggatctactacaccactgagcgcgatgagcagggttcaaagatcaatgacttctttcttcgcagcgaagatcttttcaacgaaatgaattggcaaaaaaagttgagggctcagcccgtgctgtactggtgtgccagaaatatgtctttctggagctccatctctttcaatcttgccgtgctgatgaacctgctggtggccttcttctaccctttcaaaggggtgagagggggaaccctggagcctcactggtccggattattgtggaccgccatgttgatttccctggctattgtgatcgcccttcctaagccgcacgggattcgagctttaatagctagtacaatattacgcctgatcttttccgtcggactgcaacctacccttttcctgctgggtgcgtttaatgtgtgtaataagattatattcctgatgtctttcgtgggtaattgtggtacatttactcggggttatcgtgccatggtcttggatgtggagttcttgtaccacctgttatatctggtaatttgtgcaatgggcctcttcgtccatgagttcttctactctctgctgctgttcgatttggtctacagagaggagaccttgctcaatgtgatcaagagtgtgacacggaacggcagaagcattatattaaccgcagtgctagccctgatcctggtgtacctgttttctatagtgggctacctgttttttaaagatgatttcatcctagaagtagatcgcttgccgaatgagactgcagtgcctgagaccggggagagccttgcttccgaatttctgttttccgatgtgtgtcgcgtggaatcgggggagaattgttcgtctcctgcccctcgcgaagagctggtgcctgccgaggaaaccgagcaggacaaggagcatacctgtgaaactctgctcatgtgtatcgtcacagtcttaagccatgggctgcggagtgggggtggtgtaggagatgtgttgagaaaaccctcaaaggaggaaccgctgttcgcagccagggtgatatatgacctcctctttttttttatggtcatcatcattgtacttaatctgatctttggagtgatcattgatacatttgccgatcttcggtccgagaaacaaaaaaaggaggagatcctcaaaactacatgtttcatctgtggcctggaacgcgacaagttcgataataaaacagttaccttcgaggagcatatcaaagaagagcacaatatgtggcactatctgtgcttcattgtgctagttaaagtgaaagactccacagaatacaccgggccagagtcctatgtagcagaaatgattaaagaaaggaatttagattggtttccaaggatgcgagcaatgtcgctcgtgagtagcgatagtgagggggagcagaatgaattacgtaacctccaggaaaagctggagtctactatgaagctagtgacgaacctgtccggtcagttatctgaactcaaggatcagatgacagagcagaggaagcagaaacaacgcataggcctccttggtcaccctccacacatgaatgtgaacccccagcagccggcata

SEQ ID NO: 65912 - DNA, 8232 bp, Artificial Sequence
  derived and/or modified sequence
atgagcgacaagatgagcagcttcctgcacatcggcgacatctgcagcctgtacgccgagggcagcaccaacggcttcatcagcaccctgggcctggtggacgacagatgcgtggtgcagcccgagaccggcgacctgaacaacccccccaagaagttcagagactgcctgttcaagctgtgccccatgaacagatacagcgcccagaagcagttctggaaggccgccaagcccggcgccaacagcaccaccgacgccgtgctgctgaacaagctgcaccacgccgccgacctggagaagaagcagaacgagaccgagaacagaaagctgctgggcaccgtgatccagtacggcaacgtgatccagctgctgcacctgaagagcaacaagtacctgaccgtgaacaagagactgcccgccctgctggagaagaacgccatgagagtgaccctggacgaggccggcaacgagggcagctggttctacatccagcccttctacaagctgagaagcatcggcgacagcgtggtgatcggcgacaaggtggtgctgaaccccgtgaacgccggccagcccctgcacgccagcagccaccagctggtggacaaccccggctgcaacgaggtgaacagcgtgaactgcaacaccagctggaagatcgtgctgttcatgaagtggagcgacaacaaggacgacatcctgaagggcggcgacgtggtgagactgttccacgccgagcaggagaagttcctgacctgcgacgagcacagaaagaagcagcacgtgttcctgagaaccaccggcagacagagcgccaccagcgccaccagcagcaaggccctgtgggaggtggaggtggtgcagcacgacccctgcagaggcggcgccggctactggaacagcctgttcagattcaagcacctggccaccggccactacctggccgccgaggtggaccccgaccaggacgccagcagaagcagactgagaaacgcccaggagaagatggtgtacagcctggtgagcgtgcccgagggcaacgacatcagcagcatcttcgagctggaccccaccaccctgagaggcggcgacagcctggtgcccagaaacagctacgtgagactgagacacctgtgcaccaacacctgggtgcacagcaccaacatccccatcgacaaggaggaggagaagcccgtgatgctgaagatcggcaccagccccgtgaaggaggacaaggaggccttcgccatcgtgcccgtgagccccgccgaggtgagagacctggacttcgccaacgacgccagcaaggtgctgggcagcatcgccggcaagctggagaagggcaccatcacccagaacgagagaagaagcgtgaccaagctgctggaggacctggtgtacttcgtgaccggcggcaccaacagcggccaggacgtgctggaggtggtgttcagcaagcccaacagagagagacagaagctgatgagagagcagaacatcctgaagcagatcttcaagctgctgcaggcccccttcaccgactgcggcgacggccccatgctgagactggaggagctgggcgaccagagacacgcccccttcagacacatctgcagactgtgctacagagtgctgagacacagccagcaggactacagaaagaaccaggagtacatcgccaagcagttcggcttcatgcagaagcagatcggctacgacgtgctggccgaggacaccatcaccgccctgctgcacaacaacagaaagctgctggagaagcacatcaccgccgccgagatcgacaccttcgtgagcctggtgagaaagaacagagagcccagattcctggactacctgagcgacctgtgcgtgagcatgaacaagagcatccccgtgacccaggagctgatctgcaaggccgtgctgaaccccaccaacgccgacatcctgatcgagaccaagctggtgctgagcagattcgagttcgagggcgtgagcagcaccggcgagaacgccctggaggccggcgaggacgaggaggaggtgtggctgttctggagagacagcaacaaggagatcagaagcaagagcgtgagagagctggcccaggacgccaaggagggccagaaggaggacagagacgtgctgagctactacagataccagctgaacctgttcgccagaatgtgcctggacagacagtacctggccatcaacgagatcagcggccagctggacgtggacctgatcctgagatgcatgagcgacgagaacctgccctacgacctgagagccagcttctgcagactgatgctgcacatgcacgtggacagagacccccaggagcaggtgacccccgtgaagtacgccagactgtggagcgagatccccagcgagatcgccatcgacgactacgacagcagcggcgccagcaaggacgagatcaaggagagattcgcccagaccatggagttcgtggaggagtacctgagagacgtggtgtgccagagattccccttcagcgacaaggagaagaacaagctgaccttcgaggtggtgaacctggccagaaacctgatctacttcggcttctacaacttcagcgacctgctgagactgaccaagatcctgctggccatcctggactgcgtgcacgtgaccaccatcttccccatcagcaagatggccaagggcgaggagaacaagggcaacaacgacgtggagaagctgaagagcagcaacgtgatgagaagcatccacggcgtgggcgagctgatgacccaggtggtgctgagaggcggcggcttcctgcccatgacccccatggccgccgcccccgagggcaacgtgaagcaggccgagcccgagaaggaggacatcatggtgatggacaccaagctgaagatcatcgagatcctgcagttcatcctgaacgtgagactggactacagaatcagctgcctgctgtgcatcttcaagagagagttcgacgagagcaacagccagaccagcgagaccagcagcggcaacagcagccaggagggccccagcaacgtgcccggcgccctggacttcgagcacatcgaggagcaggccgagggcatcttcggcggcagcgaggagaacacccccctggacctggacgaccacggcggcagaaccttcctgagagtgctgctgcacctgaccatgcacgactacccccccctggtgagcggcgccctgcagctgctgttcagacacttcagccagagacaggaggtgctgcaggccttcaagcaggtgcagctgctggtgaccagccaggacgtggacaactacaagcagatcaagcaggacctggaccagctgagaagcatcgtggagaagagcgagctgtgggtgtacaagggccagggccccgacgagaccatggacggcgccagcggcgagaacgagcacaagaagaccgaggagggcaacaacaagccccagaagcacgagagcaccagcagctacaactacagagtggtgaaggagatcctgatcagactgagcaagctgtgcgtgcaggagagcgccagcgtgagaaagagcagaaagcagcagcagagactgctgagaaacatgggcgcccacgccgtggtgctggagctgctgcagatcccctacgagaaggccgaggacaccaagatgcaggagatcatgagactggcccacgagttcctgcagaacttctgcgccggcaaccagcagaaccaggccctgctgcacaagcacatcaacctgttcctgaaccccggcatcctggaggccgtgaccatgcagcacatcttcatgaacaacttccagctgtgcagcgagatcaacgagagagtggtgcagcacttcgtgcactgcatcgagacccacggcagaaacgtgcagtacatcaagttcctgcagaccatcgtgaaggccgagggcaagttcatcaagaagtgccaggacatggtgatggccgagctggtgaacagcggcgaggacgtgctggtgttctacaacgacagagccagcttccagaccctgatccagatgatgagaagcgagagagacagaatggacgagaacagccccctgatgtaccacatccacctggtggagctgctggccgtgtgcaccgagggcaagaacgtgtacaccgagatcaagtgcaacagcctgctgcccctggacgacatcgtgagagtggtgacccacgaggactgcatccccgaggtgaagatcgcctacatcaacttcctgaaccactgctacgtggacaccgaggtggagatgaaggagatctacaccagcaaccacatgtggaagctgttcgagaacttcctggtggacatctgcagagcctgcaacaacaccagcgacagaaagcacgccgacagcatcctggagaagtacgtgaccgagatcgtgatgagcatcgtgaccaccttcttcagcagccccttcagcgaccagagcaccaccctgcagaccagacagcccgtgttcgtgcagctgctgcagggcgtgttcagagtgtaccactgcaactggctgatgcccagccagaaggccagcgtggagagctgcatcagagtgctgagcgacgtggccaagagcagagccatcgccatccccgtggacctggacagccaggtgaacaacctgttcctgaagagccacagcatcgtgcagaagaccgccatgaactggagactgagcgccagaaacgccgccagaagagacagcgtgctggccgccagcagagactacagaaacatcatcgagagactgcaggacatcgtgagcgccctggaggacagactgagacccctggtgcaggccgagctgagcgtgctggtggacgtgctgcacagacccgagctgctgttccccgagaacaccgacgccagaagaaagtgcgagagcggcggcttcatctgcaagctgatcaagcacaccaagcagctgctggaggagaacgaggagaagctgtgcatcaaggtgctgcagaccctgagagagatgatgaccaaggacagaggctacggcgagaagctgatcagcatcgacgagctggacaacgccgagctgccccccgcccccgacagcgagaacgccaccgaggagctggagcccagcccccccctgagacagctggaggaccacaagagaggcgaggccctgagacaggtgctggtgaacagatactacggcaacgtgagacccagcggcagaagagagagcctgaccagcttcggcaacggccccctgagcgccggcggccccggcaagcccggcggcggcggcggcggcagcggcagcagcagcatgagcagaggcgagatgagcctggccgaggtgcagtgccacctggacaaggagggcgccagcaacctggtgatcgacctgatcatgaacgccagcagcgacagagtgttccacgagagcatcctgctggccatcgccctgctggagggcggcaacaccaccatccagcacagcttcttctgcagactgaccgaggacaagaagagcgagaagttcttcaaggtgttctacgacagaatgaaggtggcccagcaggagatcaaggccaccgtgaccgtgaacaccagcgacctgggcaacaagaagaaggacgacgaggtggacagagacgcccccagcagaaagaaggccaaggagcccaccacccagatcaccgaggaggtgagagaccagctgctggaggccagcgccgccaccagaaaggccttcaccaccttcagaagagaggccgaccccgacgaccactaccagcccggcgagggcacccaggccaccgccgacaaggccaaggacgacctggagatgagcgccgtgatcaccatcatgcagcccatcctgagattcctgcagctgctgtgcgagaaccacaacagagacctgcagaacttcctgagatgccagaacaacaagaccaactacaacctggtgtgcgagaccctgcagttcctggactgcatctgcggcagcaccaccggcggcctgggcctgctgggcctgtacatcaacgagaagaacgtggccctgatcaaccagaccctggagagcctgaccgagtactgccagggcccctgccacgagaaccagaactgcatcgccacccacgagagcaacggcatcgacatcatcaccgccctgatcctgaacgacatcaaccccctgggcaagaagagaatggacctggtgctggagctgaagaacaacgccagcaagctgctgctggccatcatggagagcagacacgacagcgagaacgccgagagaatcctgtacaacatgagacccaaggagctggtggaggtgatcaagaaggcctacatgcagggcgaggtggagttcgaggacggcgagaacggcgaggacggcgccgccagccccagaaacgtgggccacaacatctacatcctggcccaccagctggccagacacaacaaggagctgcagagcatgctgaagcccggcggccaggtggacggcgacgaggccctggagttctacgccaagcacaccgcccagatcgagatcgtgagactggacagaaccatggagcagatcgtgttccccgtgcccagcatctgcgagttcctgaccaaggagagcaagctgagaatctactacaccaccgagagagacgagcagggcagcaagatcaacgacttcttcctgagaagcgaggacctgttcaacgagatgaactggcagaagaagctgagagcccagcccgtgctgtactggtgcgccagaaacatgagcttctggagcagcatcagcttcaacctggccgtgctgatgaacctgctggtggccttcttctaccccttcaagggcgtgagaggcggcaccctggagccccactggagcggcctgctgtggaccgccatgctgatcagcctggccatcgtgatcgccctgcccaagccccacggcatcagagccctgatcgccagcaccatcctgagactgatcttcagcgtgggcctgcagcccaccctgttcctgctgggcgccttcaacgtgtgcaacaagatcatcttcctgatgagcttcgtgggcaactgcggcaccttcaccagaggctacagagccatggtgctggacgtggagttcctgtaccacctgctgtacctggtgatctgcgccatgggcctgttcgtgcacgagttcttctacagcctgctgctgttcgacctggtgtacagagaggagaccctgctgaacgtgatcaagagcgtgaccagaaacggcagaagcatcatcctgaccgccgtgctggccctgatcctggtgtacctgttcagcatcgtgggctacctgttcttcaaggacgacttcatcctggaggtggacagactgcccaacgagaccgccgtgcccgagaccggcgagagcctggccagcgagttcctgttcagcgacgtgtgcagagtggagagcggcgagaactgcagcagccccgcccccagagaggagctggtgcccgccgaggagaccgagcaggacaaggagcacacctgcgagaccctgctgatgtgcatcgtgaccgtgctgagccacggcctgagaagcggcggcggcgtgggcgacgtgctgagaaagcccagcaaggaggagcccctgttcgccgccagagtgatctacgacctgctgttcttcttcatggtgatcatcatcgtgctgaacctgatcttcggcgtgatcatcgacaccttcgccgacctgagaagcgagaagcagaagaaggaggagatcctgaagaccacctgcttcatctgcggcctggagagagacaagttcgacaacaagaccgtgaccttcgaggagcacatcaaggaggagcacaacatgtggcactacctgtgcttcatcgtgctggtgaaggtgaaggacagcaccgagtacaccggccccgagagctacgtggccgagatgatcaaggagagaaacctggactggttccccagaatgagagccatgagcctggtgagcagcgacagcgagggcgagcagaacgagctgagaaacctgcaggagaagctggagagcaccatgaagctggtgaccaacctgagcggccagctgagcgagctgaaggaccagatgaccgagcagagaaagcagaagcagagaatcggcctgctgggccaccccccccacatgaacgtgaacccccagcagcccgcctag

SEQ ID NO: 65913 - protein, 400 aa, Artificial Sequence
  derived and/or modified sequence
MNPASAPPPLPPPGQQVIHVTQDLDTDLEALFNSVMNPKPSSWRKKILPESFFKEPDSGSHSRQSSTDSSGGHPGPRLAGGAQHVRSHSSPASLQLGTGAGAAGSPAQQHAHLRQQSYDVTDELPLPPGWEMTFTATGQRYFLNHIEKITTWQDPRKAMNQPLNHMNLHPAVSSTPVPQRSMAVSQPNLVMNHQHQQQMAPSTLSQQNHPTQNPPAGLMSMPNALTTQQQQQQKLRLQRIQMERERIRMRQEELMRQEAALCRQLPMEAETLAPVQAAVNPPTMTPDMRSITNNSSDPFLNGGPYHSREQSTDSGLGLGCYSVPTTPEDFLSNVDEMDTGENAGQTPMNINPQQTRFPDFLDCLPGTNVDLGTLESEDLIPLFNDVESALNKSEPFLTWL

SEQ ID NO: 65914 - protein, 21 aa, Artificial Sequence
  derived and/or modified sequence
MNPASAPPPLPPPGQQVIHVT

SEQ ID NO: 65915 - protein, 109 aa, Artificial Sequence
  derived and/or modified sequence
MNPASAPPPLPPPGQQVIHVTQDLDTDLEALFNSVMNPKPSSWRKKILPESFFKEPDSGSHSRQSSTDSSGGHPGPRLAGGAQHVRSHSSPASLQLGTGAGAAGSPAQQ

SEQ ID NO: 65916 - protein, 189 aa, Artificial Sequence
  derived and/or modified sequence
MNPASAPPPLPPPGQQVIHVTQDLDTDLEALFNSVMNPKPSSWRKKILPESFFKEPDSGSHSRQSSTDSSGGHPGPRLAGGAQHVRSHSSPASLQLGTGAGAAGSPAQQHAHLRQQSYDVTDELPLPPGWEMTFTATGQRYFLNHIEKITTWQDPRKAMNQPLNHMNLHPAVSSTPVPQRSMAVSQPNL

SEQ ID NO: 65917 - protein, 138 aa, Artificial Sequence
  derived and/or modified sequence
MNPASAPPPLPPPGQQVIHVTQDLDTDLEALFNSVMNPKPSSWRKKILPESFFKEPDSGSHSRQSSTDSSGGHPGPRLAGGAQHVRSHSSPASLQLGTGAGAAGSPAQQHAHLRQQSYDVTDELPLPPGWEMTFTATG

SEQ ID NO: 65918 - DNA, 1203 bp, Artificial Sequence
  derived and/or modified sequence
atgaaccccgccagcgcccccccccccctgcccccccccggccagcaggtgatccacgtgacccaggacctggacaccgacctggaggccctgttcaacagcgtgatgaaccccaagcccagcagctggagaaagaagatcctgcccgagagcttcttcaaggagcccgacagcggcagccacagcagacagagcagcaccgacagcagcggcggccaccccggccccagactggccggcggcgcccagcacgtgagaagccacagcagccccgccagcctgcagctgggcaccggcgccggcgccgccggcagccccgcccagcagcacgcccacctgagacagcagagctacgacgtgaccgacgagctgcccctgccccccggctgggagatgaccttcaccgccaccggccagagatacttcctgaaccacatcgagaagatcaccacctggcaggaccccagaaaggccatgaaccagcccctgaaccacatgaacctgcaccccgccgtgagcagcacccccgtgccccagagaagcatggccgtgagccagcccaacctggtgatgaaccaccagcaccagcagcagatggcccccagcaccctgagccagcagaaccaccccacccagaacccccccgccggcctgatgagcatgcccaacgccctgaccacccagcagcagcagcagcagaagctgagactgcagagaatccagatggagagagagagaatcagaatgagacaggaggagctgatgagacaggaggccgccctgtgcagacagctgcccatggaggccgagaccctggcccccgtgcaggccgccgtgaacccccccaccatgacccccgacatgagaagcatcaccaacaacagcagcgaccccttcctgaacggcggcccctaccacagcagagagcagagcaccgacagcggcctgggcctgggctgctacagcgtgcccaccacccccgaggacttcctgagcaacgtggacgagatggacaccggcgagaacgccggccagacccccatgaacatcaacccccagcagaccagattccccgacttcctggactgcctgcccggcaccaacgtggacctgggcaccctggagagcgaggacctgatccccctgttcaacgacgtggagagcgccctgaacaagagcgagcccttcctgacctggctgtag

SEQ ID NO: 65919 - DNA, 330 bp, Artificial Sequence
  derived and/or modified sequence
atgaaccccgccagcgcccccccccccctgcccccccccggccagcaggtgatccacgtgacccaggacctggacaccgacctggaggccctgttcaacagcgtgatgaaccccaagcccagcagctggagaaagaagatcctgcccgagagcttcttcaaggagcccgacagcggcagccacagcagacagagcagcaccgacagcagcggcggccaccccggccccagactggccggcggcgcccagcacgtgagaagccacagcagccccgccagcctgcagctgggcaccggcgccggcgccgccggcagccccgcccagcagtag

SEQ ID NO: 65920 - DNA, 570 bp, Artificial Sequence
  derived and/or modified sequence
atgaaccccgccagcgcccccccccccctgcccccccccggccagcaggtgatccacgtgacccaggacctggacaccgacctggaggccctgttcaacagcgtgatgaaccccaagcccagcagctggagaaagaagatcctgcccgagagcttcttcaaggagcccgacagcggcagccacagcagacagagcagcaccgacagcagcggcggccaccccggccccagactggccggcggcgcccagcacgtgagaagccacagcagccccgccagcctgcagctgggcaccggcgccggcgccgccggcagccccgcccagcagcacgcccacctgagacagcagagctacgacgtgaccgacgagctgcccctgccccccggctgggagatgaccttcaccgccaccggccagagatacttcctgaaccacatcgagaagatcaccacctggcaggaccccagaaaggccatgaaccagcccctgaaccacatgaacctgcaccccgccgtgagcagcacccccgtgccccagagaagcatggccgtgagccagcccaacctgtag

SEQ ID NO: 65921 - DNA, 417 bp, Artificial Sequence
  derived and/or modified sequence
atgaaccccgccagcgcccccccccccctgcccccccccggccagcaggtgatccacgtgacccaggacctggacaccgacctggaggccctgttcaacagcgtgatgaaccccaagcccagcagctggagaaagaagatcctgcccgagagcttcttcaaggagcccgacagcggcagccacagcagacagagcagcaccgacagcagcggcggccaccccggccccagactggccggcggcgcccagcacgtgagaagccacagcagccccgccagcctgcagctgggcaccggcgccggcgccgccggcagccccgcccagcagcacgcccacctgagacagcagagctacgacgtgaccgacgagctgcccctgccccccggctgggagatgaccttcaccgccaccggctag

SEQ ID NO: 65922 - DNA, 2103 bp, Artificial Sequence
  derived and/or modified sequence
ataattcaacagctcaactttcgggcccgcctctttcctgggggtgggagtttgctccaaactttgtttatgggacagtccgggagctgctgcggccgcgctgtctgcttctcctgcgcctccttttcgcccagcactagcgccttaggccagctcgggggatgtgagagccgaagcccttagactgccaggcacagagtcgggtcgggatttgtcagccaagcctcggctccagctccgcaatctcgggactcacccgagcgacccaggcccgacggcaagttcgggcgggacggcggccgccgcgcgctcaggctcagcttcgctgcccgcccagaagatgaatccggcctcggcgccccctccgctcccgccgcctgggcagcaagtgatccacgtcacgcaggacctagacacagacctcgaagccctcttcaactctgtcatgaatccgaagcctagctcgtggcggaagaagatcctgccggagtctttctttaaggagcctgattcgggctcgcactcgcgccagtccagcaccgactcgtcgggcggccacccggggcctcgactggctgggggtgcccagcatgtccgctcgcactcgtcgcccgcgtccctgcagctgggcaccggcgcgggtgctgcgggtagccccgcgcagcagcacgcgcacctccgccagcagtcctacgacgtgaccgacgagctgccactgcccccgggctgggagatgaccttcacggccactggccagaggtacttcctcaatcacatagaaaaaatcaccacatggcaagaccctaggaaggcgatgaatcagcctctgaatcatatgaacctccaccctgccgtcagttccacaccagtgcctcagaggtccatggcagtatcccagccaaatctcgtgatgaatcaccaacaccagcagcagatggcccccagtaccctgagccagcagaaccaccccactcagaacccacccgcagggctcatgagtatgcccaatgcgctgaccactcagcagcagcagcagcagaaactgcggcttcagagaatccagatggagagagaaaggattcgaatgcgccaagaggagctcatgaggcaggaagctgccctctgtcgacagctccccatggaagctgagactcttgccccagttcaggctgctgtcaacccacccacgatgaccccagacatgagatccatcactaataatagctcagatcctttcctcaatggagggccatatcattcgagggagcagagcactgacagtggcctggggttagggtgctacagtgtccccacaactccggaggacttcctcagcaatgtggatgagatggatacaggagaaaacgcaggacaaacacccatgaacatcaatccccaacagacccgtttccctgatttccttgactgtcttccaggaacaaacgttgacttaggaactttggaatctgaagacctgatccccctcttcaatgatgtagagtctgctctgaacaaaagtgagccctttctaacctggctgtaatcactaccattgtaacttggatgtagccatgaccttacatttcctgggcctcttggaaaaagtgatggagcagagcaagtctgcaggtgcaccacttcccgcctccatgactcgtgctccctcctttttatgttgccagtttaatcattgcctggttttgattgagagtaacttaagttaaacataaataaatattctattttcattttctgcaagcctgcgttcttgtgacagattatacagaattgtgtctgcaggattgattatgcagaatacttttctctttcttctctgctgccccatggctaagctttatgggtgttaattgaaatttatacaccaattgattttaaaccataaaaagctgaccacaggcagttacttctgagggcatcttggtccaggaaatgtgcacaaaattcgacctgatttacagtttcaaaaactgtattgatgacagtagtaccaaatgctttaaaaactatttaacttgagctttaaaaatcattgtatggatagtaaaattctactgtatggaatacaatgtaattttgaatcca

SEQ ID NO: 65923 - DNA, 1203 bp, Artificial Sequence
  derived and/or modified sequence
atgaaccctgcctctgcccctcccccccttcccccccccgggcagcaagtgattcatgttactcaagatctagatactgacctggaggctctcttcaattctgtgatgaacccaaagccctcctcatggcgaaagaagatccttcctgagtcattctttaaagagccggactccggctcccacagcagacagtctagtaccgactccagtggcggacatcctggacccaggctcgccggtggtgctcagcatgtgcggtcccatagttcccccgcttccctgcagctgggcactggcgcaggcgctgcaggctctcccgcgcagcagcacgcccatctgaggcagcagagctatgacgttaccgacgaactgcccctccctccaggctgggagatgacttttacagcgactggccagcgatatttcttgaaccatatcgagaaaattacaacttggcaagatccccgaaaagctatgaaccagccacttaaccacatgaatctccaccccgcagtctctagcaccccagttcctcaacgctccatggctgtctcccagcctaatcttgtaatgaatcaccagcatcagcaacagatggcgccatctactctgagccaacaaaatcatcctacgcaaaacccccctgccggactgatgagcatgcccaacgccctcacaactcagcagcagcagcaacagaaattgcgactgcaacgaatccaaatggagcgggagcgcatccgaatgcgtcaggaggagctcatgagacaggaagccgctttatgcaggcagctgccaatggaagccgagaccctcgcacctgtacaggccgctgtgaatcctccaaccatgacccctgatatgcggtccatcacaaacaattcctcggacccctttctgaatggcggcccatatcactcgagagagcaatctactgactcaggcctggggctcgggtgctatagcgttcctacaactccggaggacttcctcagcaatgttgatgagatggataccggagagaatgccggacagacacctatgaacatcaaccctcaacagacacggtttcctgactttttggactgtctgcctggcaccaacgtcgatctcgggaccttagaaagtgaggatcttatcccactcttcaatgacgttgaatcggctctgaataaatccgaaccctttctgacatggctctag

SEQ ID NO: 65924 - DNA, 1203 bp, Artificial Sequence
  derived and/or modified sequence
atgaaccccgcatcggctccaccccctctgcccccaccaggacagcaggtcatccatgtgactcaggatttggataccgatttggaggccctattcaatagtgtgatgaatcctaaaccttcttcttggcggaagaagattctccccgaatcattctttaaggagccagattccggctcccacagcaggcaaagctctactgattcatctggcgggcacccagggcctcggctcgccggtggagctcagcacgtgcggtctcactcgtcccccgcatccctccagctcggaacaggagctggtgccgccggaagcccagcacagcagcatgcacatctgagacaacagtcctacgacgttaccgatgagctcccccttccacccgggtgggaaatgactttcactgccacaggacagcgatattttctaaaccacattgagaagatcaccacttggcaggaccctcgaaaggccatgaaccaaccactgaaccacatgaatttacatcctgccgtcagcagcacccccgtaccccagcgatccatggcagtgtcccagccaaatctggtgatgaaccaccagcaccaacaacaaatggctccctcgactctgtcccagcagaaccatccaacccagaacccccccgccggcttgatgtcaatgccaaatgcacttaccacgcagcagcagcaacagcagaagctccggctgcaacggatccagatggaacgggagcggatccgtatgcgccaggaagaacttatgagacaggaagccgccctttgcagacagctccccatggaggccgagacgctcgccccggtacaggcggccgttaatccccccactatgacgcccgacatgcgaagtatcactaataactcttccgatcctttcctcaacgggggaccataccactcccgcgagcaatcaaccgattccggactcggcctgggctgttattctgtgcccacgacaccagaggattttctttccaatgtggacgagatggacaccggagagaacgcaggccagactcccatgaacattaaccctcagcagacccgctttcctgactttcttgactgcttgcctgggacaaatgtagatttagggaccctggaatccgaggacctgatccctttattcaacgacgttgaatctgcccttaacaagagtgaaccctttttgacatggctctag

SEQ ID NO: 65925 - DNA, 1203 bp, Artificial Sequence
  derived and/or modified sequence
atgaaccccgcttcagcacccccgcctttgcctcctccgggtcagcaggttattcacgtgacccaggacctggatacagatctcgaagcccttttcaatagtgtgatgaaccctaagccgtcctcctggcgaaagaaaatcctccctgaatcatttttcaaggaacctgattccggcagtcactcccggcagagctccacagacagttcgggaggccatcctggaccgagactcgctggtggagcgcagcacgtcagatcacactcatccccagcctcactgcagctgggcacaggtgccggggcagccggctccccagcacagcagcatgcccacttaaggcagcagagttatgacgttacagacgagctgccactaccccctggctgggaaatgaccttcaccgccaccggacagcgatattttctcaaccacatcgagaagataaccacctggcaggacccccgtaaggctatgaatcagccacttaatcatatgaacctccacccggccgtgtcctcaactccagtccctcaaagaagcatggccgtatctcagccgaacctagtgatgaatcaccagcatcaacaacagatggcacccagtactctctctcaacagaatcatcctacacagaatcctcccgctggattaatgagtatgcccaacgcattgacgactcagcagcaacagcagcagaagctgcgcctacagaggatacagatggaaagggaacgcatacgaatgcggcaggaagagctgatgcgacaagaagcagccctgtgtcgtcaacttcctatggaggctgagacactggcaccggttcaggctgctgtgaaccccccgacaatgactccagatatgcgctccattactaataattcttcagatccattccttaatggcggaccttatcactcaagagagcaatccaccgactcaggccttggtttagggtgttactccgtgcctactactcctgaggactttttgagtaacgttgatgagatggacaccggtgaaaacgccggtcagaccccgatgaacatcaatccccaacagacgcggtttcccgactttcttgactgcctgcctggtacaaatgtcgatcttggaaccctggaatcggaagacctcattccattatttaacgacgtcgaatcagctctgaataaaagcgagcccttcctcacctggctctag

SEQ ID NO: 65926 - DNA, 330 bp, Artificial Sequence
  derived and/or modified sequence
atgaatcccgctagtgctcctcctccattgccacctcccgggcagcaggtcattcacgtgacccaggacctggatacggacttagaggcattattcaactccgtcatgaaccctaaaccgtcttcctggcgtaaaaagattctccctgagagctttttcaaagagcctgactcaggttcccactcaaggcagtcttctactgacagcagcggaggccaccccggcccacgtctcgctggaggggctcagcacgtgaggtcacatagttcccctgcatccctgcaactgggaacgggtgccggggccgccggtagcccagcccaacaatag

SEQ ID NO: 65927 - DNA, 570 bp, Artificial Sequence
  derived and/or modified sequence
atgaatcccgccagcgcaccaccacccctccctccacctggccaacaggtgatacacgtgacccaggacttggacacagatctggaggcactgttcaatagtgtgatgaaccccaagccaagctcgtggcgcaaaaagatcctgccagaaagtttttttaaggaacccgattctggatctcactcaaggcagtccagcacagactcttcggggggacatcctggaccacgcctggcaggcggggcccagcatgtgcgcagtcatagttcccccgcaagcctgcagctcggtacaggtgccggcgccgctggctcccccgcacagcagcacgctcacctgcgtcagcagagctacgatgtcaccgacgaactgcccttgccaccagggtgggagatgacctttacagcgactggacagcggtacttcctcaaccatattgagaaaataacaacatggcaggatcctcggaaggccatgaaccagcctttgaaccacatgaacctccaccccgcggtgtcatcgacaccagtcccacaaaggtccatggccgtttctcagcctaacttatag

SEQ ID NO: 65928 - DNA, 417 bp, Artificial Sequence
  derived and/or modified sequence
atgaacccagcatccgcaccgccacccctgcctcctcctggccaacaagtgatccacgtcacccaggatctggatactgacctcgaagccctattcaacagtgttatgaatcctaagccctcctcctggaggaagaagatcctgcctgagtcgttcttcaaagaaccagatagcggcagtcacagtcgtcagtcctcaactgatagctctgggggacaccctgggccacgcctggccggtggggctcagcacgtacgatcccactccagccccgcgagtttacagttaggcacgggcgccggtgctgccggtagccccgcccagcagcacgcgcacctgaggcagcagtcatacgatgtcaccgacgagttgccactgcccccgggttgggaaatgacttttactgcgactgggtag

SEQ ID NO: 65929 - DNA, 1203 bp, Artificial Sequence
  derived and/or modified sequence
atgaacccagccagcgcccccccacccctgcccccacctggccagcaggtgattcatgtgacccaggacctggacacagacctggaggccctcttcaacagcgtgatgaaccccaagcccagctcctggaggaagaagatcctgcctgagagcttcttcaaggagccagacagcggcagccacagccggcagagcagcacagacagcagcggcggccaccctggcccccggctggccggcggggcccagcacgtgcgcagccacagcagccctgccagcctgcagctgggcaccggggccggggctgctggcagccctgcccagcagcacgcccacctgcggcagcagagctatgatgtgacagatgagctgcccctgcccccaggctgggagatgaccttcaccgccaccggccagcgctacttcctgaaccacatcgagaagatcaccacctggcaggaccccaggaaggccatgaaccagcccctgaaccacatgaacctgcaccctgctgtgagcagcacccctgtgccccagaggtccatggctgtgtcccagcccaacctggtgatgaaccaccagcaccagcagcagatggcccccagcaccctgagccagcagaaccaccccacccagaaccccccagctggcctgatgtccatgcccaatgccctgaccacccagcagcagcagcagcagaagctgcggctgcagaggatccagatggagcgggagcgcatccgcatgaggcaggaggagctgatgaggcaggaggccgccctgtgccggcagctgcccatggaggccgagaccctggcccctgtgcaggccgctgtgaacccccccaccatgaccccagacatgaggagcatcaccaacaacagcagtgaccccttcctgaatggaggcccctaccacagccgggagcagagcacagacagcggcctgggcctgggctgctacagcgtgcccaccaccccagaggacttcctgagcaatgtggatgagatggacacaggagaaaatgccggccagacccccatgaacatcaacccccagcagacccgcttcccagacttcctggactgcctgcccggcaccaacgtggacctgggcaccctggagagtgaagatctcatccccctcttcaatgatgtggagagcgccctgaacaagtctgagcccttcctgacctggctgtag

SEQ ID NO: 65930 - DNA, 330 bp, Artificial Sequence
  derived and/or modified sequence
atgaacccagccagcgcccccccacccctgcccccacctggccagcaggtgattcatgtgacccaggacctggacacagacctggaggccctcttcaacagcgtgatgaaccccaagcccagctcctggaggaagaagatcctgcctgagagcttcttcaaggagccagacagcggcagccacagccggcagagcagcacagacagcagcggcggccaccctggcccccggctggccggcggggcccagcacgtgcgcagccacagcagccctgccagcctgcagctgggcaccggggccggggctgctggcagccctgcccagcagtag

SEQ ID NO: 65931 - DNA, 570 bp, Artificial Sequence
  derived and/or modified sequence
atgaacccagccagcgcccccccacccctgcccccacctggccagcaggtgattcatgtgacccaggacctggacacagacctggaggccctcttcaacagcgtgatgaaccccaagcccagctcctggaggaagaagatcctgcctgagagcttcttcaaggagccagacagcggcagccacagccggcagagcagcacagacagcagcggcggccaccctggcccccggctggccggcggggcccagcacgtgcgcagccacagcagccctgccagcctgcagctgggcaccggggccggggctgctggcagccctgcccagcagcacgcccacctgcggcagcagagctatgatgtgacagatgagctgcccctgcccccaggctgggagatgaccttcaccgccaccggccagcgctacttcctgaaccacatcgagaagatcaccacctggcaggaccccaggaaggccatgaaccagcccctgaaccacatgaacctgcaccctgctgtgagcagcacccctgtgccccagaggtccatggctgtgtcccagcccaacctgtag

SEQ ID NO: 65932 - DNA, 417 bp, Artificial Sequence
  derived and/or modified sequence
atgaacccagccagcgcccccccacccctgcccccacctggccagcaggtgattcatgtgacccaggacctggacacagacctggaggccctcttcaacagcgtgatgaaccccaagcccagctcctggaggaagaagatcctgcctgagagcttcttcaaggagccagacagcggcagccacagccggcagagcagcacagacagcagcggcggccaccctggcccccggctggccggcggggcccagcacgtgcgcagccacagcagccctgccagcctgcagctgggcaccggggccggggctgctggcagccctgcccagcagcacgcccacctgcggcagcagagctatgatgtgacagatgagctgcccctgcccccaggctgggagatgaccttcaccgccactggatag

SEQ ID NO: 65933 - DNA, 1203 bp, Artificial Sequence
  derived and/or modified sequence
atgaaccccgccagcgcccccccccccctgcccccccccggccagcaggttattcacgtgacgcaggacctggatacagatctggaagcgcttttcaatagcgttatgaatcccaagccgtcctcttggaggaagaaaatcctgcccgagtcatttttcaaagagccagatagtggatcacatagcaggcaatcctctactgatagtagcgggggacatccaggccctaggctcgctggtggcgcccaacatgttcgctcgcacagttcgcctgcctctttgcagcttggtactggcgcaggcgcagccggctctcccgcacagcagcacgcgcacctgcggcaacagagctacgacgtgacagacgagttgccactgccacctggatgggagatgacattcactgcaacgggacagaggtactttctgaaccacatcgagaaaatcacaacgtggcaggatccaaggaaagctatgaatcaaccgttgaaccatatgaacctgcatcctgcagtgtcgtctaccccagtgccgcagcgtagcatggctgtcagccagcccaacctcgtaatgaaccatcagcatcagcagcagatggctccaagtaccctgtctcagcagaatcaccccacacaaaatccaccagctgggctcatgtccatgcccaatgccctcaccacccagcagcagcagcaacagaagttacgtcttcagcgcattcaaatggaacgggaaaggattagaatgaggcaggaggagctgatgcgccaggaagctgcactgtgccggcaactgcctatggaggcggaaacattggcaccagtgcaagctgccgtgaatccacccactatgacaccggacatgcgcagcattacaaacaactccagcgacccttttcttaacgggggaccctatcattccagagaacaaagcacagactctggcctcgggctcggctgttacagcgtcccaactaccccagaagatttcctttccaacgtggatgaaatggataccggggagaacgcggggcaaactcctatgaacatcaacccacagcagactaggttccccgattttcttgactgccttccggggacaaacgttgacctggggaccttggaatcagaggacctgatacctctgtttaatgacgtggagagtgcccttaataagagcgagccttttctcacttggctttag

SEQ ID NO: 65934 - DNA, 1203 bp, Artificial Sequence
  derived and/or modified sequence
atgaaccccgccagcgcccccccccccctgcccccccccggccagcaggttatccatgtcacccaggatctggacaccgacctggaggcgctattcaacagtgtcatgaacccaaagccctctagttggcgtaaaaaaatcctcccagagtctttcttcaaggagcccgatagtggatcccactctcgtcaatcctctacagactcttctggcggacaccccggaccgcgcctagctggtggagctcagcacgtgcggtcacacagttctcctgcttcccttcagctcggaaccggcgcgggagcggccggaagccccgcacagcagcacgcccatctgagacagcaatcttatgatgtcacagacgagctccccctgccccccgggtgggagatgactttcaccgccactgggcaaaggtattttttgaaccatatcgaaaagattactacatggcaggacccacgcaaggccatgaaccagcctctcaaccacatgaacctgcacccagcggtgtctagtactccagtcccgcagcggagcatggccgtgtcccaacctaatctggtgatgaaccatcaacatcagcagcagatggcccccagtaccctgagtcagcaaaaccaccccacccagaatccgccagccgggcttatgtcaatgcctaacgccctcaccacacagcagcagcagcaacagaagctccggctccagagaattcaaatggagcgggaacgcattcggatgcgtcaggaagaactgatgaggcaagaggctgcactgtgtagacagctgcccatggaggcagagactttggcacccgttcaggcagccgtcaatccacctacaatgacacccgacatgaggtctattacaaataattccagcgaccccttcctgaatggcgggccctatcatagccgcgagcagtctacagattccggtcttgggttagggtgctatagtgtccccaccaccccagaagattttctgtccaatgtggacgagatggacaccggcgaaaacgcagggcagaccccaatgaatattaatcctcagcagacacgattccccgatttccttgattgcctgcccgggacaaatgtcgacttgggcacactcgagtcagaagatctaataccgttattcaacgatgtagaaagcgctctgaataaatcagagccattcttgacctggctgtag

SEQ ID NO: 65935 - DNA, 1203 bp, Artificial Sequence
  derived and/or modified sequence
atgaaccccgccagcgcccccccccccctgcccccccccggccagcaggtgatccatgtcactcaggacctggacacagatctcgaagcgttgtttaacagcgtcatgaacccaaagccctcctcctggcgcaagaaaatactacctgagtccttttttaaggagcccgacagtggaagccactcacggcagagctccacagattccagcggcggccaccccggcccgaggctggctggaggggcccaacatgtgaggagtcattcaagcccggcttcactgcagctaggcacgggcgctggcgccgcggggtctcccgcacagcaacacgctcacctccgccagcagtcctatgacgtgaccgacgaactaccccttcctcctgggtgggaaatgacatttaccgccactggccaaaggtactttctgaaccatatagagaaaatcaccacatggcaggatccaagaaaagcaatgaatcaaccactgaatcacatgaatctacaccctgccgtgtcctccacaccggttccgcagcggagtatggcagtcagtcagcctaacctcgtaatgaaccaccaacatcagcagcagatggccccctcaacgctgagccagcagaaccaccctacccagaatcctccagctgggctgatgtctatgcctaacgcactgactacccagcagcaacagcagcagaagctgcgcctccagcgcattcagatggaaagagaacggatccggatgaggcaggaagagctaatgagacaggaggccgccctctgccgccaacttcccatggaagcagaaaccctggctcccgtccaggcagcagtgaatcctcccaccatgactcctgacatgcgttcaatcactaacaacagttctgatcctttcttgaatggtggcccataccactcccgggaacagtccacagattccggcctgggcctgggctgctatagcgtcccgactaccccggaggatttcctgtcaaacgtagacgagatggacacaggagaaaatgctggccagacaccaatgaatataaatcctcagcaaacgcgatttccagatttcctcgactgcttgcccggcacaaatgtcgatctggggactctcgagagtgaggatcttattccactgttcaatgatgtggagagcgcacttaataaaagcgagccctttctcacttggctctag

SEQ ID NO: 65936 - DNA, 330 bp, Artificial Sequence
  derived and/or modified sequence
atgaaccccgccagcgcccccccccccctgcccccccccggccagcaagtgatacatgtgacccaggatcttgacaccgacctcgaagctttattcaatagcgtcatgaaccccaagccctccagctggcgtaagaaaattttacctgagtctttctttaaggagccagattcaggatcccattctcgccagtcaagtaccgactcttctggagggcaccccgggccgcgcctggctggaggggcccagcacgtgcgatctcattcatcccccgcttccctgcagctgggcactggtgccggagccgccggctcgccagctcagcagtag

SEQ ID NO: 65937 - DNA, 570 bp, Artificial Sequence
  derived and/or modified sequence
atgaaccccgccagcgcccccccccccctgcccccccccggccagcaggttatacatgtgacacaggacctagatacggatctggaggctctcttcaattcagttatgaaccccaagccaagtagttggcgaaaaaagattttaccagagagtttctttaaggagccagactccggtagccatagccgccaatcaagcacagattcttccggcggccatcccgggcctagacttgccggcggagctcagcacgttcgatcgcacagcagtcccgccagtctacagcttggtaccggagccggtgcggccggctcacccgctcaacaacacgctcacctgcggcaacaatcttacgacgtgaccgacgagctgcctctgcctcccgggtgggaaatgacctttactgccacaggccaaaggtacttcttgaatcacatcgaaaagatcaccacctggcaggatcctcggaaggccatgaaccaacctctgaaccacatgaacttacatcccgccgttagtagtacccctgttccccagaggagcatggccgtctctcagcccaatctgtag

SEQ ID NO: 65938 - DNA, 417 bp, Artificial Sequence
  derived and/or modified sequence
atgaaccccgccagcgcccccccccccctgcccccccccggccagcaagtgattcatgtaacgcaagatctggacaccgacttggaagcacttttcaattcagtcatgaaccctaagccttccagctggcgaaaaaagatcctacccgagtctttcttcaaagagccggatagcggatcccactcaaggcagtcaagcactgattcaagcggcgggcatcctggaccaaggctcgctggtggcgcacagcatgttcggagccatagcagccctgcatccctgcagctgggaaccggagccggggcggccggctcaccggcacaacaacacgcccacttgagacagcagagttatgatgtgaccgatgagttaccacttcctccagggtgggagatgacttttaccgcaacgggctag

SEQ ID NO: 65939 - DNA, 1203 bp, Artificial Sequence
  derived and/or modified sequence
atgaatccagcttccgcccctcctcccctgcccccacctggtcagcaggtgatacacgtaactcaggacttggacacagacctagaagcactcttcaatagcgtgatgaatcctaaaccatcatcttggcgcaagaaaatattgcccgagagcttcttcaaggagccagattctggatctcattctcgacagtcaagcacggatagttcagggggacatcctggcccacggctcgccggtggagctcagcacgttcgtagccattcttctccagcctccctccagctgggtaccggagctggagccgcaggatcccctgcacagcagcacgcccaccttcggcagcagagttacgatgttactgatgagctccccctccctcctgggtgggaaatgacatttaccgctacaggtcaacggtacttcctaaaccacattgaaaagatcacgacatggcaggacccacggaaagccatgaaccagccattgaatcatatgaatctacatcctgcagtcagttccacacctgtcccccagcgctctatggctgtgtcccagcccaatctggtcatgaatcaccaacaccagcagcagatggccccaagcaccctgtcccagcaaaaccatccaacacagaatccacccgcaggcttgatgtccatgcccaacgctctcactactcagcagcagcagcaacaaaaactgcggctgcaacggattcagatggagagggagagaattaggatgcggcaggaggagctcatgcgccaggaagccgctctgtgtcggcagcttcccatggaggcagaaaccctggcgccagttcaggcagccgtgaaccctccgacaatgacccctgatatgcgaagtattaccaacaacagctccgaccctttcctgaatggcggtccttatcacagtcgggagcagagcacggatagcggactcggcctgggctgttactcagttcctactacacctgaagattttctctctaatgttgacgaaatggacaccggggagaatgccggtcagacccccatgaacataaatcctcagcagacgcgatttcccgacttcctcgattgtttgcctggtactaatgtggatctcggaacactggagtctgaggacttgattccgctttttaacgatgtggagtcggctcttaataaaagtgagcccttcctgacatggctatag

SEQ ID NO: 65940 - DNA, 1203 bp, Artificial Sequence
  derived and/or modified sequence
atgaaccctgcaagcgcccctcctcccttgccgcctcccggacagcaagtgattcacgtgacccaggatctggatactgatctggaagcccttttcaacagtgtgatgaatccaaagcctagttcatggcggaaaaagatcctgccagagtctttctttaaggaacccgattctgggtcacatagcaggcagtcctcgacagactcctcaggtgggcatcccggaccaagattggccggaggtgcacagcatgtgagaagtcactctagtcctgcgtccctacagctcggcactggcgctggcgctgcaggatcgccagcacagcagcacgcccacctccgacagcagtcatacgatgtgacagatgagctgcccctccctcctggctgggagatgaccttcactgccaccggacagcgctatttcctcaaccatatcgaaaaaattacaacatggcaggacccgcgaaaggctatgaatcagcccctgaatcacatgaaccttcacccggcagtcagctccacacctgtgcctcagcgatctatggctgtgagccagcccaacttggtgatgaaccaccagcatcagcagcaaatggccccttccacactgtcacaacagaatcaccctacgcagaaccccccagccggtttgatgtctatgcccaacgctttgacgacacaacaacagcaacagcaaaagctgaggttgcagcgaattcaaatggaaagggaacgtattcggatgcggcaggaggagttaatgcgccaggaggcagcactctgccgccagctgccaatggaagcagaaactctggcacccgttcaagccgcagtaaatccaccgaccatgacaccggacatgagaagcatcactaacaattctagtgatccatttctaaacggcggaccgtaccattctcgggagcagtcaacagactccggcctcggactgggatgctactccgttcccacaacccctgaggatttcctctctaatgtcgatgaaatggacactggggagaacgcaggtcaaacacctatgaacatcaatcctcaacagactcgatttccagactttttagattgcctaccaggaactaatgtagacctgggcactttggagtctgaggacctcattcccctgtttaacgacgtcgaatctgccctcaacaaatccgagccctttcttacttggctttag

SEQ ID NO: 65941 - DNA, 1203 bp, Artificial Sequence
  derived and/or modified sequence
atgaaccccgcttctgcccctccacccctaccccctcccggtcagcaagtgattcacgtaacccaggacttggatactgatctcgaagctttatttaacagtgttatgaatccgaagccttccagctggagaaagaagatactcccagagtcattttttaaggaaccagactcaggctctcactctaggcagagctctaccgatagctctggtgggcaccccggacccaggttggccggaggcgcacaacatgttcggtcacactcgtctcctgcatctctacagttggggactggagctggcgctgcgggttcccctgcacaacaacacgcacaccttagacagcaatcttacgacgtcaccgatgaacttcctctgccccctggctgggagatgacgttcaccgcaactggccagcggtatttcctgaaccatattgagaagatcactacctggcaggatccgcgtaaggctatgaatcaacccttaaatcacatgaacctccatccggctgtgtcttccacccctgtgccacagcggtcgatggctgtaagccaacctaacctggtgatgaatcaccagcatcagcagcagatggcaccctcaactctgagccagcagaatcaccccacccagaaccccccagctggcttaatgagcatgcccaatgcactgaccacccagcaacaacagcagcaaaagctgaggctgcagcggattcaaatggaacgggaaaggatccgaatgcggcaggaagagctcatgcgccaagaagctgcactctgcagacagctgccgatggaagccgagaccttggccccagtccaagcagcagtgaacccccctactatgacccccgacatgagaagcatcaccaataacagctctgatccattcctgaacgggggaccctatcactctcgggagcagtccactgacagcggactcggactgggttgctacagtgttccaactactcctgaggattttctgtctaatgtggacgaaatggatacaggggaaaacgctggtcagacacccatgaacattaacccccaacagacacgctttccagatttcctggactgtttgcctggtaccaacgtcgacttaggcaccctagaatcagaggatctgattcctctgtttaatgacgtggaatccgccctcaataaatccgagcccttcctcacttggctgtag

SEQ ID NO: 65942 - DNA, 330 bp, Artificial Sequence
  derived and/or modified sequence
atgaacccagcctccgcgcctcctccactgccaccccctgggcagcaggttattcatgtgactcaggatttagacacggatctcgaggcccttttcaactctgtgatgaatcccaagccgtcttcttggaggaagaaaatcctgcccgagagtttctttaaggaacctgatagcggatcccattcacggcagtccagcaccgactctagtgggggtcaccctggcccaagactcgctggcggagctcagcacgtccgctcacattccagtccggcatccctgcaactaggtaccggggcaggggctgccggaagtcctgcccagcaatag

SEQ ID NO: 65943 - DNA, 570 bp, Artificial Sequence
  derived and/or modified sequence
atgaatccggctagtgctccaccccctctcccgccacccggacagcaggtgatacacgtcactcaagatcttgacaccgacctcgaggcactgttcaattccgtcatgaatcctaagccttccagttggaggaaaaagattctgccagaaagcttctttaaggaaccggactctgggtctcacagccggcagtcctccacagattcatcagggggacatcctggcccaagactggcaggtggcgcacagcatgtaagatcccactcttctcccgcaagcctgcagttgggaactggcgcaggagctgccggtagtcctgctcaacaacatgcccacctgcgccagcagagctatgatgtgacggacgagttgccactccctcccggatgggaaatgaccttcaccgccactgggcaacggtactttctgaatcacattgaaaagatcactacgtggcaagatccccgaaaggcgatgaaccagcctctgaatcatatgaaccttcatccagctgtgtcatccacgcctgtaccacaaaggagcatggctgtaagtcaacctaacctgtag

SEQ ID NO: 65944 - DNA, 417 bp, Artificial Sequence
  derived and/or modified sequence
atgaatcctgcttccgctcctccaccattgccgccaccaggacagcaggtgatccatgttacgcaagatctggacacagacttggaagcactgttcaattctgttatgaatcctaagccatcatcctggagaaaaaagatcctgcctgaaagttttttcaaggagccggactctgggtctcactctcggcagtcatccaccgattcttctggcggacatccaggccctcgcctcgctgggggtgcacagcatgttaggtcccacagtagcccggctagcctgcaactcggaactggtgctggtgccgctggaagcccagcccagcagcacgcccacctgcgccagcagagctacgatgtgaccgatgaactccctttgccccctggatgggaaatgacatttaccgctactggctag

SEQ ID NO: 65945 - DNA, 5030 bp, Artificial Sequence
  derived and/or modified sequence
gacacactcctctacaacaccagagactcccaaacacaaggccttatattgactcatttcagctcacatcctggcgactctcaagagagaaacctcagagtgactaaaatctccataatgagaagacatgtacattcagtatctattttggcattttccccaatacatctctgctcatctgactcttatcttggcatctgcttcctggtggatctgaactgacccataagccacgcttactagtgattttccagaagatgaatccggcctcggcgccccctccgctcccgccgcctgggcagcaagtgatccacgtcacgcaggacctagacacagacctcgaagccctcttcaactctgtcatgaatccgaagcctagctcgtggcggaagaagatcctgccggagtctttctttaaggagcctgattcgggctcgcactcgcgccagtccagcaccgactcgtcgggcggccacccggggcctcgactggctgggggtgcccagcatgtccgctcgcactcgtcgcccgcgtccctgcagctgggcaccggcgcgggtgctgcgggtagccccgcgcagcagcacgcgcacctccgccagcagtcctacgacgtgaccgacgagctgccactgcccccgggctgggagatgaccttcacggccactggccagaggtacttcctcaatcacatagaaaaaatcaccacatggcaagaccctaggaaggcgatgaatcagcctctgaatcatatgaacctccaccctgccgtcagttccacaccagtgcctcagaggtccatggcagtatcccagccaaatctcgtgatgaatcaccaacaccagcagcagatggcccccagtaccctgagccagcagaaccaccccactcagaacccacccgcagggctcatgagtatgcccaatgcgctgaccactcagcagcagcagcagcagaaactgcggcttcagagaatccagatggagagagaaaggattcgaatgcgccaagaggagctcatgaggcaggaagctgccctctgtcgacagctccccatggaagctgagactcttgccccagttcaggctgctgtcaacccacccacgatgaccccagacatgagatccatcactaataatagctcagatcctttcctcaatggagggccatatcattcgagggagcagagcactgacagtggcctggggttagggtgctacagtgtccccacaactccggaggacttcctcagcaatgtggatgagatggatacaggagaaaacgcaggacaaacacccatgaacatcaatccccaacagacccgtttccctgatttccttgactgtcttccaggaacaaacgttgacttaggaactttggaatctgaagacctgatccccctcttcaatgatgtagagtctgctctgaacaaaagtgagccctttctaacctggctgtaatcactaccattgtaacttggatgtagccatgaccttacatttcctgggcctcttggaaaaagtgatggagcagagcaagtctgcaggtgcaccacttcccgcctccatgactcgtgctccctcctttttatgttgccagtttaatcattgcctggttttgattgagagtaacttaagttaaacataaataaatattctattttcattttctgcaagcctgcgttcttgtgacagattatacagaattgtgtctgcaggattgattatgcagaatacttttctctttcttctctgctgccccatggctaagctttatgggtgttaattgaaatttatacaccaattgattttaaaccataaaaagctgaccacaggcagttacttctgagggcatcttggtccaggaaatgtgcacaaaattcgacctgatttacagtttcaaaaactgtattgatgacagtagtaccaaatgctttaaaaactatttaacttgagctttaaaaatcattgtatggatagtaaaattctactgtatggaatacaatgtaattttgaatccatgctggctctgatggctcttattagtctgtatttataaaggcacacagtcctattgtagcttatctttcgttattttactgcagagcatctagacaacttagtccctccagcgggaaagtagcagcagcagcattagtcacaggtcttacactacagatcttgtgaaagagaccagtttggtactaattatgagcattttattcaaacaaaagtttttgaaatattacaactggggatttaaaaaattgcagcttagaatctgatggtttttttttttcttgatgttgtttgtttgtttttgagatcgagttttgctcttgttgtccaggctggaatgcaatggcacaatctcggctcactgcaacctctgccttctgggttcaagcgattctcctgccttagcctcccgagtagctgggattacaggcacctgccaccacgtccggctaattttttgtattttgagtagagacggggtttcaccataatggtcaggctgttctcaaactcctgatctcaggtgatccacccatctcggcctcccaaagtgctgggattactggcgtgagccaccgcacccggccttgatgtttattttataaagcactgtaattttgtagctgatgacaaaaggcagccaaatgtttttgataaatcagtggcaactgtatttttgtcttttgaaataactctgaaaacatcaggacaacatagatttcaacctgatagcacaccacacacagtgagctgttgctttttaaattctgaagccttgtcaggtttgcttcctagatttcaagtgtttaaaataattctatctatgaaactgaaggatgaagcagatctctgactgacatgtaaaaaaaaatgccctttgagggtgtatggtggagataaatgtttctgaattcagtaaaattgattcctaagtatattatcctaatcctgtttgctacagttggtataaaaaggcatgaaatatgtattcaatacctcttatgtaaccaaaaccatttttaattagcttttaaggactgagagagcatcatgttcaactggcatgcagtctgcctgcattgccaatgaagtcctcaactgtttaatattttgaactaatattatttataatctatgaatttaatcttttttgaaagactttaataatttgagtctctgagaggatactttcaatttccatgggggacttatttgttggggatcttaaataagattccttttgatctaccggaatatacatgtacagagtacattggatcatgttggaaagaaggcaagtgaaaaggtcagagatgaagtagcaaagttatggaatatcgtggaaaggatactagttgtgaaatggaaagagacaagttatagtaccccaaaagcaaaacaagcaggagatgcaagagatgccccaaaaggacaaagcaacaattttctgttgccacctttataccggaagactctgttgtagaagaaaagaaggctttggtgcaccttatgtgggaggaggaggggcagggcatgctgatgctgagcgtacaggcagacaagagcgtagcctgctgttgcctccatcactatgaaatgacttattttacctgaaggacccatggtttatgttcctctaattcctttcactctccctaagccctctgagagagatgaagatagatgattttattgctactaaattgaagggagcactatttctttttgtcttttgttagcaaaaaattgcaaaaagaattgtacattcttgctaaaaataaataaataaataaaaaattaaaaaaacaagggacctaacaaaactcagcagtgttactgtatttttaaaaaatatttttatagactcattttcaggttattaaatgtaagagaaacagatacccctcttttttaaagtaggtaaatcattgatgatttatattaccaatttttagaagtaattttctagtaagcttgtggcatcagaaaatactagaagatttttttagttaaattagttagaacatttatgaatgaatataataaatattttttcagaataaaatatggaccctttgtgtttactaatagataaagccagatataattttttgtttttaaggccacaaaatatggcctttgttaaagaacactaaagttagaaatctaaagttagagcaactttttaatggctatttcctattattgtaagtgttaaaacccctgcagaattcttgataaggtgctatttatactatatttcttattataagataactgtctttagtcttcttagtactagtctttttagtactaaatcaatcagtaaacatcatcatttcaccccaaaattttgtcacagaaaaggcgtatcaaatgaaaaataatttcagagatctttctttcaagatattttttcctgataaaatacattgtcttgaagtaaatacattgtcaaaacctaattgcaattctgttaaatctaagtaatttttagacagtgtttcaccgtattatttaggatgtgaaatgccatttctttcactgattacaccatatacaggaaacaggtaaaacagtgaaaactttattgtgctggttgatgccaacttggttgaaaagctctctgcagaagaagtgatctagactgacagaagtgttgctaattacaagttgtgttctcatgacgtaattagaaagtaacttctcaaagtacaacttttatgaaaaaaataagctgttaaaaaaaggaaatcgtaggttaatttaattgggaaaatgggcaattgacagagaccattttcctaacacatatatgtgctagtactttaactttttaaaattttacttctacgttttgtaatataaaaatttctattttaagtttagaatgttatacgtaccgaaagtatgcagccaaatcgatcagatcaaaccattttacctggagtttggtactggtttttacttctctgaatctgtataagaaaaataaagacaattgaacttcca

SEQ ID NO: 65946 - DNA, 1603 bp, Artificial Sequence
  derived and/or modified sequence
agtccgggagctgctgcggccgcgctgtctgcttctcctgcgcctccttttcgcccagcactagcgccttaggccagctcgggggatgtgagagccgaagcccttagactgccaggcacagagtcgggtcgggatttgtcagccaagcctcggctccagctccgcaatctcgggactcacccgagcgacccaggcccgacggcaaatgaatccggcctcggcgccccctccgctcccgccgcctgggcagcaagtgatccacgtcacgcaggacctagacacagacctcgaagccctcttcaactctgtcatgaatccgaagcctagctcgtggcggaagaagatcctgccggagtctttctttaaggagcctgattcgggctcgcactcgcgccagtccagcaccgactcgtcgggcggccacccggggcctcgactggctgggggtgcccagcatgtccgctcgcactcgtcgcccgcgtccctgcagctgggcaccggcgcgggtgctgcgggtagccccgcgcagcagcacgcgcacctccgccagcagtcctacgacgtgaccgacgagctgccactgcccccgggctgggagatgaccttcacggccactggccagaggtacttcctcaatcacatagaaaaaatcaccacatggcaagaccctaggaaggcgatgaatcagcctctgaatcatatgaacctccaccctgccgtcagttccacaccagtgcctcagaggtccatggcagtatcccagccaaatctcgtgatgaatcaccaacaccagcagcagatggcccccagtaccctgagccagcagaaccaccccactcagaacccacccgcagggctcatgagtatgcccaatgcgctgaccactcagcagcagcagcagcagaaactgcggcttcagagaatccagatggagagagaaaggattcgaatgcgccaagaggagctcatgaggcaggaagctgccctctgtcgacagctccccatggaagctgagactcttgccccagttcaggctgctgtcaacccacccacgatgaccccagacatgagatccatcactaataatagctcagatcctttcctcaatggagggccatatcattcgagggagcagagcactgacagtggcctggggttagggtgctacagtgtccccacaactccggaggacttcctcagcaatgtggatgagatggatacaggagaaaacgcaggacaaacacccatgaacatcaatccccaacagacccgtttccctgatttccttgactgtcttccaggaacaaacgttgacttaggaactttggaatctgaagacctgatccccctcttcaatgatgtagagtctgctctgaacaaaagtgagccctttctaacctggctgtaatcactaccattgtaacttggatgtagccatgaccttacatttcctgggcctcttggaaaaagtgatggagcagagcaagtctgcaggtgcaccacttcccgcctccatgactcgtgctccctcctttttatgttgccagtttaatcattgcctggttttgattgagagtaacttaagttaaacataaataaatat

SEQ ID NO: 65947 - DNA, 578 bp, Artificial Sequence
  derived and/or modified sequence
aggatttgcactttctccttttcttcagaatgtgtatctgcctaagcagtgtgataacttttttcccagactggatcgatattccttagctggtcctgttgcagcaggagtccggtgactggagagaggaagctcttgggcagcattttccccaatacatctctgctcatctgactcttatcttggcatctgcttcctggtggatctgaactgacccataagccacgcttactagtgattttccagaagatgaatccggcctcggcgccccctccgctcccgccgcctgggcagcaagtgatccacgtcacgcaggacctagacacagacctcgaagccctcttcaactctgtcatgaatccgaagcctagctcgtggcggaagaagatcctgccggagtctttctttaaggagcctgattcgggctcgcactcgcgccagtccagcaccgactcgtcgggcggccacccggggcctcgactggctgggggtgcccagcatgtccgctcgcactcgtcgcccgcgtccctgcagctgggcaccggcgcgggtgctgcgggtagccccgcgcagcagca

SEQ ID NO: 65948 - DNA, 697 bp, Artificial Sequence
  derived and/or modified sequence
ttatctgtctcctcgtttccttttccctctattctttctcccaccatctcgccctctcaccctgtaaccctcttacccacttcctccgactttaaataaaaggctgatctgaccttctttttgcagaagatgaatccggcctcggcgccccctccgctcccgccgcctgggcagcaagtgatccacgtcacgcaggacctagacacagacctcgaagccctcttcaactctgtcatgaatccgaagcctagctcgtggcggaagaagatcctgccggagtctttctttaaggagcctgattcgggctcgcactcgcgccagtccagcaccgactcgtcgggcggccacccggggcctcgactggctgggggtgcccagcatgtccgctcgcactcgtcgcccgcgtccctgcagctgggcaccggcgcgggtgctgcgggtagccccgcgcagcagcacgcgcacctccgccagcagtcctacgacgtgaccgacgagctgccactgcccccgggctgggagatgaccttcacggccactggccagaggtacttcctcaatcacatagaaaaaatcaccacatggcaagaccctaggaaggcgatgaatcagcctctgaatcatatgaacctccaccctgccgtcagttccacaccagtgcctcagaggtccatggcagtatcccagccaaatctcg

SEQ ID NO: 65949 - DNA, 503 bp, Artificial Sequence
  derived and/or modified sequence
caggtagtgcccgctggagctcgcgcgctcatccggcaccactccagggctccaggctcctcgggcttccggagtcgagacgtgaagatgaatccggcctcggcgccccctccgctcccgccgcctgggcagcaagtgatccacgtcacgcaggacctagacacagacctcgaagccctcttcaactctgtcatgaatccgaagcctagctcgtggcggaagaagatcctgccggagtctttctttaaggagcctgattcgggctcgcactcgcgccagtccagcaccgactcgtcgggcggccacccggggcctcgactggctgggggtgcccagcatgtccgctcgcactcgtcgcccgcgtccctgcagctgggcaccggcgcgggtgctgcgggtagccccgcgcagcagcacgcgcacctccgccagcagtcctacgacgtgaccgacgagctgccactgcccccgggctgggagatgaccttcacggccactggcca

SEQ ID NO: 65950 - protein, 360 aa, Artificial Sequence
  derived and/or modified sequence
MEDFNMESDSFEDFWKGEDLSNYSYSSTLPPFLLDAAPCEPESLEINKYFVVIIYALVFLLSLLGNSLVMLVILYSRVGRSVTDVYLLNLALADLLFALTLPIWAASKVNGWIFGTFLCKVVSLLKEVNFYSGILLLACISVDRYLAIVHATRTLTQKRYLVKFICLSIWGLSLLLALPVLLFRRTVYSSNVSPACYEDMGNNTANWRMLLRILPQSFGFIVPLLIMLFCYGFTLRTLFKAHMGQKHRAMRVIFAVVLIFLLCWLPYNLVLLADTLMRTQVIQETCERRNHIDRALDATEILGILHSCLNPLIYAFIGQKFRHGLLKILAIHGLISKDSLPKDSRPSFVGSSSGHTSTTL

SEQ ID NO: 65951 - protein, 138 aa, Artificial Sequence
  derived and/or modified sequence
MEDFNMESDSFEDFWKGEDLSNYSYSSTLPPFLLDAAPCEPESLEINKYFVVIIYALVFLLSLLGNSLVMLVILYSRVGRSVTDVYLLNLALADLLFALTLPIWAASKVNGWIFGTFLCKVVSLLKEVNFYSGILLLA

SEQ ID NO: 65952 - protein, 15 aa, Artificial Sequence
  derived and/or modified sequence
MEDFNMESDSFEDFW

SEQ ID NO: 65953 - protein, 172 aa, Artificial Sequence
  derived and/or modified sequence
MEDFNMESDSFEDFWKGEDLSNYSYSSTLPPFLLDAAPCEPESLEINKYFVVIIYALVFLLSLLGNSLVMLVILYSRVGRSVTDVYLLNLALADLLFALTLPIWAASKVNGWIFGTFLCKVVSLLKEVNFYSGILLLACISVDRYLAIVHATRTLTQKRYLVKFICLSIWGL

SEQ ID NO: 65954 - protein, 201 aa, Artificial Sequence
  derived and/or modified sequence
MEDFNMESDSFEDFWKGEDLSNYSYSSTLPPFLLDAAPCEPESLEINKYFVVIIYALVFLLSLLGNSLVMLVILYSRVGRSVTDVYLLNLALADLLFALTLPIWAASKVNGWIFGTFLCKVVSLLKEVNFYSGILLLACISVDRYLAIVHATRTLTQKRYLVKFICLSIWGLSLLLALPVLLFRRTVYSSNVSPACYEDMG

SEQ ID NO: 65955 - protein, 136 aa, Artificial Sequence
  derived and/or modified sequence
MEDFNMESDSFEDFWKGEDLSNYSYSSTLPPFLLDAAPCEPESLEINKYFVVIIYALVFLLSLLGNSLVMLVILYSRVGRSVTDVYLLNLALADLLFALTLPIWAASKVNGWIFGTFLCKVVSLLKEVNFYSGILL

SEQ ID NO: 65956 - DNA, 1083 bp, Artificial Sequence
  derived and/or modified sequence
atggaggacttcaacatggagagcgacagcttcgaggacttctggaagggcgaggacctgagcaactacagctacagcagcaccctgccccccttcctgctggacgccgccccctgcgagcccgagagcctggagatcaacaagtacttcgtggtgatcatctacgccctggtgttcctgctgagcctgctgggcaacagcctggtgatgctggtgatcctgtacagcagagtgggcagaagcgtgaccgacgtgtacctgctgaacctggccctggccgacctgctgttcgccctgaccctgcccatctgggccgccagcaaggtgaacggctggatcttcggcaccttcctgtgcaaggtggtgagcctgctgaaggaggtgaacttctacagcggcatcctgctgctggcctgcatcagcgtggacagatacctggccatcgtgcacgccaccagaaccctgacccagaagagatacctggtgaagttcatctgcctgagcatctggggcctgagcctgctgctggccctgcccgtgctgctgttcagaagaaccgtgtacagcagcaacgtgagccccgcctgctacgaggacatgggcaacaacaccgccaactggagaatgctgctgagaatcctgccccagagcttcggcttcatcgtgcccctgctgatcatgctgttctgctacggcttcaccctgagaaccctgttcaaggcccacatgggccagaagcacagagccatgagagtgatcttcgccgtggtgctgatcttcctgctgtgctggctgccctacaacctggtgctgctggccgacaccctgatgagaacccaggtgatccaggagacctgcgagagaagaaaccacatcgacagagccctggacgccaccgagatcctgggcatcctgcacagctgcctgaaccccctgatctacgccttcatcggccagaagttcagacacggcctgctgaagatcctggccatccacggcctgatcagcaaggacagcctgcccaaggacagcagacccagcttcgtgggcagcagcagcggccacaccagcaccaccctgtag

SEQ ID NO: 65957 - DNA, 417 bp, Artificial Sequence
  derived and/or modified sequence
atggaggacttcaacatggagagcgacagcttcgaggacttctggaagggcgaggacctgagcaactacagctacagcagcaccctgccccccttcctgctggacgccgccccctgcgagcccgagagcctggagatcaacaagtacttcgtggtgatcatctacgccctggtgttcctgctgagcctgctgggcaacagcctggtgatgctggtgatcctgtacagcagagtgggcagaagcgtgaccgacgtgtacctgctgaacctggccctggccgacctgctgttcgccctgaccctgcccatctgggccgccagcaaggtgaacggctggatcttcggcaccttcctgtgcaaggtggtgagcctgctgaaggaggtgaacttctacagcggcatcctgctgctggcctag

SEQ ID NO: 65958 - DNA, 48 bp, Artificial Sequence
  derived and/or modified sequence
atggaggacttcaacatggagagcgacagcttcgaggacttctggtag

SEQ ID NO: 65959 - DNA, 519 bp, Artificial Sequence
  derived and/or modified sequence
atggaggacttcaacatggagagcgacagcttcgaggacttctggaagggcgaggacctgagcaactacagctacagcagcaccctgccccccttcctgctggacgccgccccctgcgagcccgagagcctggagatcaacaagtacttcgtggtgatcatctacgccctggtgttcctgctgagcctgctgggcaacagcctggtgatgctggtgatcctgtacagcagagtgggcagaagcgtgaccgacgtgtacctgctgaacctggccctggccgacctgctgttcgccctgaccctgcccatctgggccgccagcaaggtgaacggctggatcttcggcaccttcctgtgcaaggtggtgagcctgctgaaggaggtgaacttctacagcggcatcctgctgctggcctgcatcagcgtggacagatacctggccatcgtgcacgccaccagaaccctgacccagaagagatacctggtgaagttcatctgcctgagcatctggggcctgtag

SEQ ID NO: 65960 - DNA, 606 bp, Artificial Sequence
  derived and/or modified sequence
atggaggacttcaacatggagagcgacagcttcgaggacttctggaagggcgaggacctgagcaactacagctacagcagcaccctgccccccttcctgctggacgccgccccctgcgagcccgagagcctggagatcaacaagtacttcgtggtgatcatctacgccctggtgttcctgctgagcctgctgggcaacagcctggtgatgctggtgatcctgtacagcagagtgggcagaagcgtgaccgacgtgtacctgctgaacctggccctggccgacctgctgttcgccctgaccctgcccatctgggccgccagcaaggtgaacggctggatcttcggcaccttcctgtgcaaggtggtgagcctgctgaaggaggtgaacttctacagcggcatcctgctgctggcctgcatcagcgtggacagatacctggccatcgtgcacgccaccagaaccctgacccagaagagatacctggtgaagttcatctgcctgagcatctggggcctgagcctgctgctggccctgcccgtgctgctgttcagaagaaccgtgtacagcagcaacgtgagccccgcctgctacgaggacatgggctag

SEQ ID NO: 65961 - DNA, 411 bp, Artificial Sequence
  derived and/or modified sequence
atggaggacttcaacatggagagcgacagcttcgaggacttctggaagggcgaggacctgagcaactacagctacagcagcaccctgccccccttcctgctggacgccgccccctgcgagcccgagagcctggagatcaacaagtacttcgtggtgatcatctacgccctggtgttcctgctgagcctgctgggcaacagcctggtgatgctggtgatcctgtacagcagagtgggcagaagcgtgaccgacgtgtacctgctgaacctggccctggccgacctgctgttcgccctgaccctgcccatctgggccgccagcaaggtgaacggctggatcttcggcaccttcctgtgcaaggtggtgagcctgctgaaggaggtgaacttctacagcggcatcctgctgtag

SEQ ID NO: 65962 - DNA, 2879 bp, Artificial Sequence
  derived and/or modified sequence
aggaagtgcaggttcaaaacattcagagacagaaggtggatagacaaatctccaccttcagactggtaggctcctccagaagccatcagacaggaagatgtgaaaatccccagcactcatcccagaatcactaagtggcacctgtcctgggccaaagtcccaggacagacctcattgttcctctgtgggaatacctccccaggagggcatcctggatttcccccttgcaacccaggtcagaagtttcatcgtcaaggttgtttcatcttttttttcctgtctaacagctctgactaccacccaaccttgaggcacagtgaagacatcggtggccactccaataacagcaggtcacagctgctcttctggaggtgtcctacaggtgaaaagcccagcgacccagtcaggatttaagtttacctcaaaaatggaagattttaacatggagagtgacagctttgaagatttctggaaaggtgaagatcttagtaattacagttacagctctaccctgcccccttttctactagatgccgccccatgtgaaccagaatccctggaaatcaacaagtattttgtggtcattatctatgccctggtattcctgctgagcctgctgggaaactccctcgtgatgctggtcatcttatacagcagggtcggccgctccgtcactgatgtctacctgctgaacctagccttggccgacctactctttgccctgaccttgcccatctgggccgcctccaaggtgaatggctggatttttggcacattcctgtgcaaggtggtctcactcctgaaggaagtcaacttctatagtggcatcctgctactggcctgcatcagtgtggaccgttacctggccattgtccatgccacacgcacactgacccagaagcgctacttggtcaaattcatatgtctcagcatctggggtctgtccttgctcctggccctgcctgtcttacttttccgaaggaccgtctactcatccaatgttagcccagcctgctatgaggacatgggcaacaatacagcaaactggcggatgctgttacggatcctgccccagtcctttggcttcatcgtgccactgctgatcatgctgttctgctacggattcaccctgcgtacgctgtttaaggcccacatggggcagaagcaccgggccatgcgggtcatctttgctgtcgtcctcatcttcctgctctgctggctgccctacaacctggtcctgctggcagacaccctcatgaggacccaggtgatccaggagacctgtgagcgccgcaatcacatcgaccgggctctggatgccaccgagattctgggcatccttcacagctgcctcaaccccctcatctacgccttcattggccagaagtttcgccatggactcctcaagattctagctatacatggcttgatcagcaaggactccctgcccaaagacagcaggccttcctttgttggctcttcttcagggcacacttccactactctctaagacctcctgcctaagtgcagccccgtggggttcctcccttctcttcacagtcacattccaagcctcatgtccactggttcttcttggtctcagtgtcaatgcagcccccattgtggtcacaggaagtagaggaggccacgttcttactagtttcccttgcatggtttagaaagcttgccctggtgcctcaccccttgccataattactatgtcatttgctggagctctgcccatcctgcccctgagcccatggcactctatgttctaagaagtgaaaatctacactccagtgagacagctctgcatactcattaggatggctagtatcaaaagaaagaaaatcaggctggccaacggggtgaaaccctgtctctactaaaaatacaaaaaaaaaaaaaaattagccgggcgtggtggtgagtgcctgtaatcacagctacttgggaggctgagatgggagaatcacttgaacccgggaggcagaggttgcagtgagccgagattgtgcccctgcactccagcctgagcgacagtgagactctgtctcagtccatgaagatgtagaggagaaactggaactctcgagcgttgctgggggggattgtaaaatggtgtgaccactgcagaagacagtatggcagctttcctcaaaacttcagacatagaattaacacatgatcctgcaattccacttataggaattgacccacaagaaatgaaagcagggacttgaacccatatttgtacaccaatattcatagcagcttattcacaagacccaaaaggcagaagcaacccaaatgttcatcaatgaatgaatgaatggctaagcaaaatgtgatatgtacctaacgaagtatccttcagcctgaaagaggaatgaagtactcatacatgttacaacacggacgaaccttgaaaactttatgctaagtgaaataagccagacatcaacagataaatagtttatgattccacctacatgaggtactgagagtgaacaaatttacagagacagaaagcagaacagtgattaccagggactgaggggaggggagcatgggaagtgacggtttaatgggcacagggtttatgtttaggatgttgaaaaagttctgcagataaacagtagtgatagttgtaccgcaatgtgacttaatgccactaaattgacacttaaaaatggtttaaatggtcaattttgttatgtatattttatatcaatttaaaaaaaaacctgagccccaaaaggtattttaatcaccaaggctgattaaaccaaggctagaaccacctgcctatattttttgttaaatgatttcattcaatatcttttttttaataaaccatttttacttgggtgtttata

SEQ ID NO: 65963 - DNA, 585 bp, Artificial Sequence
  derived and/or modified sequence
gcagtgtctttgttgagcagcagaggggagctctgactaccacccaaccttgaggcacagtgaagacatcggtggccactccaataacagcaggtcacagctgctcttctggaggtgtcctacaggtgaaaagcccagcgacccagtcaggatttaagtttacctcaaaaatggaagattttaacatggagagtgacagctttgaagatttctggaaaggtgaagatcttagtaattacagttacagctctaccctgcccccttttctactagatgccgccccatgtgaaccagaatccctggaaatcaacaagtattttgtggtcattatctatgccctggtattcctgctgagcctgctgggaaactccctcgtgatgctggtcatcttatacagcagggtcggccgctccgtcactgatgtctacctgctgaacctagccttggccgacctactctttgccctgaccttgcccatctgggccgcctccaaggtgaatggctggatttttggcacattcctgtgcaaggtggtctcactcctgaaggaagtcaacttctatagtggcatcctgctactggcct

SEQ ID NO: 65964 - DNA, 223 bp, Artificial Sequence
  derived and/or modified sequence
gacctggttctccttgctgagttctctaccttctgtcctgacttgcatgctctccctctggaacctgaagctgacccataatgcctgggagcatgagctcacccatacacctccagcccacccccagcacagctgagcactggattatccacagtcaggatttaagtttacctcaaaaatggaagattttaacatggagagtgacagctttgaagatttctgg

SEQ ID NO: 65965 - DNA, 621 bp, Artificial Sequence
  derived and/or modified sequence
gttctcaccaccacctccctttcataggtcacagctgctcttctggaggtgtcctacaggtgaaaagcccagcgacccagtcaggatttaagtttacctcaaaaatggaagattttaacatggagagtgacagctttgaagatttctggaaaggtgaagatcttagtaattacagttacagctctaccctgcccccttttctactagatgccgccccatgtgaaccagaatccctggaaatcaacaagtattttgtggtcattatctatgccctggtattcctgctgagcctgctgggaaactccctcgtgatgctggtcatcttatacagcagggtcggccgctccgtcactgatgtctacctgctgaacctagccttggccgacctactctttgccctgaccttgcccatctgggccgcctccaaggtgaatggctggatttttggcacattcctgtgcaaggtggtctcactcctgaaggaagtcaacttctatagtggcatcctgctactggcctgcatcagtgtggaccgttacctggccattgtccatgccacacgcacactgacccagaagcgctacttggtcaaattcatatgtctcagcatctggggtctgt

SEQ ID NO: 65966 - DNA, 262 bp, Artificial Sequence
  derived and/or modified sequence
ggggaggtgaggaagtggagagagcagctgtggtggctgaagggtgctaggacagagggagcatgataaagccataactctgactaccacccaaccttgaggcacagtgaagacatcggtggccactccaataacagcaggtcacagctgctcttctggaggtgtcctacaggtgaaaagcccagcgacccagtcaggatttaagtttacctcaaaaatggaagattttaacatggagagtgacagctttgaagatttctgg

SEQ ID NO: 65967 - DNA, 813 bp, Artificial Sequence
  derived and/or modified sequence
taagcagtggtgatagctgagaatatgcagccgttttctccttcctgggtacagtgctattctgcctagagctctgactaccacccaaccttgaggcacagtgaagacatcggtggccactccaataacagcaggtcacagctgctcttctggaggtgtcctacaggtgaaaagcccagcgacccagtcaggatttaagtttacctcaaaaatggaagattttaacatggagagtgacagctttgaagatttctggaaaggtgaagatcttagtaattacagttacagctctaccctgcccccttttctactagatgccgccccatgtgaaccagaatccctggaaatcaacaagtattttgtggtcattatctatgccctggtattcctgctgagcctgctgggaaactccctcgtgatgctggtcatcttatacagcagggtcggccgctccgtcactgatgtctacctgctgaacctagccttggccgacctactctttgccctgaccttgcccatctgggccgcctccaaggtgaatggctggatttttggcacattcctgtgcaaggtggtctcactcctgaaggaagtcaacttctatagtggcatcctgctactggcctgcatcagtgtggaccgttacctggccattgtccatgccacacgcacactgacccagaagcgctacttggtcaaattcatatgtctcagcatctggggtctgtccttgctcctggccctgcctgtcttacttttccgaaggaccgtctactcatccaatgttagcccagcctgctatgaggacatggg

SEQ ID NO: 65968 - DNA, 597 bp, Artificial Sequence
  derived and/or modified sequence
aaaacattcagagacagaaggtggatagacaaatctccaccttcagactgctctgactaccacccaaccttgaggcacagtgaagacatcggtggccactccaataacagcaggtcacagctgctcttctggaggtgtcctacaggtgaaaagcccagcgacccagtcaggatttaagtttacctcaaaaatggaagattttaacatggagagtgacagctttgaagatttctggaaaggtgaagatcttagtaattacagttacagctctaccctgcccccttttctactagatgccgccccatgtgaaccagaatccctggaaatcaacaagtattttgtggtcattatctatgccctggtattcctgctgagcctgctgggaaactccctcgtgatgctggtcatcttatacagcagggtcggccgctccgtcactgatgtctacctgctgaacctagccttggccgacctactctttgccctgaccttgcccatctgggccgcctccaaggtgaatggctggatttttggcacattcctgtgcaaggtggtctcactcctgaaggaagtcaacttctatagtggcatcctgct

SEQ ID NO: 65969 - DNA, 1083 bp, Artificial Sequence
  derived and/or modified sequence
atggaggacttcaacatggagagcgactcgtttgaggacttttggaagggagaggatctcagcaactattcctatagctctaccctgccaccttttctattggatgcagccccctgcgaaccagaaagtttagagataaataagtattttgtcgtcatcatttatgctttagtgttcctactgtctctgctgggcaacagtctcgtgatgctggtgattctctattccagggtgggaaggagcgtcactgatgtttacttgttaaacttggccctggccgacctcttattcgcgctgaccctcccaatttgggcagctagcaaagtcaatgggtggattttcggtacctttctgtgcaaagtcgtgagtctgctgaaggaggtcaatttctatagcggtatactgttgctggcatgtatttccgtagacagatatctcgcaatagttcatgccaccaggacattgacgcagaagcggtatctggtcaagtttatttgtctgtccatctggggcctgtccctgctgcttgcacttcccgttctgttgttccggcggaccgtctacagcagcaatgtgtctcccgcatgctatgaagacatggggaacaatactgcaaactggaggatgctactccgaatcctcccccagtctttcgggtttatcgtgcctctgttgatcatgctgttttgttatggtttcacacttaggaccctatttaaggcccatatgggtcagaagcaccgtgctatgagggtcatttttgctgtggtcctgatctttctcctttgctggctcccatacaacctcgtattactggctgatacactaatgagaactcaggtcatacaggaaacctgtgagagacgtaatcacatcgacagggcactggatgctaccgagattttgggaattctccactcttgcctgaacccattgatttatgcattcatcggccaaaagtttaggcatggcctgctcaagatactggcgatccatggcctgattagtaaagactccttacctaaggactctcggccttcctttgttggatcctcctccgggcacacgtcaacgactctgtag

SEQ ID NO: 65970 - DNA, 417 bp, Artificial Sequence
  derived and/or modified sequence
atggaggacttcaatatggaatccgatagcttcgaggacttctggaagggggaagaccttagtaattattcatattccagtacactgccgcctttcttgctggatgccgcgccctgcgagccagagagcttggagatcaacaagtattttgtggtgatcatatacgcactcgtgttcctcctctccttgctgggaaactctttggtaatgctcgtgatcctctactcacgcgtcggccgctccgttactgatgtgtaccttctgaacttggccttggcggatctgctgttcgctctgactctgccaatctgggccgcgagcaaggtgaacgggtggatcttcggaacctttctgtgcaaagtcgtgtcactgctgaaagaggtgaacttttactccgggattttactgctggcatag

SEQ ID NO: 65971 - DNA, 48 bp, Artificial Sequence
  derived and/or modified sequence
atggaagacttcaacatggagtccgactccttcgaggatttttggtag

SEQ ID NO: 65972 - DNA, 519 bp, Artificial Sequence
  derived and/or modified sequence
atggaggacttcaacatggagtccgacagcttcgaggacttctggaagggagaggatctaagcaattacagctatagcagcaccctgcccccattcctcttagacgccgcgccctgtgagccggagtccctggagattaataaatattttgttgtcatcatatacgccctcgtgttcctgctctctctgctcggtaattcactggtcatgctggtcattctgtatagccgcgttggccggagcgtcactgatgtctatctcctcaatctcgccctggctgacttgctcttcgccttgactcttccaatctgggctgcttccaaagtgaatggatggattttcggaacttttttgtgcaaggtggtgtccctgctgaaggaggttaatttctactccggcatcctccttcttgcatgtatttccgtggatcgctacctcgctatcgttcacgccactaggaccttgacacagaaacgatacttggtcaagttcatttgcctcagcatctggggcctgtag

SEQ ID NO: 65973 - DNA, 48 bp, Artificial Sequence
  derived and/or modified sequence
atggaggatttcaacatggagtctgatagtttcgaagatttctggtag

SEQ ID NO: 65974 - DNA, 606 bp, Artificial Sequence
  derived and/or modified sequence
atggaggattttaatatggagtcagattcttttgaggatttttggaagggcgaggacctgtccaactactcttacagcagcacacttccaccctttctacttgacgcagcaccatgtgaacccgaaagtctggaaatcaataagtattttgtagtgatcatctacgccctggtatttctgctttcactacttgggaatagtcttgtaatgttagtgattctgtattcaagagtggggcggtcagttactgatgtctatttactcaatctggccttggccgacctgctgtttgcgcttacgcttccaatttgggcggcatcgaaagtgaatggttggattttcggaacattcctttgtaaggtggtatccttgctaaaggaagtgaatttttacagcggtatcctgttgctggcctgcatctccgtggaccgatacctcgcgatcgtccatgccacccgcacactcacccagaagagatatctggtgaagttcatctgcctatcgatatggggactgtccctactgctggctctaccagtactcttgttcagacgcaccgtgtattcatccaacgtgtccccagcatgctatgaggatatggggtag

SEQ ID NO: 65975 - DNA, 411 bp, Artificial Sequence
  derived and/or modified sequence
atggaagattttaacatggagagcgattccttcgaggacttttggaagggagaggacctctctaattattcgtacagcagcaccctgccccctttcttgctggatgccgccccctgtgagcccgagtctctggagataaataaatactttgtcgttattatctatgccctagtgttcctcctcagcttgctcgggaactctctggtcatgctggtcattctctactcacgagtcgggaggtcggtgactgacgtttatctgctaaacctggccctggctgatttactgttcgcactcacactccccatttgggccgcaagcaaagtcaatggatggatattcggcacgtttctgtgtaaggtcgtttccctcctcaaggaggtgaatttttacagcggaatcctgctgtag

SEQ ID NO: 65976 - DNA, 1083 bp, Artificial Sequence
  derived and/or modified sequence
atggaggacttcaacatggagagtgacagctttgaggacttctggaagggggaggacctgagcaactacagctacagcagcaccctgccccccttcctgctggatgctgccccctgtgagcctgagagcctggagatcaacaagtactttgtggtgatcatctatgccctggtgttcctgctgagcctgctgggcaacagcctggtgatgctggtgatcctgtacagccgggtgggccgctctgtgacagatgtgtacctgctgaacctggccctggccgacctgctgtttgccctgaccctgcccatctgggccgccagcaaggtgaatggctggatcttcggcaccttcctgtgcaaggtggtgtccctgctgaaggaggtgaacttctacagcggcatcctgctgctggcctgcatctctgtggaccgctacctggccatcgtgcacgccaccaggaccctgacccagaagcgctacctggtgaagttcatctgcctgagcatctggggcctgagcctgctgctggccctgcctgtgctgctcttccggaggacagtgtacagcagcaatgtgtccccagcctgctatgaggacatgggcaacaacacagccaactggaggatgctgctgcgcatcctgccccagagctttggcttcatcgtgcccctgctgatcatgctgttctgctacggcttcaccctgcggaccctcttcaaggcccacatgggccagaagcaccgggccatgagggtcatctttgctgtggtgctgatcttcctgctgtgctggctgccctacaacctggtgctgctggccgacaccctgatgaggacccaggtgatccaggagacctgtgagaggaggaaccacatcgaccgggccctggatgccacagagatcctgggcatcctgcacagctgcctgaaccccctcatctatgccttcatcggccagaagttcagacatggcctgctgaagatcctggccatccacggcctcatcagcaaggacagcctgcccaaggacagccggcccagctttgtgggcagcagcagcggccacaccagcaccaccctgtag

SEQ ID NO: 65977 - DNA, 417 bp, Artificial Sequence
  derived and/or modified sequence
atggaggacttcaacatggagagtgacagctttgaggacttctggaagggggaggacctgagcaactacagctacagcagcaccctgccccccttcctgctggatgctgccccctgtgagcctgagagcctggagatcaacaagtactttgtggtgatcatctatgccctggtgttcctgctgagcctgctgggcaacagcctggtgatgctggtgatcctgtacagccgggtgggccgctctgtgacagatgtgtacctgctgaacctggccctggccgacctgctgtttgccctgaccctgcccatctgggccgccagcaaggtgaatggctggatcttcggcaccttcctgtgcaaggtggtgtccctgctgaaggaggtgaacttctacagcggcatcctgctgctggcctag

SEQ ID NO: 65978 - DNA, 48 bp, Artificial Sequence
  derived and/or modified sequence
atggaggacttcaacatggagagtgacagctttgaggacttctggtag

SEQ ID NO: 65979 - DNA, 519 bp, Artificial Sequence
  derived and/or modified sequence
atggaggacttcaacatggagagtgacagctttgaggacttctggaagggggaggacctgagcaactacagctacagcagcaccctgccccccttcctgctggatgctgccccctgtgagcctgagagcctggagatcaacaagtactttgtggtgatcatctatgccctggtgttcctgctgagcctgctgggcaacagcctggtgatgctggtgatcctgtacagccgggtgggccgctctgtgacagatgtgtacctgctgaacctggccctggccgacctgctgtttgccctgaccctgcccatctgggccgccagcaaggtgaatggctggatcttcggcaccttcctgtgcaaggtggtgtccctgctgaaggaggtgaacttctacagcggcatcctgctgctggcctgcatctctgtggaccgctacctggccatcgtgcacgccaccaggaccctgacccagaagcgctacctggtgaagttcatctgcctgagcatctggggcctgtag

SEQ ID NO: 65980 - DNA, 606 bp, Artificial Sequence
  derived and/or modified sequence
atggaggacttcaacatggagagtgacagctttgaggacttctggaagggggaggacctgagcaactacagctacagcagcaccctgccccccttcctgctggatgctgccccctgtgagcctgagagcctggagatcaacaagtactttgtggtgatcatctatgccctggtgttcctgctgagcctgctgggcaacagcctggtgatgctggtgatcctgtacagccgggtgggccgctctgtgacagatgtgtacctgctgaacctggccctggccgacctgctgtttgccctgaccctgcccatctgggccgccagcaaggtgaatggctggatcttcggcaccttcctgtgcaaggtggtgtccctgctgaaggaggtgaacttctacagcggcatcctgctgctggcctgcatctctgtggaccgctacctggccatcgtgcacgccaccaggaccctgacccagaagcgctacctggtgaagttcatctgcctgagcatctggggcctgagcctgctgctggccctgcctgtgctgctcttccggaggacagtgtacagcagcaatgtgtccccagcctgctatgaggacatgggctag

SEQ ID NO: 65981 - DNA, 411 bp, Artificial Sequence
  derived and/or modified sequence
atggaggacttcaacatggagagtgacagctttgaggacttctggaagggggaggacctgagcaactacagctacagcagcaccctgccccccttcctgctggatgctgccccctgtgagcctgagagcctggagatcaacaagtactttgtggtgatcatctatgccctggtgttcctgctgagcctgctgggcaacagcctggtgatgctggtgatcctgtacagccgggtgggccgctctgtgacagatgtgtacctgctgaacctggccctggccgacctgctgtttgccctgaccctgcccatctgggccgccagcaaggtgaatggctggatcttcggcaccttcctgtgcaaggtggtgtccctgctgaaggaggtgaacttctacagcggcatcctgctgtag

SEQ ID NO: 65982 - DNA, 1083 bp, Artificial Sequence
  derived and/or modified sequence
atggaggacttcaacatggagagcgacagcttcgaggacttctggaagggtgaggatctatctaactacagttactcctcgacccttccaccattcctattagacgctgctccgtgcgaacccgagtcgctggagattaacaaatacttcgtcgtcatcatatatgcactggtatttctcctgtctctgctcggaaatagtttagtgatgctggtcatcctgtactctagggtcggacggtccgttaccgacgtatatttactgaacctggctctggctgatttgctgttcgccttgacactaccaatctgggctgcctctaaggtgaatggctggatcttcggtacattcctgtgcaaggtggtgagcctccttaaagaggtgaacttctacagcggaattctgctgttagcctgtatctcagttgataggtatctcgccattgtgcatgccacacggacccttactcagaagaggtacctcgttaagtttatttgtctgagtatctggggcctttcccttttgctcgccctacctgtgcttctcttcagacgcaccgtctattcttctaatgtatcacctgcatgttacgaggacatgggcaacaatacggccaattggcgtatgttgttgcgaattctcccgcagtcttttggattcattgttccgctgcttatcatgctgttttgctacggattcactctgcggaccttgtttaaagcccacatgggacaaaaacaccgcgcaatgagggttatctttgccgtggtgttgatctttcttttgtgttggctaccatacaatctcgtcttacttgcagacaccctcatgcgcacccaggtaattcaagagacatgcgaaagaaggaaccatatagatagagctctggatgcaactgaaattttaggcatcttgcactcgtgcctgaacccattaatttacgccttcatcggtcaaaaatttagacatggactgctcaagattctggctatacacggcctgatttcaaaggattcccttccaaaagactcacgcccctctttcgtcggttcctcttccggtcacacatcaactactctttag

SEQ ID NO: 65983 - DNA, 417 bp, Artificial Sequence
  derived and/or modified sequence
atggaggacttcaacatggagagcgacagcttcgaggacttctggaaaggagaagatctgtcgaactactcatactcatctacactgcctcccttcttgctcgacgcagccccctgcgaacctgagtccctcgagattaacaagtatttcgtggtcattatttatgcgctagtgttcttgctgtccctgctgggaaattctctcgttatgctcgtaatcctgtactcacgcgtcggccggtccgtgacagacgtctatttgctgaacttggcactagcagacctcctattcgctttgaccctgcctatctgggccgccagcaaggtcaacggctggatctttggtacattcctgtgcaaagtcgtttctttattgaaggaagtcaatttttacagcggcatactgttacttgcctag

SEQ ID NO: 65984 - DNA, 519 bp, Artificial Sequence
  derived and/or modified sequence
atggaggacttcaacatggagagcgacagcttcgaggacttctggaaaggggaagaccttagtaattattcctatagttccacccttccaccattcctgctcgacgcagctccctgcgaacccgagtccctcgagatcaacaaatactttgtagtaataatatacgctctggtgttcttgctctccctgctgggcaatagcttggtgatgttggtcatcctctacagcagagtgggacggtccgttacggatgtgtatctcctgaaccttgctttggccgatctacttttcgcactgaccctgccaatttgggctgctagtaaggttaatggatggatctttggaacgttcctgtgcaaggtagtgtctctcctaaaagaggtcaatttttattcaggaattctgctgctggcctgcataagcgtcgatcgatatttagctattgtgcacgcgacaaggaccctgacacaaaagcgctatctcgtgaaattcatatgtctgagtatctggggtctgtag

SEQ ID NO: 65985 - DNA, 606 bp, Artificial Sequence
  derived and/or modified sequence
atggaggacttcaacatggagagcgacagcttcgaggacttctggaagggagaggatttgtccaactactcatattcgagcaccttacctcctttcctattggacgccgctccatgcgaaccggagagccttgaaattaataaatactttgtcgtgatcatctatgccctggttttcttacttagcctcttaggcaatagtcttgtcatgctcgtgattttatactcaagggtagggcggtcagtgactgatgtgtatctcctgaaccttgcactggccgatctcctgttcgccctgactctaccaatctgggccgcatcaaaggtgaatggttggatttttgggacattcctctgtaaggtggtttctctgctgaaagaggtgaacttctacagtggcatcctactgctggcctgcattagtgtcgacagataccttgccatcgttcacgctacgaggacactgacccagaaacgctacctcgtgaaatttatctgcttgtcgatttggggactgtccctgcttcttgcgttgcccgtgctgctgtttcgaaggacagtgtacagctcaaacgtgagtcctgcttgttacgaggacatggggtag

SEQ ID NO: 65986 - DNA, 411 bp, Artificial Sequence
  derived and/or modified sequence
atggaggacttcaacatggagagcgacagcttcgaggacttctggaagggggaggacctttctaattattcttatagctctacgctgccaccattcttgctagatgccgctccatgtgaacctgaatccctggagataaacaagtatttcgtggtgatcatctacgcgctggtgttcctgctatcgctgctcggcaactcactcgtgatgctggtcattctgtactcacgtgtgggcagaagtgtgacagatgtctatctgctgaaccttgcactggctgatctgcttttcgcactcacattgcccatctgggcagccagtaaggttaacggatggatcttcggtaccttcctatgcaaagtggtctcccttctgaaagaagtgaatttctactcaggcatattgctgtag

SEQ ID NO: 65987 - DNA, 1083 bp, Artificial Sequence
  derived and/or modified sequence
atggaggattttaacatggagtcagactcctttgaagacttttggaagggtgaggacctgtcaaactactcatactctagcactctcccaccattcctgttagacgctgccccttgcgaaccggaaagtcttgagatcaacaagtatttcgttgttattatctacgctctggtattcctgctctcactgcttggtaatagtcttgtgatgctggtaattctttatagccgcgtcgggagaagcgtcacggatgtgtatttactcaacctcgcattagctgacctcttgttcgcgctgaccttacccatctgggcagctagcaaagttaatggctggattttcggcactttcttatgcaaggtcgtgagcctgttaaaagaggtgaacttctactctggtattttgctgttagcttgcatttcagtggacaggtacctggcaatcgtgcacgctactaggactcttacacagaagaggtatctagtgaaatttatttgtcttagtatctggggactctcattgctactcgcgctgcccgtactgctgtttaggagaaccgtgtactcctcgaatgtgagtcctgcgtgctacgaagatatgggcaacaataccgctaattggcggatgttgctgcgcattctaccacagagctttgggttcatcgtaccactactgataatgttgttctgttacggatttaccctgcgaacactctttaaggcacatatgggtcagaaacatagagctatgcgcgtaatcttcgccgtcgtgctgattttcttgctctgctggttgccatataacttggtcctgctcgccgacactctcatgcgcacccaggttatacaagagacctgcgagagaaggaatcatatcgatcgcgctttggatgcaacagagatattgggcatcctgcacagttgcctcaaccccctgatttatgcttttattgggcaaaagttccggcatggtctgttgaagatcctggcgatccacggccttatctccaaggacagcctccccaaggacagtagaccctctttcgtgggatcaagttccggtcacacgtccactacactctag

SEQ ID NO: 65988 - DNA, 417 bp, Artificial Sequence
  derived and/or modified sequence
atggaggatttcaacatggaatctgattcctttgaggatttttggaagggggaagacttatctaattatagttatagtagcacattgccaccctttcttctggacgcagcaccctgcgaacctgagagcctcgagataaacaaatactttgttgtaatcatctacgcgctggtttttctgctgagtctgctggggaattcactagttatgcttgtgattttatactctcgcgtgggccgaagcgtgaccgatgtctatctcttaaatctggccctggccgaccttttattcgcactgacactgcccatctgggccgcttcaaaagtgaatggctggatattcggcacttttctgtgtaaagtggtctcactactcaaagaggtgaatttctattccggcatcctgctgctggcctag

SEQ ID NO: 65989 - DNA, 48 bp, Artificial Sequence
  derived and/or modified sequence
atggaagattttaacatggaaagcgacagctttgaggacttctggtag

SEQ ID NO: 65990 - DNA, 519 bp, Artificial Sequence
  derived and/or modified sequence
atggaagatttcaatatggagtcagattcattcgaagacttctggaagggcgaggacttaagtaactacagttattcatcgaccctccccccttttttgctagacgccgctccgtgtgaaccggaatcactggagatcaataaatattttgtagttattatttacgccttggtattcttactctctctgctgggtaactcactcgtgatgctcgtgattctgtactcccgcgtgggaaggtccgtcactgacgtgtacctgctcaatcttgccctcgccgatttattgttcgctctcaccttgcccatctgggcagcatctaaggtgaatgggtggattttcggaacattcctgtgtaaagtcgtgagcctgttaaaggaggtcaatttttacagcggcatcttgctgttggcctgcatttccgttgataggtacctcgctatcgttcacgccactagaacacttactcagaaacggtacctcgttaagtttatctgcttgagcatctggggcctgtag

SEQ ID NO: 65991 - DNA, 48 bp, Artificial Sequence
  derived and/or modified sequence
atggaagattttaacatggaaagcgattcatttgaggacttctggtag

SEQ ID NO: 65992 - DNA, 606 bp, Artificial Sequence
  derived and/or modified sequence
atggaggattttaatatggagagtgactccttcgaagacttctggaagggggaagatctctcaaattattcctactctagcacactgccaccattcctgcttgacgctgcaccttgcgaacctgaatccctggagatcaataaatatttcgtggttattatctacgccttggtctttttactcagtttactaggaaattctttggtgatgttagtgattctgtacagtagggtaggccgtagcgtcactgacgtgtacctcttaaacctggctctggccgacctgctgttcgcacttaccctgcctatctgggccgcatctaaagtgaatggctggattttcggtaccttcctgtgtaaggtcgtcagcctcctgaaagaagtgaatttctacagtggaatcttacttttggcctgcataagcgtggaccgctatctggcaatcgtgcatgctacccgcacgttgacccagaaaagatatttggtgaaattcatctgcctaagcatatggggactatcgttgcttctggctctgcctgtcctgcttttcaggagaacagtgtacagttccaatgttagccccgcttgctacgaggacatggggtag

SEQ ID NO: 65993 - DNA, 411 bp, Artificial Sequence
  derived and/or modified sequence
atggaggattttaacatggagtcagactcctttgaagatttttggaaaggcgaagacctcagcaactattcctatagcagtactttacctccttttcttctcgacgccgctccatgtgagccggagagccttgaaattaacaaatacttcgttgtgattatttacgcgcttgttttcctcctgagcctgctcgggaattccctggtgatgctggtgatcctgtactctagggttggcagatccgtcaccgatgtttatctgcttaacctggcattagcagacctgctttttgcgctaacactacctatctgggccgcatcaaaggtgaacggttggatcttcgggactttcctgtgtaaagtggtaagcctcctcaaagaggtaaatttctactccggaatattgttatag

SEQ ID NO: 65994 - protein, 489 aa, Artificial Sequence
  derived and/or modified sequence
MAGQRVLLLVGFLLPGVLLSEAAKILTISTVDFKKEEKSYQVISWLAPEDHQREFKKSFDFFLEETLGGRGKFENLLNVLEYLALQCSHFLNRKDIMDSLKNENFDMVIVETFDYCPFLIAEKLGKPFVAILSTSFGSLEFGLPIPLSYVPVFRSLLTDHMDFWGRVKNFLMFFSFCRRQQHMQSTFDNTIKEHFTEGSRPVLSHLLLKAELWFINSDFAFDFARPLLPNTVYVGGLMEKPIKPVPQDLENFIAKFGDSGFVLVTLGSMVNTCQNPEIFKEMNNAFAHLPQGVIWKCQCSHWPKDVHLAANVKIVDWLPQSDLLAHPSIRLFVTHGGQNSIMEAIQHGVPMVGIPLFGDQPENMVRVEAKKFGVSIQLKKLKAETLALKMKQIMEDKRYKSAAVAASVILRSHPLSPTQRLVGWIDHVLQTGGATHLKPYVFQQPWHEQYLLDVFVFLLGLTLGTLWLCGKLLGMAVWWLRGARKVKET

SEQ ID NO: 65995 - protein, 221 aa, Artificial Sequence
  derived and/or modified sequence
MVNTCQNPEIFKEMNNAFAHLPQGVIWKCQCSHWPKDVHLAANVKIVDWLPQSDLLAHPSIRLFVTHGGQNSIMEAIQHGVPMVGIPLFGDQPENMVRVEAKKFGVSIQLKKLKAETLALKMKQIMEDKRYKSAAVAASVILRSHPLSPTQRLVGWIDHVLQTGGATHLKPYVFQQPWHEQYLLDVFVFLLGLTLGTLWLCGKLLGMAVWWLRGARKVKET

SEQ ID NO: 65996 - DNA, 1470 bp, Artificial Sequence
  derived and/or modified sequence
atggccggccagagagtgctgctgctggtgggcttcctgctgcccggcgtgctgctgagcgaggccgccaagatcctgaccatcagcaccgtggacttcaagaaggaggagaagagctaccaggtgatcagctggctggcccccgaggaccaccagagagagttcaagaagagcttcgacttcttcctggaggagaccctgggcggcagaggcaagttcgagaacctgctgaacgtgctggagtacctggccctgcagtgcagccacttcctgaacagaaaggacatcatggacagcctgaagaacgagaacttcgacatggtgatcgtggagaccttcgactactgccccttcctgatcgccgagaagctgggcaagcccttcgtggccatcctgagcaccagcttcggcagcctggagttcggcctgcccatccccctgagctacgtgcccgtgttcagaagcctgctgaccgaccacatggacttctggggcagagtgaagaacttcctgatgttcttcagcttctgcagaagacagcagcacatgcagagcaccttcgacaacaccatcaaggagcacttcaccgagggcagcagacccgtgctgagccacctgctgctgaaggccgagctgtggttcatcaacagcgacttcgccttcgacttcgccagacccctgctgcccaacaccgtgtacgtgggcggcctgatggagaagcccatcaagcccgtgccccaggacctggagaacttcatcgccaagttcggcgacagcggcttcgtgctggtgaccctgggcagcatggtgaacacctgccagaaccccgagatcttcaaggagatgaacaacgccttcgcccacctgccccagggcgtgatctggaagtgccagtgcagccactggcccaaggacgtgcacctggccgccaacgtgaagatcgtggactggctgccccagagcgacctgctggcccaccccagcatcagactgttcgtgacccacggcggccagaacagcatcatggaggccatccagcacggcgtgcccatggtgggcatccccctgttcggcgaccagcccgagaacatggtgagagtggaggccaagaagttcggcgtgagcatccagctgaagaagctgaaggccgagaccctggccctgaagatgaagcagatcatggaggacaagagatacaagagcgccgccgtggccgccagcgtgatcctgagaagccaccccctgagccccacccagagactggtgggctggatcgaccacgtgctgcagaccggcggcgccacccacctgaagccctacgtgttccagcagccctggcacgagcagtacctgctggacgtgttcgtgttcctgctgggcctgaccctgggcaccctgtggctgtgcggcaagctgctgggcatggccgtgtggtggctgagaggcgccagaaaggtgaaggagacctag

SEQ ID NO: 65997 - DNA, 666 bp, Artificial Sequence
  derived and/or modified sequence
atggtgaacacctgccagaaccccgagatcttcaaggagatgaacaacgccttcgcccacctgccccagggcgtgatctggaagtgccagtgcagccactggcccaaggacgtgcacctggccgccaacgtgaagatcgtggactggctgccccagagcgacctgctggcccaccccagcatcagactgttcgtgacccacggcggccagaacagcatcatggaggccatccagcacggcgtgcccatggtgggcatccccctgttcggcgaccagcccgagaacatggtgagagtggaggccaagaagttcggcgtgagcatccagctgaagaagctgaaggccgagaccctggccctgaagatgaagcagatcatggaggacaagagatacaagagcgccgccgtggccgccagcgtgatcctgagaagccaccccctgagccccacccagagactggtgggctggatcgaccacgtgctgcagaccggcggcgccacccacctgaagccctacgtgttccagcagccctggcacgagcagtacctgctggacgtgttcgtgttcctgctgggcctgaccctgggcaccctgtggctgtgcggcaagctgctgggcatggccgtgtggtggctgagaggcgccagaaaggtgaaggagacctag

SEQ ID NO: 65998 - DNA, 1470 bp, Artificial Sequence
  derived and/or modified sequence
atggctgggcagagagtcctcctgctggtggggtttctcctccctggagtcctgctcagtgaggctgcaaaaattctgacaatctctaccgttgacttcaagaaagaagaaaagtcttaccaggtgattagctggttagctcctgaggatcaccagcgcgagtttaagaaaagtttcgacttcttcctggaggagacgctgggcggcaggggcaagtttgagaacctattaaatgtcctggaatacctggcactgcagtgtagtcacttcctgaataggaaggatataatggattcactgaaaaatgagaactttgacatggtgatagtcgagacttttgattactgcccgtttctgatcgcagaaaaactggggaagcccttcgtcgccattctgagcacaagcttcggatcgctcgaattcggactgcccatcccgctcagctatgttcccgtcttcaggtctttacttactgaccacatggatttttggggacgggtgaaaaactttctcatgttttttagcttctgcagacgacagcagcatatgcagtctaccttcgacaacactatcaaagagcattttacagaaggctcacgtcctgttttgagccatctgcttctgaaggcggagttatggttcatcaatagtgactttgctttcgattttgcacgccccctcttgcccaatactgtgtacgtgggaggcttgatggagaaaccaattaagccagtccctcaagacctcgagaattttatcgcaaagttcggagactccggctttgttctggtaaccctgggcagtatggtgaatacatgtcagaacccagagatcttcaaggagatgaacaatgcctttgctcatctgcctcagggggttatttggaagtgtcagtgtagccattggcctaaggacgtgcatctggccgccaatgtcaaaatcgtggattggcttcctcagtccgatctattggcccacccttctattcggctgttcgtgacccatggcggtcaaaactccatcatggaagctattcagcacggggtcccaatggtggggattcctctgtttggagatcagcctgaaaatatggtgcgtgtcgaggccaagaagttcggtgtgtctatccagttgaaaaaactgaaggcagagaccctcgcactcaaaatgaaacagattatggaggacaaaagatacaaatccgccgccgtcgcagcctcagtaattctgcggtcccacccactgtcccctacccagcgcctggtcgggtggatcgatcatgttctgcaaacgggtggcgccacgcatctgaagccatatgttttccagcagccttggcacgaacagtacctacttgatgtctttgttttccttctcggactgacgttagggaccctgtggttgtgtggcaaacttctgggcatggccgtgtggtggctgagaggcgccagaaaggttaaggaaacttag

SEQ ID NO: 65999 - DNA, 666 bp, Artificial Sequence
  derived and/or modified sequence
atggtcaacacctgccaaaatccggagatatttaaggagatgaacaatgccttcgctcacctcccacagggagttatctggaagtgccagtgctcccactggcccaaagacgtccacttggcagccaacgtaaaaatcgtcgactggctcccccagtctgacttgctcgcccaccctagcatccggttattcgtgactcatgggggccagaacagcatcatggaggcaattcaacatggcgtgcccatggtcggcatccctcttttcggggaccagcccgagaacatggtgagagtggaagcgaagaaattcggggtgtctattcagctgaagaagctgaaggccgagacactcgcccttaaaatgaagcagatcatggaagacaagcggtataagagtgcagcagtggcagcgagcgtcattctgcggagccacccattgtcccccacgcagcgactcgtgggctggatcgaccacgtactccaaaccggcggtgccacgcatctcaagccatatgtgttccagcaaccatggcacgagcagtacttgctggatgtattcgttttcctcctgggtcttaccctgggaactctctggctctgcggcaaactactggggatggctgtatggtggttgcgcggcgcgcggaaggtgaaagaaacatag

SEQ ID NO: 66000 - DNA, 1470 bp, Artificial Sequence
  derived and/or modified sequence
atggccggccagagggtgctgctgctggtgggcttcctgctgcccggggtgctgctgtctgaggccgccaagatcctgaccatcagcacagtggacttcaagaaggaggagaagagctaccaggtgatctcctggctggcccctgaggaccaccagcgggagttcaagaagagctttgacttcttcctggaggagaccctgggcggccggggcaagtttgagaacctgctgaatgtgctggagtacctggccctgcagtgcagccacttcctgaacaggaaggacatcatggacagcctgaagaatgaaaattttgacatggtgattgtggagacctttgactactgccccttcctgattgctgagaagctgggcaagccctttgtggccatcctgagcaccagctttggcagcctggagtttggcctgcccatccccctgtcctatgtgcctgtgttccgcagcctgctgacagaccacatggacttctggggccgggtgaagaacttcctgatgttcttctccttctgccggcggcagcagcacatgcagagcacctttgacaacaccatcaaggagcacttcacagagggcagcaggcctgtgctgagccacctgctgctgaaggccgagctgtggttcatcaacagcgactttgcctttgattttgcccggcccctgctgcccaacacagtgtatgtgggcggcctgatggagaagcccatcaagcctgtgccccaggacctggagaacttcatcgccaagtttggagacagcggctttgtgctggtgaccctgggctccatggtgaacacctgccagaaccctgagatcttcaaggagatgaacaatgcctttgcccacctgccccagggcgtcatctggaagtgccagtgcagccactggcccaaggatgtgcacctggccgccaacgtgaagatcgtggactggctgccccagagcgacctgctggcccaccccagcatccggctgtttgtgacccatggaggccagaacagcatcatggaggccatccagcacggcgtgcccatggtgggcatccccctgtttggagaccagcctgagaacatggtgcgggtggaggccaagaagtttggagtgtccatccagctgaagaagctgaaggccgagaccctggccctgaagatgaagcagatcatggaggacaagcgctacaagtctgctgctgtggccgccagcgtcatcctgcggagccaccccctgagccccacccagaggctggtgggctggattgaccacgtgctgcagacaggaggagccacccacctgaagccctacgtgttccagcagccctggcatgagcagtacctgctggatgtgtttgtgttcctgctgggcctgaccctgggcaccctgtggctgtgtgggaagctgctgggcatggctgtgtggtggctgcggggggccaggaaggtgaaggagacctag

SEQ ID NO: 66001 - DNA, 666 bp, Artificial Sequence
  derived and/or modified sequence
atggtgaacacctgccagaaccctgagatcttcaaggagatgaacaatgcctttgcccacctgccccagggcgtcatctggaagtgccagtgcagccactggcccaaggatgtgcacctggccgccaacgtgaagatcgtggactggctgccccagagcgacctgctggcccaccccagcatccggctgtttgtgacccatggaggccagaacagcatcatggaggccatccagcacggcgtgcccatggtgggcatccccctgtttggagaccagcctgagaacatggtgcgggtggaggccaagaagtttggagtgtccatccagctgaagaagctgaaggccgagaccctggccctgaagatgaagcagatcatggaggacaagcgctacaagtctgctgctgtggccgccagcgtcatcctgcggagccaccccctgagccccacccagaggctggtgggctggattgaccacgtgctgcagacaggaggagccacccacctgaagccctacgtgttccagcagccctggcatgagcagtacctgctggatgtgtttgtgttcctgctgggcctgaccctgggcaccctgtggctgtgtgggaagctgctgggcatggctgtgtggtggctgcggggggccaggaaggtgaaggagacctag

SEQ ID NO: 66002 - DNA, 1470 bp, Artificial Sequence
  derived and/or modified sequence
atggccggccagcgggtgctgctgctggtgggcttcctgctgcccggggtcctgttaagtgaagcagctaaaatcctgacaatttccaccgtcgactttaaaaaggaggagaagagctatcaggtgattagctggctcgcccccgaagaccaccagcgagagttcaagaagagtttcgatttttttctggaggagacgctgggcggacgcggcaaatttgagaatcttttgaatgtcctcgagtacctcgctctccaatgttcacattttctaaataggaaggatatcatggattcacttaagaacgaaaacttcgatatggttattgtggagaccttcgactattgccctttcttaatcgctgagaaactgggcaaacccttcgttgcaattctgtccacatcattcggctccctcgagttcggactccccatccccttgtcctatgtccctgtgtttagatccttgctgaccgatcacatggacttttgggggcgcgttaaaaacttccttatgttctttagcttctgtaggcgtcaacagcacatgcagtctacattcgataacaccattaaggagcacttcactgagggatcgagacctgttctgagccatttgttactaaaagctgagctttggtttatcaattccgatttcgcatttgactttgcccggccgttgttgcctaacacagtgtacgttggaggtctgatggaaaaacccattaaacctgtcccgcaggacctggagaacttcattgcgaagtttggagactccgggtttgtattggtgaccttggggtccatggtgaacacctgtcagaatcctgaaattttcaaagagatgaacaacgcctttgctcatttgccccagggtgtcatctggaaatgccagtgcagccactggccaaaagatgtgcacctcgccgccaatgtgaagattgtcgactggctgccccagagtgatctactggcacatccctcaatcaggctcttcgttacccatggtgggcagaacagtataatggaggctatccaacatggcgtgcctatggtcggcattcccctgtttggtgatcagcctgagaacatggtacgcgtggaggcaaaaaaatttggcgtcagtattcagcttaagaaactgaaggccgagacattagccctcaagatgaagcagatcatggaggataagcgctataagtctgccgcggtagcggctagtgtgattctccggtctcatccactctcccccacacaacggttagtcggctggatcgaccacgtgttgcagacaggtggggctacacacttaaaaccatacgttttccagcaaccttggcacgagcagtatctacttgatgtcttcgtgtttctgctgggcctaacattagggaccctctggctgtgtggaaagctgctcggaatggccgtgtggtggctccgaggcgcacgcaaggtcaaagaaacatag

SEQ ID NO: 66003 - DNA, 666 bp, Artificial Sequence
  derived and/or modified sequence
atggtgaacacctgccagaaccccgagatcttcaaggagatgaacaacgccttcgcccaccttccacagggtgtaatctggaaatgccagtgttcacattggcccaaggatgttcacctcgctgccaatgtcaagattgtggattggctgccccagagcgaccttttagcgcacccctccatccgcttgtttgttacccacggcggacagaactccatcatggaagccatccagcacggtgtgcctatggtggggatacccctgtttggtgatcagccagagaacatggttcgggtggaagccaaaaaattcggggtgtcgatccaacttaagaagctcaaggctgaaactctcgccttgaagatgaaacagatcatggaggataagcgatacaaatcagccgctgtggcagcctcagttatccttcggtctcacccattatccccaacccagagactggtgggatggatagatcacgtgcttcagacaggcggggcaacacatttgaaaccctacgtgttccaacagccttggcacgaacagtacctgcttgacgtgtttgtgttcttgttaggattgaccctcggaactctatggttatgtggcaagctcctcggcatggccgtttggtggttaagaggcgcacggaaggtcaaagagacatag

SEQ ID NO: 66004 - DNA, 1470 bp, Artificial Sequence
  derived and/or modified sequence
atggctgggcagcgggtgctgttgctcgtaggctttctgttgccgggtgtgctgctgtctgaagccgctaagatactgacaatcagcacggtggatttcaaaaaagaggagaagtcatatcaggttatcagctggttagcaccagaggaccaccagagggagttcaagaagagtttcgacttttttttggaggaaacccttggaggcagaggcaagtttgagaacctgctcaatgtgttggagtatttggctttgcaatgctcacattttcttaataggaaagacattatggattctctgaagaacgaaaatttcgacatggtgattgtagaaacctttgattactgcccctttctcatcgccgagaagctaggcaagccatttgtggcaattttgtcaacgtctttcgggagcttggagtttggcctccctatacctcttagctacgttcccgtttttagatctctgctcactgaccacatggacttctggggccgagtcaagaactttctgatgttcttctctttctgccggagacaacagcatatgcagtctacattcgacaataccattaaggagcattttacagaaggcagccgccctgtcctgtcacatcttttgctcaaagctgaactgtggtttatcaatagcgatttcgccttcgatttcgcacggcctttattaccaaacacggtgtatgttggtggactcatggagaaacctattaaaccagtccctcaggacttagagaattttattgccaagttcggggactcaggtttcgtactggtgactttaggttccatggtgaatacttgtcaaaatcccgagatctttaaagaaatgaataatgccttcgcacatctgccccagggggtcatttggaagtgtcagtgtagtcactggccaaaggatgttcatcttgccgcaaacgttaaaattgtagactggctcccccagtccgatctcctcgcccatccctcaatccgcctatttgttacccatggtgggcagaatagcatcatggaagcaatccagcatggagtgccaatggtcgggatcccactattcggagaccagcctgagaacatggttagagtcgaagcaaagaaattcggcgtttcaatacagcttaagaaattaaaggcagagactctggccctaaagatgaaacaaattatggaggacaagcgatataaatccgcagctgtggcagcttcagtgatcctgaggtcacaccctctcagtccaactcagcggctggtggggtggatcgatcacgtgctacagacagggggtgcgacgcacctgaagccctatgtcttccagcagccgtggcatgaacaataccttctggacgtctttgtgttcctgctcgggcttactttgggtactttgtggctctgtggcaagcttttaggtatggctgtctggtggttgcggggagccagaaaggttaaggaaacttag

SEQ ID NO: 66005 - DNA, 666 bp, Artificial Sequence
  derived and/or modified sequence
atggttaacacctgccagaatccggaaatcttcaaagaaatgaataacgcattcgctcacctaccccagggcgtgatttggaaatgccagtgttcccactggcctaaagacgtgcacctggctgctaatgtgaaaatcgtcgattggctcccccagtctgaccttctggcacatcccagtattagactgttcgtcacacatggcggacagaacagcattatggaagctattcagcacggggttccgatggtcggcatcccgcttttcggagaccagccagagaatatggtccgcgtcgaggctaagaagtttggcgtatccattcagctgaaaaagctcaaggctgagacactggctttgaagatgaaacagataatggaggataagcggtataagtccgctgcagtcgccgcttctgtcatcctccgctcccatccgctgtcgccaacacagagactggtgggctggatcgatcatgtcttgcagactgggggagctactcacttgaagccatacgtatttcagcagccatggcatgagcaatatctgctggatgtatttgtgttccttctggggctgactcttggaacgctgtggctgtgtggtaaactcctgggcatggccgtatggtggcttaggggagccagaaaagtcaaggaaacttag

SEQ ID NO: 66006 - DNA, 1470 bp, Artificial Sequence
  derived and/or modified sequence
atggcaggtcaaagggtcctgttactggtcggcttcctgctgcctggtgtccttttaagcgaggcagccaaaatactgacaatttctaccgtcgacttcaaaaaagaagagaaaagctaccaggtgatcagttggctcgctccagaagaccatcagcgagaattcaagaaaagcttcgacttctttctcgaggagacactcggcgggcggggaaagtttgagaatttgctgaatgtgctggagtacttagccctgcagtgttctcacttcctcaatagaaaagatatcatggatagccttaagaacgagaactttgatatggttatcgtggagaccttcgactactgcccctttctcattgccgagaagcttggaaagcctttcgttgctatactttccacttcgttcggttcccttgaattcgggctacccatccccttatcctatgtccccgttttccgaagcctcctcaccgaccacatggacttctggggacgcgtaaagaactttctcatgttcttcagtttttgccgtcgtcaacaacacatgcagtccaccttcgacaatactatcaaagaacacttcactgagggttcacgccccgtgctgagtcatcttctgctgaaagctgagctgtggtttatcaatagtgattttgcattcgattttgctcgcccgctcttgccaaataccgtgtacgtgggtggcctgatggagaaaccaattaaacccgtgcctcaggacttagagaactttatagcaaaattcggagattcaggattcgttctggttaccctgggatctatggtaaacacatgccagaaccccgagatatttaaagaaatgaacaacgcgttcgcccaccttcctcagggcgtgatctggaagtgtcagtgttcccactggccgaaggacgtgcacctggccgcaaatgtgaaaattgtggactggttgcctcagtcagacctgcttgcccatccatcgatccgcctctttgtgacccacgggggccagaatagtatcatggaggctatacagcatggagtgcctatggtcgggatccctctctttggcgaccagccggaaaacatggttagagtagaggccaaaaagtttggtgtgtcaattcagctgaaaaaactgaaagctgagaccttggccctgaaaatgaagcagataatggaggataagagatacaaatccgccgctgtggccgcaagcgttatcttgcgcagtcaccccctctcacccacgcagcgcctcgtgggctggattgaccatgtcctccaaaccgggggcgcaacccatcttaaaccctatgtctttcagcagccttggcacgagcagtacttactcgatgtctttgtgttcctgttggggttgacattgggaacactctggctttgcggtaagcttctcggcatggcggtctggtggctgcggggggcccggaaagtaaaggagacgtag

SEQ ID NO: 66007 - DNA, 666 bp, Artificial Sequence
  derived and/or modified sequence
atggtcaacacgtgtcagaacccagagatttttaaggaaatgaataacgccttcgcccacttaccccaaggcgttatctggaagtgccagtgttcacactggccaaaagacgtgcatctggccgctaatgtgaagattgtggactggctgcctcagagcgacttgctcgcacatccctcaattcgcctgttcgttacgcacggcggacagaatagcatcatggaagccattcaacatggagtgccaatggtaggtatacccctcttcggagaccaacccgagaatatggtcagagtggaggcgaaaaagtttggagtgtcaatacaattgaagaagctcaaagcagagacactggctctgaagatgaaacagatcatggaggacaagagatacaaatcagctgctgtagccgcctctgtaattctgaggagccacccactctctcccacacagagactggttggttggatagatcacgtactccagacgggaggcgccacccacttgaaaccttatgtctttcagcaaccttggcatgaacaatatttgctggatgtttttgtgtttctgctgggattaacattgggaaccctgtggctgtgtggaaaactcctcggcatggcagtgtggtggctccgcggagcacgtaaagtaaaagaaacgtag

SEQ ID NO: 66008 - DNA, 1470 bp, Artificial Sequence
  derived and/or modified sequence
atggcggggcagagggtcttgcttctggttgggtttctcctccctggcgtactacttagtgaagccgcaaagatcctgaccatttcgaccgttgattttaaaaaggaagaaaagtcatatcaggtgatttcctggttagcacctgaagaccaccagagggaattcaaaaagtctttcgattttttcctggaagagacactcggagggcgaggcaagttcgaaaacctcttaaacgtcctggagtatctggccttacagtgcagccactttttgaataggaaagatatcatggattcattgaagaacgaaaatttcgacatggtgattgttgagacatttgattactgcccttttctcatcgcagaaaaacttggcaagcccttcgtagccatcctttctacgagcttcggcagcttagagttcggtctgccgatcccattatcctatgttcccgtcttccgctcgctattaactgatcacatggatttttggggcagagttaagaactttctgatgtttttttccttttgcagacggcagcaacacatgcagtcaacattcgataatacaattaaagaacactttactgaggggtcccgacccgtgctttcccatcttctgctgaaagctgaactttggttcatcaattctgacttcgcttttgactttgcccggcccctgctcccaaacaccgtgtacgtgggcggcctgatggaaaaacctatcaaacctgtcccacaggacctggaaaactttatcgccaaattcggggactccggatttgtgctcgttactctcggatccatggttaatacctgccagaaccctgagatcttcaaagagatgaacaacgcgttcgcacatcttcctcaaggtgtcatatggaaatgccagtgtagtcattggcctaaggacgtacatctcgcagccaacgtcaagatagtggattggttgcctcagtctgacttgctagcccaccccagcataagactcttcgttacccatggaggtcaaaactctattatggaggccatccagcacggggtacccatggtcggaatccccctttttggggatcaaccagagaacatggttcgagtcgaagccaaaaagtttggagtatcaatccagctgaaaaagcttaaggctgaaacactggctctgaagatgaaacagataatggaagataagagatataaaagtgcagcagtagctgccagtgtcatcctcagatcacatccactctcacctactcagcgtctggttggctggattgaccatgtactccaaacagggggagccacccacctaaaaccatacgtttttcagcagccttggcatgagcagtacctgctggacgtatttgtgttcttacttgggcttactttgggaactctttggctgtgtggcaaattattaggcatggccgtctggtggcttaggggagcacgcaaggtgaaggaaacatag

SEQ ID NO: 66009 - DNA, 666 bp, Artificial Sequence
  derived and/or modified sequence
atggtgaatacatgccagaaccctgagattttcaaggaaatgaataatgccttcgcccaccttccgcagggagtcatatggaaatgtcagtgctctcactggcctaaagacgtccatttagccgctaacgtaaagatagttgactggctaccccaaagtgaccttctcgcccatcccagcattcgactcttcgtgacccacggcggacagaacagtatcatggaggctatccaacatggtgtgccaatggtcggaatcccacttttcggtgatcagcctgagaacatggtgagagtggaggcgaaaaagtttggagtgtcaatacaattgaagaagctcaaagcagagacactggctctgaagatgaaacagatcatggaggacaagagatacaaatcagctgctgtagccgcctctgtaattctgaggagccacccactctctcccacacagagactggttggttggatagatcacgtactccagacgggaggcgccacccacttgaaaccttatgtctttcagcaaccttggcatgaacaatatttgctggatgtttttgtgtttctgctgggattaacattgggaaccctgtggctgtgcgggaagttgctgggtatggcagtgtggtggttacgaggcgcaagaaaggttaaggaaacatag

SEQ ID NO: 66010 - DNA, 1924 bp, Artificial Sequence
  derived and/or modified sequence
agtgcctttggcgcactgaggtgcacagggtcccttagccgggcgcagggcgcgcagcccaggctgagatccgcggcttccgtagaagtgagcatggctgggcagcgagtgcttcttctagtgggcttccttctccctggggtcctgctctcagaggctgccaaaatcctgacaatatctacagtagattttaaaaaggaagaaaaatcatatcaagttatcagttggcttgcacctgaagatcatcaaagagaatttaaaaagagttttgatttctttctggaagaaactttaggtggcagaggaaaatttgaaaacttattaaatgttctagaatacttggcgttgcagtgcagtcattttttaaatagaaaggatatcatggattccttaaagaatgagaacttcgacatggtgatagttgaaacttttgactactgtcctttcctgattgctgagaagcttgggaagccatttgtggccattctttccacttcattcggctctttggaatttgggctaccaatccccttgtcttatgttccagtattccgttccttgctgactgatcacatggacttctggggccgagtgaagaattttctgatgttctttagtttctgcaggaggcaacagcacatgcagtctacatttgacaacaccatcaaggaacatttcacagaaggctctaggccagttttgtctcatcttctactgaaagcagagttgtggttcattaactctgactttgcctttgattttgctcgacctctgcttcccaacactgtttatgttggaggcttgatggaaaaacctattaaaccagtaccacaagacttggagaacttcattgccaagtttggggactctggttttgtccttgtgaccttgggctccatggtgaacacctgtcagaatccggaaatcttcaaggagatgaacaatgcctttgctcacctaccccaaggggtgatatggaagtgtcagtgttctcattggcccaaagatgtccacctggctgcaaatgtgaaaattgtggactggcttcctcagagtgacctcctggctcacccaagcatccgtctgtttgtcacccacggcgggcagaatagcataatggaggccatccagcatggtgtgcccatggtggggatccctctctttggagaccagcctgaaaacatggtccgagtagaagccaaaaagtttggtgtttctattcagttaaagaagctcaaggcagagacattggctcttaagatgaaacaaatcatggaagacaagagatacaagtccgcggcagtggctgccagtgtcatcctgcgctcccacccgctcagccccacacagcggctggtgggctggattgaccacgtcctccagacagggggcgcgacgcacctcaagccctatgtctttcagcagccctggcatgagcagtacctgctcgacgtttttgtgtttctgctggggctcactctggggactctatggctttgtgggaagctgctgggcatggctgtctggtggctgcgtggggccagaaaggtgaaggagacataaggccaggtgcagccttggcggggtctgtttggtgggcgatgtcaccatttctagggagcttcccactagttctggcagccccattctctagtccttctagttatctcctgttttcttgaagaacaggaaaaatggccaaaaatcatcctttccacttgctaattttgctacaaattcatccttactagctcctgcctgctagcagaattctttccagtcctcttgtcctcctttgtttgccatcagcaagggctatgctgtgattctgtctctgagtgacttggaccactgaccctcagatttccagccttaaaatccaccttccttctcatgcgcctctccgaatcacaccctgactctt

SEQ ID NO: 66011 - DNA, 1476 bp, Artificial Sequence
  derived and/or modified sequence
agtgcctttggcgcactgaggtgcacagggtcccttagccgggcgcagggcgcgcagcccaggctgagatccgcggcttccgtagaagtgagcatggctgggcagcgagtgcttcttctagtgggcttccttctccctggggtcctgctctcagaggctgccaaaatcctgacaatatctacagtaggtggaagccattatctactgatggaccgggtttctcagattcttcaagatcacggtcataatgtcaccatgcttaaccacaaaagaggtccttttatgccagattttaaaaaggaagaaaaatcatatcaagttatcagttggcttgcacctgaagatcatcaaagagaatttaaaaagagttttgatttctttctggaagaaactttaggtggcaggacttggagaacttcattgccaagtttggggactctggttttgtccttgtgaccttgggctccatggtgaacacctgtcagaatccggaaatcttcaaggagatgaacaatgcctttgctcacctaccccaaggggtgatatggaagtgtcagtgttctcattggcccaaagatgtccacctggctgcaaatgtgaaaattgtggactggcttcctcagagtgacctcctggctcacccaagcatccgtctgtttgtcacccacggcgggcagaatagcataatggaggccatccagcatggtgtgcccatggtggggatccctctctttggagaccagcctgaaaacatggtccgagtagaagccaaaaagtttggtgtttctattcagttaaagaagctcaaggcagagacattggctcttaagatgaaacaaatcatggaagacaagagatacaagtccgcggcagtggctgccagtgtcatcctgcgctcccacccgctcagccccacacagcggctggtgggctggattgaccacgtcctccagacagggggcgcgacgcacctcaagccctatgtctttcagcagccctggcatgagcagtacctgctcgacgtttttgtgtttctgctggggctcactctggggactctatggctttgtgggaagctgctgggcatggctgtctggtggctgcgtggggccagaaaggtgaaggagacataaggccaggtgcagccttggcggggtctgtttggtgggcgatgtcaccatttctagggagcttcccactagttctggcagccccattctctagtccttctagttatctcctgttttcttgaagaacaggaaaaatggccaaaaatcatcctttccacttgctaattttgctacaaattcatccttactagctcctgcctgctagcagaattctttccagtcctcttgtcctcctttgtttgccatcagcaagggctatgctgtgattctgtctctgagtgacttggaccactgaccctcagatttccagccttaaaatccaccttccttctcatgcgcctctccg

SEQ ID NO: 66012 - RNA, 1470 nt, Artificial Sequence
  derived and/or modified sequence
auggcaggucaaaggguccuguuacuggucggcuuccugcugccugguguccuuuuaagcgaggcagccaaaauacugacaauuucuaccgucgacuucaaaaaagaagagaaaagcuaccaggugaucaguuggcucgcuccagaagaccaucagcgagaauucaagaaaagcuucgacuucuuucucgaggagacacucggcgggcggggaaaguuugagaauuugcugaaugugcuggaguacuuagcccugcaguguucucacuuccucaauagaaaagauaucauggauagccuuaagaacgagaacuuugauaugguuaucguggagaccuucgacuacugccccuuucucauugccgagaagcuuggaaagccuuucguugcuauacuuuccacuucguucgguucccuugaauucgggcuacccauccccuuauccuauguccccguuuuccgaagccuccucaccgaccacauggacuucuggggacgcguaaagaacuuucucauguucuucaguuuuugccgucgucaacaacacaugcaguccaccuucgacaauacuaucaaagaacacuucacugaggguucacgccccgugcugagucaucuucugcugaaagcugagcugugguuuaucaauagugauuuugcauucgauuuugcucgcccgcucuugccaaauaccguguacguggguggccugauggagaaaccaauuaaacccgugccucaggacuuagagaacuuuauagcaaaauucggagauucaggauucguucugguuacccugggaucuaugguaaacacaugccagaaccccgagauauuuaaagaaaugaacaacgcguucgcccaccuuccucagggcgugaucuggaagugucaguguucccacuggccgaaggacgugcaccuggccgcaaaugugaaaauuguggacugguugccucagucagaccugcuugcccauccaucgauccgccucuuugugacccacgggggccagaauaguaucauggaggcuauacagcauggagugccuauggucgggaucccucucuuuggcgaccagccggaaaacaugguuagaguagaggccaaaaaguuuggugugucaauucagcugaaaaaacugaaagcugagaccuuggcccugaaaaugaagcagauaauggaggauaagagauacaaauccgccgcuguggccgcaagcguuaucuugcgcagucacccccucucacccacgcagcgccucgugggcuggauugaccauguccuccaaaccgggggcgcaacccaucuuaaacccuaugucuuucagcagccuuggcacgagcaguacuuacucgaugucuuuguguuccuguugggguugacauugggaacacucuggcuuugcgguaagcuucucggcauggcggucugguggcugcggggggcccggaaaguaaaggagacguag

SEQ ID NO: 66013 - RNA, 666 nt, Artificial Sequence
  derived and/or modified sequence
auggucaacacgugucagaacccagagauuuuuaaggaaaugaauaacgccuucgcccacuuaccccaaggcguuaucuggaagugccaguguucacacuggccaaaagacgugcaucuggccgcuaaugugaagauuguggacuggcugccucagagcgacuugcucgcacaucccucaauucgccuguucguuacgcacggcggacagaauagcaucauggaagccauucaacauggagugccaaugguagguauaccccucuucggagaccaacccgagaauauggucagaguggaggcgaaaaaguuuggagugucaauacaauugaagaagcucaaagcagagacacuggcucugaagaugaaacagaucauggaggacaagagauacaaaucagcugcuguagccgccucuguaauucugaggagccacccacucucucccacacagagacugguugguuggauagaucacguacuccagacgggaggcgccacccacuugaaaccuuaugucuuucagcaaccuuggcaugaacaauauuugcuggauguuuuuguguuucugcugggauuaacauugggaacccuguggcuguguggaaaacuccucggcauggcagugugguggcuccgcggagcacguaaaguaaaagaaacguag

SEQ ID NO: 66014 - RNA, 1470 nt, Artificial Sequence
  derived and/or modified sequence
auggcggggcagagggucuugcuucugguuggguuucuccucccuggcguacuacuuagugaagccgcaaagauccugaccauuucgaccguugauuuuaaaaaggaagaaaagucauaucaggugauuuccugguuagcaccugaagaccaccagagggaauucaaaaagucuuucgauuuuuuccuggaagagacacucggagggcgaggcaaguucgaaaaccucuuaaacguccuggaguaucuggccuuacagugcagccacuuuuugaauaggaaagauaucauggauucauugaagaacgaaaauuucgacauggugauuguugagacauuugauuacugcccuuuucucaucgcagaaaaacuuggcaagcccuucguagccauccuuucuacgagcuucggcagcuuagaguucggucugccgaucccauuauccuauguucccgucuuccgcucgcuauuaacugaucacauggauuuuuggggcagaguuaagaacuuucugauguuuuuuuccuuuugcagacggcagcaacacaugcagucaacauucgauaauacaauuaaagaacacuuuacugaggggucccgacccgugcuuucccaucuucugcugaaagcugaacuuugguucaucaauucugacuucgcuuuugacuuugcccggccccugcucccaaacaccguguacgugggcggccugauggaaaaaccuaucaaaccugucccacaggaccuggaaaacuuuaucgccaaauucggggacuccggauuugugcucguuacucucggauccaugguuaauaccugccagaacccugagaucuucaaagagaugaacaacgcguucgcacaucuuccucaaggugucauauggaaaugccaguguagucauuggccuaaggacguacaucucgcagccaacgucaagauaguggauugguugccucagucugacuugcuagcccaccccagcauaagacucuucguuacccauggaggucaaaacucuauuauggaggccauccagcacgggguacccauggucggaaucccccuuuuuggggaucaaccagagaacaugguucgagucgaagccaaaaaguuuggaguaucaauccagcugaaaaagcuuaaggcugaaacacuggcucugaagaugaaacagauaauggaagauaagagauauaaaagugcagcaguagcugccagugucauccucagaucacauccacucucaccuacucagcgucugguuggcuggauugaccauguacuccaaacagggggagccacccaccuaaaaccauacguuuuucagcagccuuggcaugagcaguaccugcuggacguauuuguguucuuacuugggcuuacuuugggaacucuuuggcuguguggcaaauuauuaggcauggccgucugguggcuuaggggagcacgcaaggugaaggaaacauag

SEQ ID NO: 66015 - RNA, 666 nt, Artificial Sequence
  derived and/or modified sequence
auggugaauacaugccagaacccugagauuuucaaggaaaugaauaaugccuucgcccaccuuccgcagggagucauauggaaaugucagugcucucacuggccuaaagacguccauuuagccgcuaacguaaagauaguugacuggcuaccccaaagugaccuucucgcccaucccagcauucgacucuucgugacccacggcggacagaacaguaucauggaggcuauccaacauggugugccaauggucggaaucccacuuuucggugaucagccugagaacauggugagaguggaggcgaaaaaguuuggagugucaauacaauugaagaagcucaaagcagagacacuggcucugaagaugaaacagaucauggaggacaagagauacaaaucagcugcuguagccgccucuguaauucugaggagccacccacucucucccacacagagacugguugguuggauagaucacguacuccagacgggaggcgccacccacuugaaaccuuaugucuuucagcaaccuuggcaugaacaauauuugcuggauguuuuuguguuucugcugggauuaacauugggaacccuguggcugugcgggaaguugcuggguauggcaguguggugguuacgaggcgcaagaaagguuaaggaaacauag

SEQ ID NO: 66016 - protein, 239 aa, Artificial Sequence
  derived and/or modified sequence
MARGCLCCLKYMMFLFNLIFWLCGCGLLGVGIWLSVSQGNFATFSPSFPSLSAANLVIAIGTIVMVTGFLGCLGAIKENKCLLLSFFIVLLVILLAELILLILFFVYMDKVNENAKKDLKEGLLLYHTENNVGLKNAWNIIQAEMRCCGVTDYTDWYPVLGENTVPDRCCMENSQGCGRNATTPLWRTGCYEKVKMWFDDNKHVLGTVGMCILIMQILGMAFSMTLFQHIHRTGKKYDA

SEQ ID NO: 66017 - DNA, 720 bp, Artificial Sequence
  derived and/or modified sequence
atggccagaggctgcctgtgctgcctgaagtacatgatgttcctgttcaacctgatcttctggctgtgcggctgcggcctgctgggcgtgggcatctggctgagcgtgagccagggcaacttcgccaccttcagccccagcttccccagcctgagcgccgccaacctggtgatcgccatcggcaccatcgtgatggtgaccggcttcctgggctgcctgggcgccatcaaggagaacaagtgcctgctgctgagcttcttcatcgtgctgctggtgatcctgctggccgagctgatcctgctgatcctgttcttcgtgtacatggacaaggtgaacgagaacgccaagaaggacctgaaggagggcctgctgctgtaccacaccgagaacaacgtgggcctgaagaacgcctggaacatcatccaggccgagatgagatgctgcggcgtgaccgactacaccgactggtaccccgtgctgggcgagaacaccgtgcccgacagatgctgcatggagaacagccagggctgcggcagaaacgccaccacccccctgtggagaaccggctgctacgagaaggtgaagatgtggttcgacgacaacaagcacgtgctgggcaccgtgggcatgtgcatcctgatcatgcagatcctgggcatggccttcagcatgaccctgttccagcacatccacagaaccggcaagaagtacgacgcctag

SEQ ID NO: 66018 - DNA, 720 bp, Artificial Sequence
  derived and/or modified sequence
atggcacggggttgtctttgttgtctaaagtacatgatgttcctgttcaacctaatcttctggctttgcggttgtgggcttctaggggttgggatttggctgtccgtgtctcaggggaactttgccaccttttccccctcatttccctccctgtccgctgccaacctggtcatagctatcggaactatcgtcatggtgactgggttcttgggctgcttaggcgccattaaagagaataaatgtctgctcctcagcttctttattgtgctgctggtcatcctgctggccgagctgatacttctgatcctgttttttgtttacatggataaagtcaatgagaacgccaaaaaggatctgaaggaagggttattgctctatcatactgaaaacaatgtcgggctaaagaacgcatggaacattattcaggcagagatgagatgttgtggcgtcaccgactacaccgactggtaccccgtgcttggcgagaacactgtgcctgatagatgttgtatggagaacagtcaaggctgcggccgcaacgccacaaccccactgtggcgcactggctgctacgaaaaagtgaagatgtggttcgatgacaacaagcacgtgcttggaacggtcggtatgtgcatcttgatcatgcagatattgggcatggcatttagtatgactctgtttcagcacatccaccggaccggcaagaagtacgatgcgtag

SEQ ID NO: 66019 - DNA, 720 bp, Artificial Sequence
  derived and/or modified sequence
atggctcgcggctgtttgtgctgtctcaagtacatgatgttcttgttcaacctaattttctggctgtgtggctgtggactcctcggggtcgggatctggctctcggtttctcaagggaactttgcaacgttttctccatcttttcctagcttgtctgccgctaacttggtgattgctatcgggaccatcgtgatggttacagggtttctgggctgtctgggggctattaaagaaaataaatgtctgctgttatccttctttatagtactgcttgtcatcctgctggccgaactcattctccttatcctgttctttgtctacatggataaggttaatgagaatgccaagaaagacctcaaggaaggtcttcttctgtatcacactgagaacaatgtgggcttaaaaaatgcctggaatatcatccaggctgagatgcggtgctgcggagtcaccgactacacggactggtaccccgtgctgggtgagaacactgtgccagacagatgttgtatggagaacagccagggctgcggcagaaacgcgacaacccctctttggcgcacgggctgctacgaaaaagtcaaaatgtggtttgacgataacaaacacgtgttaggaactgtagggatgtgcattctgatcatgcagatcttgggtatggctttcagtatgacactcttccagcacattcaccgcaccgggaaaaaatacgacgcctag

SEQ ID NO: 66020 - DNA, 720 bp, Artificial Sequence
  derived and/or modified sequence
atggcccggggctgcctgtgctgcctgaagtacatgatgttcctgttcaacctgatcttctggctgtgtggctgcggcctgctgggcgtgggcatctggctgtctgtgtcccagggcaactttgccaccttcagccccagcttccccagcctgtctgctgccaacctggtgattgccatcggcaccatcgtgatggtgacaggcttcctgggctgcctgggcgccatcaaggagaacaagtgcctgctgctgtccttcttcatcgtgctgctggtgatcctgctggccgagctgatcctgctgatcctcttctttgtgtacatggacaaggtgaatgaaaatgccaagaaggacctgaaggagggcctgctgctgtaccacacagaaaataatgtgggcctgaagaatgcctggaacatcatccaggccgagatgcgctgctgcggcgtgacagactacacagactggtaccctgtgctgggggagaacacagtgcctgaccgctgctgcatggagaacagccagggctgcggcagaaatgccaccacccccctgtggaggacaggctgctatgagaaggtgaagatgtggtttgatgacaacaagcacgtgctgggcaccgtgggcatgtgcatcctgatcatgcagatcctgggcatggccttctccatgaccctcttccagcacatccacaggacaggcaagaagtatgatgcctag

SEQ ID NO: 66021 - DNA, 720 bp, Artificial Sequence
  derived and/or modified sequence
atggcccggggctgcctgtgctgcctgaagtacatgatgttcctgttcaacctgattttctggctgtgcggttgtggtctgctcggtgttggtatatggctcagtgtctcccaaggaaactttgcaaccttcagtcctagtttcccatcattgagtgcggccaacctcgtcattgccattggcaccattgttatggtcactgggtttctggggtgtctcggggccatcaaggaaaataagtgcttgctgctgtcttttttcatagtgctgctggtcattctgctggccgagctgatcctgttgatcctgttttttgtctacatggacaaagtgaacgagaatgccaagaaggacctgaaggagggcttactgctgtatcacacggagaacaatgtcgggttaaaaaacgcatggaatatcatacaagccgagatgagatgctgtggcgtgaccgactacacagactggtacccagtcctaggagaaaacaccgtaccagatcgatgctgcatggaaaattcccagggatgcgggaggaacgccacaactcccctgtggagaactggatgttacgagaaagtgaagatgtggtttgatgataacaagcacgtactaggaaccgtaggcatgtgtatccttatcatgcagatactggggatggccttctctatgaccctgttccagcatatccaccgtacaggtaaaaagtacgacgcatag

SEQ ID NO: 66022 - DNA, 720 bp, Artificial Sequence
  derived and/or modified sequence
atggcccggggctgcctgtgctgcctgaagtacatgatgttcctgtttaatctcatattttggttatgtggctgcggacttctgggggtaggaatttggttatccgtatctcagggcaactttgctacattcagcccaagctttccatccctctccgcagccaacttggtgatcgccatcgggaccatagtgatggtcactggattcttgggctgtttaggtgcgattaaggaaaacaaatgcttacttctcagtttcttcatagtgttgctggtgatcttactggccgagttgatattgttgatccttttctttgtgtatatggacaaggtgaacgaaaatgcaaaaaaagatctgaaggagggactgctgctgtatcacacagagaataacgtcggcctaaaaaacgcttggaatattatacaggccgagatgcgttgctgcggcgtgacggactatacagactggtacccagtcttgggggaaaatacagtgcctgacagatgttgcatggaaaactcccagggatgcggacggaacgcgacaaccccgctttggaggaccggatgctatgagaaggtaaaaatgtggtttgatgataataagcacgtgctgggcacagttggaatgtgtattttgatcatgcagatattgggaatggcgttctctatgactctgttccagcacatccacagaactggaaagaagtacgacgcgtag

SEQ ID NO: 66023 - DNA, 720 bp, Artificial Sequence
  derived and/or modified sequence
atggccaggggatgtctctgttgcctcaaatacatgatgttcctgttcaaccttatcttctggctttgtggatgcggcctgctcggagtgggaatttggctcagcgtgtcccaaggcaacttcgcaacattctccccatcgtttcccagcctcagcgctgccaacttagttatcgcaatcggcaccatcgttatggttacagggttcctgggatgcctgggtgcaattaaggagaacaagtgcttacttttatcattctttattgtccttctggtaatcctactcgcagaactgattttgctgatcctgttcttcgtatatatggacaaagtcaatgagaatgccaagaaagacctgaaagagggactgcttctgtatcataccgaaaacaatgtggggttaaagaacgcgtggaacattatccaggcggagatgcgttgctgcggggtgaccgattatacggattggtatcctgtgctcggggagaataccgtgcccgacagatgctgtatggaaaattctcagggttgcggcaggaatgcgacaacccctctctggagaaccgggtgctatgaaaaggtgaagatgtggtttgatgacaacaaacatgtgctgggcaccgtgggcatgtgcattcttattatgcagatcctgggcatggccttcagtatgacactctttcagcatatacatagaaccggcaaaaaatacgacgcgtag

SEQ ID NO: 66024 - DNA, 720 bp, Artificial Sequence
  derived and/or modified sequence
atggctagaggttgcttgtgttgcttaaaatatatgatgtttttatttaatcttattttttggctctgcggctgcggactcctaggagtcggcatatggctctcggtttcacaagggaatttcgccaccttctcgcccagttttccaagtctgagcgctgctaacctggtgatcgccatcggtacaattgtaatggtaaccgggtttctggggtgtcttggcgctatcaaggaaaacaagtgtctgctgttgtctttctttatagttttacttgtgatcctgctagctgaattaattttactgatacttttcttcgtctacatggacaaggtaaatgagaacgccaaaaaagatctcaaagagggcctcctgctctaccataccgagaacaatgtggggctcaaaaacgcctggaacatcattcaggcagaaatgaggtgttgcggagtgaccgattacactgactggtaccctgtcctgggcgaaaatacagtgccagatagatgctgcatggagaactcccaggggtgcggcaggaacgccacaactcctctgtggaggacaggttgctatgagaaagtaaaaatgtggtttgatgacaataagcacgtgcttgggactgttggcatgtgcatcttgataatgcagatattaggtatggcattctctatgacactatttcagcacattcaccggacaggaaagaaatatgatgcctag

SEQ ID NO: 66025 - DNA, 720 bp, Artificial Sequence
  derived and/or modified sequence
atggcaaggggttgcttgtgttgcttaaaatatatgatgttcctctttaatctaattttctggttatgcgggtgcggacttctgggggtgggaatttggctgtccgttagccaagggaattttgcaacattcagtccatctttcccttcactgtctgctgctaatctagttatcgccatcgggaccatcgttatggtgacagggttcctcggatgcctgggcgccatcaaggaaaacaagtgccttctgctgagcttcttcatcgtactgcttgtcattctcttagccgaactcattcttctgattcttttttttgtgtacatggacaaagttaatgagaatgcaaagaaagacctgaaagagggactgctgctctaccataccgagaataacgtggggttaaagaatgcctggaacatcatccaggccgagatgcgatgttgcggagtgaccgattatacagactggtatccggttctgggagagaacactgtgccagacagatgttgtatggagaactcccagggatgtggacggaacgccaccacaccactttggcggacaggatgttacgagaaagttaagatgtggttcgacgacaacaagcacgtgttaggtacggtcgggatgtgtatactgatcatgcagatccttggaatggccttttctatgactttgtttcaacacattcatcgaacaggaaagaaatacgacgcttag

SEQ ID NO: 66026 - DNA, 720 bp, Artificial Sequence
  derived and/or modified sequence
atggctaggggatgcctgtgctgcctaaagtacatgatgttcctattcaacctcattttctggctctgcggatgtggtttactgggcgtgggcatctggctatcagtgtctcaagggaactttgccactttctctccatcatttccatcattaagcgctgcaaacttagtcattgccataggaactatcgtcatggtgactggatttctgggctgtctcggtgctattaaggagaataaatgtcttcttctttcattcttcattgttctgttggtgatcctgctcgcagagttaatcttattgattcttttcttcgtgtacatggataaagtcaatgaaaatgctaaaaaggatcttaaagagggcctgctcctgtatcacactgaaaataatgtagggttgaaaaatgcatggaatattattcaggccgagatgcgctgttgtggggtgacagattatacagactggtatccagttttgggagagaataccgtgcccgatagatgctgtatggaaaactcgcagggatgcgggaggaacgctaccactcctctttggagaacaggctgttacgagaaagtaaaaatgtggtttgacgacaataaacatgttcttgggaccgttggaatgtgtatcctcattatgcaaatcctcggcatggccttctctatgactctgttccaacacatccatcgcactggcaaaaaatacgatgcttag

SEQ ID NO: 66027 - DNA, 4323 bp, Artificial Sequence
  derived and/or modified sequence
ctgtttccgctggcggcggcggcggcggcggtgccggagcgcgagcagagcggagacccccaggtcctgcgggcgcggaatatcctggaaccttcttttgtttgtcagcagccaaggtgtttccaggaagttcagagagaacagaatttaagaagtgcaacatggccaggggctgcctctgctgcttgaagtacatgatgttcctcttcaatttgatattctggctctgtggctgtgggctgctgggagtgggcatctggctctccgtgtcccaaggcaactttgccaccttctcccccagcttcccttcgttgtctgcagccaacctggtcattgccataggcaccattgtcatggtgacgggcttcctcggctgcctgggggccatcaaggaaaacaagtgcctcctcctcagctttttcatcgtcctgttggtcatcctcctagcagagctgatcttactcatcctcttctttgtctacatggacaaggtgaacgagaacgccaagaaggacctgaaggaaggcctgctgctgtaccacaccgagaacaacgtggggctgaagaacgcctggaacatcatccaggctgagatgcgatgctgtggtgtcactgactacacagactggtacccagtgctgggggagaacacggttcccgaccgctgctgcatggagaactcccagggctgcgggcgcaacgccaccacgcctttgtggagaacgggctgctatgaaaaggtgaagatgtggttcgatgacaataagcacgtgctgggcacggtggggatgtgcatcctcatcatgcagatcctgggcatggccttctccatgaccctcttccagcacatccaccggactggtaagaagtacgacgcatgagcgggctggccgggagtgcccaccccgccctgctgccctgtggagggaagaggattgagctttgtgtcacctgcctgcgctctccagatatgacccctgcacccaccccccacagcctgccctaccccacctaccctgcctcagcctcggacttctcagtgggtggagtgccagggaggaggaggcacacggagacctggggctcggggcccctggattcctgcatctgcatatgcgtatttgccaaagacgacagggtgggctggggtgcgctccggaggaacccccggcactgatgggcttctgcccctgcccttcctcacactgacactttgtccccacatggggtggggagcagagtgcccgccccgtggagataccgccccagcgggggctgcgacatccatggccaccatggggcacctggcggggcgggggtctgccggcctctgggcaaggcccctggagcatctcgcccaggctttttataccttacaatgtaacttttttattttattttactctatgattattcaggaatattatctctcagataagtttagggttagatttctgatttgtaactttttactgtgttgatttctttaatggtttgactttttttccctgagggtgagggatgggtgggaagagaggacatctgtccagtctcaatcaggacagaccaccgtgcgacacccaggaggctctcggatggggcgcgcctgcgccctcagaacgtgtgggaaggagggggcgtggacaggacacgggaccttgccaggcctggtgtctgaggacaggagcctgggagaggcgggtggagcgtgaagcaggctggaggtgcccctgcacgggaggtggcgtttgctaaccaatcgagctggaaatgccagggcaggggggccccacggtgctgtggcagagctagaggggtccttagacttttcactgatgagcagttgttggttttttctttctcccttcctcccgctctctgctggcacgcgaggcttccccttccaccccatgtgggtattcccacaacaggttctgcacaccccagttatttcacagacattcctgctagaaactgtcagacaaatacctctctagttcggatgctgctcactttcccccttgcttctggaaggggaagcagtccttaggttttgctgtgctgggacagtggcaggggacccacaggggtgaggacccacggtcctccccgccagccttgctcagctgtgggttgccctgctgggaaggagggaatcacgtccacctgggtcccaagatcttcgcctccttccctggggccacggacatcagcagtgggttgggtggcgattatatcatctgtgatcccaaggagaagaaatacagaaaacccaagagaggtcagactggctcttgttaccggagccacgggaagaaagcagccggagtcacgcacgtgcagagctgggcatgggagagaaacgggctggggagtgaggccaggagtgggattcagctgcagcagggcgccccctccaaactgcagctggtctggcttactgttttgccgttcaaaaaggtcgcgaatccgtgggactgagcacggggacctcacccgctagccagcgtctgctgcacttgatcaggtggggccttggtgggcggctgcctttcctatacagtttgtcttgtcaccctggtttcccactggggccaggtctcttctccagcctccacctgcctgtctgatccaagagctgagacacggccacccagcaccagtcactcctctgttcaccttaagtaacacacaaatcgggaacaggaggacagaaccgttggcattatcaggattcgtgttttgtgggggtgggagtggagagtagggtggtcttgtgagttgtgcagggtgaagaccgcttccctgagacaggggcagtggtgctgatggaatgtgggggaggcccacatttgagcaaagctgccctgcccttgtcccctggcctggcttcctggtaaggagtttcagccgcctccgcaggaacccccaaagtgcagattccggagcagacacatccgggcggagagactcagcagacaagtgctgcagttgcacggtgggacccggggcctcgtgcgttttttgctgtgggtggggtgggtgggttggtttatgcctatcaatgcaatttttaatttttgttaatatcaacagcaaaagcctagtgcattgggagatgtgcaacctccctgaaaatcttttctgtttctggagtacttcaggggtggcctctggccccagagcctttgccacagtgctcccaccagcccccacctcatccgtctgtttgcagagcctcatctacaggtccccacgctgccttctttactcactctgcgcttggccgttttgttatttggcttagtctacattgggcggaagtctgtgtgcacagagtgggtgttccttcgagccccttccactcagagggccacacccagcgatgccagtgaaggtggcacagcctctcttcagtttctcctgactgtgatctcactggggtagaattcccctgagagaattccctcactcacggctccctttgccagagtcagttcaatcaggtctgatgtgagcaatttacacacttgtctcagaaagtccctcagggtttgtagaggactgcaggggggcatccgctgcagactcagcctttctctgcagccatcctgcagtgggggtgagcgggcacaggctgagaactgctcttgggtggtggaagcaggtgtcacggtgcaagtctccccctgcacccctcccccagcttgagccgtgtcacccccctctccctccagcatgggcctgtgtctcaggctctctggaaggtggccctgccccggaccctcttgcaggtgtcctggtttgacttggaactagatggccatctttccaggctttggtggcccaagagcagtctgggtggatggaagtggctgtcccctcctctccagcccctgcccacccactggtggaggtgctaactagcagggacgtggcataggatgggagctgggcgtgaggtgcttggggtccattctttgtccctcagcttctcagagtccggccagcccttgtgttcccgtgccccacactttcctcctccccactgcagtgagtcaatagtccagggtggggcctggcctccctgccctgattggggactcaggaggtgaggcctggggggcttcctgccccctccttgcccacctgcctgcccccgggcagcacgggagggagagcagggtgagcacgcttgttggtttcagatgcactttctgcttgcattgccgtatctgtgcgttccttcatcctggtcctggctttatggaacaccatgtttttagcatgtttttaaataaaaacggataaagtgtcaaaagc

SEQ ID NO: 66028 - DNA, 4284 bp, Artificial Sequence
  derived and/or modified sequence
attcccgggcaggccccgccccctgtttccgctggcggcggcggcggcggcggtgccggagcgcgagcagagcggagacccccaggtcctgcgggcgcgaatttaagaagtgcaacatggccaggggctgcctctgctgcttgaagtacatgatgttcctcttcaatttgatattctggctctgtggctgtgggctgctgggagtgggcatctggctctccgtgtcccaaggcaactttgccaccttctcccccagcttcccttcgttgtctgcagccaacctggtcattgccataggcaccattgtcatggtgacgggcttcctcggctgcctgggggccatcaaggaaaacaagtgcctcctcctcagctttttcatcgtcctgttggtcatcctcctagcagagctgatcttactcatcctcttctttgtctacatggacaaggtgaacgagaacgccaagaaggacctgaaggaaggcctgctgctgtaccacaccgagaacaacgtggggctgaagaacgcctggaacatcatccaggctgagatgcgatgctgtggtgtcactgactacacagactggtacccagtgctgggggagaacacggttcccgaccgctgctgcatggagaactcccagggctgcgggcgcaacgccaccacgcctttgtggagaacgggctgctatgaaaaggtgaagatgtggttcgatgacaataagcacgtgctgggcacggtggggatgtgcatcctcatcatgcagatcctgggcatggccttctccatgaccctcttccagcacatccaccggactggtaagaagtacgacgcatgagcgggctggccgggagtgcccaccccgccctgctgccctgtggagggaagaggattgagctttgtgtcacctgcctgcgctctccagatatgacccctgcacccaccccccacagcctgccctaccccacctaccctgcctcagcctcggacttctcagtgggtggagtgccagggaggaggaggcacacggagacctggggctcggggcccctggattcctgcatctgcatatgcgtatttgccaaagacgacagggtgggctggggtgcgctccggaggaacccccggcactgatgggcttctgcccctgcccttcctcacactgacactttgtccccacatggggtggggagcagagtgcccgccccgtggagataccgccccagcgggggctgcgacatccatggccaccatggggcacctggcggggcgggggtctgccggcctctgggcaaggcccctggagcatctcgcccaggctttttataccttacaatgtaacttttttattttattttactctatgattattcaggaatattatctctcagataagtttagggttagatttctgatttgtaactttttactgtgttgatttctttaatggtttgactttttttccctgagggtgagggatgggtgggaagagaggacatctgtccagtctcaatcaggacagaccaccgtgcgacacccaggaggctctcggatggggcgcgcctgcgccctcagaacgtgtgggaaggagggggcgtggacaggacacgggaccttgccaggcctggtgtctgaggacaggagcctgggagaggcgggtggagcgtgaagcaggctggaggtgcccctgcacgggaggtggcgtttgctaaccaatcgagctggaaatgccagggcaggggggccccacggtgctgtggcagagctagaggggtccttagacttttcactgatgagcagttgttggttttttctttctcccttcctcccgctctctgctggcacgcgaggcttccccttccaccccatgtgggtattcccacaacaggttctgcacaccccagttatttcacagacattcctgctagaaactgtcagacaaatacctctctagttcggatgctgctcactttcccccttgcttctggaaggggaagcagtccttaggttttgctgtgctgggacagtggcaggggacccacaggggtgaggacccacggtcctccccgccagccttgctcagctgtgggttgccctgctgggaaggagggaatcacgtccacctgggtcccaagatcttcgcctccttccctggggccacggacatcagcagtgggttgggtggcgattatatcatctgtgatcccaaggagaagaaatacagaaaacccaagagaggtcagactggctcttgttaccggagccacgggaagaaagcagccggagtcacgcacgtgcagagctgggcatgggagagaaacgggctggggagtgaggccaggagtgggattcagctgcagcagggcgccccctccaaactgcagctggtctggcttactgttttgccgttcaaaaaggtcgcgaatccgtgggactgagcacggggacctcacccgctagccagcgtctgctgcacttgatcaggtggggccttggtgggcggctgcctttcctatacagtttgtcttgtcaccctggtttcccactggggccaggtctcttctccagcctccacctgcctgtctgatccaagagctgagacacggccacccagcaccagtcactcctctgttcaccttaagtaacacacaaatcgggaacaggaggacagaaccgttggcattatcaggattcgtgttttgtgggggtgggagtggagagtagggtggtcttgtgagttgtgcagggtgaagaccgcttccctgagacaggggcagtggtgctgatggaatgtgggggaggcccacatttgagcaaagctgccctgcccttgtcccctggcctggcttcctggtaaggagtttcagccgcctccgcaggaacccccaaagtgcagattccggagcagacacatccgggcggagagactcagcagacaagtgctgcagttgcacggtgggacccggggcctcgtgcgttttttgctgtgggtggggtgggtgggttggtttatgcctatcaatgcaatttttaatttttgttaatatcaacagcaaaagcctagtgcattgggagatgtgcaacctccctgaaaatcttttctgtttctggagtacttcaggggtggcctctggccccagagcctttgccacagtgctcccaccagcccccacctcatccgtctgtttgcagagcctcatctacaggtccccacgctgccttctttactcactctgcgcttggccgttttgttatttggcttagtctacattgggcggaagtctgtgtgcacagagtgggtgttccttcgagccccttccactcagagggccacacccagcgatgccagtgaaggtggcacagcctctcttcagtttctcctgactgtgatctcactggggtagaattcccctgagagaattccctcactcacggctccctttgccagagtcagttcaatcaggtctgatgtgagcaatttacacacttgtctcagaaagtccctcagggtttgtagaggactgcaggggggcatccgctgcagactcagcctttctctgcagccatcctgcagtgggggtgagcgggcacaggctgagaactgctcttgggtggtggaagcaggtgtcacggtgcaagtctccccctgcacccctcccccagcttgagccgtgtcacccccctctccctccagcatgggcctgtgtctcaggctctctggaaggtggccctgccccggaccctcttgcaggtgtcctggtttgacttggaactagatggccatctttccaggctttggtggcccaagagcagtctgggtggatggaagtggctgtcccctcctctccagcccctgcccacccactggtggaggtgctaactagcagggacgtggcataggatgggagctgggcgtgaggtgcttggggtccattctttgtccctcagcttctcagagtccggccagcccttgtgttcccgtgccccacactttcctcctccccactgcagtgagtcaatagtccagggtggggcctggcctccctgccctgattggggactcaggaggtgaggcctggggggcttcctgccccctccttgcccacctgcctgcccccgggcagcacgggagggagagcagggtgagcacgcttgttggtttcagatgcactttctgcttgcattgccgtatctgtgcgttccttcatcctggtcctggctttatggaacaccatgtttttagcatgtttttaaataaaaacggataaagtgtcaaaagcacagca

SEQ ID NO: 66029 - protein, 187 aa, Artificial Sequence
  derived and/or modified sequence
MGAAHSASEEVRELEGKTGFSSDQIEQLHRRFKQLSGDQPTIRNLRKGPSGLADEINFEDFLTIMSYFRPIDTTMDEEQVELSRKEKLRFLFHMYDSDSDGRITLEEYRNVVEELLSGNPHIEKESARSIADGAMMEAASVCMGQMEPDQVYEGITFEDFLKIWQGIDIETKMHVRFLNMETMALCH

SEQ ID NO: 66030 - DNA, 564 bp, Artificial Sequence
  derived and/or modified sequence
atgggcgccgcccacagcgccagcgaggaggtgagagagctggagggcaagaccggcttcagcagcgaccagatcgagcagctgcacagaagattcaagcagctgagcggcgaccagcccaccatcagaaacctgagaaagggccccagcggcctggccgacgagatcaacttcgaggacttcctgaccatcatgagctacttcagacccatcgacaccaccatggacgaggagcaggtggagctgagcagaaaggagaagctgagattcctgttccacatgtacgacagcgacagcgacggcagaatcaccctggaggagtacagaaacgtggtggaggagctgctgagcggcaacccccacatcgagaaggagagcgccagaagcatcgccgacggcgccatgatggaggccgccagcgtgtgcatgggccagatggagcccgaccaggtgtacgagggcatcaccttcgaggacttcctgaagatctggcagggcatcgacatcgagaccaagatgcacgtgagattcctgaacatggagaccatggccctgtgccactag

SEQ ID NO: 66031 - DNA, 564 bp, Artificial Sequence
  derived and/or modified sequence
atgggcgctgcacattcggcctcagaggaggtccgagaactggaaggaaaaacaggattctcgagcgaccagattgaacagctccatcgtcgctttaaacagttgtccggggaccagcccactatcaggaatctccgtaaaggtccttctggactggccgatgagattaactttgaggattttctgactattatgtcctatttcaggcccatagatactactatggatgaggagcaggtggagctgtccagaaaggaaaagctgaggtttctgtttcatatgtacgatagcgattcggacggtcgcataacattggaggaatatagaaatgtcgtggaggaactcctgtcaggtaatccccatattgagaaggaatctgccagaagcatcgctgacggagccatgatggaagcggcatctgtatgtatggggcagatggagcctgaccaggtgtatgagggcattacatttgaagattttttgaagatctggcaaggcatagacattgagaccaaaatgcatgtgaggtttttgaatatggagacaatggctttgtgtcactag

SEQ ID NO: 66032 - DNA, 564 bp, Artificial Sequence
  derived and/or modified sequence
atgggcgccgcccacagcgccagcgaggaggtgcgggagctggagggcaagacaggcttcagcagtgaccagatcgagcagctgcaccggcgcttcaagcagctgagcggggaccagcccaccatccggaacctgaggaagggccccagcggcctggctgatgagatcaactttgaggacttcctgaccatcatgagctacttccggcccatcgacaccaccatggatgaggagcaggtggagctgagcaggaaggagaagctgcgcttcctgttccacatgtatgacagcgacagtgatggccgcatcaccctggaggagtacagaaatgtggtggaggagctgctgagcggcaacccccacatcgagaaggagagcgcccggagcattgctgatggagccatgatggaggccgcctctgtgtgcatgggccagatggagccagaccaggtgtatgagggcatcacctttgaggacttcctgaagatctggcagggcattgatattgagaccaagatgcacgtgcgcttcctgaacatggagaccatggccctgtgccactag

SEQ ID NO: 66033 - DNA, 564 bp, Artificial Sequence
  derived and/or modified sequence
atgggcgccgcccacagcgccagcgaggaggtgcgggagctggagggaaagacaggctttagcagtgaccaaatagagcaattgcataggcgcttcaagcagctaagtggggatcagcccaccatccggaaccttcgcaaggggcccagcggcctcgctgatgaaattaactttgaagatttcctgaccatcatgagttactttagacccatcgataccaccatggacgaggagcaggttgagcttagtaggaaagagaaactgcgatttctgttccatatgtatgacagcgattcggacggccggattactttggaagagtaccgcaatgtggttgaggagctgctgagtgggaaccctcatatagagaaggagagcgcacgatcaattgcggacggggctatgatggaagcagctagcgtctgtatgggccagatggaacctgaccaggtctacgagggcataacctttgaggatttccttaaaatttggcagggaatagacattgagaccaaaatgcacgtgaggttcctgaacatggagactatggctctgtgtcattag

SEQ ID NO: 66034 - DNA, 564 bp, Artificial Sequence
  derived and/or modified sequence
atgggggctgcccactctgccagcgaagaggtcagggagctggagggaaagactggcttcagttcagaccagatcgaacagttgcatagaagattcaaacagctcagtggggaccagcctaccattagaaatctgcggaaggggccatctggactggccgacgaaattaacttcgaggatttcttgacaatcatgagctatttcaggccaatcgatacgactatggatgaagaacaagttgaactgtcccgcaaggagaaactacgctttttatttcatatgtacgattcggattctgatggtaggatcactctcgaggaatataggaacgtggttgaggaactgctttccggcaacccacacatcgagaaagaaagcgcaagatccatcgccgatggcgctatgatggaggccgcatcagtgtgcatgggacaaatggagcccgatcaggtctatgagggtataactttcgaagacttcctaaaaatttggcagggaatcgatatagagaccaaaatgcacgtgaggtttctgaacatggaaaccatggctttgtgtcactag

SEQ ID NO: 66035 - DNA, 936 bp, Artificial Sequence
  derived and/or modified sequence
gttatatgaggccccgctccggccccacgcggaacccgcggctccgagccttcgccggcgtcccgacccgaggccggacccgaggccagtcccgccgctgcgcagccgaagccagtgcggggcctgagagggacgcgcgccccggggcccccgccgcgggcaccatgggcgctgcccactccgcgtctgaggaggtgcgggagctcgagggcaagaccggcttctcatcggatcagatcgagcagctccatcggagatttaagcagctgagtggagatcagcctaccattcggaacctgcgcaagggacccagtggcctggctgatgagatcaatttcgaggacttcctgaccatcatgtcctacttccggcccatcgacaccaccatggacgaggaacaggtggagctgtcccggaaggagaagctgagatttctgttccacatgtacgactcggacagcgacggccgcatcactctggaagaatatcgaaatgtggtcgaggagctgctgtcgggaaaccctcacatcgagaaggagtccgctcgctccatcgccgacggggccatgatggaggcggccagcgtgtgcatggggcagatggagcctgatcaggtgtacgaggggatcaccttcgaggacttcctgaagatctggcaggggatcgacattgagaccaagatgcacgtccgcttccttaacatggaaaccatggccctctgccactgacccaccgccacctccgcggagaaactgcactttgcaatggggccgcctccccgcgtagctggagcagcccaggcccggcggacagcctcttcctgcagcgccggtacatagccaaggctcgtctgcgcaccttgtgtcttgtagggtatggtatgtgggacttcgctgtttttatctccaataaaaaaaaaaaaaaggtttgttaatt

SEQ ID NO: 66036 - protein, 120 aa, Artificial Sequence
  derived and/or modified sequence
MSFPKYKPSSLRTLPETLDPAEYNISPETRRAQAERLAIRAQLKREYLLQYNDPNRRGLIENPALLRWAYARTINVYPNFRPTPKNSLMGALCGFGPLIFIYYIIKTERVSIQTRCLVFE

SEQ ID NO: 66037 - DNA, 363 bp, Artificial Sequence
  derived and/or modified sequence
atgagcttccccaagtacaagcccagcagcctgagaaccctgcccgagaccctggaccccgccgagtacaacatcagccccgagaccagaagagcccaggccgagagactggccatcagagcccagctgaagagagagtacctgctgcagtacaacgaccccaacagaagaggcctgatcgagaaccccgccctgctgagatgggcctacgccagaaccatcaacgtgtaccccaacttcagacccacccccaagaacagcctgatgggcgccctgtgcggcttcggccccctgatcttcatctactacatcatcaagaccgagagagtgagcatccagaccagatgcctggtgttcgagtag

SEQ ID NO: 66038 - DNA, 363 bp, Artificial Sequence
  derived and/or modified sequence
atgagcttccccaaatacaagccatcttcactgcgcaccctcccggagacattggacccagcggaatataatataagccccgagactcggagagcccaggcggagcggctggcaatcagagcacagctgaagagagagtacttactgcagtacaacgaccctaaccgacgcggtctgattgagaacccggctcttctgcggtgggcctacgccaggaccatcaatgtgtaccccaactttcgccccacacctaagaactctctgatgggggccctctgtggttttgggccattgatttttatttactacattattaagacggagcgagtgagtatacagacccgctgtctcgtattcgaatag

SEQ ID NO: 66039 - DNA, 363 bp, Artificial Sequence
  derived and/or modified sequence
atgtccttccccaagtacaagcccagcagcctgcggaccctgcctgagaccctggaccctgctgagtacaacatcagccctgagacccggcgggcccaggccgagcggctggccatccgggcccagctgaagcgggagtacctgctgcagtacaatgaccccaacagaagaggcctgattgaaaatcctgccctgctgcgctgggcctatgcccggaccatcaacgtgtaccccaacttccggcccacccccaagaacagcctgatgggcgccctgtgtggcttcggccccctcatcttcatctactacatcatcaagacagagcgggtgtccatccagacccgctgcctggtgtttgaatag

SEQ ID NO: 66040 - DNA, 1426 bp, Artificial Sequence
  derived and/or modified sequence
gcgcaggcgcaattgtgccctggttcgccaagatgtcgttcccaaagtataagccgtcgagcctgcgcactctgcctgagaccctcgacccagccgaatacaacatatctccggaaacccggcgggcgcaagccgagcggttggccataagagcccagctgaaacgagagtacctgcttcagtacaacgatcccaaccgccgagggctcatcgaaaatcctgccttgcttcgttgggcctatgcaagaacaataaatgtctatcctaatttcagacccactcctaaaaactcactcatgggagctctgtgtggatttgggcccctcatcttcatttattatattatcaaaactgagagggtaagtattcagaccagatgtttagtatttgagtgataggttcactttctagggaccagctgcagctccttctcttgaagattgccaccagtgcccctcccaccttggggctgtcctctgccttcccttcctctcttcttttatctttattcctttccagcaggagttaaaacagaaagttttcagtcacctttgtctatttttgttagttcatttgttttttaaaaagatgatgtttattgggttaagtattagcagaatacataaatcatttagtacgtttcctgtttgcgtgaattctatttatgttggtcacattttgcaaattaatgttaaaacctattaatactctacggacagagaagcacaagctgcctgtgtggggaatagctgccgtcagcagcctgggtatatgattggagagaaagtcaagctgatctttggcaccaaaccattccacatctggtactaaaccctgagctgcagcccccaggcttgtgttgccactggagcccactcgtctagctttgtctttaactggcccatctgcattcccattagagttcgtgtattttgattatctggtgaatgatctacttaacagaaaggtagtccacattttcccagaaagtgtttgcattttgctttcaatatatggttttatgggataatatatttctaatgactaaaatgtgagtaagatgtttttgaataggagcattttcttactgtgtctttagttcctcggattactgtttcttcgcacactccctgggctttagacagtgggattgcaattaggtttggagtgtttcattctgtttgtcagttgtacggtgggttgtgccaaaatgcagtttttcttaccttttttatttatttatttttatctaatatagccaactggcagaatatattgtctttaatgtactttttttctgtctttacaggataggaaagaaaaacttatccaggaaggaaaattggatcgaacatttcacctctcatattaagtctggcaatgatgactatatgtattcctgcctaaataaatcatctattaatca

SEQ ID NO: 66041 - DNA, 363 bp, Artificial Sequence
  derived and/or modified sequence
atgagcttccccaagtacaagcccagcagcctgcggaccctgcccgagactctggaccctgcagagtacaacataagtcccgaaacgagaagagcccaggcagaacgattggcaataagagcccagttaaaaagagaatacctgctgcaatataatgatccaaaccgccggggattgatcgaaaatcccgctctactgcggtgggcctatgccagaactatcaacgtctaccctaatttccgtccaacccccaagaactctcttatgggtgctctctgtggttttggccctctgatattcatttattacatcattaagaccgaacgtgtgagtatccaaacccggtgtttagtgttcgagtag

SEQ ID NO: 66042 - DNA, 363 bp, Artificial Sequence
  derived and/or modified sequence
atgagctttccaaagtacaagccaagcagtctgagaacactccccgagactctcgatcctgctgagtacaatatttcgccggagacccgccgagctcaagctgagcggctggcaattcgcgctcagctgaagagggaataccttctccaatacaatgacccaaaccggagggggcttatcgagaatcctgccctactgcgctgggcatacgccaggactattaacgtgtatccaaatttccgtccgacccctaagaattccctgatgggcgctctgtgcggatttggccctctgatattcatctactatatcattaagacagagagggtgagcattcagaccaggtgcctggtgttcgagtag

SEQ ID NO: 66043 - protein, 479 aa, Artificial Sequence
  derived and/or modified sequence
MLSRLRVVSTTCTLACRHLHIKEKGKPLMLNPRTNKGMAFTLQERQMLGLQGLLPPKIETQDIQALRFHRNLKKMTSPLEKYIYIMGIQERNEKLFYRILQDDIESLMPIVYTPTVGLACSQYGHIFRRPKGLFISISDRGHVRSIVDNWPENHVKAVVVTDGERILGLGDLGVYGMGIPVGKLCLYTACAGIRPDRCLPVCIDVGTDNIALLKDPFYMGLYQKRDRTQQYDDLIDEFMKAITDRYGRNTLIQFEDFGNHNAFRFLRKYREKYCTFNDDIQGTAAVALAGLLAAQKVISKPISEHKILFLGAGEAALGIANLIVMSMVENGLSEQEAQKKIWMFDKYGLLVKGRKAKIDSYQEPFTHSAPESIPDTFEDAVNILKPSTIIGVAGAGRLFTPDVIRAMASINERPVIFALSNPTAQAECTAEEAYTLTEGRCLFASGSPFGPVKLTDGRVFTPGQGNNVYIFPGYRIPIC

SEQ ID NO: 66044 - DNA, 1440 bp, Artificial Sequence
  derived and/or modified sequence
atgctgtctcgactgagggtagtctctacaacatgcaccttggcctgtcggcacctgcatatcaaagaaaaaggaaaacccttaatgctgaacccccggacgaataaaggaatggcatttaccctgcaggagagacagatgcttggcctccaggggctgctgcctccaaaaatcgaaacacaggatattcaagccttgcgctttcatagaaacctgaaaaagatgacgtcacccctcgagaaatacatctatattatggggatccaggagaggaatgaaaagttattctacaggattttgcaggatgacatcgagtccctcatgccaatcgtgtacacacccacagttggactcgcatgctcccagtacggacacattttccggagaccaaaaggtctttttatctcaatctcagatagagggcatgtgcgcagtatcgtggacaactggcctgaaaatcacgtgaaagccgtggttgtgacagacggagagagaatcctgggtctaggtgatctgggcgtgtatgggatggggattccagtggggaagctgtgtctgtacaccgcctgtgccggtataaggccagatcgctgcttaccagtctgcatcgacgtcgggaccgacaacatcgcattgctcaaagatcccttctacatgggcctctatcagaagcgggaccgcacgcagcagtatgatgatctcatcgacgagtttatgaaagccatcacagatcggtacgggcgaaatactctaatccagttcgaagattttgggaatcacaatgccttccggttcctcaggaaataccgagaaaagtactgcacctttaatgatgatatccaggggacggctgcagttgcactggccggcttgctggctgctcaaaaggtcatcagcaaacctatctctgagcataaaattttattcctcggtgccggcgaagctgctttgggcatcgctaatctgatcgttatgagcatggttgagaatggactgtctgaacaggaggcccaaaagaaaatctggatgttcgataagtacggcctgctggttaaaggtagaaaggcgaagatagacagctaccaggagccctttacacactccgctcccgagtctatacccgatactttcgaagacgctgtgaacatattaaagcccagcaccataatcggagtggctggtgccggccggctgttcactcctgacgttatccgggccatggccagcatcaatgaacgccctgttattttcgcactttctaatccgacagcccaggcagagtgcaccgccgaggaggcttacaccttgaccgagggccggtgtttatttgcaagcggtagcccatttggcccagtaaagctgaccgatggccgagtgtttacacctggacaggggaacaacgtttatatctttcccggatatcgcattcctatatgttag

SEQ ID NO: 66045 - DNA, 1440 bp, Artificial Sequence
  derived and/or modified sequence
atgctgagccggctgcgggtggtgtccaccacctgcaccctggcctgccgccacctgcacatcaaggagaagggcaagcccctgatgctgaaccccaggaccaacaagggcatggccttcaccctgcaggagcggcagatgctgggcctgcagggcctgctgccccccaagattgagacccaggacatccaggccctgcgcttccacaggaacctgaagaagatgaccagccccctggagaagtacatctacatcatgggcatccaggagagaaatgagaagctgttctaccgcatcctgcaggatgacatcgagagcctgatgcccatcgtgtacacccccaccgtgggcctggcctgcagccagtatggccacatcttccggcggcccaagggcctcttcatcagcatcagtgaccggggccacgtgcgcagcatcgtggacaactggccagagaaccacgtgaaggctgtggtggtgacagatggagagcgcatcctgggcctgggggacctgggcgtgtatggcatgggcatccctgtgggcaagctgtgcctgtacacagcctgtgccggcatccggccagaccgctgcctgcctgtgtgcattgatgtgggcacagacaacatcgccctgctgaaggaccccttctacatgggcctgtaccagaagagggacaggacccagcagtatgatgacctgattgatgagttcatgaaggccatcacagacagatatggcaggaacaccctcatccagtttgaagattttggaaaccacaatgccttccgcttcctgaggaagtaccgggagaagtactgcaccttcaatgatgacatccagggcacagctgctgtggccctggccggcctgctggccgcccagaaggtgatcagcaagcccatcagcgagcacaagatcctcttcctgggcgctggggaggccgccctgggcatcgccaacctgattgtgatgtccatggtggagaatggcctgtctgagcaggaggcccagaagaagatctggatgtttgacaagtatggcctgctggtgaagggcaggaaggccaagattgacagctaccaggagcccttcacccacagcgcccctgagagcatcccagacacctttgaagatgctgtgaacatcctgaagcccagcaccatcatcggcgtggccggggccggccgcctcttcaccccagatgtgatccgggccatggccagcatcaatgaaagacctgtgatctttgccctgagcaaccccacagcccaggctgaatgtacagctgaggaggcctacaccctgacagagggccgctgcctgtttgccagcggcagcccctttggacctgtgaagctgacagatggccgggtcttcaccccaggccagggcaacaacgtgtacatcttccctggctaccgcatccccatctgctag

SEQ ID NO: 66046 - DNA, 4450 bp, Artificial Sequence
  derived and/or modified sequence
accgtgggccacgccttccgggccccgcggctggccggctcctcgcgccctcccctctctcggccgctcttcgggccgcctctgcgtgtggggccgcccgcgccagtgtgagcctgagctgacggcggctccgggaggctcgcagaaggggagggccgggcggcgcgggagctgagcatcgccagggcgggcggcagggcgcggcctctccgccgggtgtaccacctgtcgcggcgcgagacctctggtgaaagaaaagatgttgtcccggttaagagtagtttccaccacttgtactttggcatgtcgacatttgcacataaaagaaaaaggcaagccacttatgctgaacccaagaacaaacaagggaatggcatttactttacaagaacgacaaatgcttggtcttcaaggacttctacctcccaaaatagagacacaagatattcaagccttacgatttcatagaaacttgaagaaaatgactagccctttggaaaaatatatctacataatgggaatacaagaaagaaatgagaaattgttttatagaatactgcaagatgacattgagagtttaatgccaattgtatatacaccgacggttggtcttgcctgctcccagtatggacacatctttagaagacctaagggattatttatttcgatctcagacagaggtcatgttagatcaattgtggataactggccagaaaatcatgttaaggctgttgtagtgactgatggagagagaattctgggtcttggagatctgggtgtctatggaatgggaattccagtaggaaaactttgtttgtatacagcttgtgcaggaatacggcctgatagatgcctgccagtgtgtattgatgtgggaactgataatatcgcactcttaaaagacccattttacatgggcttgtaccagaaacgagatcgcacacaacagtatgatgacctgattgatgagtttatgaaagctattactgacagatatggccggaacacactcattcagttcgaagactttggaaatcataatgcattcaggttcttgagaaagtaccgagaaaaatattgtactttcaatgatgatattcaagggacagctgcagtagctctagcaggtcttcttgcagcacaaaaagttattagtaaaccaatctccgaacacaaaatcttattccttggagcaggagaggctgctcttggaattgcaaatcttatagttatgtctatggtagaaaatggcctgtcagaacaagaggcacaaaagaaaatctggatgtttgacaagtatggtttattagttaagggacggaaagcaaaaatagatagttatcaggaaccatttactcactcagccccagagagcatacctgatacttttgaagatgcagtgaatatactgaagccttcaactataattggagttgcaggtgctggccgtcttttcactcctgatgtaatcagagccatggcctctatcaatgaaaggcctgtaatatttgcattaagtaatcctacagcacaggcagagtgcacggctgaagaagcatatacacttacagagggcaggtgtttgtttgccagtggcagtccatttgggccagtgaaacttacagatgggcgagtctttacaccaggtcaaggaaacaatgtttatatttttccaggttacagaatacctatatgctaataaaatggctttccgatacccagaacctgaagacaaggccaaatatgttaaagaaagaacatggcggagtgaatatgattccctgctgccagatgtgtatgaatggccagaatctgcatcaagccctcctgtgataacagaatagaagcactcccctgataaatactttctgtgctccagggaaccccttttttcagacaagaagagataatgtcttcagttttatggtgttttctgtgttttgttctccctgaccactttggttgatgtattttttccatgcgtctccacatctgttggggtagacgtgttgattgattgcattgcccaccagcaccctacagtcagatagttgtgatgctttaattctaacatacagcccgtaccacatccaggagatgtaaaaagtgtgtttgtgaatgtcttcacttgtactctaattcagacttgccaaagtatttgctatttactattatgggtaatactcttctctggcctagttcttacagagctactaaaatagaaatttacttttatggatagaagtacagaattttgagaagaaactaaattttcaccaaattttaaggaaaaattgtcattatctaaaaatgttcttatatatctgcttcatcttaccttcatactctgaaattccctatagcagacagagctagggaaatattaaaaatttaccctatttattttctggaactaaatcaagccttaactataacattatgagagtaatgggaactactgctggctttaagtaaataaaagtcattgttttcaacagtgtataaaaatcatagtgtaacctttttatttaataaatatcttacatttaattgcttcagttatgctatcttattgcccaactagaaatttagatttgcttatgaaaaacacatatttttgttacttctagatgattctaggagggagtataagatacctaatcatatgggaacatcacgtgactttttaaatctaaattagtcatgcttcacatcaaaatgagtcatatttaactggagaaactatgcccttattccagaactgatgctctttattgcttgagataattttggaatgttactatgatactgtttctttgaatatcattagtagtgacaactctttctccattgaaggcagacttaatttttttaaaccaccaacattaatttagagctaaatggggatgaataaggttggtgttcatctgggaaatgccttttttaatcccagtaaaatgggtaataatggctatccagaacagttttcttgtgtggcttgcatattgaagaattctaaaggaaaatatatctgcctaccatgcttgctcttagggaagaaaacttaaatgctcattctaggatagtaacaacaacagataattcatcgataatatgagcatgcacagtatttgatattgctctgtaggaaaaaagagacttcatttttttcatcttctgcctatgaatacaaattgattctttttttttttttttttttttgagacagagtctcactctgttaccaggctggagtgcagtggtgtgatctcagctcactgcaacctctgcctcccaggttcaagcagttctcctgcctcagcctcccaagtagctgggactacaggtacacgccaccacgcccagctaatttttgtatttttagtagagacgggatttcaccatgttggccaggagggtctcgatttcctgacctcgcgatccgcccacctcagccttccaaagtgctgggattacaggcgtgagccaccgcacccagccaattttttttttttttttttttgagacagagtctcgcttttgtcgcccagtctggagtgtagtggcatgatctctgcaacctctgcctcctcggttcaggcgattcttctgccttagcctcccaagtagctgggattacaggcaccggccaccacacccagctaatttttgtatttttagtagagatggggtttcaccatgttggccaggctggtctcaaaatcctgacttcaggtgatccacccactttggcctcccaaagtgctgggattacaggcgtgagccaccacacctggtccaattcatcataattctgaatataatttaataattttaaaatggtcgcaatggcattgccatttggagtatgggaaaatgcagttggttaattcattgaacagattagtaaagtcagaagtctttttcataacatacggtcacaattcctttcttttaattaaagacaaaaggtttatgggttttggtttgtttgttttagatatggggttttgctatgtcacccttgctggagggcggtggctgttcacaggcgtgggtcatagagcactgcagcctggaactcctgggttcaagctctcctcctgcctcagcctcctgagcagcttggactaaaggtgtgcaccaccgcacctggctgagaggcttctgtttttcatgttccctttatcaaaacaaaatcacgcctaaacatactctctgtgtgaaatcttgattttagttcaacctaagaaatataataaatataaacctgtttcttgcttagtgtttattgaaggcaggaacgtatgctgaattaaagtaattttactacgaagtttgcttattaagtatgcctggtacagtcttcatggaagttattaagtattttaaggaaaaaaataggctaaatggcatatagcctgcttaaataaaataattctattttttt

SEQ ID NO: 66047 - DNA, 1440 bp, Artificial Sequence
  derived and/or modified sequence
atgctgagccggctgcgggtggtgagcaccacctgcaccctggcctgccgacacctgcacatcaaggaaaagggaaagcccctcatgttgaacccccgaactaataagggaatggcctttactttgcaggaaaggcagatgttgggcctacaggggttgctgcctcctaagattgagacacaggacatccaagcattacgcttccaccgcaatttgaagaagatgacaagtcctctcgagaagtatatctatatcatgggaatccaggagcggaacgagaagctcttttatcggatccttcaagacgatatcgagtcactcatgccaatcgtctacacacccacagtgggcttagcatgcagccaatacggacatatctttcgccgacctaaaggattgttcatctccattagcgatcgtggccatgtgcggtcaattgtggacaactggccagagaaccacgtgaaagcggtggtggtgacagatggggaaaggattctggggctgggtgatttgggcgtgtatggaatgggcatacccgtggggaagctgtgtttatacacagcttgcgccgggatccggccggacagatgtctgccagtgtgcatcgatgttggaactgacaacatcgctctgctgaaggatccattctacatgggtttataccagaagagagatcggacccagcagtatgatgatttgattgatgagttcatgaaggcgataacagaccgctacggacggaacactctaatccagtttgaggatttcgggaaccataatgcctttaggtttctcagaaagtaccgggagaagtattgtacgttcaacgacgatatccagggcaccgctgcagttgcgcttgccggcctgctcgcggcccagaaggttatctccaagcccatttcggagcacaaaattctgtttcttggagcaggagaggccgccctgggaattgcgaacttgatcgtcatgagcatggtggagaacggactcagcgagcaggaggctcagaaaaagatttggatgtttgacaagtatggtctcctggtaaaaggaagaaaggcgaagattgattcttaccaggagccctttacccattccgcccccgaaagtatccctgatacctttgaagatgctgtgaacattttgaagccatccaccatcattggggtcgctggagcaggcaggctgttcaccccagacgtcatacgcgccatggctagcatcaatgagagacccgttatcttcgccctgagtaaccctacagcgcaggcagaatgtacagccgaggaagcttataccctgaccgaaggtcggtgcctgtttgcctccgggagcccctttggacctgtcaagctgaccgacggccgcgtgtttacccccggtcagggaaacaacgtgtacatcttccctggatatcgaatccccatctgctag

SEQ ID NO: 66048 - DNA, 1440 bp, Artificial Sequence
  derived and/or modified sequence
atgctgtccagacttcgggtggtctccaccacatgcactctggcctgccggcacctccacatcaaggagaaggggaagcctctgatgctgaatccccgaaccaacaaaggcatggccttcactctgcaggaaagacaaatgctcgggttacagggactcctgccacccaaaatcgagacccaggatatccaggccctgagattccaccggaatctcaagaagatgactagtcctctcgagaagtatatttacattatgggcattcaggaaagaaacgagaagttgttctacaggattcttcaggacgatatcgagagtttgatgccgatcgtgtacactccaaccgttggcctggcatgttcccaatacggccacatcttccgacggcctaaaggcctgtttatttcaatctcagaccgaggacacgtgagaagcatagtcgataattggcctgagaaccacgtgaaggcagtggttgtaaccgatggggaacgcattcttggactaggcgatctgggcgtgtatggcatgggaatccctgtcggcaaactttgcctctatacagcctgcgcaggtattcgacccgatcgttgtctgcccgtgtgcattgatgtcgggactgacaatattgcgttgctcaaggacccgttctacatgggtctgtatcagaaacgagaccgaacacagcagtacgacgacctgattgacgaatttatgaaagccatcaccgatcgatatggtcgaaatacactgatccagttcgaggatttcggaaatcacaatgcattcaggtttctgcgtaagtaccgcgaaaaatactgtacttttaacgatgacatccagggcaccgccgcagtggcattagcagggctgctagcggcacagaaagtgatctctaagcccatcagcgagcacaagatcttgttcctgggagctggcgaagccgctttaggcatcgccaatctgattgttatgagcatggttgaaaatggcctgtccgaacaggaggcccagaagaaaatttggatgtttgacaagtacggactcctagtgaaaggcagaaaggcaaagatagactcctatcaggaacctttcactcacagcgcaccagaaagtatacccgatacttttgaagacgccgttaacatcctgaaacctagcacaatcatcggggtcgctggggcaggccgtctgttcacgccagatgtgatccgagctatggcatcaattaatgaaagacccgttatcttcgcactgtccaacccgaccgctcaggccgagtgcacagcagaggaagcttataccctaactgagggtagatgcctttttgctagcggctctccattcgggccagttaaactgacggacggtcgtgtgttcacaccaggacaagggaataatgtctacatttttcccggatacaggattccgatctgctag

SEQ ID NO: 66049 - DNA, 1440 bp, Artificial Sequence
  derived and/or modified sequence
atgctgagcagactgagagtggtgagcaccacctgcaccctggcctgcagacacctgcacatcaaggagaagggcaagcccctgatgctgaaccccagaaccaacaagggcatggccttcaccctgcaggagagacagatgctgggcctgcagggcctgctgccccccaagatcgagacccaggacatccaggccctgagattccacagaaacctgaagaagatgaccagccccctggagaagtacatctacatcatgggcatccaggagagaaacgagaagctgttctacagaatcctgcaggacgacatcgagagcctgatgcccatcgtgtacacccccaccgtgggcctggcctgcagccagtacggccacatcttcagaagacccaagggcctgttcatcagcatcagcgacagaggccacgtgagaagcatcgtggacaactggcccgagaaccacgtgaaggccgtggtggtgaccgacggcgagagaatcctgggcctgggcgacctgggcgtgtacggcatgggcatccccgtgggcaagctgtgcctgtacaccgcctgcgccggcatcagacccgacagatgcctgcccgtgtgcatcgacgtgggcaccgacaacatcgccctgctgaaggaccccttctacatgggcctgtaccagaagagagacagaacccagcagtacgacgacctgatcgacgagttcatgaaggccatcaccgacagatacggcagaaacaccctgatccagttcgaggacttcggcaaccacaacgccttcagattcctgagaaagtacagagagaagtactgcaccttcaacgacgacatccagggcaccgccgccgtggccctggccggcctgctggccgcccagaaggtgatcagcaagcccatcagcgagcacaagatcctgttcctgggcgccggcgaggccgccctgggcatcgccaacctgatcgtgatgagcatggtggagaacggcctgagcgagcaggaggcccagaagaagatctggatgttcgacaagtacggcctgctggtgaagggcagaaaggccaagatcgacagctaccaggagcccttcacccacagcgcccccgagagcatccccgacaccttcgaggacgccgtgaacatcctgaagcccagcaccatcatcggcgtggccggcgccggcagactgttcacccccgacgtgatcagagccatggccagcatcaacgagagacccgtgatcttcgccctgagcaaccccaccgcccaggccgagtgcaccgccgaggaggcctacaccctgaccgagggcagatgcctgttcgccagcggcagccccttcggccccgtgaagctgaccgacggcagagtgttcacccccggccagggcaacaacgtgtacatcttccccggctacagaatccccatctgctag

SEQ ID NO: 66050 - protein, 136 aa, Artificial Sequence
  derived and/or modified sequence
MEHKEVVLLLLLFLKSGQGEPLDDYVNTQGASLFSVTKKQLGAGSIEECAAKCEEDEEFTCRAFQYHSKEQQCVIMAENRKSSIIIRMRDVVLFEKKVYLSECKTGNGKNYRGTMSKTKNGITCQKWSSTSPHRPR

SEQ ID NO: 66051 - DNA, 408 bp, Artificial Sequence
  derived and/or modified sequence
atggagcacaaggaggtggtgctgctgctgctgctgttcctgaagagcggccagggcgagcccctggacgactacgtgaacacccagggcgccagcctgttcagcgtgaccaagaagcagctgggcgccggcagcatcgaggagtgcgccgccaagtgcgaggaggacgaggagttcacctgccgcgccttccagtaccacagcaaggagcagcagtgcgtgatcatggccgagaaccgcaagagcagcatcatcatccgcatgcgcgacgtggtgctgttcgagaagaaggtgtacctgagcgagtgcaagaccggcaacggcaagaactaccgcggcaccatgagcaagaccaagaacggcatcacctgccagaagtggagcagcaccagcccccaccgcccccgc

SEQ ID NO: 66052 - DNA, 411 bp, Artificial Sequence
  derived and/or modified sequence
atggagcacaaggaggtggtgctgctgctgctgctgttcctgaagagcggccagggcgagcccctggacgactacgtgaacacccagggcgccagcctgttcagcgtgaccaagaagcagctgggcgccggcagcatcgaggagtgcgccgccaagtgcgaggaggacgaggagttcacctgcagagccttccagtaccacagcaaggagcagcagtgcgtgatcatggccgagaacagaaagagcagcatcatcatcagaatgagagacgtggtgctgttcgagaagaaggtgtacctgagcgagtgcaagaccggcaacggcaagaactacagaggcaccatgagcaagaccaagaacggcatcacctgccagaagtggagcagcaccagcccccacagacccagatag

SEQ ID NO: 66053 - DNA, 411 bp, Artificial Sequence
  derived and/or modified sequence
atggaacacaaagaggttgtgctgctcctgctgctgttccttaaatccggccagggcgagccgctggacgactacgtaaacactcagggcgccagcctcttctcagttaccaaaaaacaactgggggcgggctctattgaggaatgcgccgctaaatgcgaagaggatgaggagttcacttgtcgagcgtttcagtaccattctaaagaacagcaatgtgtgattatggcggagaataggaagtctagcattattatccgaatgcgggacgtcgtcctgtttgagaagaaggtgtacttgtctgaatgtaagaccggcaacggaaaaaactatcgcgggaccatgtctaagacaaaaaatgggattacatgtcagaagtggtcctcgacatcccctcaccgcccacggtag

SEQ ID NO: 66054 - DNA, 411 bp, Artificial Sequence
  derived and/or modified sequence
atggagcacaaggaggtggtgctgctgctgctgctcttcctgaagagcggccagggcgagcccctggatgattatgtgaacacccagggcgccagcctcttctctgtgaccaagaagcagctgggcgccggcagcattgaggagtgtgccgccaagtgtgaagaagatgaggagttcacctgccgggccttccagtaccacagcaaggagcagcagtgtgtgatcatggccgagaacaggaagagcagcatcatcatccgcatgagagatgtggtgctgtttgagaagaaggtgtacctgtctgagtgcaagacaggaaatggcaagaactaccggggcaccatgagcaagaccaagaatggcatcacctgccagaagtggagcagcaccagcccccaccggcccaggtag

SEQ ID NO: 66055 - DNA, 411 bp, Artificial Sequence
  derived and/or modified sequence
atggagcacaaggaggtggtgctgctgctgctgctgttcctgaagtccggccagggcgagcccctcgatgactacgtaaacactcagggggcttctctgttttcagtcaccaaaaagcagcttggcgcagggtctatcgaagagtgcgccgctaagtgtgaggaggatgaagagtttacttgtagagctttccagtaccactctaaggagcaacaatgtgttatcatggcggaaaataggaagtcgtctattattattagaatgagggacgtcgtgctgtttgaaaaaaaagtctatctttctgaatgtaaaactggcaatggcaagaactatcgggggaccatgtcaaaaacaaaaaacggcattacctgccagaagtggtccagcacttccccccatcggcctagatag

SEQ ID NO: 66056 - DNA, 411 bp, Artificial Sequence
  derived and/or modified sequence
atggaacataaggaagtcgtgcttctactgctcctgtttctgaagtccggccagggagaaccactcgatgattacgttaatactcagggcgcatcgctcttcagcgtgactaaaaagcagctgggggcaggcagtatcgaggagtgcgcggctaaatgcgaggaagacgaagagtttacttgtcgcgcttttcagtaccacagtaaggaacagcagtgtgtgataatggctgaaaatcgaaaatcttcaatcataatcagaatgagggatgttgtcctgttcgagaaaaaggtgtacctttcagaatgcaagaccgggaatggtaagaattataggggcaccatgtctaaaaccaaaaacggaataacatgccagaaatggagctccacttctcctcaccgaccaaggtag

SEQ ID NO: 66057 - DNA, 1166 bp, Artificial Sequence
  derived and/or modified sequence
tctcatgtaagtcaacaacatcctgggattgggacccactttctgggcactgctggccagtcccaaaatggaacataaggaagtggttcttctacttcttttatttctgaaatcaggtcaaggagagcctctggatgactatgtgaatacccagggggcttcactgttcagtgtcactaagaagcagctgggagcaggaagtatagaagaatgtgcagcaaaatgtgaggaggacgaagaattcacctgcagggcattccaatatcacagtaaagagcaacaatgtgtgataatggctgaaaacaggaagtcctccataatcattaggatgagagatgtagttttatttgaaaagaaagtgtatctctcagagtgcaagactgggaatggaaagaactacagagggacgatgtccaaaacaaaaaatggcatcacctgtcaaaaatggagttccacttctccccacagacctaggtaagacattccctttcatctttgtgttcatctactgtaaagttgtccctctgtgtctgtgagggattggttccaggacccctgtggctaccaaaatccatgcttctcaagtcccttatataaaatggtgcagtatttgcatataacctacataccttctcttgtataatccctaatataatgtaaatgctatttaatcgttgttatactgtattgtttttatttgtattatgttttattgtcatattgttattttctgtcatctttttcaagtcttttccatccacagttggttgaatttgtggatctggaacccatggatacagagggccaactgtatttaggataatttcatcacttttaattcaaaccacaatatgtgaataagcagatagaaagaatctttttgatgtcgatgttcaactatttttggcaccatagtagaacatggttgctttctattttttcttggatatggaggtttcttgaagacctagaacatagaagaatgcctagtttaaaaaaaatcaatgaaactatgagttttaggccaaatctgagaaaagatcaaagatgactatgtttgggactgaagtaagcatatcaggttagaactctcatcacatgttcgactcaaattgtggagcaaaagagtaaataagatataaaaatgaaaatgaagatacgtgaaa

SEQ ID NO: 66058 - DNA, 522 bp, Artificial Sequence
  derived and/or modified sequence
aacaacatcctgggattgggacacactttctgggcactgctggccagtcccaaaatggaacataaggaagtggttcttctacttcttttatttctgaaatcaggtcaaggagagcccctggatgactatgtgaatacccaggggccttcactgttcagtgtcactaagaagcagctgggggcaggaagcagagaagaatgtgcagcaaaatgtgaagaggacaaagaattcacctgcagggcattccaatatcacagtaaagagcaacaatgtgtgataatggctgaaaacaggaagtcctccataatcattaggatgagagatgcagttttatttgaaaagtaaatgtatctttcagagtgcaagactgggaatggaaagaactacagagggacgatgtccaaaacaaaaaatggcatcacctgtcaaaaatggagttccacttctccccgcagacctagattctcacctgctacacacccctcagagggactggaggaatccagacaacgatgcgcaggg

SEQ ID NO: 66059 - DNA, 1173 bp, Artificial Sequence
  derived and/or modified sequence
tctcatgtaagtcaacaacatcctgggattgggacacactttctgggcactgctggccagtcccaaaatggaacataaggaagtggttcttctacttcttttatttctgaaatcaggtcaaggagagcccctggatgactatgtgaatacccaggggccttcactgttcagtgtcactaagaagcagctgggggcaggaagcagagaagaatgtgcagcaaaatgtgaagaggacaaagaattcacctgcagggcattccaatatcacagtaaagagcaacaatgtgtgataatggctgaaaacaggaagtcctccataatcattaggatgagagatgcagttttatttgaaaagtaaatgtatctttcagagtgcaagactgggaatggaaagaactacagagggacgatgtccaaaacaaaaaatggcatcacctgtcaaaaatggagttccacttctccccgcagacctaggtcagacttttcctttcatctttgtgttcatctactgtaaagtgtccgtctgtgtctgtgagggattggttccaggacccctgtggctaccaaaatccatgcttctcaagtcccttatgtaaaatggtgcagtatttgcatataacctacataccttctcttgtgcaatccctaatataatgtaaatgctatgtaatcgttgttatactgtattgtttttatttgtattatgttttattgtcatattgttattttctctcatctttttcaagtcttttccatccacagttggttgaatttgtggatgtggaacccatggatacagagggccaactgtatttaggataatttcatcacttttaattcaaaccagaatatgtgaataagcagacagaaagaatctttttgatgtcgatgttcaactatttttggcaccatagtagaacatggttgctttctattttttcttgggtatggaggtttcttgaagacctagaacatagaagaatgcctagttaaaaaaaaaaatcaatgaaactacgagttttaggccaaatctgagaaaagaccaaagatgactatgtttgggactgaagtaaacatatcaagttagaactctcatcacatgtttgactcaaattgtggagcaaaatagtaaataaaatataaaaatgaaaatgaagatacgtgaaattcaaa

SEQ ID NO: 66060 - DNA, 1169 bp, Artificial Sequence
  derived and/or modified sequence
actctcatgtaagtcaacaacatcctgggattgggacacactttctgggcactgctggccagtcccaaaatggaacataaggaagtggttcttctacttcttttatttctgaaatcaggtcaaggagagcccctggatgactatgtgaatacccaggggccttcactgttcagtgtcactaagaagcagctgggggcaggaagcagagaagaatgtgcagcaaaatgtgaagaggacaaagaattcacctgcagggcattccaatatcacagtaaagagcaacaatgtgtgataatggctgaaaacaggaagtcctccataatcattaggatgagagatgcagttttatttgaaaagtaaatgtatctttcagagtgcaagactgggaatggaaagaactacagagggacgatgtccaaaacaaaaaatggcatcacctgtcaaaaatggagttccacttctccccgcaaacctaggtcagacttttcctttcatctttgtgttcatctactgtaaagtgtccgtctgtgtctgtgagggattggttccaggacccctgtggctaccaaaatccatgcttctcaagtcccttatgtaaaatggtgcagtatttgcatataacctacataccttctcttgtgcaatccctaatataatgtaaatgctatgtaatcgttgttatactgtattgtttttatttgtattatgttttattgtcatattgttattttctctcatctttttcaagtcttttccatccacagttggttgaatttgtggatgtggaacccatggatacagagggccaactgtatttaggataatttcatcacttttaattcaaaccagaatatgtgaataagcagacagaaagaatctttttgatgtcgatgttcaactatttttggcaccatagtagaacatggttgctttctattttttcttgggtatggaggtttcttgaagacctagaacatagaagaatgcctagttaaaaaaaaaaatcaatgaaactacgagttttaggccaaatctgagaaaagaccaaagatgactatgtttgggactgaagtaaacatatcaagttagaactctcatcacatgtttgactcaaattgtggagcaaaatagtaaataaaatataaaaatgaaaatgaagatacgtgaaa

SEQ ID NO: 66061 - protein, 669 aa, Artificial Sequence
  derived and/or modified sequence
MDAVLACRLRGRGNRVAALRPRPRPGGSAGPSPFALLCAGLSPEPRAGVGSEFPAWFLGGSSQRRNMALLGSRAELEADEDVFEDALETISISSHSDMATSSLHFASCDTQQAPRQRGASTVSSSSSTKVDLKSGLEECAVALNLFLSNKFTDALELLRPWAKESMYHALGYSTIVVLQAVLTFEQQDIQNGISAMKDALQTCQKYRKKYTVVESFSSLLSRGSLEQLSEEEMHAEICYAECLLQKAALTFVQDENMINFIKGGLKIRTSYQIYKECLSILHEIQKNKLQQEFFYEFEGGVKLGSGAFNLMLSLLPARIIRLLEFIGFSGNRELGLLQLREGASGRSMRSALCCLTILAFHTYISLILGTGEVNVAEAERLLAPFLQQFPNVRSVFQSAQEVFQKCISVQEEWKQFHHLCYWELMWINVFQQNWMQAYYYSDLLCKESKWSKATYVFLKAAILSMLPEEDVVATNENVVTLFRQVDSLKQRIAGKSIPTEKFAVRKARRYSASLPAPVKLILPALEMMYVWNGFSIVSKRKDLSENLLVTVEKAEAALQSQNFNSFSVDDECLVKLLKGCCLKNLQRPLQAELCYNHVVESEKLLKYDHYLVPFTLFELASLYKSQGEIDKAIKFLETARNNYKDYSLESRLHFRIQAALHLWRKPSSD

SEQ ID NO: 66062 - protein, 194 aa, Artificial Sequence [sequence omitted]

SEQ ID NO: 66063 - DNA, 2010 bp, Artificial Sequence
  derived and/or modified sequence
atggacgccgtgctggcctgcagactgagaggcagaggcaacagagtggccgccctgagacccagacccagacccggcggcagcgccggccccagccccttcgccctgctgtgcgccggcctgagccccgagcccagagccggcgtgggcagcgagttccccgcctggttcctgggcggcagcagccagagaagaaacatggccctgctgggcagcagagccgagctggaggccgacgaggacgtgttcgaggacgccctggagaccatcagcatcagcagccacagcgacatggccaccagcagcctgcacttcgccagctgcgacacccagcaggcccccagacagagaggcgccagcaccgtgagcagcagcagcagcaccaaggtggacctgaagagcggcctggaggagtgcgccgtggccctgaacctgttcctgagcaacaagttcaccgacgccctggagctgctgagaccctgggccaaggagagcatgtaccacgccctgggctacagcaccatcgtggtgctgcaggccgtgctgaccttcgagcagcaggacatccagaacggcatcagcgccatgaaggacgccctgcagacctgccagaagtacagaaagaagtacaccgtggtggagagcttcagcagcctgctgagcagaggcagcctggagcagctgagcgaggaggagatgcacgccgagatctgctacgccgagtgcctgctgcagaaggccgccctgaccttcgtgcaggacgagaacatgatcaacttcatcaagggcggcctgaagatcagaaccagctaccagatctacaaggagtgcctgagcatcctgcacgagatccagaagaacaagctgcagcaggagttcttctacgagttcgagggcggcgtgaagctgggcagcggcgccttcaacctgatgctgagcctgctgcccgccagaatcatcagactgctggagttcatcggcttcagcggcaacagagagctgggcctgctgcagctgagagagggcgccagcggcagaagcatgagaagcgccctgtgctgcctgaccatcctggccttccacacctacatcagcctgatcctgggcaccggcgaggtgaacgtggccgaggccgagagactgctggcccccttcctgcagcagttccccaacgtgagaagcgtgttccagagcgcccaggaggtgttccagaagtgcatcagcgtgcaggaggagtggaagcagttccaccacctgtgctactgggagctgatgtggatcaacgtgttccagcagaactggatgcaggcctactactacagcgacctgctgtgcaaggagagcaagtggagcaaggccacctacgtgttcctgaaggccgccatcctgagcatgctgcccgaggaggacgtggtggccaccaacgagaacgtggtgaccctgttcagacaggtggacagcctgaagcagagaatcgccggcaagagcatccccaccgagaagttcgccgtgagaaaggccagaagatacagcgccagcctgcccgcccccgtgaagctgatcctgcccgccctggagatgatgtacgtgtggaacggcttcagcatcgtgagcaagagaaaggacctgagcgagaacctgctggtgaccgtggagaaggccgaggccgccctgcagagccagaacttcaacagcttcagcgtggacgacgagtgcctggtgaagctgctgaagggctgctgcctgaagaacctgcagagacccctgcaggccgagctgtgctacaaccacgtggtggagagcgagaagctgctgaagtacgaccactacctggtgcccttcaccctgttcgagctggccagcctgtacaagagccagggcgagatcgacaaggccatcaagttcctggagaccgccagaaacaactacaaggactacagcctggagagcagactgcacttcagaatccaggccgccctgcacctgtggagaaagcccagcagcgactag

SEQ ID NO: 66064 - DNA, 2010 bp, Artificial Sequence
  derived and/or modified sequence
atggatgctgtcctcgcatgccgcttgagggggagaggaaaccgggttgcagctctgagaccacggcccagacccggcggaagcgctggcccttcgccttttgcccttttatgtgcgggactctctcctgaaccacgagccggagtcggatccgagtttcccgcctggtttctaggcgggtcctcccaacgacgtaacatggccctgcttggcagccgggcggagctagaggccgatgaagatgtgtttgaggatgcattagagacgatttcgatcagtagccacagtgacatggcgacaagctccttgcattttgcttcgtgtgacacacagcaggcgccacggcagagaggcgcttctactgtgtcttcctcttcctcaaccaaggtagatttaaaaagcggtttagaggagtgtgcagttgccttaaacctctttctgtcgaacaaatttaccgacgcactggaacttctccggccctgggccaaggaaagcatgtaccacgcactggggtacagcaccatcgtggttctgcaagcagtcctaacattcgagcagcaggacattcagaatggaatctctgcaatgaaagatgcactccagacctgtcaaaaataccgcaaaaaatacacagtggtggagtcctttagttctctcctgtcccgcgggtccctggagcaacttagcgaggaagagatgcatgctgaaatctgctatgcggagtgcttgcttcagaaggcggccctgacctttgtgcaagatgagaacatgatcaattttatcaaagggggtttgaaaattaggaccagttaccagatctacaaggaatgcctgtcaatcctccatgagattcaaaaaaataaactgcagcaggaattcttttacgagttcgaagggggcgtgaagctcggttcgggcgccttcaatcttatgctaagccttttgcccgccaggattattcgcctgctggagtttataggtttctccggaaacagggagctgggcctcctacagctccgggagggtgcttcaggtaggtcaatgagatcggccctgtgttgccttacaatcctcgcctttcacacctatatctctctaattcttggaaccggtgaggtcaacgtggctgaggccgagagactgttggccccgtttctgcagcaattcccaaatgttagatccgtcttccagtcagcccaggaggtttttcagaaatgcatttctgtccaggaggagtggaagcagtttcatcacctctgctattgggaattgatgtggatcaatgtctttcagcagaattggatgcaagcttattactacagtgatctcctctgtaaagagagtaaatggagtaaggctacctacgtcttcttgaaggcagcgatcctctcaatgctgcctgaagaagatgtcgttgccacgaatgagaatgttgtcactctgttcaggcaagtggattctcttaaacagcggatcgccggtaaatctatccccacagagaaattcgccgttagaaaagccagaaggtattcagcaagcctccccgccccagtcaagcttatcctccccgccctcgaaatgatgtatgtctggaacgggttctcgattgtctccaagcggaaggacctctctgaaaacctcctagtaactgtggagaaagccgaggccgcacttcagagccagaacttcaatagtttctcagtggatgacgaatgcctggtaaagctcctgaaaggatgttgtttgaaaaacctgcagagaccactgcaagcggaattgtgctataaccatgtggtggagagcgagaaactcctgaaatacgatcactacctggtgcctttcaccttgtttgaattggcttccctatataagtcccaaggggagatcgataaggcaatcaagttcttggagactgcgcggaataactacaaagactatagcctcgagagcagactgcacttccgtattcaggcagcgctacacctatggcgtaaaccttcctccgattag

SEQ ID NO: 66065 - DNA, 2010 bp, Artificial Sequence
  derived and/or modified sequence
atggatgctgtgctggcctgccgcctgcggggccggggcaacagagtggccgccctgcggccccggcccaggcctgggggcagcgctggccccagcccctttgccctgctgtgtgccggcctgagccctgagcccagggctggggtgggcagcgagttccctgcctggttcctgggcggcagcagccagaggaggaacatggccctgctgggcagcagagctgagctggaggctgatgaagatgtgtttgaagatgccctggagaccatcagcatcagcagccacagcgacatggccaccagcagcctgcactttgccagctgtgacacccagcaggccccccggcagagaggagccagcacagtgagcagcagcagcagcaccaaggtggacctgaagagcggcctggaggagtgtgctgtggccctgaacctcttcctgagcaacaagttcacagatgccctggagctgctgcggccctgggccaaggagagcatgtaccacgccctgggctacagcaccatcgtggtgctgcaggccgtgctgacctttgagcagcaggacatccagaatggcatcagcgccatgaaggatgccctgcagacctgccagaagtacaggaagaagtacacagtggtggagagcttcagcagcctgctgagccggggcagcctggagcagctgtctgaggaggagatgcatgctgagatctgctacgcagaatgtctgctgcagaaggccgccctgacctttgtgcaggatgagaacatgatcaacttcatcaagggcggcctgaagatccgcaccagctaccagatctacaaggagtgcctgagcatcctgcacgagatccagaagaacaagctgcagcaggagttcttctatgaatttgaaggaggagtgaagctgggcagcggggccttcaacctgatgctgagcctgctgcctgcccgcatcatccggctgctggagttcatcggcttcagcggcaaccgggagctgggcctgctgcagctgcgggagggcgccagcggccgctccatgaggtctgccctgtgctgcctgaccatcctggccttccacacctacatcagcctcatcctgggcaccggggaggtgaatgtggccgaggccgagcggctgctggcccccttcctgcagcagttccccaacgtgcgcagcgtcttccagagcgcccaggaggtgttccagaagtgcatctctgtgcaggaggagtggaagcagttccaccacctgtgctactgggagctgatgtggatcaacgtgttccagcagaactggatgcaggcctactactacagcgacctgctgtgcaaggagagcaagtggagcaaggccacctacgtgttcctgaaggccgccatcctgtccatgctgcctgaagaagatgtggtggccaccaatgaaaatgtggtgaccctcttccggcaggtggacagcctgaagcagagaattgctgggaagagcatccccacagagaagtttgctgtgaggaaggcccggcgctacagcgccagcctgcctgcccctgtgaagctgatcctgcctgccctggagatgatgtatgtgtggaatggcttcagcatcgtgtccaagaggaaggacctgtctgagaacctgctggtgacagtggagaaggccgaggccgccctgcagagccagaacttcaacagcttctctgtggatgatgaatgtctggtgaagctgctgaagggctgctgcctgaagaacctgcagaggcccctgcaggccgagctgtgctacaaccacgtggtggagagcgagaagctgctgaagtatgaccactacctggtgcccttcaccctgtttgagctggccagcctgtacaagagccagggcgagattgacaaggccatcaagttcctggagacagccaggaacaactacaaggactacagcctggagagccggctgcacttccgcatccaggccgccctgcacctgtggaggaagcccagcagtgactag

SEQ ID NO: 66066 - DNA, 2010 bp, Artificial Sequence
  derived and/or modified sequence
atggacgccgtgctggcctgccggctgcggggccggggcaaccgggtggctgccttgcggcccagaccaaggccaggggggagcgcgggacctagcccattcgcccttctctgtgcggggctgagccctgagccgcgagccggcgtagggtccgaatttcctgcctggttcctcgggggctcaagtcaacgaagaaatatggccttgctgggctccagagccgaattggaggccgatgaggatgtgttcgaagatgcacttgagaccatatcgattagttctcactcagacatggccaccagctccttgcactttgcttcatgtgatacacagcaggcccccagacagaggggtgcatctaccgtgagtagcagctctagcacaaaagttgatctgaagtctgggctcgaggagtgtgccgttgcgctgaatctgtttcttagcaacaaatttaccgacgctctcgagctgttgaggccatgggcgaaggagagcatgtatcacgccttgggatatagtactatagttgttctccaagccgttctgacgtttgagcaacaggacatccagaacggcatatccgcgatgaaggatgccttacagacatgccagaagtaccgtaagaagtacaccgtcgtggaaagcttctcaagtctgttatctagaggctctctggagcagctgagcgaggaggaaatgcacgcggagatttgctatgccgagtgcctcctgcagaaagcagctctcacctttgtgcaggatgagaatatgatcaactttattaaaggaggtctcaagatccgcaccagttaccagatatataaagagtgcctgtctatcctccatgagatccagaaaaacaagctccagcaggaatttttctacgagttcgaagggggcgttaaactcggttcaggcgctttcaatctgatgttgtcattgctccccgcaaggataatccggctgctcgagttcataggcttctcagggaacagggagctggggctgttacagctcagagaaggtgcatccggacggtccatgcggagtgctctgtgctgcctcactatcttagcatttcacacttacataagtctgattctgggcaccggtgaggtaaacgtcgctgaagccgaacggctgcttgcccctttcctgcagcagtttccaaacgttcggtcagtgttccagagcgcccaggaggtgtttcaaaagtgcataagtgtgcaagaagagtggaagcagttccaccatctgtgctactgggagctgatgtggataaatgtcttccaacagaactggatgcaggcctactactattccgatttattgtgtaaggagtcaaaatggtcaaaggccacgtacgtgttcctcaaagctgccatcctcagcatgctcccggaagaggacgtcgtggccactaacgagaatgtcgtcacactgtttagacaggtagattccttgaagcagcggattgcaggaaagtctatcccgacagagaagtttgcagtaaggaaagctcggaggtatagcgcctcccttccagctcctgtaaagctgatcctgccggccctcgagatgatgtacgtgtggaacggattttctatcgtttccaagcgcaaagacttgtctgagaatcttctcgtcactgtcgaaaaagcggaagccgccctgcagagccagaatttcaacagtttctcagtcgacgatgagtgtctcgtcaaactgctgaagggctgttgccttaagaatctccagaggccattgcaggctgagctgtgctataatcacgttgtcgagagtgaaaaactgctgaagtatgaccattacctggttccattcacattgttcgaactggcttcgctatacaaatcacagggcgagattgacaaagccatcaagttcctcgagacagcccgtaataactataaggactattccctggagtctcgcctgcactttagaatccaagcagcattacacctctggagaaaaccttcctctgattag

SEQ ID NO: 66067 - DNA, 2010 bp, Artificial Sequence
  derived and/or modified sequence
atggatgctgtcctggcttgtcgcttgagaggcaggggcaaccgcgtggcagctctacgcccacgtccccgacccggagggtcggcgggacctagtccattcgccctgctgtgtgcaggactgtcgcccgaacccagggcaggggtagggtctgaatttccagcctggtttttgggcggaagtagtcaacgcagaaatatggctttgcttgggagcagagctgagctagaagcagatgaagacgtgtttgaggacgctctggaaacgataagcatttcctcccattcagatatggccaccagctccctgcacttcgcctcttgtgacacgcagcaggcccctcggcagcgcggagcgagtactgtaagtagctcatcttccaccaaagtcgatctcaaatccgggctcgaggaatgcgcagtagctttaaacttgtttctatcaaataaattcactgacgcattggagctgttgaggccctgggcaaaagaatcaatgtaccacgctctggggtactccactatagtggtgctccaggcagtcttgaccttcgagcagcaggacattcaaaatggtatcagtgctatgaaagatgctctccagacctgccaaaagtaccggaagaaatatacagtggtggagtcattctcctctttactgagtcggggatccctggagcaactgagcgaggaagagatgcatgctgaaatctgctatgcagaatgcctgctacaaaaggcggctctgacatttgtccaagacgagaacatgataaatttcatcaaagggggactgaagataaggacgtcttaccagatctacaaagagtgtctatcgatcctgcacgaaatacagaaaaacaagctgcagcaggaattcttctacgaattcgaggggggagtgaaactcggcagcggggcattcaatcttatgttatccttgctgcctgctagaatcatccgacttctcgagttcatcggttttagtggaaacagggagctgggcctcctacaactgagggagggggcatctggtcgttctatgcgcagcgccctctgttgccttactattttagccttccatacatatatctcactcatattaggcaccggcgaggtgaatgtggctgaggccgaacgcctcctggccccatttttgcaacagttccctaacgtgaggtcagttttccaatctgctcaggaagtattccaaaaatgtattagcgtgcaggaagagtggaaacagttccaccacctgtgctattgggagctgatgtggattaatgttttccagcagaactggatgcaggcctactattattccgacctgttgtgtaaggagagcaagtggtctaaggccacctatgtttttctgaaagctgccattctaagtatgcttccagaggaggatgtcgtcgcaacaaacgaaaacgtcgtgactttgttccgacaggtggacagcctgaaacagcgaatcgccggtaagtcaattccgacagagaaattcgccgtccggaaggcgaggcgttacagcgcatcgctgccagcacccgttaaactcatccttcctgctttggagatgatgtacgtgtggaacggattctcgatcgtatcaaaacggaaggacctgagtgaaaatttactggtgaccgtagaaaaggccgaagctgcgttgcagtcacagaattttaattctttctcggttgatgatgaatgtctggtgaagcttctaaaaggctgctgcctgaaaaatctgcagagacctctccaggccgagctttgctacaaccacgtggttgaatccgaaaagctacttaagtacgatcactatcttgtgcctttcactttatttgaactggctagcctttataagtctcaaggcgaaattgacaaggccatcaaatttttggagacggcccgaaataattacaaagattacagtctagaatcccgattgcacttccggattcaggctgcccttcacctctggcgaaagccgtcatctgactag

SEQ ID NO: 66068 - DNA, 3221 bp, Artificial Sequence
  derived and/or modified sequence
aagtggcccggccagcggcgcggcgtccggggaggaaatggatgctgtgctggcctgccggctccgggggcggggaaatcgagtagctgcactcaggccccgcccgagacccggagggagcgccgggccgtccccttttgccctcctttgcgctgggctgagcccagagccgagagcaggagtcggctctgagttccctgcttggtttttgggtggcagcagccagaggaggaatatggcgctcttaggcagccgagcggagctggaagcggacgaggacgttttcgaagatgccttggaaaccatctcaatatcttctcactcagatatggcaacaagcagccttcactttgcatcatgtgatacacaacaggcgcccagacagcgcggagcgtctactgtcagcagttcatcatcaaccaaggtggatctcaagagtggcctcgaagaatgtgctgtggcattgaacttatttctaagcaacaaatttacagacgccttagaattgcttcgcccctgggctaaggagagtatgtaccatgccttgggctacagtaccattgtggtgttgcaggctgtcctgaccttcgagcaacaggacatccagaacggcatttctgccatgaaggacgctttacaaacctgccaaaaatacaggaaaaaatacacagttgtagaatctttctcaagtcttctttctagaggatccctggagcaactgagtgaagaggaaatgcatgctgaaatctgttatgccgagtgtctcctacagaaagctgcactcacgtttgtgcaggatgaaaatatgatcaacttcatcaaaggtggactcaaaattagaacaagttaccaaatatataaagaatgtctttctatcctgcatgaaattcagaagaacaaacttcagcaggaattcttctatgagtttgaagggggtgtcaagcttggcagtggggcctttaatttgatgctgtcccttttaccagcaaggattatcagactactagaatttattggattttctgggaatagggagttgggcctcctgcagttacgtgaaggtgcttcaggaaggagcatgaggtctgcactgtgctgcttaaccatcttagcttttcatacttacatctccctaatacttggtacaggagaagtgaatgttgcggaagcagagcgtctcctggcacccttcctccagcagtttccaaatgtacgctcagtatttcaaagtgcacaagaagtatttcaaaaatgcatttcagttcaagaagaatggaaacagtttcaccatctctgctactgggagctaatgtggattaatgttttccaacaaaactggatgcaggcatattactattcagatctgctttgcaaagagagtaaatggtccaaggcaacttatgtgttcttgaaagcagcaattttgagtatgcttccagaggaggatgtagtagcaacgaatgagaatgtggtaactttattcagacaggtggacagcttgaagcagagaattgccgggaaatctatccctactgagaagtttgctgtgaggaaggctcggcgttactccgcctccttacctgcacctgtgaagctcatcttacctgccctggaaatgatgtatgtctggaatggtttttcaatagtgagcaaaagaaaagacctttctgaaaatctgttagtaactgttgaaaaagctgaggcagctttacaaagtcaaaattttaacagcttctctgtggatgatgagtgcttagtgaagttacttaaaggatgttgcctcaagaacttacagcggcccttgcaagctgaactatgttacaatcatgttgtggaaagtgaaaagctactgaagtatgaccactacctagtgccgttcactctatttgaattggcatctttgtataaaagccagggggaaattgacaaggccataaagttcctagaaactgcaaggaacaactacaaagattactccctggagtccagactacacttcagaattcaggcagctcttcacctctggagaaaaccttcctcagattgatcagaacttgaaggatggaatttttcctcaattagcatcggcatctgctatagattcaaccttatattaaagtggaaaaatgatcttgtgaataagagacaaaaaaacagtttttttggtcaatattttctatcatctgagagatttactgttggtctacataattttttttcctatggaatggcattctatattatctagaaaattcttatattttgcctcccccaaaagaatttcatattatttgaattagggggcgaagaagtcttttgaaagacttgcagatgcaatagtctaattagattatttatttttttaatgtgaaaattaatattgtttagcaaatagcttacaagttgagccaattttggatttgttgggtagttaaacttcagagatattttgttgcctgtatttaaatttcagaagataaataaatatcattgcatttaaaatagcttaacagtgaccttcagaagacttctgaaaaagacagtctgagaacatgaacacggatcgatataatgtacttcatgggttgaagagacctttctctataaaggatgatgcagtattcagttagtggttttttactcttcatttgattaaaggtggtgacgttttggagagactgattttgaatgtacttaagtctattataataacaaaattcaaaacccctgtgtatctaaagggaaggaagtgtcatattttaggaatttttcttaaccttagcaatgagagcctaaaatacatacatggattatttttcttctaggaagtaaatttcctgctgctttaaatgatatgtaaaatatcaataatttttacacttaagatgttggtaagacctagttttctaatctctctagcactgtgatgtctccttgtagataatctggaccttgcttagtcctttagttgggaaacagaatcagggcatagagcagaagagagcttgacactccatatggtcctggttctgctacccattagcgattagtgaggagacctttagggagtccactgtgccctgtgtgtcaccacattttcttctgtgaaatcaagattaaagaacagatgactttcaaggtctttttcagttttataactgtgagtctatgtattaggtatttattttcaacaaatgactttaaaatgtcgaatgcaaacc

SEQ ID NO: 66069 - protein, 613 aa, Artificial Sequence
  derived and/or modified sequence
MDAVLACRLRGRGNRVAALRPRPRPGGSAGPSPFALLCAGLSPEPRAGVGSEFPAWFLGGSSQRRNMALLGSRAELEADEDVFEDALETISMAKESMYHALGYSTIVVLQAVLTFEQQDIQNGISAMKDALQTCQKYRKKYTVVESFSSLLSRGSLEQLSEEEMHAEICYAECLLQKAALTFVQDENMINFIKGGLKIRTSYQIYKECLSILHEIQKNKLQQEFFYEFEGGVKLGSGAFNLMLSLLPARIIRLLEFIGFSGNRELGLLQLREGASGRSMRSALCCLTILAFHTYISLILGTGEVNVAEAERLLAPFLQQFPNGSLVLFYHARIELLKGNLEEAQEVFQKCISVQEEWKQFHHLCYWELMWINVFQQNWMQAYYYSDLLCKESKWSKATYVFLKAAILSMLPEEDVVATNENVVTLFRQVDSLKQRIAGKSIPTEKFAVRKARRYSASLPAPVKLILPALEMMYVWNGFSIVSKRKDLSENLLVTVEKAEAALQSQNFNSFSVDDECLVKLLKGCCLKNLQRPLQAELCYNHVVESEKLLKYDHYLVPFTLFELASLYKSQGEIDKAIKFLETARNNYKDYSLESRLHFRIQAALHLWRKPSSD

SEQ ID NO: 66070 - DNA, 1842 bp, Artificial Sequence
  derived and/or modified sequence
atggacgccgtgctggcctgcagactgagaggcagaggcaacagagtggccgccctgagacccagacccagacccggcggcagcgccggccccagccccttcgccctgctgtgcgccggcctgagccccgagcccagagccggcgtgggcagcgagttccccgcctggttcctgggcggcagcagccagagaagaaacatggccctgctgggcagcagagccgagctggaggccgacgaggacgtgttcgaggacgccctggagaccatcagcatggccaaggagagcatgtaccacgccctgggctacagcaccatcgtggtgctgcaggccgtgctgaccttcgagcagcaggacatccagaacggcatcagcgccatgaaggacgccctgcagacctgccagaagtacagaaagaagtacaccgtggtggagagcttcagcagcctgctgagcagaggcagcctggagcagctgagcgaggaggagatgcacgccgagatctgctacgccgagtgcctgctgcagaaggccgccctgaccttcgtgcaggacgagaacatgatcaacttcatcaagggcggcctgaagatcagaaccagctaccagatctacaaggagtgcctgagcatcctgcacgagatccagaagaacaagctgcagcaggagttcttctacgagttcgagggcggcgtgaagctgggcagcggcgccttcaacctgatgctgagcctgctgcccgccagaatcatcagactgctggagttcatcggcttcagcggcaacagagagctgggcctgctgcagctgagagagggcgccagcggcagaagcatgagaagcgccctgtgctgcctgaccatcctggccttccacacctacatcagcctgatcctgggcaccggcgaggtgaacgtggccgaggccgagagactgctggcccccttcctgcagcagttccccaacggcagcctggtgctgttctaccacgccagaatcgagctgctgaagggcaacctggaggaggcccaggaggtgttccagaagtgcatcagcgtgcaggaggagtggaagcagttccaccacctgtgctactgggagctgatgtggatcaacgtgttccagcagaactggatgcaggcctactactacagcgacctgctgtgcaaggagagcaagtggagcaaggccacctacgtgttcctgaaggccgccatcctgagcatgctgcccgaggaggacgtggtggccaccaacgagaacgtggtgaccctgttcagacaggtggacagcctgaagcagagaatcgccggcaagagcatccccaccgagaagttcgccgtgagaaaggccagaagatacagcgccagcctgcccgcccccgtgaagctgatcctgcccgccctggagatgatgtacgtgtggaacggcttcagcatcgtgagcaagagaaaggacctgagcgagaacctgctggtgaccgtggagaaggccgaggccgccctgcagagccagaacttcaacagcttcagcgtggacgacgagtgcctggtgaagctgctgaagggctgctgcctgaagaacctgcagagacccctgcaggccgagctgtgctacaaccacgtggtggagagcgagaagctgctgaagtacgaccactacctggtgcccttcaccctgttcgagctggccagcctgtacaagagccagggcgagatcgacaaggccatcaagttcctggagaccgccagaaacaactacaaggactacagcctggagagcagactgcacttcagaatccaggccgccctgcacctgtggagaaagcccagcagcgactag

SEQ ID NO: 66071 - DNA, 1842 bp, Artificial Sequence
  derived and/or modified sequence
atggacgctgtgttggcttgccgactccgcggtcgggggaatcgtgtggccgccctacgtccccggcctcggccaggagggtctgcgggcccaagcccattcgcactgttgtgcgcaggcctgtctcccgagccacgagccggcgttggatcggaatttccagcttggtttctcggaggcagctctcagcgacggaacatggcacttttaggctccagagctgagctcgaagccgacgaggatgtgttcgaggacgccctggaaacaatatccatggccaaagaatcaatgtatcacgctctgggctactccaccatagttgtgctgcaggccgtgctaacctttgagcagcaggatattcagaatgggattagcgccatgaaagatgccttacagacgtgccagaaatataggaagaagtacacagttgtggagtcattttcatccttactgagtagggggtcgctggagcagctgagcgaggaggaaatgcacgcagagatttgttacgcagaatgcctgctgcagaaggctgcattgacgttcgtgcaagacgagaatatgatcaattttattaagggcggcttgaagattagaacatcataccagatatacaaggagtgtctgtctattctacacgaaatccaaaaaaacaagctgcagcaggaattcttctacgaattcgagggaggcgtcaagctggggtcaggggcatttaatctaatgttatctcttctgcctgcccgcatcataaggttacttgagttcatcggatttagtgggaaccgggaactgggcctgctgcagctgcgagagggggcctccgggaggtccatgcgatcggctctctgctgtttaacaattctcgcattccacacatacattagtctcattctgggtaccggtgaagtcaacgttgcggaggctgaaagattactggccccattccttcaacagtttcctaatggttccctggttctgttctaccacgccagaatcgaactcctcaaggggaacctcgaagaagcccaagaggtctttcagaagtgcatcagcgttcaggaagagtggaagcaattccaccacttatgttattgggagctcatgtggatcaacgtgtttcagcagaactggatgcaggcttattactattcggacctgctgtgtaaggaaagtaaatggtctaaagcgacttacgtgtttctgaaagccgcaatcttaagcatgctgccagaagaggatgttgtggctacaaacgagaacgtggtaactctcttccgacaggtcgactcactgaaacaaagaatcgcaggaaaatctatccctacagaaaaattcgctgttcggaaggcccggcgctactcagcctccctgcctgctcccgtcaagctgatcctcccagctttagagatgatgtacgtatggaacggcttcagcatagtgagcaaacgtaaagacttgagtgagaatctgcttgtcacagtggaaaaagctgaagccgccctccagagccaaaattttaatagctttagcgttgacgatgagtgtctagtcaagttgttgaaggggtgctgtctcaagaatttgcaacgacccctacaggccgaactgtgttacaaccacgtcgttgaatccgagaaacttttaaagtatgaccactacctggtgccctttactctttttgaattggcgagtttatacaagtcacagggggaaatcgataaagctattaagtttctcgaaacggcccggaacaactacaaggactactctctcgagtcgcggctgcactttagaatacaggccgccttacacctttggcgcaagccatccagcgactag

SEQ ID NO: 66072 - DNA, 1842 bp, Artificial Sequence
  derived and/or modified sequence
atggatgctgtgctggcctgccgcctgcggggccggggcaacagagtggccgccctgcggccccggcccaggcctgggggcagcgctggccccagcccctttgccctgctgtgtgccggcctgagccctgagcccagggctggggtgggcagcgagttccctgcctggttcctgggcggcagcagccagaggaggaacatggccctgctgggcagcagagctgagctggaggctgatgaagatgtgtttgaagatgccctggagaccatctccatggccaaggagagcatgtaccacgccctgggctacagcaccatcgtggtgctgcaggccgtgctgacctttgagcagcaggacatccagaatggcatcagcgccatgaaggatgccctgcagacctgccagaagtacaggaagaagtacacagtggtggagagcttcagcagcctgctgagccggggcagcctggagcagctgtctgaggaggagatgcacgccgagatctgctacgccgagtgcctgctgcagaaggccgccctgacctttgtgcaggatgagaacatgatcaacttcatcaagggcggcctgaagatccgcaccagctaccagatctacaaggaatgtctgagcatcctgcacgagatccagaagaacaagctgcagcaggagttcttctatgaatttgagggcggcgtgaagctgggcagcggggccttcaacctgatgctgagcctgctgcctgcccgcatcatccggctgctggagttcatcggcttcagcggcaaccgggagctgggcctgctgcagctgcgggagggcgccagcggccgctccatgaggtctgccctgtgctgcctgaccatcctggccttccacacctacatcagcctcatcctgggcactggagaggtgaatgtggccgaggccgagcggctgctggcccccttcctgcagcagttccccaacggcagcctggtgctcttctaccacgccagaattgagctgctgaagggcaacctggaggaggcccaggaggtgttccagaagtgcatctctgtgcaggaggagtggaagcagttccaccacctgtgctactgggagctgatgtggatcaacgtgttccagcagaactggatgcaggcctactactacagcgacctgctgtgcaaggagagcaagtggagcaaggccacctacgtgttcctgaaggccgccatcctgtccatgctgcctgaagaagatgtggtggccaccaatgaaaatgtggtgaccctcttccggcaggtggacagcctgaagcagagaattgctgggaagagcatccccacagagaagtttgctgtgaggaaggcccggcgctacagcgccagcctgcctgcccctgtgaagctgatcctgcctgccctggagatgatgtatgtgtggaatggcttcagcatcgtgtccaagaggaaggacctgtctgagaacctgctggtgacagtggagaaggccgaggccgccctgcagagccagaacttcaacagcttctctgtggatgatgaatgtctggtgaagctgctgaagggctgctgcctgaagaacctgcagaggcccctgcaggccgagctgtgctacaaccacgtggtggagagcgagaagctgctgaagtatgaccactacctggtgcccttcaccctgtttgagctggccagcctgtacaagagccagggcgagattgacaaggccatcaagttcctggagacagccaggaacaactacaaggactacagcctggagagccggctgcacttccgcatccaggccgccctgcacctgtggaggaagcccagcagtgactag

SEQ ID NO: 66073 - DNA, 1842 bp, Artificial Sequence
  derived and/or modified sequence
atggacgccgtgctggcctgccggctgcggggccggggcaaccgggtcgccgcgctaagaccgagaccgcgacctggggggtccgctggcccatctcccttcgctctgctgtgcgctggactgtcccccgaaccacgggcaggagtagggagtgaattcccagcttggtttctgggcgggagctcacagagacgaaatatggctctgctgggatcccgtgctgaactggaggctgatgaagatgtgttcgaagacgcactggagaccatttcaatggctaaagagtcaatgtatcacgctttgggttattcgaccatagtggtcttacaagccgttttaacattcgagcaacaggacatccagaacggtataagtgcgatgaaggatgccctgcagacctgccagaagtaccgcaagaagtatacagtggtggaatccttctcaagcttgctttcccggggaagtctcgagcaactgtcagaagaggagatgcatgcagaaatctgttatgccgaatgtttgcttcagaaagccgctctgaccttcgtgcaggatgaaaacatgatcaattttatcaagggtggactcaaaattaggaccagttaccagatttataaagaatgcctttccatactccatgagatccagaagaataagctgcagcaggaattcttttatgagtttgagggaggagtaaagcttggctctggtgcctttaatttgatgttgtcacttctccccgcaagaatcatccgtctgctggagtttattgggttctcaggaaatcgcgagctcggcctgttgcagcttagggagggcgcctctgggaggtctatgagatctgctctctgttgtctgactatcctagcatttcatacatatatcagcctgatactgggaactggggaagttaatgtcgcagaggcagagcgattgctggcccctttccttcagcaatttcccaacggctctctagtcctcttttatcacgctcggatcgaactgctgaagggaaatctggaggaggcacaggaggtcttccagaaatgcattagcgttcaggaagagtggaaacaattccaccacctctgttattgggagcttatgtggatcaacgtatttcaacaaaactggatgcaggcttattattacagcgacctcctgtgcaaggagtccaaatggtcgaaggccacatacgttttcctgaaagctgctattctatctatgctgcccgaggaggatgtcgtggcaactaacgaaaatgtagtcactctgtttcgccaggtagacagtcttaaacagaggatcgctgggaagagtattcccaccgagaaatttgccgttaggaaggcccggaggtatagtgcaagccttcctgcacctgtcaaactcatacttcctgccctggagatgatgtacgtgtggaacggcttctctattgtgtctaagagaaaagacctcagtgaaaacctgttagttaccgtggaaaaggccgaagcggcactacaatctcagaattttaactccttctccgtcgacgatgaatgcctggtgaagctcctaaaaggatgctgcctgaagaaccttcagagacctcttcaagcagaactgtgttacaaccatgtcgttgaatccgaaaaactccttaaatatgatcattatttggtcccttttaccctgtttgaactggcttccttatataaaagtcagggggagatcgataaagccatcaaattcctcgaaacagcaagaaacaactataaagattatagcctggagagcagactgcacttcagaatccaggccgccctgcacctctggaggaagcctagttccgattag

SEQ ID NO: 66074 - DNA, 1842 bp, Artificial Sequence
  derived and/or modified sequence
atggatgccgtcctggcatgcagacttcgcggtagaggaaaccgcgtggcggctttacgccctcgtccaagacctggaggcagcgcgggaccgtcaccctttgccctcctctgcgctggcctctcacctgaacccagagctggagttggaagtgagtttcccgcttggtttctggggggaagcagccagcgccgaaatatggcccttctgggctcccgcgctgagcttgaggccgacgaggacgtgttcgaggacgccttggaaaccatctccatggctaaagagagcatgtatcatgccctggggtacagcacaattgttgtgctccaagccgtgttgacctttgagcaacaggacattcagaatggaatttctgctatgaaggacgcactgcagacatgccagaagtaccggaagaagtatacagtagtagaatccttttcatcattactgtcacgaggaagcctggagcaactcagcgaggaagagatgcacgccgaaatctgctacgcagagtgtcttctgcaaaaagcggcattaacattcgtccaggacgagaatatgattaattttatcaaaggaggcctcaaaatacgcactagctatcagatttacaaggagtgcctgagtatcctgcatgagatccaaaaaaataagctgcagcaggagtttttttatgagtttgaggggggagtgaaactggggtctggagccttcaaccttatgctctcactgctcccagccaggatcattaggctactcgagttcattggcttctctggaaatagagagcttggtttattacaattaagggagggcgctagtggaagatcgatgcgctccgccttatgttgcctgactatcctggccttccatacttatatatctttaatcctgggaaccggagaggtaaatgtcgcggaagccgaacgtctcttggctccgtttctgcagcagtttccaaatgggtcccttgtcctgttttatcacgccaggattgagctgctcaaggggaatcttgaggaggctcaggaagttttccagaaatgcattagtgtccaggaggagtggaagcaatttcaccatctgtgctattgggaactgatgtggatcaacgtatttcagcagaattggatgcaggcttactactactcagaccttctctgtaaggagtcaaaatggtctaaggctacctatgtgtttctcaaagccgctatattgtccatgctgcctgaggaggacgttgtggctactaacgagaatgtggttaccctgtttcgtcaggtcgattccctgaaacagcggatcgcaggtaaatcgatccctaccgaaaagtttgctgtgcggaaagcgagaaggtactctgcttctctgcccgcacccgtgaagctgatcttaccggctctggaaatgatgtatgtctggaacggatttagcattgttagcaagcgcaaagatctctccgagaatctccttgtgacagtagagaaggctgaggcagccctacaatctcagaactttaatagtttctccgtggacgatgaatgtctggtgaaattactgaaaggctgttgcttgaagaacttgcagaggcccctgcaagccgaactctgctacaaccatgtagtcgagtctgagaagctgctgaagtatgatcattacctagtcccttttacactcttcgagcttgcttcactatacaaatcccagggtgagattgataaagccatcaaattcctggaaactgctcgaaataactacaaggactatagtctagagtcacgactgcacttccgtattcaggcagccttgcacttatggcggaaaccaagcagcgattag

SEQ ID NO: 66075 - DNA, 3053 bp, Artificial Sequence
  derived and/or modified sequence
aagtggcccggccagcggcgcggcgtccggggaggaaatggatgctgtgctggcctgccggctccgggggcggggaaatcgagtagctgcactcaggccccgcccgagacccggagggagcgccgggccgtccccttttgccctcctttgcgctgggctgagcccagagccgagagcaggagtcggctctgagttccctgcttggtttttgggtggcagcagccagaggaggaatatggcgctcttaggcagccgagcggagctggaagcggacgaggacgttttcgaagatgccttggaaaccatctcaatggctaaggagagtatgtaccatgccttgggctacagtaccattgtggtgttgcaggctgtcctgaccttcgagcaacaggacatccagaacggcatttctgccatgaaggacgctttacaaacctgccaaaaatacaggaaaaaatacacagttgtagaatctttctcaagtcttctttctagaggatccctggagcaactgagtgaagaggaaatgcatgctgaaatctgttatgccgagtgtctcctacagaaagctgcactcacgtttgtgcaggatgaaaatatgatcaacttcatcaaaggtggactcaaaattagaacaagttaccaaatatataaagaatgtctttctatcctgcatgaaattcagaagaacaaacttcagcaggaattcttctatgagtttgaagggggtgtcaagcttggcagtggggcctttaatttgatgctgtcccttttaccagcaaggattatcagactactagaatttattggattttctgggaatagggagttgggcctcctgcagttacgtgaaggtgcttcaggaaggagcatgaggtctgcactgtgctgcttaaccatcttagcttttcatacttacatctccctaatacttggtacaggagaagtgaatgttgcggaagcagagcgtctcctggcacccttcctccagcagtttccaaatggctcactcgtgttgttttatcatgcccgaatagagttgctgaaagggaatcttgaagaggcacaagaagtatttcaaaaatgcatttcagttcaagaagaatggaaacagtttcaccatctctgctactgggagctaatgtggattaatgttttccaacaaaactggatgcaggcatattactattcagatctgctttgcaaagagagtaaatggtccaaggcaacttatgtgttcttgaaagcagcaattttgagtatgcttccagaggaggatgtagtagcaacgaatgagaatgtggtaactttattcagacaggtggacagcttgaagcagagaattgccgggaaatctatccctactgagaagtttgctgtgaggaaggctcggcgttactccgcctccttacctgcacctgtgaagctcatcttacctgccctggaaatgatgtatgtctggaatggtttttcaatagtgagcaaaagaaaagacctttctgaaaatctgttagtaactgttgaaaaagctgaggcagctttacaaagtcaaaattttaacagcttctctgtggatgatgagtgcttagtgaagttacttaaaggatgttgcctcaagaacttacagcggcccttgcaagctgaactatgttacaatcatgttgtggaaagtgaaaagctactgaagtatgaccactacctagtgccgttcactctatttgaattggcatctttgtataaaagccagggggaaattgacaaggccataaagttcctagaaactgcaaggaacaactacaaagattactccctggagtccagactacacttcagaattcaggcagctcttcacctctggagaaaaccttcctcagattgatcagaacttgaaggatggaatttttcctcaattagcatcggcatctgctatagattcaaccttatattaaagtggaaaaatgatcttgtgaataagagacaaaaaaacagtttttttggtcaatattttctatcatctgagagatttactgttggtctacataattttttttcctatggaatggcattctatattatctagaaaattcttatattttgcctcccccaaaagaatttcatattatttgaattagggggcgaagaagtcttttgaaagacttgcagatgcaatagtctaattagattatttatttttttaatgtgaaaattaatattgtttagcaaatagcttacaagttgagccaattttggatttgttgggtagttaaacttcagagatattttgttgcctgtatttaaatttcagaagataaataaatatcattgcatttaaaatagcttaacagtgaccttcagaagacttctgaaaaagacagtctgagaacatgaacacggatcgatataatgtacttcatgggttgaagagacctttctctataaaggatgatgcagtattcagttagtggttttttactcttcatttgattaaaggtggtgacgttttggagagactgattttgaatgtacttaagtctattataataacaaaattcaaaacccctgtgtatctaaagggaaggaagtgtcatattttaggaatttttcttaaccttagcaatgagagcctaaaatacatacatggattatttttcttctaggaagtaaatttcctgctgctttaaatgatatgtaaaatatcaataatttttacacttaagatgttggtaagacctagttttctaatctctctagcactgtgatgtctccttgtagataatctggaccttgcttagtcctttagttgggaaacagaatcagggcatagagcagaagagagcttgacactccatatggtcctggttctgctacccattagcgattagtgaggagacctttagggagtccactgtgccctgtgtgtcaccacattttcttctgtgaaatcaagattaaagaacagatgactttcaaggtctttttcagttttataactgtgagtctatgtattaggtatttattttcaacaaatgactttaaaatgtcgaatgcaaacc

SEQ ID NO: 66076 - protein, 1687 aa, Artificial Sequence
  derived and/or modified sequence
MTSSSPAGLEGSDLSSINTMMSAVMSVGKVTENGGSPQGIKSPSKPPGPNRIGRRNQETKEEKSSYNCPLCEKICTTQHQLTMHIRQHNTDTGGADHSCSICGKSLSSASSLDRHMLVHSGERPYKCTVCGQSFTTNGNMHRHMKIHEKDPNSATATAPPSPLKRRRLSSKRKLSHDAESEREDPAPAKKMVEDGQSGDLEKKADEVFHCPVCFKEFVCKYGLETHMETHSDNPLRCDICCVTFRTHRGLLRHNALVHKQLPRDAMGRPFIQNNPSIPAGFHDLGFTDFSCRKFPRISQAWCETNLRRCISEQHRFVCDTCDKAFPMLCSLALHKQTHVAADQGQEKPQATPLPGDALDQKGFLALLGLQHTKDVRPAPAEEPLPDDNQAIQLQTLKCQLPQDPGCTNLLSLSPFEAASLGGSLTVLPATKDSIKHLSLQPFQKGFIIQPDSSIVVKPISGESAIELADIQQILKMAASAPPQISLPPFSKAPAAPLQAIFKHMPPLKPKPLVTPRTVVATSTPPPLINAQQASPGCISPSLPPPPLKLLKGSVEAASNAHLLQSKSGTQPHAATRLSLQQPRAELPGQPEMKTQLEQDSIIEALLPLSMEAKIKQEITEGELKAFMTAPGGKKTPAMRKVLYPCRFCNQVFAFSGVLRAHVRSHLGISPYQCNICDYIAADKAALIRHLRTHSGERPYICKICHYPFTVKANCERHLRKKHLKATRKDIEKNIEYVSSSAAELVDAFCAPDTVCRLCGEDLKHYRALRIHMRTHCGRGLGGGHKGRKPFECKECSAAFAAKRNCIHHILKQHLHVPEQDIESYVLAADGLGPAEAPAAEASGRGEDSGCAALGDCKPLTAFLEPQNGFLHRGPTQPPPPHVSIKLEPASSFAVDFNEPLDFSQKGLALVQVKQENISFLSPSSLVPYDCSMEPIDLSIPKNFRKGDKDLATPSEAKKPEEEAGSSEQPSPCPAPGPSLPVTLGPSGILESPMAPAPAATPEPPAQPLQGPVQLAVPIYSSALVSSPPLVGSSALLSGTALLRPLRPKPPLLLPKPPVTEELPPLASIAQIISSVSSAPTLLKTKVADPGPASTGSNTTASDSLGGSVPKAATTATPAATTSPKESSEPPAPASSPEAASPTEQGPAGTSKKRGRKRGMRSRPRANSGGVDLDSSGEFASIEKMLATTDTNKFSPFLQTAEDNTQDEVAGAPADHHGPSDEEQGSPPEDKLLRAKRNSYTNCLQKITCPHCPRVFPWASSLQRHMLTHTDSQSDAETAAAAGEVLDLTSRDREQPSEGATELRQVAGDAPVEQATAETASPVHREEHGRGESHEPEEEHGTEESTGDADGAEEDASSNQSLDLDFATKLMDFKLAEGDGEAGAGGAASQEQKLACDTCGKSFKFLGTLSRHRKAHGRQEPKDEKGDGASTAEEGPQPAPEQEEKPPETPAEVVESAPGAGEAPAEKLAEETEGPSDGESAAEKRSSEKSDDDKKPKTDSPKSVASKADKRKKVCSVCNKRFWSLQDLTRHMRSHTGERPYKCQTCERTFTLKHSLVRHQRIHQKARHAKHHGKDSDKEERGEEDSENESTHSGNNAVSENEAELAPNASNHMAVTRSRKEGLASATKDCSHREEKVTAGWPSEPGQGDLNPESPAALGQDLLEPRSKRPAHPILATADGASQLVGME

SEQ ID NO: 66077 - protein, 164 aa, Artificial Sequence
  derived and/or modified sequence
MTSSSPAGLEGSDLSSINTMMSAVMSVGKVTENGGSPQGIKSPSKPPGPNRIGRRNQETKEEKSSYNCPLCEKICTTQHQLTMHIRQHNTDTGGADHSCSICGKSLSSASSLDRHMLVHSGERPYKCTVCGQSFTTNGNMHRHMKIHEKDPNSATATAPPSPLK

SEQ ID NO: 66078 - protein, 136 aa, Artificial Sequence
  derived and/or modified sequence
MTSSSPAGLEGSDLSSINTMMSAVMSVGKVTENGGSPQGIKSPSKPPGPNRIGRRNQETKEEKSSYNCPLCEKICTTQHQLTMHIRQHNTDTGGADHSCSICGKSLSSASSLDRHMLVHSGERPYKCTVCGQSFTT

SEQ ID NO: 66079 - DNA, 3576 bp, Artificial Sequence
  derived and/or modified sequence
  misc_feature (1261)..(1261): n is a, c, g, or t
  misc_feature (1307)..(1307): n is a, c, g, or t
  misc_feature (2728)..(2728): n is a, c, g, or t
  misc_feature (3454)..(3454): n is a, c, g, or t
  misc_feature (3569)..(3569): n is a, c, g, or t
gaattccgggtggctgcgctgcccttggtgactgcaagcccctcactgccttcctggaacccaagaacrrctttcttcacaggggccccacccagcctccacctccccatgtctcgatcaagttggagcccgccagtagctttgcggtggacttcaatgagcccctggacttctcgcagaagggcctggcctggtccaagtgaagcaggaaaacatctcctttctgagcccttcttccctggtcccctatgactgctccatggagcccatcgacctgtccatccccaagaacttcaggaaaggggacaaggatttggccactcccagcgaasscaagaagcctgaggaggaggcggggagcagcgagcagccctctccctgcccagcacccggcccttctcttcctgtaactttggggcccagcggaatcctggaaagccccatggcccctgctccggcggccaccccggaacccccagcacagcccctgcagggccctgttcagctggcggtcccaatctactcctcagccctggtcagcagccctccactcgtgggcagctcagccctcctgagtggcacagccttgctgcgtccactgcggcccaagcccccgctgcttttgccaaagccccccgtgacagaagagctgcccccgctggcctccattgcccagatcatctcatctgtatcctcggcccccaccctgctgaaaaccaaggtggcggacccagggcccgcaagcactggcagtaacaccacggcttcagacagcttaggaggttctgtccccaaagccgccaccaccgccacccccgctgccaccaccagcccaaaagagtctagtgagcctcccgctccagccagcagcccagaggctgcctctcccaccgagcagggcccagcgcggacgtcgaagaagaggggccggaaaagggggatgaggagccgaccccgcgccaacagcggcggggtggacctggactccagcggggagtttgccagcatcgagaagatgctggccaccacagacaccaacaagttcagtccgtttctgcagacagcggaggacaacactcaggatgaggtggccggagcccctgccgaccaccatgggcccagtgatgaagagcagggcagtcccccagaagacaagctgctgagggccaagcggaactcgtacaccaactgcctgcagaagatcacctgtccccactgtccccgggttttcccttgggccagctccctacagaggcacatnctcacacacactgacagtcagtcggatgcggagactgcagccgccncgggcgaagtgctagacctcacctcacgggacagagagcagccgtcggagggcgccactgagctccgccaggtcgcaggggatgcgcctgtggagcaggccacggcggaaacggcctcgccggtgcaccgggaagagcacgggcgtggggagagccatgagccggaggaggagcatggcactgaggagagcactggggacgccgacggcggaagaggacgcgtcgagcaaccagagcctggacctggacttcgccaccaagctcatggacttcaagctggcggagggcgacggcgaggcaggcccgggggcgcggcctcgcaggagcagaagctcgcctgcgacacctgtgggaagagcttcaagttcctgggcaccctgagccgccaccggaaggcgcacggccgccaggagcccaaggacgagaagggagatggcgccacgactgcagaggagggscccagccctgcccctgaacaggaggagaagccscccgagaccccggcagaggtggtggagtcggccccgggtgccggggaggccccggcggaaaagctcgcggaggagacggagggcccctccgacggggagagcgcggccgagaaaaggtcctcagagaagagcgacgatgacaagaaaccaaagacagactcccccaaaagcgtggccagcaaggcagacaagaggaagaaggtctgcagcgtgtgcaacaagcggttctggtcgctgcaggacctgacccggcacatgcgctcccacacaggggaaaggccatacaaatgtcagacctgcgagcgaaccttcaccttgaagcacagcctggttcgccaccagcggatccaccagaaagccaggcatgccaaacaccacgggaaggacagcgacaaggaagagcggggtgaggaggacagcgagaatgagtccacccacagcggcaacaacgccgtctcagagaacgaggctgagctggctcccaatgccagcaaccacatggctgtcacccggagccggaaggagggcttggccagtgccaccaaggactgcagccacagggaggagaaggtcacggcagggtggccgtctgagcctggccagggtgaccttaacccagagagcccggcggccctggggcaggacctgctggagccgcgcagcaagaggcctgcccacccaatcctggccacagctgatggcgcctcccagcacgtggggatggagtgacagcctcagtccccctcagcacagacaaaagccagcagagcaaagcgtctatacttcatggggtttcctcagtgccctttggctgttgaggagtgagagagagagagagagagagagagagagagagagagagacaagcaggagcgtggctgctcgctcagtgccatagccttaccgcagcctgcgcgggaggcccacagnccgtgccgattccagtgccttaactacttaccggatccctccatattatcatgggtgttgtatttttccaaaatgacttcttaaacaaaacaaatattataatgaattgtctggagaggacctcttcatttgagcattagcgttattttgtattggtgtgtgtgagcttgttcttgtgaatctgtgatagcaccgtttgttctgtgagctggaaacagaaggaaaaaacatacccttgggtacccatagccaataactggaagaaaatgatgtgaatttcatgtaaatgaccagaggaaagatggataagatgataatttcttaaatagacattttccttttttctttgtgcttcatggtggagctgtcatctggtccttggtattacaggatgtggttgatgaaggtttccaatatggtttcaggccaaaaccagggaagattctagcttcagcctcatgtcattccagtctgtcagcattagacatggtcactgttcaagtttcaagacatccattcttaactatagagaagagttactcccctggcgtcttaacctatggaaaacatgcacggataggatatatttgattgcctcctcttccctttcagtatatgtattattaatattattattattattattattattagttcatcagtttgctgttctctgcagtgagcagaatcaaatgggcaatatttgtcctgggagacctgtgccgnacccaggtccccgtgttaacgtgtgcctgcggttgtggttggcaccctcgggtggtagctcttctactgtaatgagacaagcctttcttctgtcactgcagaatttagaaggggnggaattc

SEQ ID NO: 66080 - DNA, 5064 bp, Artificial Sequence
  derived and/or modified sequence
atgacaagttcctcccctgcagggcttgagggatctgatttgagctctataaacaccatgatgtccgcagtgatgagtgtaggtaaagtcactgagaatgggggatcgccacagggaattaagagtccttcaaaaccgcctgggcctaatcggattggccgacgcaatcaggaaactaaggaggaaaagagctcttataactgtcccttgtgcgagaagatatgcactacgcaacaccagctgactatgcacataaggcaacacaacacggatacaggcggcgccgaccactcctgctccatctgtggcaagtcactttctagcgcatccagcctggaccgccatatgttggtgcactccggggagaggccctacaagtgcaccgtatgtgggcaaagttttaccactaacgggaacatgcatcgtcacatgaagattcacgagaaagatcccaattcagccaccgccacagccccaccgagccccttgaaaagaagacgcctgtcttccaagcgtaaattgagtcacgatgctgagagcgagcgcgaagaccccgcccccgcaaaaaagatggttgaggatggccaatccggcgatctagagaaaaaagccgacgaagtcttccattgcccagtgtgtttcaaagaattcgtgtgcaagtatggtcttgagacccacatggaaacccatagtgataatccgctgcgctgcgacatttgctgcgtcacttttagaactcataggggcctgctgaggcacaacgccctcgtgcataaacagctgcccagagacgctatgggacgaccatttatccagaacaaccctagtatccccgctgggtttcacgatcttggatttacagactttagttgccgcaaatttcccaggatctcccaagcctggtgtgagacaaatctgcgtagatgtattagtgagcagcaccgcttcgtgtgcgacacctgtgataaagcctttccaatgttgtgttccttggcccttcacaagcaaacccatgtggcagccgaccaaggccaggaaaagcctcaggcgactcccctcccgggtgacgcactcgatcagaaggggtttttggcactcctggggctccagcatacgaaagacgtgcggcctgcaccagctgaggaacccttgcccgacgataatcaggccattcaactgcagaccctgaagtgccagcttccccaggaccctggatgcacaaaccttctttctctgagcccattcgaggcagccagtctggggggctcactgactgtcctgcccgccacaaaggactcgattaaacacctgtcactgcagccattccagaagggattcattatacagcctgactcaagcatcgtagttaaacccatcagcggagaatcggccatcgagctggccgacatccagcagatcctgaaaatggcggcatcagcacctccacaaatttcattgcctcctttctccaaggcacctgccgcccctctgcaggctatatttaagcatatgccacccctgaagcccaaaccactcgtcacgcctcgcacagtggtagctactagcacccccccccctctgattaatgcacagcaggcaagcccgggctgcatctccccatcactgcctcccccacctctcaagcttctgaaaggctctgtggaggccgcatccaacgcccacctgctgcagagtaaatcgggcactcagccccacgctgcaacacgactgtcgttacagcagcctcgagcggagcttcccggtcagcccgaaatgaagacgcagttggaacaggattctatcatcgaggctctgctccctctatctatggaagccaagatcaaacaggagattaccgagggagagctgaaagcgttcatgaccgcccccggaggaaaaaaaacccctgccatgagaaaagtgctatatccatgccgcttctgcaatcaagttttcgcgtttagtggggtgctcagagcccacgtcagatcacacctgggcatctctccctaccagtgtaacatctgtgactacattgcggcggacaaagctgccttgattagacacttgagaacgcactccggtgagcgcccgtacatatgtaagatctgccattacccatttacagtgaaggccaattgtgagcgccatcttcgcaaaaaacatctcaaggcaacacgcaaagatattgagaagaatatagaatatgtgagcagctctgctgccgagttggtcgacgcattttgcgcccctgacaccgtgtgtagactgtgtggcgaggacctgaagcactatcgggccctgcgcatccacatgcgaactcactgcggccgcggcctcggaggagggcacaaagggcgcaagcctttcgagtgtaaagagtgttcagcggcctttgcggctaagaggaactgcatccatcacattctgaagcaacacctgcacgtaccagaacaggacatcgaaagctatgtgttggccgctgatgggcttggaccggcggaggcacctgccgctgaggcaagcggtcgcggagaggacagtggttgcgccgcactcggggactgtaagcccctaactgcatttcttgaaccccaaaatggctttttgcaccggggcccaacccagccccctcctcctcacgtctcgattaagctggagcccgcatccagtttcgctgtcgactttaatgaacctctggacttcagccagaaaggcctggccctagtgcaagttaaacaggagaacatctctttcttatctcctagcagccttgtgccctacgactgttcaatggagccgatcgacttatccatcccaaagaacttcaggaaaggtgataaagatctcgctaccccttccgaagccaagaagccagaagaggaagctgggtcctcagaacagccaagcccttgcccagcgcccggccctagcctgcccgtcactttgggcccttctggcatcttagaatcccctatggcgcccgcccctgctgccacccccgaaccccccgcccagcccctccaaggcccggtacagctggcagtgcccatttatagttccgccctcgtaagttcccctcctttggtgggatcgtctgccttgctgtccggaacggccttgcttagaccactcagaccgaagcctcctctcctcctcccaaaaccccccgtaacagaagaactgccgcccctagcctccattgcccagataattagttccgtatcctcagctcccaccctgctgaagaccaaggtggccgatccagggcctgcgtcaaccgggagcaacaccacggctagtgactccctgggtggcagcgttcccaaggctgccacaaccgccacgccagctgcaaccactagcccaaaggaaagctccgagcctcccgcgccggcttccagccccgaagccgcgtcgccgactgaacagggccccgcaggcactagcaaaaagcggggcagaaaaagagggatgcgatcaagacccagggccaactccggcggagtcgatctggactcaagcggcgaattcgccagtatcgagaagatgctcgcgacaactgacaccaataagttttctcctttcctgcagaccgctgaagataatactcaggatgaagtggccggcgctcccgcggaccatcatgggccttccgatgaagaacaaggctcaccccctgaggataagttacttagggctaaacggaattcctacactaactgtcttcaaaagatcacctgtcctcactgtcccagggtgttcccctgggcatcctcgctgcagaggcatatgctgacgcacactgattcacagtcagatgccgagaccgccgctgctgcaggagaggtgctcgacctcacatcccgcgaccgcgagcagccctccgaaggtgccaccgagttgagacaggtcgctggggatgcgcccgtcgagcaagccaccgccgaaactgccagcccagtccaccgggaagagcacggcaggggcgagagccatgagcccgaggaagaacatggcaccgaagagagcacaggtgatgctgacggcgcagaggaggacgcttccagcaaccagtccctcgacctagacttcgcaacaaaactgatggacttcaaattggcagaaggagacggcgaggcgggtgccggaggagcagcctcacaggagcagaagctagcctgtgatacatgcggcaaatcatttaaattcctggggacgctcagccggcatagaaaggctcacggaaggcaagaaccgaaagatgaaaaaggggatggcgcctccacagctgaagagggccctcagccagccccggagcaagaagaaaaacccccagagactccagctgaggtggtcgagtccgcaccaggagcaggtgaggcacccgccgagaagctggccgaggagaccgagggccctagcgacggggagtccgctgccgaaaagagaagctctgaaaaatctgatgacgataaaaaacctaagactgatagtccaaagtctgtcgcgtccaaggctgacaaacgcaagaaggtttgttctgtatgcaataagcgcttctggtccttgcaggatctaacgcgtcatatgaggtctcatactggggagaggccatataaatgtcagacctgcgagcggacatttaccctgaagcactcgctggtccggcatcaacggattcatcagaaggcacggcatgccaagcaccatgggaaggatagtgacaaggaggagcgaggcgaggaagacagcgaaaatgaaagcacacactcaggcaacaatgccgtgtcagaaaacgaggcggagctcgcccccaatgcgagcaatcacatggcggttactaggtctcgcaaggaaggcttggcatctgctactaaggattgctcacatagagaggaaaaggtgaccgccggctggccaagcgaacctggccagggggatctgaaccccgaatccccagcggccttggggcaggatctcctagaaccgcggtctaagcgacccgcacatcctatcctggccaccgcggacggggcgtcacaattggtggggatggaatag

SEQ ID NO: 66081 - DNA, 5064 bp, Artificial Sequence
  derived and/or modified sequence
atgaccagtagctccccagcaggcctcgagggctccgatctgtctagcataaacaccatgatgtcggctgtcatgagtgttgggaaggtaacagaaaatggtgggtctccccagggcatcaaatcccctagcaagccacccggtcccaatcgcattggccgaagaaaccaggaaaccaaggaggagaaatcctcttacaactgtcccctgtgtgaaaagatatgcactacgcagcaccaattgactatgcacatccgccaacacaacacagatacgggcggagctgaccattcctgcagcatctgcgggaagagcctgtcatctgcttcatcattggatcggcacatgttagtgcacagtggcgagcgaccttataagtgcactgtgtgtggccagtcattcacaaccaatgggaacatgcacagacacatgaaaattcatgagaaggatcccaacagcgccaccgctaccgcccctccctctcctctcaaacggcgcagacttagttcaaaacggaagctgtcacacgacgccgaatctgagagagaggatcctgcacctgccaagaagatggttgaagacggtcagtcgggagatctggagaagaaggcggatgaagtgtttcattgcccagtgtgtttcaaagaatttgtgtgcaagtacggcctggagactcatatggagacccactccgacaacccattgcgatgtgatatctgctgcgttacatttcggacacatcgaggcttgctccggcacaacgcactggttcacaagcagctccccagggacgcgatgggcaggccgtttattcagaacaatcctagcatacctgccggcttccacgacctgggtttcactgatttttcctgtaggaaattccccaggatctctcaggcgtggtgcgaaacgaacctgaggcggtgcatcagcgaacaacatcgctttgtgtgcgatacctgtgacaaggcctttcccatgctgtgcagcctcgccctgcacaagcagacacatgtagcggcggaccagggtcaggaaaaaccccaggccacaccgctacccggcgacgccctcgaccaaaaagggtttctggcactgctgggcttacagcacacaaaagatgtgcggccagcgccggccgaagaacccctacctgatgacaatcaggcaattcagctgcagacactgaaatgtcaactacctcaagaccccggctgtactaacctgctttccctgagtcccttcgaggccgccagcttgggaggaagcctcacagtactgccagccaccaaagacagtatcaagcacctgagtttgcaaccttttcagaagggcttcataatccagccagatagctcaattgtggtgaaaccaatctccggcgaatccgccatcgagctggcagacatccagcagattctgaagatggcggccagcgcaccgccccagatctccttacccccatttagcaaagctcccgccgctccgctacaggcgatctttaagcatatgccaccactaaagccaaaaccccttgtgactcccagaacagtagtggccacctctacccctcccccgctgattaacgctcagcaggcttcccccggttgcatttccccctcactcccaccccctccattaaagctattaaagggatccgttgaggcagcctcaaacgctcatctgctgcagagtaagtctgggacacagccacatgctgccactaggttgagcctacagcagccacgagcggagcttccagggcaaccagaaatgaaaacacaactggagcaggattccattattgaggctctgctgcctctgtccatggaggccaaaatcaaacaggaaattaccgagggtgagctcaaggccttcatgactgctcctggagggaaaaaaacaccagctatgagaaaagtgctctatccttgcaggttctgtaatcaggtgttcgcctttagcggcgtgctgcgcgcccatgtgcgttctcacctggggatcagcccctatcagtgcaacatctgcgattatatcgctgccgacaaggctgcactcatccgacatctccggactcatagcggggagagaccttatatctgcaagatttgccattacccattcaccgtgaaggctaattgtgaacgacaccttagaaaaaagcacctgaaggccactcggaaagacattgagaaaaatatagagtacgtttcttcctctgccgctgaactggtggacgccttctgcgctcccgacaccgtgtgtcgcctgtgcggagaagacttaaagcactacagggcgctcaggatacatatgcggacccattgcggtaggggccttggcgggggacacaagggaagaaagcctttcgagtgtaaggagtgcagcgctgccttcgcggctaagcggaattgtatccatcacattctgaaacaacatctgcacgtgcccgagcaggatattgagtcatacgtccttgctgccgacggcctgggtccagcggaggctccggccgctgaggcttcgggtagaggggaggactctgggtgtgctgctctgggcgattgcaaacctttaaccgcatttttagaaccacaaaatgggttcctccacaggggacctacacaacctccccctccccacgtctctattaaactggagcctgctagtagcttcgcagtagatttcaacgagccattggattttagccagaaaggacttgctctggtccaggtgaaacaagaaaatatctcatttttatccccaagctcactagtcccatacgattgtagcatggagcctattgacctgagcatccccaagaatttccggaaaggagacaaggacctggcgactccgagtgaggcaaagaaaccagaggaggaggctgggtcatcagaacagccttctccctgccctgctcctggcccttctctgcccgtgacactgggaccttcaggaatcctggagtcacctatggcccccgcccctgctgctacaccagagcccccagcccagccattacagggcccagtgcagttagcagtgcccatctattcttcggccctcgtgtcaagcccacctctggtcggtagcagcgctctgctctccggaaccgcgctgctgcggccgttacggccaaagccgcccctgcttctaccaaaacctcccgtgacagaggaactgcctccactggcatctattgctcagataatctcatcagtgagcagcgcacctacactgttaaagaccaaggttgcggatccagggcctgcctcaaccggctctaacacaaccgcatcagattcactcggcggatcagtgcccaaagccgccacaaccgccacccccgcagcaacaaccagcccaaaggagtcttctgaaccgccagctcctgcgagctccccagaggcagcgagccctaccgaacaggggccggccgggactagcaagaagagaggtaggaagcggggcatgagatccaggcccagggctaattccggaggtgtcgatttggatagctcgggtgaattcgcgtccatcgaaaagatgttggctacaactgacacaaataaatttagtccattcctgcaaactgcggaggataatactcaggacgaggtcgctggagctcccgctgaccaccatgggccgagcgatgaggagcagggatcccctcccgaagacaagcttctcagggcaaaaagaaacagttacactaattgtcttcagaagataacttgcccccactgtcctcgggtattcccctgggcaagcagcctacagcgccatatgctgacccacacagattcacagagcgacgccgagacagccgctgccgctggagaggtactagacttaacatctcgggaccgagaacagccatccgaaggtgcaacggagctgcggcaagtcgccggggacgcaccagtggagcaagctactgccgagacagccagccccgtgcatagagaggaacacggcagaggagaaagtcacgagcccgaggaggaacacggcactgaagagtctactggggacgccgatggtgccgaagaagacgcctcttctaaccaatccctcgatctggacttcgctactaaattgatggacttcaagctcgccgagggggatggcgaggccggcgccgggggtgctgcctcacaagaacagaaactggcatgcgatacctgcggcaagtcttttaagtttcttgggaccctgagccgtcatcgaaaagcacatggacggcaagagcctaaggacgagaagggggatggggcatcgaccgctgaagaaggtccccagcccgctccagagcaagaagaaaagcctcccgagaccccagcggaggttgtcgagagcgcacccggggccggcgaagcccctgccgaaaagctggcggaagagacggaaggaccctctgatggcgagtcagctgccgaaaagagatcatcagaaaaatctgatgacgataagaaaccgaaaaccgattctcccaagtccgtcgcgagcaaggccgacaagcggaagaaggtgtgttccgtgtgtaacaaaaggttctggtccttacaggacctcacccggcacatgcggtcacatacaggcgagcggccatacaaatgccaaacttgcgagaggaccttcaccctcaaacactctctggttcgccatcagcggatccatcaaaaagcacggcacgctaagcaccacggaaaggactcagataaggaagaacgcggagaagaggattccgagaacgagtctacgcattcggggaacaatgccgtttccgaaaatgaagccgaactggcccccaacgcttccaaccatatggctgtaacccggagcaggaaggaaggacttgcctccgctacgaaagactgctcccaccgggaagaaaaggtcacggcaggatggccttctgaacctgggcagggcgatctgaacccagaatccccggccgcccttggacaggacctgcttgagccccgcagcaagcggcccgctcatccaattctggccacagcagatggcgccagccagctggtgggaatggagtag

SEQ ID NO: 66082 - DNA, 5064 bp, Artificial Sequence
  derived and/or modified sequence
atgaccagcagcagccctgctggcctggagggcagtgacctgagcagcatcaacaccatgatgtctgctgtgatgtctgtgggcaaggtgacagaaaatggaggcagcccccagggcatcaagagccccagcaagcccccaggccccaaccgcatcggcagaagaaaccaggagaccaaggaggagaagagcagctacaactgccccctgtgtgagaagatctgcaccacccagcaccagctgaccatgcacatccggcagcacaacacagacaccggcggcgctgaccacagctgcagcatctgtgggaagagcctgagcagcgccagcagcctggacagacacatgctggtgcacagcggggagcggccctacaagtgcaccgtgtgtggccagagcttcaccaccaatggaaacatgcaccgccacatgaagatccacgagaaggaccccaacagcgccacagccacagccccacccagccccctgaagagaagaaggctgagcagcaagaggaagctgagccatgatgctgagagcgagagagaagatcctgccccagccaagaagatggtggaggatggccagagcggggacctggagaagaaggcagatgaggtgttccactgccctgtgtgcttcaaggagtttgtgtgcaagtatggcctggagacccacatggagacccacagcgacaaccccctgcgctgtgacatctgctgcgtgaccttccgcacccaccggggcctgctgcggcacaatgccctggtgcacaagcagctgcccagagatgccatgggccggcccttcatccagaacaaccccagcatcccagctggcttccatgacctgggcttcacagacttcagctgcaggaagttcccccgcatcagccaggcctggtgtgagaccaacctgcggcgctgcatcagcgagcagcacagatttgtgtgtgacacctgtgacaaggccttccccatgctgtgcagcctggccctgcacaagcagacccacgtggccgctgaccagggccaggagaagccccaggccacccccctgcctggagatgccctggaccagaagggcttcctggccctgctgggcctgcagcacaccaaggatgtgcggcctgccccagctgaggagcccctgcctgatgacaaccaggccatccagctgcagaccctgaagtgccagctgccccaggaccccggctgcaccaacctgctgagcctgagcccctttgaagctgccagcctgggcggcagcctgactgtgctgcctgccaccaaggacagcatcaagcacctgagcctgcagcccttccagaagggcttcatcatccagcctgacagcagcatcgtggtgaagcccatcagcggggagagcgccatcgagctggccgacatccagcagatcctgaagatggccgccagcgccccaccccagatcagcctgccccccttcagcaaggccccagctgcccccctgcaggccatcttcaagcacatgccacccctgaagcccaagcccctggtgacccccaggacagtggtggccaccagcaccccacctcctctcatcaatgcccagcaggccagccctggctgcatcagccccagcctgcccccaccacccctgaagctgctgaagggctctgtggaggccgccagcaatgcccacctgctgcagagcaagagcggcacccagccccatgctgccacccggctgagcctgcagcagcccagggctgagctgcccggccagcctgagatgaagacccagctggagcaggacagcatcatcgaggccctgctgcccctgtccatggaggccaagatcaagcaggagatcacagaaggagagctgaaggccttcatgacagcccctgggggcaagaagaccccagccatgaggaaggtgctgtacccctgccgcttctgcaaccaggtgtttgccttctctggagtgctgcgggcccacgtgcgcagccacctgggcatcagcccctaccagtgcaacatctgtgactacatcgctgctgacaaggccgccctgatccgccacctgcggacccacagcggggagcggccctacatctgcaagatctgccactaccccttcaccgtgaaggccaactgtgagcggcacctgaggaagaagcacctgaaggccaccaggaaggacatcgagaagaacatcgagtatgtgagcagcagcgctgctgagctggtggatgccttctgtgccccagacacagtgtgccgcctgtgtggggaggacctgaagcactaccgggccctgcgcatccacatgaggacccactgcggccggggcctgggcggcggccacaagggcaggaagccctttgagtgcaaggagtgcagcgctgcctttgctgccaagaggaactgcatccaccacatcctgaagcagcacctgcacgtgcctgagcaggacatcgagagctatgtgctggccgcagatggcctgggccctgctgaggccccagctgctgaggccagcggccgcggggaggacagcggctgtgccgccctgggggactgcaagcccctgacagccttcctggagccccagaatggcttcctgcaccggggccccacccagcccccacctcctcatgtgtccatcaagctggagcccgccagcagctttgctgtggacttcaatgagcccctggacttcagccagaagggcctggccctggtgcaggtgaagcaggagaacatctccttcctgagccccagcagcctggtgccctatgactgcagcatggagcccatcgacctgagcatccccaagaacttcagaaaaggagacaaggacctggccacccccagcgaggccaagaagccagaggaggaggccggcagcagcgagcagcccagcccctgcccagcccctggccccagcctgcctgtgaccctgggccccagcggcatcctggagagccccatggccccagccccagctgccaccccagagcccccagcccagcccctgcagggccctgtgcagctggccgtgcccatctacagcagcgccctggtgagcagcccccccctggtgggcagcagcgccctgctgtctggaacagccctgctgcggcccctgcggcccaagccacccctgctgctgcccaagccccctgtgacagaggagctgccccccctggccagcatcgcccagatcatcagctctgtgtcctctgcccccaccctgctgaagaccaaggtggccgaccccggccctgccagcacaggcagcaacaccacagccagtgacagcctgggcggctctgtgcccaaggccgccaccacagccaccccagctgccaccaccagccccaaggagagcagcgagcccccagccccagccagcagccctgaggccgccagccccacagagcagggccctgctggcaccagcaagaagaggggcaggaagaggggcatgaggagccggccccgggccaacagcggaggagtggacctggacagcagtggagaatttgccagcattgagaagatgctggccaccacagacaccaacaagttcagccccttcctgcagacagctgaggacaacacccaggatgaggtggccggggccccagctgaccaccacggccccagtgatgaggagcagggcagccccccagaggacaagctgctgcgggccaagaggaacagctacaccaactgcctgcagaagatcacctgcccccactgccccagggtcttcccctgggccagcagcctgcagaggcacatgctgacccacacagacagccagagtgatgctgagacagctgctgctgctggggaggtgctggacctgaccagccgggaccgggagcagcccagcgagggcgccacagagctgcggcaggtggccggagatgcccctgtggagcaggccacagctgagacagccagccctgtgcaccgggaggagcacggccgcggggagagccatgagcctgaggaggagcacggcacagaggagagcactggagatgctgatggagcagaagaagatgccagcagcaaccagagcctggacctggactttgccaccaagctgatggacttcaagctggccgagggagatggagaggccggggccggcggggccgccagccaggagcagaagctggcctgtgacacctgtgggaagagcttcaagttcctgggcaccctgagccgccacaggaaggcccacggccggcaggagcccaaggatgagaagggagatggagccagcacagctgaggagggcccccagcctgcccctgagcaggaggagaagcccccagagaccccagctgaggtggtggagagcgcccctggagctggggaggccccagctgagaagctggccgaggagacagagggccccagtgatggagagagcgctgctgagaagaggagcagcgagaagagtgatgatgacaagaagcccaagacagacagccccaagtctgtggccagcaaggctgacaagaggaagaaggtgtgcagcgtgtgcaacaagcgcttctggagcctgcaggacctgaccaggcacatgaggagccacactggagagcggccctacaagtgccagacctgtgagaggaccttcaccctgaagcacagcctggtgcgccaccagaggatccaccagaaggcccggcatgccaagcaccacggcaaggacagcgacaaggaggagcggggggaggaggacagtgaaaatgaaagcacccacagcggcaacaatgctgtgtctgaaaatgaggccgagctggccccaaatgccagcaaccacatggctgtgaccaggagcaggaaggagggcctggccagcgccaccaaggactgcagccaccgggaggagaaggtgacagctggctggcccagcgagcccggccagggcgacctgaaccctgagagccctgctgccctgggccaggacctgctggagcccaggagcaagaggcctgcccaccccatcctggccacagcagatggagccagccagctggtgggcatggagtag

SEQ ID NO: 66083 - DNA, 5064 bp, Artificial Sequence
  derived and/or modified sequence
atgaccagcagcagccccgccggcctggagggcagcgacctgagcagcatcaacactatgatgtccgccgtgatgtcagtgggcaaggtgactgaaaacgggggttcaccccaaggcatcaaatccccctctaaacctccggggcctaacagaatcggccgaaggaatcaggaaaccaaggaggagaagtcatcatataattgtcccctgtgtgagaagatatgtaccactcagcaccaactgacaatgcatatccgccagcacaatacagacacaggtggggcagatcactcctgcagtatttgtgggaaatcattatcctccgcttcttccctcgacagacacatgctcgtccactccggcgagaggccttataagtgcaccgtgtgcgggcagagctttacaaccaatggaaacatgcatcggcacatgaagattcatgaaaaagacccaaattcggcgacagctaccgcgccgccttcaccccttaagagacgccggctaagttcaaaaaggaaattaagccacgacgctgaatccgaacgcgaagaccctgcacccgcgaagaaaatggtagaggatggccagtctggagatctggagaaaaaagctgacgaggtgtttcactgtcctgtatgcttcaaagagtttgtttgcaagtatggcctcgagactcatatggaaacccatagcgataaccctctgcggtgtgacatctgctgcgtgacattcaggacacataggggtttgctgcggcacaacgccctagttcataaacagctgccacgcgacgcaatgggccgccccttcattcagaacaacccctctataccagccggcttccacgatttaggattcaccgattttagctgccgtaagttcccccgaataagccaggcttggtgtgaaacaaaccttagaagatgtatcagtgagcagcatagatttgtctgcgatacatgtgataaagccttcccgatgttgtgttcactggcactccataaacagactcatgtcgccgccgatcaggggcaagaaaagccgcaggccactcctctgccaggagatgctctcgatcagaaaggattcctcgccctgctgggcctgcagcacactaaagacgtgcgtcccgcccccgccgaagaaccacttccagacgataaccaagcgattcagctccagacgttgaaatgtcagcttcctcaggacccagggtgcacaaatcttctctctctgtccccctttgaagctgcctcactaggcggcagtctgacggtgctccccgctaccaaggatagcattaagcacctgagcctgcagccattccagaaggggtttatcattcagccggattcctctatcgtggtgaaaccgatttccggagaaagcgccattgaattggcagacattcagcaaatactcaagatggccgcctcagcaccacctcagatatcactgccccctttttccaaggcgccagccgcccccctccaagccatatttaaacacatgcctcccctgaagccaaagccactcgtgacacctcgaaccgttgtagccaccagcacacccccacctctgatcaacgctcagcaagcgtctcctgggtgcatctcgcctagcctgccgccaccgcccctgaagctgcttaaaggatcagtcgaggctgccagcaatgcccatctgttacagagtaagtccggcacccaaccccacgctgccaccagactgtccttacagcagccccgggccgagcttcctggtcagccagaaatgaaaacacagctggagcaggattccattatcgaggccctgcttcctctgagcatggaagcaaagatcaagcaagaaatcaccgagggcgaactcaaagccttcatgaccgcccctggcggtaagaaaaccccagcaatgcgcaaggtgctctatccttgtagattctgcaaccaggttttcgctttctctggagtcctgcgggctcacgtacggtcacacttggggatcagtccataccagtgcaatatctgtgactacatcgctgccgacaaggccgcccttataaggcatctgcgcacccattccggggaacggccatatatctgcaagatatgtcattacccattcactgtcaaggcgaattgcgagcggcacctccgcaaaaagcatctcaaggcaacccggaaggatattgagaagaatatcgagtatgtgtcttcttctgccgcagagctcgtagatgcattttgtgcacccgataccgtgtgccgactgtgcggggaggatctgaaacactatagagcccttagaatccacatgcgcacacactgcggtagaggtttagggggtggccataaaggacgaaaaccatttgagtgcaaggagtgcagcgctgcctttgccgcaaagcgaaattgcattcatcacattcttaagcaacacctgcatgtcccggagcaagatattgaaagttacgtactggctgccgacgggctgggaccagccgaggctcctgctgctgaagcaagtggcaggggagaggattccggctgcgctgcactgggagactgcaaaccactgactgccttcctggagccccagaatgggtttctgcacagaggacctacccagccacctcctccacatgtttccatcaaactggaaccagcatcctcctttgcagtggactttaacgagcctctggactttagccagaagggcctagccctagttcaagtcaagcaggagaacattagctttctcagcccctcctcactggtcccatacgactgctctatggaacccatcgacttgagcattcccaagaattttcggaaaggggacaaagaccttgctacaccctccgaggccaagaagcccgaagaagaagctgggtcatctgaacagccctccccatgtccagcgcccggaccatccctgccagtcactcttggcccatctggcattcttgaaagccctatggcccccgctccagctgccacccccgaacctccagcgcaacccttgcaggggcccgttcaacttgccgtaccaatctattcatccgctttggtgagctctcctccactcgtgggctcgtctgctctgctgagcgggaccgccctgctcaggcccttgcgccccaagccccctctattactgcctaagcccccagtcacagaggaactgcccccgcttgcgagcatcgctcagatcattagctctgtgtccagcgctcctactctgctgaagaccaaagtcgcagaccctggacctgccagcactgggtccaataccactgcaagtgacagcttgggaggaagcgtacctaaggcggccactactgccacaccagccgctacgacgtcacctaaggaaagctccgagccccccgcgccggctagctccccagaagctgcttcgcccacagagcagggtcccgctggcacctcaaagaaacgtggcagaaagcggggaatgagaagccgaccccgggcgaactcaggcggcgtcgacctggattcatccggcgagttcgcaagcattgagaagatgctggccacgacagatactaataagttctcgccctttttacagaccgctgaggataacacacaggatgaggtggccggagcccccgctgaccatcatggccccagtgatgaggagcaagggagccctcctgaagataagcttctgcgggctaagcgcaactcttacaccaactgtctgcagaagattacatgcccccattgccccagggtgttcccgtgggcctcttcccttcagaggcatatgctgactcacaccgattctcagagtgacgcagagacagccgctgcagcaggcgaggtgctggatttaaccagcagagatagagagcagccttccgaaggggcaaccgagctgcgacaggttgccggcgatgcacctgtggaacaggctacggcggagacagccagccccgtccatcgcgaggaacatgggagaggggaatcacatgaaccagaagaggaacacggaaccgaggaaagcaccggcgatgcagacggcgctgaggaggatgcgagttccaatcaaagtttggacctggacttcgctacaaagctgatggacttcaagctggccgagggcgacggagaagctggagctggaggtgctgcctcccaggaacagaagctggcctgcgacacctgtggaaagagttttaaattcctaggtaccctctctcggcatcgcaaagctcatggcagacaggaaccaaaggatgaaaaaggtgacggagcctccactgccgaagaaggacctcaacccgcccccgagcaggaagagaaacctcccgaaactcccgcagaggtggtggagtctgccccgggggccggagaggctccagccgagaagctcgctgaggagacagagggaccgtccgacggggagtcagctgctgagaagcgaagctcagaaaagtctgacgatgacaagaagcccaaaaccgactcacctaagtcggtagcttcgaaagccgataagaggaagaaagtttgctcggtttgtaacaagcggttctggagcctacaagaccttacccgtcatatgcgctctcacacaggtgagagaccctacaaatgccagacctgcgaacgaaccttcactctgaaacatagtcttgtacggcaccagcggattcaccaaaaggccagacacgccaaacatcatggcaaagacagtgacaaggaggaacggggtgaagaagactctgagaatgaaagtactcattctggcaataacgctgtgtccgaaaacgaggccgagttggcaccaaacgctagcaatcacatggccgtgactagaagccggaaagaaggcctggcctctgccactaaggactgttcgcatagggaggagaaggtaacggctggatggccgagtgaaccagggcagggggacttgaatcccgagtcacctgcagctttgggacaggatctgctggagcccagatccaaaaggccagcacatcccatactggcaacggccgacggggcatcgcagctggtgggcatggagtag

SEQ ID NO: 66084 - DNA, 5064 bp, Artificial Sequence
  derived and/or modified sequence
atgaccagcagcagccccgccggcctggagggcagcgacctgagcagcatcaatactatgatgagtgcagtcatgtccgtggggaaagtgacagagaatggcggcagtccgcaaggcatcaaaagcccatcgaaacctcccggtcccaatagaatagggagaaggaaccaggaaacgaaagaagaaaaaagcagttacaactgcccgctgtgtgaaaaaatctgtacaacccagcaccagcttacaatgcacatccgacagcacaataccgacacaggaggtgcagatcactcttgctctatatgtggcaagtcgctgtcctctgcgagttccctggacagacatatgttagttcactccggagagcgcccctacaagtgcacggtgtgcgggcaaagctttacaacgaatggaaacatgcatcgacatatgaagattcatgaaaaggatccaaattccgcaactgccaccgcaccacctagtcctctgaaaaggcgtagactgagctcaaaaaggaagttatcacatgacgccgaatctgaacgggaagatccagcaccagccaaaaagatggtcgaggacgggcagagcggagaccttgaaaagaaggcagatgaggtgttccattgcccagtgtgcttcaaagagtttgtgtgcaagtatggtcttgaaacccacatggaaacccattcagacaatccccttagatgcgacatctgctgcgtcacctttagaacgcaccgcgggttgttgcgccacaatgctctcgtgcacaagcagttgccgcgtgatgccatgggccgacctttcatacaaaacaatccctccatccccgccgggtttcatgacttggggtttaccgacttcagttgtaggaagttccccagaatttcacaggcctggtgcgaaactaatctccgtcggtgtatttctgagcagcaccgatttgtgtgtgacacatgcgacaaggccttccccatgttatgttcactggcattgcacaaacagacccatgtcgcagcagaccagggccaggagaaaccccaggccactccactgccgggagacgccctcgatcagaagggatttctggcgctgcttggcctgcagcatacgaaggatgtccggccagcccctgccgaagagcctttacctgatgacaatcaggcaatccagctgcagaccctgaagtgtcagctgccccaggatccaggctgtacaaacctgctgtccctcagtccgttcgaggcggctagcctggggggttcattgacggtgctgccagctacaaaggattccatcaaacatctgtcactgcagccattccagaaaggcttcatcattcagcccgatagctccatcgtagtgaagccgatctctggcgagtccgccattgaacttgccgatattcaacagattcttaagatggccgcgagcgcgcctccccagatctcactgcctccattctcaaaagccccagccgcccctctccaggccatttttaagcacatgcctcctctaaaaccgaagcccctggtcacacccagaaccgtcgtggccacatcaactcctcctccacttatcaatgcacaacaggcctcacccggttgcatctctccgagtctcccaccacccccgctaaaattgctgaaagggtcagttgaggctgctagtaacgctcatctcctgcaatcaaagtctggcactcaacctcatgcggcaacccggttaagcctccagcagccccgcgccgagctacccgggcagccagaaatgaaaactcagttggagcaggacagcatcatcgaggcgctgcttccactttctatggaggcaaaaataaagcaggaaataactgaaggtgagctgaaagcattcatgacagctcccggcggcaaaaaaacacccgccatgcggaaggtgctttatccctgcaggttctgtaaccaggtcttcgcctttagtggagtcctgagagctcacgtgaggtcccacctcggcatttctccttatcagtgtaatatctgtgactacatcgctgcagataaagcagctctcattcgccacctgaggactcactccggcgagcgaccctacatctgtaagatatgtcattatcccttcacagtaaaagccaactgcgaacgccacttgcgcaagaagcacctgaaagcgacacgtaaggacatcgagaagaatatcgagtacgtgtcgagctcagccgctgaactggtagacgctttttgcgcgccagatactgtctgcaggctgtgcggcgaagatctgaagcactacagagctcttaggattcatatgcgcacccattgcggtaggggtctgggcggcggccataaggggcgaaaaccttttgaatgcaaggagtgcagcgctgcatttgctgccaagcgtaactgtattcaccacatcctcaagcaacacctgcacgtgcccgaacaggatatcgaatcatacgttcttgccgctgatgggttgggccctgccgaggcacctgcagccgaggccagtggtagaggggaggacagcggttgcgcggctctgggtgattgcaagccccttaccgccttcctcgagccccaaaacggatttcttcaccgggggccgactcagcctccgccaccacatgtgtcaatcaagctggaacccgcctcttcctttgccgtggatttcaatgaaccattggacttctctcagaaagggttagcactggtccaggtcaaacaggagaacatctctttcttgtctccatctagtttagtcccctatgattgtagcatggaaccaattgatctgtcaattcccaaaaacttcaggaagggagacaaagacttagcgacgccatcagaagccaaaaaacctgaagaagaggcgggatccagcgagcagccctctccctgcccagcccccggaccctcactgcccgttaccttggggccttctggaatactggagtctcctatggctcctgctccagctgccacaccagaacctccagcacagcccctgcaaggtccagtgcaactagcagtgcccatctactcttccgccttggtttcctcccctcctctggtaggcagttctgccctccttagcggcacagctcttcttagaccattaaggcctaaaccgccactgctcttgccgaaaccacctgtgaccgaagagttaccccccctggcctcaattgctcagataatcagctctgtgtcaagtgcaccgaccctgctcaagaccaaagtggctgaccccggccctgcatcaaccggctccaatacgaccgcatccgactcccttggtgggagcgtgccaaaagcagccacaaccgccacacctgccgcaactacaagtcctaaagaaagctccgaaccacccgcccccgcaagtagcccggaagcagcctcacccactgaacagggaccggccggaacctccaagaagcgcggccgcaaacgggggatgaggtcccgtcctagggctaatagcggcggtgtggacctcgattcatctggtgagttcgcttctatcgaaaagatgctcgccacaaccgataccaataagttttctccttttctacagactgccgaggacaacacacaagacgaagtcgccggagcgccagccgaccaccacggaccctcggatgaagagcaggggtccccgcctgaggacaagcttcttcgtgctaagcggaatagctacacgaattgtctgcaaaaaattacttgtccccactgcccccgtgtgttcccgtgggcttctagtctgcagcgccacatgctgactcacactgattcccagagcgacgccgagacagcggcggccgctggtgaagtcctcgatctcacatccagagatcgcgaacagccgtcggaaggcgccacggaactgaggcaggtagccggggacgctcctgtggagcaggcgactgccgaaacagcttctcctgtccaccgggaggaacatggccgcggagagtcacatgagcctgaagaagaacatggcacagaagagtccacaggggatgctgacggcgcagaggaggatgcatcttccaaccagtctctggacctagacttcgccaccaagctgatggattttaagctcgctgagggcgacggtgaagccggagccggtggcgcggcgagtcaggagcagaagttggcatgtgacacatgtgggaaatctttcaagtttctgggtaccctgagccgccacagaaaggctcacggtagacaggagccaaaggacgagaaaggagatggagcctctactgctgaagagggtccccaacccgctcctgaacaggaggaaaaacctccggaaacccccgccgaggtggtcgaaagcgcccctggcgccggcgaagcccccgccgagaagctcgccgaagagacagagggacctagcgatggcgagtccgcggctgaaaagagatcttccgagaagagtgacgatgataagaagcctaagacagatagccctaagtccgtggcctctaaggctgataagcgtaaaaaagtgtgcagtgtatgtaacaaacgcttttggagcctgcaagacctcactagacatatgaggtcccacacaggtgaacggccatacaaatgccagacttgtgaacgcaccttcacacttaagcattccctggtgcgccatcaacgtatccaccagaaggcaagacacgccaagcaccatgggaaagattctgacaaggaagaacgcggagaagaggatagcgaaaacgaatcaacccacagcggcaacaatgcagttagcgagaacgaggccgagctcgccccaaatgcaagcaaccacatggccgttaccagatcccgaaaggaggggcttgccagtgctaccaaggattgcagtcatcgcgaggaaaaggttactgccggatggccgtccgagccgggacagggcgatctgaacccagagtcgcctgctgccctcgggcaggatctcctggaaccgcgttccaagcggccagcacacccaattttggccacagcagacggcgcttcccaactggtggggatggagtag

SEQ ID NO: 66085 - DNA, 5063 bp, Artificial Sequence
  derived and/or modified sequence
atgacatcttcatcccccgcagggttggagggcagtgatctctcatcaataaacacgatgatgtctgccgtgatgtcggtcggcaaggtgaccgagaatggagggtcaccccaaggcattaagagtcccagtaaacctccagggccaaacaggatcggacgccgaaaccaagagacaaaagaggagaagagctcctacaattgtcctttgtgtgaaaagatttgcacaactcagcatcagctgaccatgcacatccggcagcataacacagataccggcggagcagatcactcttgttctatctgcgggaagagcctgtcctccgcctctagtctagataggcatatgttggtccacagtggtgaacgcccatataaatgcaccgtgtgcgggcagtcatttacaaccaacggcaacatgcacagacacatgaaaatccacgagaaggatcccaactccgccaccgccacggccccacctagccctttgaaacgtcgcagattatcctccaagcgcaagctgtctcatgacgctgaaagtgagcgagaggacccagcgccagccaaaaagatggtggaggatggtcaaagcggtgatctggagaagaaggccgacgaggtgtttcactgtcctgtctgctttaaggagtttgtgtgcaagtatggcctggaaacgcatatggagactcactccgacaaccccctgcgctgtgatatatgctgcgtgacatttcgcacccacagaggccttttgaggcacaatgctctggtgcataagcagcttcccagggacgctatgggaaggccttttattcagaataacccgagtatcccagctggcttccatgatctggggttcacggactttagttgtcgaaaatttccacgcatcagccaagcttggtgcgagacaaacctgaggcgatgtatctcagagcagcataggttcgtgtgcgacacctgtgataaagcctttcccatgttgtgcagcctggcgctacataaacaaacccatgtggctgcagaccaaggtcaggagaaaccacaagccacacctctccccggagacgctctggatcagaaaggattcctggcccttctggggctacagcatacaaaggatgtgagacccgcaccagcagaggagccactccctgacgataatcaagctatccagctacagaccttgaagtgtcaactgcctcaggaccctggatgtaccaatcttctgagtttgtctccatttgaggctgcctccctgggaggcagcctgaccgtgctgcctgccaccaaggattcaattaaacatctgagcctgcagcccttccagaaggggttcattatccagccagactcttctatcgtcgtcaagccaatctccggtgagagcgctatcgagctggccgatattcagcaaattctaaagatggccgcttcagccccaccccagatctctttgccaccgttctccaaagccccagcggctccgctgcaagccatttttaagcacatgcccccacttaagccaaaacctctggttacaccgcgtaccgtagttgccacctctactccccctcctttgatcaacgcccagcaggcaagccctggctgcattagcccgagtctccctccgcctcccctgaaacttcttaagggatcagtcgaagcggcatccaatgcccatctcttgcagagcaagagcggtacacagcctcacgcagcaacacgactcagccttcagcagccaagagccgaactgcctggacagccagaaatgaaaacccaactcgagcaggattcaatcattgaggccttgctgcccctgtccatggaagcaaaaattaagcaggagatcacagaaggtgagctcaaagcttttatgacagcaccgggagggaagaagactcctgccatgagaaaagtgctgtatccctgccgtttttgcaatcaggtctttgcattctctggggtactacgagcccatgtccgatcccacttaggaatcagtccatatcagtgcaatatctgcgattacatcgctgcagataaagccgcactgatccggcacttaaggacgcactctggcgaaagaccttatatctgcaaaatctgtcactatccctttaccgtaaaggctaactgtgagaggcatctacgcaaaaagcatcttaaggcaactcgcaaagacatcgaaaagaacattgagtatgtcagttcatctgccgcagaactcgtcgatgccttttgcgcccctgacaccgtgtgccgactgtgtggggaggatttaaaacactatcgggcactgaggatacacatgaggacacactgtggcaggggattgggtggagggcacaagggaagaaaaccgtttgaatgcaaggaatgctctgccgcattcgccgctaaaagaaactgtatccaccacatactgaagcagcacttgcacgtgcctgaacaagacatcgagagttatgtgttggctgctgacggcctaggccctgctgaggcaccagcagcagaagcctctggcaggggggaggattcagggtgtgctgcacttggagactgcaaacccttaacagcgttcctggagccacaaaacggctttctccatcgaggtccaactcagccaccaccgccacatgtgtctataaaactggaacctgccagcagtttcgccgttgacttcaacgagcccctggactttagccaaaaaggactggctttagtccaggtcaagcaagagaacatctcattcctgtcgccatcttctctggtgccctatgattgctccatggaaccaattgatcttagtattcctaagaactttaggaagggggataaggatttggctacacccagcgaagcaaaaaagcctgaagaggaggcgggaagttccgaacaaccttcaccatgccctgcaccgggacctagcctccccgtaacactggggccatcaggcatcttagagtcacccatggctcccgctcctgctgcaaccccagaaccccctgctcagcctcttcaggggccagtccagctggccgttcctatttacagctcagccctggtgagctccccccctcttgtaggatcatccgccctgctgagcggaactgcattgctccgcccacttagacctaagcctccactgctgctgccaaagccccctgtcacggaagaactgcccccactggcctctatcgctcagataatctcgagcgtgagctccgcccctaccctccttaaaactaaagtggcagaccccggtccggcatccaccggaagtaatacgaccgcatccgatagcttaggaggatctgtccctaaggccgcaacaaccgcaactcccgctgctaccactagccccaaggaatcttccgaacccccagccccagcatcatcccccgaagctgcttccccaacagagcagggcccagccggaactagcaagaaaagaggacggaagcggggaatgcgctccaggcccagagctaacagtgggggagtcgatttagattcatccggagaattcgcttcaatcgagaagatgttagccaccacagacaccaataagttctccccctttcttcagacagctgaggacaacacccaggatgaggtggcaggggcacccgcagatcaccatggcccatccgatgaggagcagggaagtccacccgaggacaagttgttaagggctaagcggaattcttatacaaattgtcttcaaaagatcacttgtccacattgcccacgcgtattcccatgggctagcagtctgcagaggcacatgctgactcacacagactctcagtctgacgccgaaacagcggctgctgccggagaagttcttgatctgacctcccgagatcgcgaacagccctccgaaggggctacagaactgcgccaagtagccggagatgcccctgtcgagcaggcaaccgctgagacagccagccccgtgcatagggaggaacacggcagaggcgagtctcatgaacccgaagaggagcacggaactgaggagtctaccggtgacgccgacggcgctgaagaagatgcttcttctaaccagagcctcgatctggatttcgctacaaagctcatggactttaagctggccgagggagacggagaagccggtgccggtggggcagccagtcaggagcaaaaattagcatgtgacacttgcggtaaaagtttcaagtttctgggtactctctctcggcatagaaaggcccatggacggcaggaacccaaagacgagaagggtgatggcgcttctaccgccgaagaaggcccacaaccagcgccagaacaggaggaaaagcctccagagactcctgccgaggtcgtggagagtgctcctggcgcaggcgaagcgccagctgaaaagctggcagaggagacagagggacctagcgatggagaaagtgcagccgaaaaacgtagctcagagaaatcagacgacgataagaagcccaagaccgacagtcctaaatctgttgcttccaaagctgataagaggaaaaaagtttgttcagtttgtaataagcgattctggtccctgcaggaccttacaagacacatgcgctcgcataccggagaaagaccgtacaagtgccagacctgtgaacgcacgtttacgttaaaacatagtcttgtgcggcatcagcgaattcatcagaaagctcggcacgccaaacaccacggcaaagatagcgacaaagaggagcgaggggaggaggacagcgaaaacgaaagtacacatagcggaaataacgcggtgtccgagaacgaggccgagctcgccccaaatgccagcaaccatatggccgtaaccagatcccgtaaggaaggactggcctctgctactaaggactgcagccatcgggaggaaaaagtaacggctggttggccatccgagcctggccagggagatctgaatcctgagtccccagcagcattggggcaggacctgctggagcctcgtagcaaacgccctgctcatccaatcctagctacagcggatggagccagtcagcttgtgggcatggagta

SEQ ID NO: 66086 - DNA, 5063 bp, Artificial Sequence
  derived and/or modified sequence
atgaccagcagctcccctgcgggtctggagggaagtgatctgtcttctattaataccatgatgtcggctgtgatgtctgtcggcaaagtgacagaaaacgggggatcacctcaggggattaagtctccctccaagccacctgggcctaaccgtattggacggcgaaaccaggagaccaaggaggaaaaaagcagctataattgccccctctgcgagaagatttgtactactcaacaccaacttaccatgcacattcgacaacataatactgacactgggggagcggatcactcttgttctatctgtgggaagtccttgtcgagcgcttcaagcttagaccggcatatgcttgtacacagcggggaaagaccatacaagtgcaccgtgtgcggacaatcatttacaacgaatgggaacatgcaccggcatatgaaaatccacgaaaaggaccccaattccgcaacagccacagcgcctccgtctccactgaagcgcagaagactgtctagtaagcgcaagctgtctcatgatgccgagagcgaaagggaggatccggcaccggctaagaagatggtcgaggacggccaatcaggggacctggagaaaaaggccgacgaggtttttcattgtccggtgtgctttaaggaattcgtttgcaaatatggcctggagactcacatggagacacacagcgacaacccattgcgctgcgatatctgctgcgttacatttaggacccacagagggttgctccgccataacgcacttgtccacaagcagcttcccagggacgcgatgggcaggccatttattcaaaacaatccctcaatcccggctggattccatgatcttggattcactgatttcagctgtaggaagtttcccaggatctcacaagcttggtgtgagacaaacctaaggcgctgcatctcagagcagcatcggttcgtgtgcgatacttgcgataaggcattccccatgttgtgttctctcgccttgcataagcaaacccatgtggccgctgaccaaggccaggagaagccgcaagcaaccccgctcccaggtgatgcccttgatcagaagggattcctcgcgcttctaggcctccaacacactaaagacgtgagacccgctcccgctgaggagcctcttcccgacgacaatcaggctattcaattgcaaacattgaagtgccagctgccccaggacccaggctgcacaaatctcctgtccctgtccccatttgaagccgcaagtctgggcggatccctgactgtgctccctgctactaaagattcaattaagcacctgtcccttcagccctttcaaaaggggttcatcatacaaccagattcatctattgtggttaagcccatctctggcgaaagcgccatcgaactagctgatattcagcagatactgaaaatggccgcatcagccccaccgcagatatcgcttcccccattctcgaaggccccagccgcacctctacaggccatcttcaagcacatgcctccgttgaaaccaaagcccctggtcacccccaggaccgttgtcgccacctcgacaccccctcccctgattaatgcccagcaggcatcccccggatgtatctctcctagtctcccgcctcctccccttaagttgctcaagggttctgtagaagccgctagtaatgcccacctcctgcagtccaagtcaggcactcagccgcatgccgcaacccggctgagcctgcaacagcccagagctgagctgccaggacagcccgaaatgaagactcagttggaacaggacagtatcattgaagctctcctgcccctcagcatggaagctaagataaagcaggaaatcaccgagggtgaactgaaggcattcatgacagctcccggtggcaaaaagacccccgctatgcgaaaagtcttgtacccctgtagattctgcaaccaggtatttgcttttagtggcgtgttacgggctcatgtcagatcgcacctcggtatctcgccctaccaatgcaatatttgcgactatatcgcagctgataaggctgctctgatccggcacctgcgcactcactcgggtgaacggccatatatatgcaaaatatgtcactatcctttcaccgttaaggctaactgcgagaggcaccttagaaagaaacacctcaaagccacacgcaaagacatcgaaaagaacatcgaatacgtgagttcttcagctgccgagcttgttgacgcattctgcgcccctgataccgtctgtcgactgtgtggagaggatctgaaacactatcgagcattgagaattcacatgagaacacattgtggacgcggtcttggaggcggacataaaggtcgaaaaccatttgagtgtaaggagtgctcagccgcttttgccgctaagagaaattgtatacatcacattttaaaacaacaccttcacgtcccagagcaggatatcgagtcctacgtcctagcagctgatggcttggggcctgcagaggccccagccgcagaagcaagcggaaggggcgaggacagcggctgcgctgctttgggcgactgcaaacccttgaccgccttcctggaacctcagaacggatttctccatcgcggacccacccagccccctccaccacacgtgagcatcaaattagaaccagcatcttccttcgcagtcgacttcaacgaaccgctggacttctctcagaaaggactcgccctcgttcaggtcaaacaagaaaatatcagctttttgtctccctcttccctagtgccttatgactgtagcatggagcctattgatctgtcaattcccaaaaactttaggaaaggcgataaagacctggccactccttcggaggccaagaagcccgaagaggaagctggcagctccgaacagcctagcccgtgcccagccccaggtcctagcctgccagtgactctcggaccctctggcattctcgagtctccgatggcacctgctcccgcagctacacccgaaccccctgcccagcctctgcaaggcccagttcagctggccgtgcctatttatagctcggcactcgtgtccagccctccgttagtcggctcctcggctttactgtccgggaccgcattgctacggcctctgcgccctaagcccccattactgttgcccaagccccctgtgactgaggaattgcctccactggcctcaattgctcagattatttcaagcgtgtcctccgctccaaccctgcttaagaccaaggtggcagatccaggcccagcctccaccggatcgaacaccactgcttcagattcgttgggcggatctgtgcccaaggccgctactaccgccaccccagctgctaccacgagccccaaggagtcaagcgaaccgccagcaccagcttccagccccgaggccgcttctcccaccgaacaggggccagccggtaccagcaagaaaaggggacgcaaacggggaatgcgttcaagacctagagccaacagtggcggtgtggatctcgattcgtccggtgagttcgcctctattgagaaaatgctggccaccaccgataccaataaattcagcccattcctgcagaccgcggaagataacacacaggatgaggtggctggcgctcccgctgatcaccacggacccagtgacgaagagcagggctctccacctgaggataaactgctgagagctaaacgcaactcttataccaactgcctgcagaagatcacatgtccacattgccctcgagtgttcccctgggctagctcgcttcagagacacatgctgacccacacagactcacagtcagatgctgaaacagcagctgcggcaggggaggtgttggatttgacttcacgtgacagggagcagccttccgaaggcgctacagaactgcgacaggtggccggagatgcaccagttgagcaggccactgcggaaaccgcctccccagtccacagagaggaacatggacgcggagaatcgcatgaaccagaggaggaacatggtaccgaggaatctaccggtgacgccgatggcgctgaggaagacgctagtagcaatcaaagcctcgatctggactttgccactaagcttatggattttaagctggcggagggcgacggagaagctggcgctgggggagcggctagtcaagaacaaaagctcgcatgcgacacctgtggaaagagcttcaagtttctggggactcttagcaggcaccggaaagcccatgggaggcaggaaccaaaggacgagaagggagatggagcaagtaccgcggaagaaggaccacagccagcacccgagcaagaagagaaacctccagagacccctgctgaggtcgttgaaagcgctccaggagccggagaggccccagccgagaagctggctgaggagaccgagggcccatccgacggagaaagtgcggcagagaagcgctctagtgagaaatctgatgacgacaagaaacctaagactgacagcccgaagtctgtcgccagtaaggccgacaagaggaagaaggtttgcagtgtctgcaacaagcgcttctggtccctgcaagacttaactaggcacatgaggtcccacacaggcgagagaccatacaagtgccaaacctgtgagcggacctttactcttaaacacagtctggtgcgacaccagcggattcaccagaaagctcggcacgccaagcaccacggcaaagactcggacaaggaggagcggggagaagaggattcagaaaacgagagcacacactctggaaacaatgccgtctccgagaacgaagcggagctggctcccaatgcttcaaaccacatggcagtgacaagatcaaggaaagagggtttggcgtcagctacaaaggactgcagtcaccgggaggagaaagtcaccgctggctggcccagtgaacctgggcagggcgatctgaaccctgagtcaccagccgcattgggccaggacctgctggagcccagatctaagaggcccgctcacccaatcctggcaacagccgacggagcctcacaactggttggaatggagta

SEQ ID NO: 66087 - DNA, 7440 bp, Artificial Sequence
  derived and/or modified sequence
atgccagggagccaagcgtcctgcccggccgttgctccgactgtgtgttccaggagtggtggctctgaggtgtgaccctgcccacgtttgggcccagccaggttcagccccccaataaggagggcagcttgataacacaaagaaaacagtgtcaacgagtactaccaagagaagaagacaagaggtcaacacagactcattttctactccgtgtgaatgatagctacagcaggggaaagtttcatagtctatcagtgggtcagaaaatggagttttatagcagaggcttcttagaagcttaaacccctgtcccaatgacgtcaagttcgcccgctggcttggaaggttcagacctatcttccatcaacaccatgatgtcggcggtcatgagtgtagggaaggtcacagagaatggcgggagcccccaggggatcaagtccccctcgaagcctccaggaccaaatcggattggcagaaggaaccaggaaacgaaagaggagaagtcttcctataactgccccctgtgtgagaagatttgcactacccagcaccagctgaccatgcacattcgccagcacaacacagacactggaggagccgaccactcatgcagcatctgcggaaagtcactgagctcggccagctccctcgatcgccacatgctggtgcactctggcgagaggccttacaagtgcactgtgtgtggccagtcatttaccaccaatgggaacatgcacagacatatgaagatccatgagaaggaccctaacagtgccacagccacagcccctccatctcctctgaaacgtaggcgattgtcctccaagaggaaactgagtcacgatgccgagtcagagagagaagacccagcaccagctaaaaagatggtagaagacgggcagtcaggtgacttggagaagaaagctgatgaagtctttcactgcccagtatgtttcaaggagtttgtttgcaagtatggactggagacccacatggagacccattcagataacccactaagatgtgacatttgttgtgtcacctttcgaacacatcgaggactgctgcgtcacaacgcgcttgtccacaaacaacttcccagggatgcaatgggcagacctttcatacagaacaacccttcaattcctgctggcttccacgacttaggattcacggacttctcctgtaggaagtttcctcgcatttctcaggcctggtgcgaaacaaacctgcggaggtgcatcagcgagcaacaccgttttgtctgcgacacctgtgacaaggcgttccccatgctctgctcactggctctgcacaagcagacccatgtggcggcagaccagggtcaagaaaagccgcaggccacgcccctgcctggtgacgccctggaccagaagggcttcctggccttgcttggcctgcagcacaccaaagacgtcaggcctgcccccgccgaggagcccctgccggatgacaaccaggcaattcagctccagacactcaagtgtcagctacctcaggaccccggctgcaccaacctgctgagcctgtcacctttcgaagctgcttccctaggcggttctctcacagttctccccgcgaccaaggacagcataaagcacctgtccctgcagcccttccagaagggcttcatcatccagcctgacagcagcattgtggtcaagcccatctctggcgagtcggccatcgagctggcagacatccagcaaattctgaagatggcagcctcggctccccctcagatcagtcttccgcccttctccaaggcccctgccgccccactgcaggcgatcttcaagcacatgccccctctgaagccaaagcccctggtcacaccacggacggtggtggccacctccacgcccccgcctctcatcaacgcccagcaggcttccccgggctgtatcagccccagcctgccgccaccgcccctgaagctcctcaaaggctcagtggaggcggcctccaacgcccacctgctgcagtccaagtccgggacccagccccacgcggccacgcggctctccctgcagcagccgcgggcggagctgccgggccagcctgagatgaagacgcagctggagcaggacagcatcatcgaggccctgctgccgctgagcatggaggccaagatcaagcaggagatcacagagggggaactcaaggccttcatgacagcgcccggcggcaagaagacgcccgccatgcgcaaggtgctctacccctgccgcttctgcaaccaggtgtttgccttctcgggggtcttgcgtgcccacgtgcgctcccacctgggcatctcgccataccagtgcaacatctgcgactacatcgccgccgacaaggccgcgctcatccgccacctgcgcacgcacagtggggagcggccctacatttgcaagatctgccactaccccttcactgtcaaagccaactgcgagcggcacctgcgcaagaagcacctcaaggccacccgcaaggatatcgagaagaacatcgagtatgtgagtagcagcgcggccgagctggtggacgccttctgcgccccggacaccgtgtgccggctgtgcggcgaggacctcaagcactatcgtgccctgcgcatccacatgcgcacgcactgcggccgcggcctgggcgggggccacaagggccgcaagcccttcgagtgcaaggagtgcagcgccgcgttcgcggccaagcgcaactgcatccaccacatcctcaagcagcacctgcacgtgcccgagcaggacatcgagagctacgtgctggccgccgacggcctgggccccgcagaggcgccggccgctgaggcgtcggggcgcggggaggacagtggctgcgctgcccttggtgactgcaagcccctcactgccttcctggaaccccagaacggctttcttcacaggggccccacccagcctccacctccccatgtctcgatcaagttggagcccgccagtagctttgcggtggacttcaatgagcccctggacttctcgcagaagggcctggccctggtccaagtgaagcaggaaaacatctcctttctgagcccttcttccctggtcccctatgactgctccatggagcccatcgacctgtccatccccaagaacttcaggaaaggggacaaggatttggccactcccagcgaagccaagaagcctgaggaggaggcggggagcagcgagcagccctctccctgcccagcacccggcccttctcttcctgtaactttggggcccagcggaatcctggaaagccccatggcccctgctccggcggccaccccggaacccccagcacagcccctgcagggccctgttcagctggcggtcccaatctactcctcagccctggtcagcagccctccactcgtgggcagctcagccctcctgagtggcacagccttgctgcgtccactgcggcccaagcccccgctgcttttgccaaagccccccgtgacagaagagctgcccccgctggcctccattgcccagatcatctcatctgtatcctcggcccccaccctgctgaaaaccaaggtggcggacccagggcccgcaagcactggcagtaacaccacggcttcagacagcttaggaggttctgtccccaaagccgccaccaccgccacccccgctgccaccaccagcccaaaagagtctagtgagcctcccgctccagccagcagcccagaggctgcctctcccaccgagcagggcccagcgggcacgtcgaagaagaggggccggaaaagggggatgaggagccgaccccgcgccaacagcggcggggtggacctggactccagcggggagtttgccagcatcgagaagatgctggccaccacagacaccaacaagttcagtccgtttctgcagacagcggaggacaacactcaggatgaggtggccggagcccctgccgaccaccatgggcccagtgatgaagagcagggcagtcccccagaagacaagctgctgagggccaagcggaactcgtacaccaactgcctgcagaagatcacctgtccccactgtccccgggttttcccttgggccagctccctacagaggcacatgctcacacacactgacagtcagtcggatgcggagactgcagccgccgcgggcgaagtgctagacctcacctcacgggacagagagcagccgtcggagggcgccactgagctccgccaggtcgcaggggatgcgcctgtggagcaggccacggcggaaacggcctcgccggtgcaccgggaagagcacgggcgtggggagagccatgagccggaggaggagcatggcactgaggagagcactggggacgccgacggcgcggaagaggacgcgtcgagcaaccagagcctggacctggacttcgccaccaagctcatggacttcaagctggcggagggcgacggcgaggcaggcgccgggggcgcggcctcgcaggagcagaagctcgcctgcgacacctgtgggaagagcttcaagttcctgggcaccctgagccgccaccggaaggcgcacggccgccaggagcccaaggacgagaagggagatggcgccagcactgcagaggaggggccccagcccgcccctgaacaggaggagaagccccccgagaccccggcagaggtggtggagtcggccccgggtgccggggaggccccggcggaaaagctcgcggaggagacggagggcccctccgacggggagagcgcggccgagaaaaggtcctcagagaagagcgacgatgacaagaaaccaaagacagactcccccaaaagcgtggccagcaaggcagacaagaggaagaaggtctgcagcgtgtgcaacaagcggttctggtcgctgcaggacctgacccggcacatgcgctcccacacaggggaaaggccatacaaatgtcagacctgcgagcgaaccttcaccttgaagcacagcctggttcgccaccagcggatccaccagaaagccaggcatgccaaacaccacgggaaggacagcgacaaggaagagcggggtgaggaggacagcgagaatgagtccacccacagcggcaacaacgccgtctcagagaacgaggctgagctggctcccaatgccagcaaccacatggctgtcacccggagccggaaggagggcttggccagtgccaccaaggactgcagccacagggaggagaaggtcacggcagggtggccgtctgagcctggccagggtgaccttaacccagagagcccggcggccctggggcaggacctgctggagccgcgcagcaagaggcctgcccacccaatcctggccacagctgatggcgcctcccagctcgtggggatggagtgacagcctcagtccccctcagcacagacaaaagccagcagagcaaagcgtctatacttcatggggtttcctcagtgccctttggctgttgaggagtgagagagagagagagagagagagagagagagagagagagagacaagcaggagcgtggctgctcgctcagtgccatagccttaccgcagcctgcgcgggaggccacagcccgtgccgattccagtgccttaactacttaccggatccctccatattatcatgggtgttgtatttttccaaaatgacttcttaaacaaaacaaatattataatgaattgtctggagaggacctcttcatttgagcattagcgttattttgtattggtgtgtgtgagcttgttcttgtgaatctgtgatagcaccgtttgttctgtgagctggaaacagaaggaaaaaacatacccttgggtacccatagccaataactggaagaaaatgatgtgaatttcatgtaaatgaccagaggaaagatggataagatgataatttcttaaatagacattttccttttttctttgtgcttcatggtggagctgtcatctggtccttggtattacaggatgtggttgatgaaggtttccaatatggtttcaggccaaaaccagggaagattctagcttcagcctcatgtccatttccagtctgtcagcattagacatggtcactgttcaagtttcaagacatccattcttaactatagagaagagttactcccctggcgtcttaacctatggaaaacatgcacggataggatatatttgattgcctcctcttccctttcagtatatgtattattaatattattattattattattattattagttcatcagtttgctgttctctgcagtgagcagaatcaaatgggcaatatttgtcctgggagacctgtgccgcacccaggtccccgtgttaacgtgtgcctgcggttgtggttggcaccctcgggtggtagctcttctactgtaatgagacaagcctttcttctgtcactgcagaatttagaaggggccgtgagcagtcttcccaagcatggtccaggagcagctcagagagggtggagtgaggatgcatgcatccagggaacaggcatcaagaagccagggccgtgcctggagcactgcagagatgactttggagaaagcaaagcagtgacccagtgaccaggcacattactcgtgagcgaggtattcccagtcttcctgctaagcctaatccaagccttacccagctgtgctactgtcatttgcaaagcaaggaaatactactactggtaataaaactacacatgcaagatgtcagataagaaataggtttatatttaccttcctgcgatgtggggttggtgcttgaagataaatgtgctgtttctagtttcttaaatagcccacacccctggatgcaaaaaggcagggttatttttacccatgagcatcctgtgcaggcaatagacttccctcactgtctccgcctgcagggaggagaatgtaccccactgcacctgagctcctggtccctcagccaagacctcaggggtccccagccagcctgctgctggggacccctgtgcttgctgcagtgtatggagcctcttgccttcccctggggaggcacccctgtaccccagcttccttcccctggccttttctggccccagtgctcctcctttacatagacttgttcacacagaaacgtgcacgcccccttttctccgccacttcaccagtttctgaaatccaacctcccagacttcacaggaagatagatattcttgagataatgaaaagtgatatcttcgcatacgaaaggaaaaaaggttgaggtatatatgatttttaactgtattaggggtgtatgaaccagtttaaaaacgaggttttatttactgtagagatgaatgcaaatcagaaccaatgatcccttggcctacttagttaaaaccagttcatacatcccttagggtttttattattattattattattattacagttgttattgttgtttttgttgttattattatttgggg

SEQ ID NO: 66088 - DNA, 5826 bp, Artificial Sequence
  derived and/or modified sequence
cgggatggcaactgcggtcaccctgctaaagtcggggcgggggcggcggtcctccccctcaccccccccagtccgagcgccgccgccgccgccgccgccgccgccgcggccgctcagtaacacgtccccaggagactcgcaggagcaacacgtgatgtgtctacttatcagggttgctccgactgtgtgttccaggagtggtggctctgaggtgtgaccctgcccacgtttgggcccagccaggttcagccccccaataaggagggcagcttgataacacaaagaaaacagtgtcaacgagtactaccaagagaagaagacaagaggtcaacacagactcattttctactccgtgtgaatgatagctacagcaggggaaagtttcatagtctatcagtgggtcagaaaatggagttttatagcagaggcttcttagaagcttaaacccctgtcccaatgacgtcaagttcgcccgctggcttggaaggttcagacctatcttccatcaacaccatgatgtcggcggtcatgagtgtagggaaggtcacagagaatggcgggagcccccaggggatcaagtccccctcgaagcctccaggaccaaatcggattggcagaaggaaccaggaaacgaaagaggagaagtcttcctataactgccccctgtgtgagaagatttgcactacccagcaccagctgaccatgcacattcgccagcacaacacagacactggaggagccgaccactcatgcagcatctgcggaaagtcactgagctcggccagctccctcgatcgccacatgctggtgcactctggcgagaggccttacaagtgcactgtgtgtggccagtcatttaccaccaatgggaacatgcacagacatatgaagatccatgagaaggaccctaacagtgccacagccacagcccctccatctcctctgaaacgtaggcgattgtcctccaagaggaaactgagtcacgatgccgagtcagagagagaagacccagcaccagctaaaaagatggtagaagacgggcagtcaggtgacttggagaagaaagctgatgaagtctttcactgcccagtatgtttcaaggagtttgtttgcaagtatggactggagacccacatggagacccattcagataacccactaagatgtgacatttgttgtgtcacctttcgaacacatcgaggactgctgcgtcacaacgcgcttgtccacaaacaacttcccagggatgcaatgggcagacctttcatacagaacaacccttcaattcctgctggcttccacgacttaggattcacggacttctcctgtaggaagtttcctcgcatttctcaggcctggtgcgaaacaaacctgcggaggtgcatcagcgagcaacaccgttttgtctgcgacacctgtgacaaggcgttccccatgctctgctcactggctctgcacaagcagacccatgtggcggcagaccagggtcaagaaaagccgcaggccacgcccctgcctggtgacgccctggaccagaagggcttcctggccttgcttggcctgcagcacaccaaagacgtcaggcctgcccccgccgaggagcccctgccggatgacaaccaggcaattcagctccagacactcaagtgtcagctacctcaggaccccggctgcaccaacctgctgagcctgtcacctttcgaagctgcttccctaggcggttctctcacagttctccccgcgaccaaggacagcataaagcacctgtccctgcagcccttccagaagggcttcatcatccagcctgacagcagcattgtggtcaagcccatctctggcgagtcggccatcgagctggcagacatccagcaaattctgaagatggcagcctcggctccccctcagatcagtcttccgcccttctccaaggcccctgccgccccactgcaggcgatcttcaagcacatgccccctctgaagccaaagcccctggtcacaccacggacggtggtggccacctccacgcccccgcctctcatcaacgcccagcaggcttccccgggctgtatcagccccagcctgccgccaccgcccctgaagctcctcaaaggctcagtggaggcggcctccaacgcccacctgctgcagtccaagtccgggacccagccccacgcggccacgcggctctccctgcagcagccgcgggcggagctgccgggccagcctgagatgaagacgcagctggagcaggacagcatcatcgaggccctgctgccgctgagcatggaggccaagatcaagcaggagatcacagagggggaactcaaggccttcatgacagcgcccggcggcaagaagacgcccgccatgcgcaaggtgctctacccctgccgcttctgcaaccaggtgtttgccttctcgggggtcttgcgtgcccacgtgcgctcccacctgggcatctcgccataccagtgcaacatctgcgactacatcgccgccgacaaggccgcgctcatccgccacctgcgcacgcacagtggggagcggccctacatttgcaagatctgccactaccccttcactgtcaaagccaactgcgagcggcacctgcgcaagaagcacctcaaggccacccgcaaggatatcgagaagaacatcgagtatgtgagtagcagcgcggccgagctggtggacgccttctgcgccccggacaccgtgtgccggctgtgcggcgaggacctcaagcactatcgtgccctgcgcatccacatgcgcacgcactgcggccgcggcctgggcgggggccacaagggccgcaagcccttcgagtgcaaggagtgcagcgccgcgttcgcggccaagcgcaactgcatccaccacatcctcaagcagcacctgcacgtgcccgagcaggacatcgagagctacgtgctggccgccgacggcctgggccccgcagaggcgccggccgctgaggcgtcggggcgcggggaggacagtggctgcgctgcccttggtgactgcaagcccctcactgccttcctggaaccccagaacggctttcttcacaggggccccacccagcctccacctccccatgtctcgatcaagttggagcccgccagtagctttgcggtggacttcaatgagcccctggacttctcgcagaagggcctggccctggtccaagtgaagcaggaaaacatctcctttctgagcccttcttccctggtcccctatgactgctccatggagcccatcgacctgtccatccccaagaacttcaggaaaggggacaaggatttggccactcccagcgaagccaagaagcctgaggaggaggcggggagcagcgagcagccctctccctgcccagcacccggcccttctcttcctgtaactttggggcccagcggaatcctggaaagccccatggcccctgctccggcggccaccccggaacccccagcacagcccctgcagggccctgttcagctggcggtcccaatctactcctcagccctggtcagcagccctccactcgtgggcagctcagccctcctgagtggcacagccttgctgcgtccactgcggcccaagcccccgctgcttttgccaaagccccccgtgacagaagagctgcccccgctggcctccattgcccagatcatctcatctgtatcctcggcccccaccctgctgaaaaccaaggtggcggacccagggcccgcaagcactggcagtaacaccacggcttcagacagcttaggaggttctgtccccaaagccgccaccaccgccacccccgctgccaccaccagcccaaaagagtctagtgagcctcccgctccagccagcagcccagaggctgcctctcccaccgagcagggcccagcgggcacgtcgaagaagaggggccggaaaagggggatgaggagccgaccccgcgccaacagcggcggggtggacctggactccagcggggagtttgccagcatcgagaagatgctggccaccacagacaccaacaagttcagtccgtttctgcagacagcggaggacaacactcaggatgaggtggccggagcccctgccgaccaccatgggcccagtgatgaagagcagggcagtcccccagaagacaagctgctgagggccaagcggaactcgtacaccaactgcctgcagaagatcacctgtccccactgtccccgggttttcccttgggccagctccctacagaggcacatgctcacacacactgacagtcagtcggatgcggagactgcagccgccgcgggcgaagtgctagacctcacctcacgggacagagagcagccgtcggagggcgccactgagctccgccaggtcgcaggggatgcgcctgtggagcaggccacggcggaaacggcctcgccggtgcaccgggaagagcacgggcgtggggagagccatgagccggaggaggagcatggcactgaggagagcactggggacgccgacggcgcggaagaggacgcgtcgagcaaccagagcctggacctggacttcgccaccaagctcatggacttcaagctggcggagggcgacggcgaggcaggcgccgggggcgcggcctcgcaggagcagaagctcgcctgcgacacctgtgggaagagcttcaagttcctgggcaccctgagccgccaccggaaggcgcacggccgccaggagcccaaggacgagaagggagatggcgccagcactgcagaggaggggccccagcccgcccctgaacaggaggagaagccccccgagaccccggcagaggtggtggagtcggccccgggtgccggggaggccccggcggaaaagctcgcggaggagacggagggcccctccgacggggagagcgcggccgagaaaaggtcctcagagaagagcgacgatgacaagaaaccaaagacagactcccccaaaagcgtggccagcaaggcagacaagaggaagaaggtctgcagcgtgtgcaacaagcggttctggtcgctgcaggacctgacccggcacatgcgctcccacacaggggaaaggccatacaaatgtcagacctgcgagcgaaccttcaccttgaagcacagcctggttcgccaccagcggatccaccagaaagccaggcatgccaaacaccacgggaaggacagcgacaaggaagagcggggtgaggaggacagcgagaatgagtccacccacagcggcaacaacgccgtctcagagaacgaggctgagctggctcccaatgccagcaaccacatggctgtcacccggagccggaaggagggcttggccagtgccaccaaggactgcagccacagggaggagaaggtcacggcagggtggccgtctgagcctggccagggtgaccttaacccagagagcccggcggccctggggcaggacctgctggagccgcgcagcaagaggcctgcccacccaatcctggccacagctgatggcgcctcccagctcgtggggatggagtgacagcctcagtccccctcagcacagacaaaagccagcagagcaaagcgtctatacttcatggggtttcctcagtgccctttggctgttgaggagtgagagagagagagagagagagagagagagagagagagagagacaagcaggagcgtggctgctcgctcagtgccatagccttaccgcagcctgcgcgggaggccacagcccgtgccgattccagtgccttaactacttaccggatccctccatattatcatgggtgttgtatttttccaaaatgacttcttaaacaaaacaaatattataatg

SEQ ID NO: 66089 - DNA, 9816 bp, Artificial Sequence
  derived and/or modified sequence
tagttgtatatttcttaatttcttcaactgtcttatttttccccctctgtttctgatagcactaattgctgccttgcttttctcttgttaaactggcagtctgtaggtgtctgctgtgaacatgccattaggatgcacgaagctcccccccggagccagtggtccgagccattctcacatggtgctgcccttgacgttattggaatgtgcctgggggataggggttgctccgactgtgtgttccaggagtggtggctctgaggtgtgaccctgcccacgtttgggcccagccaggttcagccccccaataaggagggcagcttgataacacaaagaaaacagtgtcaacgagtactaccaagagaagaagacaagaggtcaacacagactcattttctactccgtgtgaatgatagctacagcaggggaaagtttcatagtctatcagtgggtcagaaaatggagttttatagcagaggcttcttagaagcttaaacccctgtcccaatgacgtcaagttcgcccgctggcttggaaggttcagacctatcttccatcaacaccatgatgtcggcggtcatgagtgtagggaaggtcacagagaatggcgggagcccccaggggatcaagtccccctcgaagcctccaggaccaaatcggattggcagaaggaaccaggtaagtgttcacacctagtggtgacctctggtgggttcaatccatgagaacattgggagatgtttccgagtttcctatgataaaaccttggaagaattgggaataaaacggacatacccagaggccttgatcatttttcaagggcaaaatttttatggcttatgttagtttcctttcatggagaaggttttctttgctgtggtgtcgatgttggtggaagtgcccttatttttggccccaccattggattttaactcaagctttcttcacttgatggccatggcagggaacatcactgatttctgtgatgtggtttgtttcctcattcacacagctggctatttttaagtatcttcagattaggtagcaaataagtattgcctgtgctagggctgccgttcagctttctatccttgaaaaagcacagaatttggcttcagataattccagttaagatgctgtttagtcatcttggattttcattgggcatcagatcagaacagggtaaagtaaataggtggaattgagaagggttaatgctgttacaaaagttgatgtcttctctgttgggaaataaatgaatcttcaatgtaagatgggacatttccttgaaaagttgttgctgtcttggcaacatactgttgaacagaaagaaggaaggtggtggaaggaggcagagagtgaatacttctcatttcaactctggatccatgtaatacgagttgacttcctcgtgtttaaagtttggtttaactaatttaatgagactatactaaatccttggagagaaggtggtcttgcatttgtccaggaaccagcaatggatgagaaagcaaacctgctgggcttttgtaaactaattttctttttttataaataatcctactgtggctgtccttatacagaattctctgagtattaatatgatggttttctataaattcttagaagtagagccttaattaaggctttcgatacaacttgccctacaagaaaagttgtaccagccccaaaccctgccagcagtatgggggaggatgcatttctccacaccttgctgaaggatggggacttggcagagttcagtgatgttttagggttggaacattgattcctttctctctctcttttttcccttttctccttgtgcctctcttcctgtgggtgcctgagaaaatactcagcctgtatgactgtggcctgagtcgagaaggagtgctagctctgagaagaaaaggaaacgaaagaggagaagtcttcctataactgccccctgtgtgagaagatttgcactacccagcaccagctgaccatgcacattcgccagcacaacacagacactggaggagccgaccactcatgcagcatctgcggaaagtcactgagctcggccagctccctcgatcgccacatgctggtgcactctggcgagaggccttacaagtgcactgtgtgtggccagtcatttaccaccaatgggaacatgcacagacatatgaagatccatgagaaggaccctaacagtgccacagccacagcccctccatctcctctgaaacgtaggcgattgtcctccaagaggaaactgagtcacgatgccgagtcagagagagaagacccagcaccagctaaaaagatggtagaagacgggcagtcaggtgacttggagaagaaagctgatgaagtctttcactgcccagtatgtttcaaggagtttgtttgcaagtatggactggagacccacatggagacccattcagataacccactaagatgtgacatttgttgtgtcacctttcgaacacatcgaggactgctgcgtcacaacgcgcttgtccacaaacaacttcccagggatgcaatgggcagacctttcatacagaacaacccttcaattcctgctggcttccacgacttaggattcacggacttctcctgtaggaagtttcctcgcatttctcaggcctggtgcgaaacaaacctgcggaggtgcatcagcgagcaacaccgttttgtctgcgacacctgtgacaaggcgttccccatgctctgctcactggctctgcacaagcagacccatgtggcggcagaccagggtcaagaaaagccgcaggccacgcccctgcctggtgacgccctggaccagaagggcttcctggccttgcttggcctgcagcacaccaaagacgtcaggcctgcccccgccgaggagcccctgccggatgacaaccaggcaattcagctccagacactcaagtgtcagctacctcaggaccccggctgcaccaacctgctgagcctgtcacctttcgaagctgcttccctaggcggttctctcacagttctccccgcgaccaaggacagcataaagcacctgtccctgcagcccttccagaagggcttcatcatccagcctgacagcagcattgtggtcaagcccatctctggcgagtcggccatcgagctggcagacatccagcaaattctgaagatggcagcctcggctccccctcagatcagtcttccgcccttctccaaggcccctgccgccccactgcaggcgatcttcaagcacatgccccctctgaagccaaagcccctggtcacaccacggacggtggtggccacctccacgcccccgcctctcatcaacgcccagcaggcttccccgggctgtatcagccccagcctgccgccaccgcccctgaagctcctcaaaggctcagtggaggcggcctccaacgcccacctgctgcagtccaagtccgggacccagccccacgcggccacgcggctctccctgcagcagccgcgggcggagctgccgggccagcctgagatgaagacgcagctggagcaggacagcatcatcgaggccctgctgccgctgagcatggaggccaagatcaagcaggagatcacagagggggaactcaaggccttcatgacagcgcccggcggcaagaagacgcccgccatgcgcaaggtgctctacccctgccgcttctgcaaccaggtgtttgccttctcgggggtcttgcgtgcccacgtgcgctcccacctgggcatctcgccataccagtgcaacatctgcgactacatcgccgccgacaaggccgcgctcatccgccacctgcgcacgcacagtggggagcggccctacatttgcaagatctgccactaccccttcactgtcaaagccaactgcgagcggcacctgcgcaagaagcacctcaaggccacccgcaaggatatcgagaagaacatcgagtatgtgagtagcagcgcggccgagctggtggacgccttctgcgccccggacaccgtgtgccggctgtgcggcgaggacctcaagcactatcgtgccctgcgcatccacatgcgcacgcactgcggccgcggcctgggcgggggccacaagggccgcaagcccttcgagtgcaaggagtgcagcgccgcgttcgcggccaagcgcaactgcatccaccacatcctcaagcagcacctgcacgtgcccgagcaggacatcgagagctacgtgctggccgccgacggcctgggccccgcagaggcgccggccgctgaggcgtcggggcgcggggaggacagtggctgcgctgcccttggtgactgcaagcccctcactgccttcctggaaccccagaacggctttcttcacaggggccccacccagcctccacctccccatgtctcgatcaagttggagcccgccagtagctttgcggtggacttcaatgagcccctggacttctcgcagaagggcctggccctggtccaagtgaagcaggaaaacatctcctttctgagcccttcttccctggtcccctatgactgctccatggagcccatcgacctgtccatccccaagaacttcaggaaaggggacaaggatttggccactcccagcgaagccaagaagcctgaggaggaggcggggagcagcgagcagccctctccctgcccagcacccggcccttctcttcctgtaactttggggcccagcggaatcctggaaagccccatggcccctgctccggcggccaccccggaacccccagcacagcccctgcagggccctgttcagctggcggtcccaatctactcctcagccctggtcagcagccctccactcgtgggcagctcagccctcctgagtggcacagccttgctgcgtccactgcggcccaagcccccgctgcttttgccaaagccccccgtgacagaagagctgcccccgctggcctccattgcccagatcatctcatctgtatcctcggcccccaccctgctgaaaaccaaggtggcggacccagggcccgcaagcactggcagtaacaccacggcttcagacagcttaggaggttctgtccccaaagccgccaccaccgccacccccgctgccaccaccagcccaaaagagtctagtgagcctcccgctccagccagcagcccagaggctgcctctcccaccgagcagggcccagcgggcacgtcgaagaagaggggccggaaaagggggatgaggagccgaccccgcgccaacagcggcggggtggacctggactccagcggggagtttgccagcatcgagaagatgctggccaccacagacaccaacaagttcagtccgtttctgcagacagcggaggacaacactcaggatgaggtggccggagcccctgccgaccaccatgggcccagtgatgaagagcagggcagtcccccagaagacaagctgctgagggccaagcggaactcgtacaccaactgcctgcagaagatcacctgtccccactgtccccgggttttcccttgggccagctccctacagaggcacatgctcacacacactgacagtcagtcggatgcggagactgcagccgccgcgggcgaagtgctagacctcacctcacgggacagagagcagccgtcggagggcgccactgagctccgccaggtcgcaggggatgcgcctgtggagcaggccacggcggaaacggcctcgccggtgcaccgggaagagcacgggcgtggggagagccatgagccggaggaggagcatggcactgaggagagcactggggacgccgacggcgcggaagaggacgcgtcgagcaaccagagcctggacctggacttcgccaccaagctcatggacttcaagctggcggagggcgacggcgaggcaggcgccgggggcgcggcctcgcaggagcagaagctcgcctgcgacacctgtgggaagagcttcaagttcctgggcaccctgagccgccaccggaaggcgcacggccgccaggagcccaaggacgagaagggagatggcgccagcactgcagaggaggggccccagcccgcccctgaacaggaggagaagccccccgagaccccggcagaggtggtggagtcggccccgggtgccggggaggccccggcggaaaagctcgcggaggagacggagggcccctccgacggggagagcgcggccgagaaaaggtcctcagagaagagcgacgatgacaagaaaccaaagacagactcccccaaaagcgtggccagcaaggcagacaagaggaagaaggtctgcagcgtgtgcaacaagcggttctggtcgctgcaggacctgacccggcacatgcgctcccacacaggggaaaggccatacaaatgtcagacctgcgagcgaaccttcaccttgaagcacagcctggttcgccaccagcggatccaccagaaagccaggcatgccaaacaccacgggaaggacagcgacaaggaagagcggggtgaggaggacagcgagaatgagtccacccacagcggcaacaacgccgtctcagagaacgaggctgagctggctcccaatgccagcaaccacatggctgtcacccggagccggaaggagggcttggccagtgccaccaaggactgcagccacagggaggagaaggtcacggcagggtggccgtctgagcctggccagggtgaccttaacccagagagcccggcggccctggggcaggacctgctggagccgcgcagcaagaggcctgcccacccaatcctggccacagctgatggcgcctcccagctcgtggggatggagtgacagcctcagtccccctcagcacagacaaaagccagcagagcaaagcgtctatacttcatggggtttcctcagtgccctttggctgttgaggagtgagagagagagagagagagagagagagagagagagagagagacaagcaggagcgtggctgctcgctcagtgccatagccttaccgcagcctgcgcgggaggccacagcccgtgccgattccagtgccttaactacttaccggatccctccatattatcatgggtgttgtatttttccaaaatgacttcttaaacaaaacaaatattataatgaattgtctggagaggacctcttcatttgagcattagcgttattttgtattggtgtgtgtgagcttgttcttgtgaatctgtgatagcaccgtttgttctgtgagctggaaacagaaggaaaaaacatacccttgggtacccatagccaataactggaagaaaatgatgtgaatttcatgtaaatgaccagaggaaagatggataagatgataatttcttaaatagacattttccttttttctttgtgcttcatggtggagctgtcatctggtccttggtattacaggatgtggttgatgaaggtttccaatatggtttcaggccaaaaccagggaagattctagcttcagcctcatgtccatttccagtctgtcagcattagacatggtcactgttcaagtttcaagacatccattcttaactatagagaagagttactcccctggcgtcttaacctatggaaaacatgcacggataggatatatttgattgcctcctcttccctttcagtatatgtattattaatattattattattattattattattagttcatcagtttgctgttctctgcagtgagcagaatcaaatgggcaatatttgtcctgggagacctgtgccgcacccaggtccccgtgttaacgtgtgcctgcggttgtggttggcaccctcgggtggtagctcttctactgtaatgagacaagcctttcttctgtcactgcagaatttagaaggggccgtgagcagtcttcccaagcatggtccaggagcagctcagagagggtggagtgaggatgcatgcatccagggaacaggcatcaagaagccagggccgtgcctggagcactgcagagatgactttggagaaagcaaagcagtgacccagtgaccaggcacattactcgtgagcgaggtattcccagtcttcctgctaagcctaatccaagccttacccagctgtgctactgtcatttgcaaagcaaggaaatactactactggtaataaaactacacatgcaagatgtcagataagaaataggtttatatttaccttcctgcgatgtggggttggtgcttgaagataaatgtgctgtttctagtttcttaaatagcccacacccctggatgcaaaaaggcagggttatttttacccatgagcatcctgtgcaggcaatagacttccctcactgtctccgcctgcagggaggagaatgtaccccactgcacctgagctcctggtccctcagccaagacctcaggggtccccagccagcctgctgctggggacccctgtgcttgctgcagtgtatggagcctcttgccttcccctggggaggcacccctgtaccccagcttccttcccctggccttttctggccccagtgctcctcctttacatagacttgttcacacagaaacgtgcacgcccccttttctccgccacttcaccagtttctgaaatccaacctcccagacttcacaggaagatagatattcttgagataatgaaaagtgatatcttcgcatacgaaaggaaaaaaggttgaggtatatatgatttttaactgtattaggggtgtatgaaccagtttaaaaacgaggttttatttactgtagagatgaatgcaaatcagaaccaatgatcccttggcctacttagttaaaaccagttcatacatcccttagggtttttattattattattattattattacagttgttattgttgtttttgttgttattattatttggggtttcttgtgttttttctttgcgactctccacactaaacttgcaatattgtggggagaagctgtgactaaactctacgctgcggtgagatgtagcagtaatcagctcccagcgacgtgtgtagctggggctgccgctcgcaataatcactattgatttaaagctttacttagccttgatctgtaccctcgtagtcaataaggtcttgccacattttattagtgaggtggagaaacgtattatttgtttgttgtttttgcccttcccccaccccccaatattaaactgtgaaatttgtgatttgtttaaactctgggtgaatcatagcttagtttgcatgtccagctaatttgtttctatacattttgtttgattctctttctccttctctcagggcttttacaaaaaaatatatatatatggatcttctgaaaagttttttgaggtgcaagttttttctcttttttttttttttttttttttctcattgattaatggacatgatgctgagattcaatcactacatgaaacacctggctgtgaaaacaaaacaacccagagggctgtgttccaagcagcgctggggaagctacgtaacagtcggatgccagttttggaagattcaccatgcgttctgaccctctgttcgtctctttcctctcctctttcttcaagaaggaaattgatcctagtgatttcagcccatgcattaaacaggaaacaataataaatttgtagaattcatatttttctaaagggaacttaaaaactgctgctacatgttatgtacaaaactggtttatgccacatgaacagagaatcacaagtttggttttggtactttttgttcctctttgtattcagttgtatagaacttccaaattcagaatgagaagaaagctgttctgtatcaaaccatttaagcaataaatgttatattttaaaagc

SEQ ID NO: 66090 - DNA, 5064 bp, Artificial Sequence
  derived and/or modified sequence
atgaccagcagcagccccgccggcctggagggcagcgacctgagcagcatcaacaccatgatgagcgccgtgatgagcgtgggcaaggtgaccgagaacggcggcagcccccagggcatcaagagccccagcaagccccccggccccaacagaatcggcagaagaaaccaggagaccaaggaggagaagagcagctacaactgccccctgtgcgagaagatctgcaccacccagcaccagctgaccatgcacatcagacagcacaacaccgacaccggcggcgccgaccacagctgcagcatctgcggcaagagcctgagcagcgccagcagcctggacagacacatgctggtgcacagcggcgagagaccctacaagtgcaccgtgtgcggccagagcttcaccaccaacggcaacatgcacagacacatgaagatccacgagaaggaccccaacagcgccaccgccaccgccccccccagccccctgaagagaagaagactgagcagcaagagaaagctgagccacgacgccgagagcgagagagaggaccccgcccccgccaagaagatggtggaggacggccagagcggcgacctggagaagaaggccgacgaggtgttccactgccccgtgtgcttcaaggagttcgtgtgcaagtacggcctggagacccacatggagacccacagcgacaaccccctgagatgcgacatctgctgcgtgaccttcagaacccacagaggcctgctgagacacaacgccctggtgcacaagcagctgcccagagacgccatgggcagacccttcatccagaacaaccccagcatccccgccggcttccacgacctgggcttcaccgacttcagctgcagaaagttccccagaatcagccaggcctggtgcgagaccaacctgagaagatgcatcagcgagcagcacagattcgtgtgcgacacctgcgacaaggccttccccatgctgtgcagcctggccctgcacaagcagacccacgtggccgccgaccagggccaggagaagccccaggccacccccctgcccggcgacgccctggaccagaagggcttcctggccctgctgggcctgcagcacaccaaggacgtgagacccgcccccgccgaggagcccctgcccgacgacaaccaggccatccagctgcagaccctgaagtgccagctgccccaggaccccggctgcaccaacctgctgagcctgagccccttcgaggccgccagcctgggcggcagcctgaccgtgctgcccgccaccaaggacagcatcaagcacctgagcctgcagcccttccagaagggcttcatcatccagcccgacagcagcatcgtggtgaagcccatcagcggcgagagcgccatcgagctggccgacatccagcagatcctgaagatggccgccagcgcccccccccagatcagcctgccccccttcagcaaggcccccgccgcccccctgcaggccatcttcaagcacatgccccccctgaagcccaagcccctggtgacccccagaaccgtggtggccaccagcacccccccccccctgatcaacgcccagcaggccagccccggctgcatcagccccagcctgccccccccccccctgaagctgctgaagggcagcgtggaggccgccagcaacgcccacctgctgcagagcaagagcggcacccagccccacgccgccaccagactgagcctgcagcagcccagagccgagctgcccggccagcccgagatgaagacccagctggagcaggacagcatcatcgaggccctgctgcccctgagcatggaggccaagatcaagcaggagatcaccgagggcgagctgaaggccttcatgaccgcccccggcggcaagaagacccccgccatgagaaaggtgctgtacccctgcagattctgcaaccaggtgttcgccttcagcggcgtgctgagagcccacgtgagaagccacctgggcatcagcccctaccagtgcaacatctgcgactacatcgccgccgacaaggccgccctgatcagacacctgagaacccacagcggcgagagaccctacatctgcaagatctgccactaccccttcaccgtgaaggccaactgcgagagacacctgagaaagaagcacctgaaggccaccagaaaggacatcgagaagaacatcgagtacgtgagcagcagcgccgccgagctggtggacgccttctgcgcccccgacaccgtgtgcagactgtgcggcgaggacctgaagcactacagagccctgagaatccacatgagaacccactgcggcagaggcctgggcggcggccacaagggcagaaagcccttcgagtgcaaggagtgcagcgccgccttcgccgccaagagaaactgcatccaccacatcctgaagcagcacctgcacgtgcccgagcaggacatcgagagctacgtgctggccgccgacggcctgggccccgccgaggcccccgccgccgaggccagcggcagaggcgaggacagcggctgcgccgccctgggcgactgcaagcccctgaccgccttcctggagccccagaacggcttcctgcacagaggccccacccagcccccccccccccacgtgagcatcaagctggagcccgccagcagcttcgccgtggacttcaacgagcccctggacttcagccagaagggcctggccctggtgcaggtgaagcaggagaacatcagcttcctgagccccagcagcctggtgccctacgactgcagcatggagcccatcgacctgagcatccccaagaacttcagaaagggcgacaaggacctggccacccccagcgaggccaagaagcccgaggaggaggccggcagcagcgagcagcccagcccctgccccgcccccggccccagcctgcccgtgaccctgggccccagcggcatcctggagagccccatggcccccgcccccgccgccacccccgagccccccgcccagcccctgcagggccccgtgcagctggccgtgcccatctacagcagcgccctggtgagcagcccccccctggtgggcagcagcgccctgctgagcggcaccgccctgctgagacccctgagacccaagccccccctgctgctgcccaagccccccgtgaccgaggagctgccccccctggccagcatcgcccagatcatcagcagcgtgagcagcgcccccaccctgctgaagaccaaggtggccgaccccggccccgccagcaccggcagcaacaccaccgccagcgacagcctgggcggcagcgtgcccaaggccgccaccaccgccacccccgccgccaccaccagccccaaggagagcagcgagccccccgcccccgccagcagccccgaggccgccagccccaccgagcagggccccgccggcaccagcaagaagagaggcagaaagagaggcatgagaagcagacccagagccaacagcggcggcgtggacctggacagcagcggcgagttcgccagcatcgagaagatgctggccaccaccgacaccaacaagttcagccccttcctgcagaccgccgaggacaacacccaggacgaggtggccggcgcccccgccgaccaccacggccccagcgacgaggagcagggcagcccccccgaggacaagctgctgagagccaagagaaacagctacaccaactgcctgcagaagatcacctgcccccactgccccagagtgttcccctgggccagcagcctgcagagacacatgctgacccacaccgacagccagagcgacgccgagaccgccgccgccgccggcgaggtgctggacctgaccagcagagacagagagcagcccagcgagggcgccaccgagctgagacaggtggccggcgacgcccccgtggagcaggccaccgccgagaccgccagccccgtgcacagagaggagcacggcagaggcgagagccacgagcccgaggaggagcacggcaccgaggagagcaccggcgacgccgacggcgccgaggaggacgccagcagcaaccagagcctggacctggacttcgccaccaagctgatggacttcaagctggccgagggcgacggcgaggccggcgccggcggcgccgccagccaggagcagaagctggcctgcgacacctgcggcaagagcttcaagttcctgggcaccctgagcagacacagaaaggcccacggcagacaggagcccaaggacgagaagggcgacggcgccagcaccgccgaggagggcccccagcccgcccccgagcaggaggagaagccccccgagacccccgccgaggtggtggagagcgcccccggcgccggcgaggcccccgccgagaagctggccgaggagaccgagggccccagcgacggcgagagcgccgccgagaagagaagcagcgagaagagcgacgacgacaagaagcccaagaccgacagccccaagagcgtggccagcaaggccgacaagagaaagaaggtgtgcagcgtgtgcaacaagagattctggagcctgcaggacctgaccagacacatgagaagccacaccggcgagagaccctacaagtgccagacctgcgagagaaccttcaccctgaagcacagcctggtgagacaccagagaatccaccagaaggccagacacgccaagcaccacggcaaggacagcgacaaggaggagagaggcgaggaggacagcgagaacgagagcacccacagcggcaacaacgccgtgagcgagaacgaggccgagctggcccccaacgccagcaaccacatggccgtgaccagaagcagaaaggagggcctggccagcgccaccaaggactgcagccacagagaggagaaggtgaccgccggctggcccagcgagcccggccagggcgacctgaaccccgagagccccgccgccctgggccaggacctgctggagcccagaagcaagagacccgcccaccccatcctggccaccgccgacggcgccagccagctggtgggcatggagtag

SEQ ID NO: 66091 - protein, 470 aa, Artificial Sequence
  derived and/or modified sequence
MGLYAAAAGVLAGVESRQGSIKGLVYSSNFQNVKQLYALVCETQRYSAVLDAVIASAGLLRAEKKLRPHLAKVLVYELLLGKGFRGGGGRWKALLGRHQARLKAELARLKVHRGVSRNEDLLEVGSRPGPASQLPRFVRVNTLKTCSDDVVDYFKRQGFSYQGRASSLDDLRALKGKHFLLDPLMPELLVFPAQTDLHEHPLYRAGHLILQDRASCLPAMLLDPPPGSHVIDACAAPGNKTSHLAALLKNQGKIFAFDLDAKRLASMATLLARAGVSCCELAEEDFLAVSPSDPRYHEVHYILLDPSCSGSGMPSRQLEEPGAGTPSPVRLHALAGFQQRALCHALTFPSLQRLVYSTCSLCQEENEDVVRDALQQNPGAFRLAPALPAWPHRGLSTFPGAEHCLRASPETTLSSGFFVAVIERVEVPSLTGQSISTRTHTQPSPKEKEETAKSRSRCLHTALHIAEAPG

SEQ ID NO: 66092 - protein, 429 aa, Artificial Sequence
  derived and/or modified sequence
MGLYAAAAGVLAGVESRQGSIKGLVYSSNFQNVKQLYALVCETQRYSAVLDAVIASAGLLRAEKKLRPHLAKVLVYELLLGKGFRGGGGRWKALLGRHQARLKAELARLKVHRGVSRNEDLLEVGSRPGPASQLPRFVRVNTLKTCSDDVVDYFKRQGFSYQGRASSLDDLRALKGKHFLLDPLMPELLVFPAQTDLHEHPLYRAGHLILQDRASCLPAMLLDPPPGSHVIDACAAPGNKTSHLAALLKNQGKIFAFDLDAKRLASMATLLARAGVSCCELAEEDFLAVSPSDPRYHEVHYILLDPSCSGSGMPSRQLEEPGAGTPSPVRLHALAGFQQRALCHALTFPSLQRLVYSTCSLCQEENEDVVRDALQQNPGAFRLAPALPAWPHRGLSTFPGAEHCLRASPETTLSSGFFVAVIERVEVPR

SEQ ID NO: 66093 - DNA, 1413 bp, Artificial Sequence
  derived and/or modified sequence
atgggcctgtacgccgccgccgccggcgtgctggccggcgtggagagcagacagggcagcatcaagggcctggtgtacagcagcaacttccagaacgtgaagcagctgtacgccctggtgtgcgagacccagagatacagcgccgtgctggacgccgtgatcgccagcgccggcctgctgagagccgagaagaagctgagaccccacctggccaaggtgctggtgtacgagctgctgctgggcaagggcttcagaggcggcggcggcagatggaaggccctgctgggcagacaccaggccagactgaaggccgagctggccagactgaaggtgcacagaggcgtgagcagaaacgaggacctgctggaggtgggcagcagacccggccccgccagccagctgcccagattcgtgagagtgaacaccctgaagacctgcagcgacgacgtggtggactacttcaagagacagggcttcagctaccagggcagagccagcagcctggacgacctgagagccctgaagggcaagcacttcctgctggaccccctgatgcccgagctgctggtgttccccgcccagaccgacctgcacgagcaccccctgtacagagccggccacctgatcctgcaggacagagccagctgcctgcccgccatgctgctggaccccccccccggcagccacgtgatcgacgcctgcgccgcccccggcaacaagaccagccacctggccgccctgctgaagaaccagggcaagatcttcgccttcgacctggacgccaagagactggccagcatggccaccctgctggccagagccggcgtgagctgctgcgagctggccgaggaggacttcctggccgtgagccccagcgaccccagataccacgaggtgcactacatcctgctggaccccagctgcagcggcagcggcatgcccagcagacagctggaggagcccggcgccggcacccccagccccgtgagactgcacgccctggccggcttccagcagagagccctgtgccacgccctgaccttccccagcctgcagagactggtgtacagcacctgcagcctgtgccaggaggagaacgaggacgtggtgagagacgccctgcagcagaaccccggcgccttcagactggcccccgccctgcccgcctggccccacagaggcctgagcaccttccccggcgccgagcactgcctgagagccagccccgagaccaccctgagcagcggcttcttcgtggccgtgatcgagagagtggaggtgcccagcctgaccggccagagcatcagcaccagaacccacacccagcccagccccaaggagaaggaggagaccgccaagagcagaagcagatgcctgcacaccgccctgcacatcgccgaggcccccggctag

SEQ ID NO: 66094 - DNA, 1413 bp, Artificial Sequence
  derived and/or modified sequence
atgggactctacgccgcagctgctggcgtactggcaggagtggaaagccggcaagggagcataaaggggctggtctacagctcaaattttcagaatgtgaagcagctgtacgctctagtgtgcgagactcagaggtacagcgccgtgttggatgcagtaatagccagcgcaggactcctacgggccgagaagaagttgaggccacatctggcaaaagtgctggtctatgagcttctgctgggtaagggattccggggtggtggtggtcggtggaaggccctcttgggccgtcaccaggccagattgaaggcggaactagccaggcttaaagttcaccgaggcgtctcacgcaatgaggacctcctggaggtggggagcagacccggtcccgcctcccaactgccacggttcgtcagggtgaacaccctgaaaacctgtagcgacgacgtggttgactattttaaacgccagggattttcatatcaggggagggccagctctctcgacgatttacgtgccctcaagggaaaacattttctgctggatcccctgatgcccgagctcttggtcttcccagcccagaccgatctgcatgagcacccactgtatagggcaggccacctgatcttgcaggaccgggcaagctgcctacccgccatgctgttggatccgccaccaggcagccatgtcatagatgcctgcgccgcccccggcaacaaaactagccacctggccgccttgctcaagaaccaggggaagatctttgctttcgatttagatgcaaagcggctggccagcatggctacgctgctggcacgagctggggttagttgttgtgagctggctgaggaagacttcctggcggtatctccatctgaccccagatatcatgaagtgcattatattctgctcgacccctcttgcagcggaagtggaatgccatctcggcaattagaggaacccggggctggtaccccgtcaccggtaaggctccacgccctggctggctttcagcagcgcgccctttgccatgctctaacattccccagcctgcagcgattggtgtactcgacatgcagtctgtgtcaagaggagaacgaggacgtcgtccgggatgcactgcaacagaatcccggggcctttcgactggctcctgcgttgcctgcttggccacatagagggctgtctactttccctggtgccgagcactgtttgagagcatctccggaaaccaccctaagcagcggatttttcgtggccgtgatagagagggtggaggtaccctcactgacaggccagagcatctctacaagaacacatacccagccgagcccaaaagaaaaggaggagacagccaaaagccgaagccgctgtctccacacagcgctgcatatcgccgaggctcccgggtag

SEQ ID NO: 66095 - DNA, 1413 bp, Artificial Sequence
  derived and/or modified sequence
atgggcctgtatgctgctgctgctggggtgctggccggcgtggagagccggcagggcagcatcaagggcctggtgtacagcagcaacttccagaatgtgaagcagctgtatgccctggtgtgtgagacccagcgctacagcgctgtgctggatgctgtgattgccagcgctggcctgctgcgggcagagaagaagctgcggccccacctggccaaggtgctggtgtatgagctgctgctgggcaagggcttccggggcggcggcggccgctggaaggccctgctgggccgccaccaggcccggctgaaggccgagctggcccggctgaaggtgcaccggggcgtgtccagaaatgaagacctgctggaggtgggcagccggcccggccctgccagccagctgcccaggtttgtgcgggtgaacaccctgaagacctgcagtgatgatgtggtggactacttcaagaggcagggcttctcctaccagggccgggccagcagcctggatgacctgcgggccctgaagggcaagcacttcctgctggaccccctgatgcctgagctgctggtgtttcctgcccagacagacctgcacgagcaccccctgtacagagctggccacctgatcctgcaggaccgggccagctgcctgcctgccatgctgctggaccccccacctggcagccacgtgattgatgcctgtgccgcccctggcaacaagaccagccacctggccgccctgctgaagaaccagggcaagatctttgcctttgacctggatgccaagaggctggcctccatggccaccctgctggcccgggccggcgtgtcctgctgtgagctggccgaggaggacttcctggccgtgagccccagcgacccccgctaccacgaggtgcactacatcctgctggaccccagctgcagcggcagcggcatgcccagccggcagctggaggagcctggagctggcacccccagccctgtgcggctgcacgccctggccggcttccagcagagggccctgtgccacgccctgaccttccccagcctgcagaggctggtgtacagcacctgcagcctgtgccaggaggagaatgaagatgtggtgagagatgccctgcagcagaaccctggggccttccggctggccccagccctgcctgcctggccccaccggggcctgagcaccttccctggagctgagcactgcctgcgggccagccctgagaccaccctgagcagcggcttctttgtggccgtcatcgagcgggtggaggtgcccagcctgaccggccagagcatcagcaccaggacccacacccagcccagccccaaggagaaggaggagacagccaagagccgcagccgctgcctgcacacagccctgcacatcgccgaggcccctggatag

SEQ ID NO: 66096 - DNA, 1413 bp, Artificial Sequence
  derived and/or modified sequence
atgggcctgtacgccgccgccgccggcgtgctggccggcgtggagagccggcaggggtccatcaaggggctggtttactctagcaactttcagaatgttaagcagctttacgctcttgtatgcgaaacccagcgctactccgctgtactggacgccgtgattgctagtgctggcttgctgcgggccgaaaagaagcttcgaccacacttggcaaaagttctggtgtatgaactcctacttggtaaggggtttcgcggaggcgggggaagatggaaagctcttctcggccgccatcaagctcggttgaaggccgaattagcacgacttaaagttcataggggagtcagtaggaacgaggatttgcttgaagtgggatctcgtccgggcccggcttcccaactcccacggttcgttcgcgtgaacactctgaaaacctgcagcgacgatgtggttgattacttcaagcggcaggggttcagctaccagggacgagcttcctctctggatgacctgcgcgccctgaagggcaagcacttcctacttgaccccttgatgcccgagctgctagtctttcctgcgcagaccgatctgcatgagcaccccctatatcgcgccggccacctgatcctccaagaccgggcgtcgtgcctgcccgccatgctgctggatccacctcctggctctcacgtgatagatgcatgcgctgcccctgggaataaaacaagccatttagccgcactgctgaaaaaccagggaaaaatcttcgcattcgatctggacgccaagcgcctcgcctctatggcgacactgctagcacgcgccggagtaagttgctgcgaactcgcagaggaagatttccttgcagttagtccttcggatccgaggtatcacgaggtacactacatactgctggatccgtcatgctctggctctggaatgcctagtagacagctagaggagcccggagccgggacaccatcccccgtgcgcctgcatgcgcttgccgggtttcagcagagagccctctgccacgccctgacatttcccagtcttcagcgactcgtctactccacctgcagcctatgccaggaagaaaacgaggacgtggtgcgcgacgctctgcagcagaatcctggagcttttcggctggctccagccctgccagcctggccgcacagagggctgagcacattccctggcgccgaacattgtctgcgcgccagtccagagaccacacttagcagcggatttttcgtggcggttatcgagcgcgttgaagtaccctccctgacggggcaatcaatctctactagaacgcacacccagccatcaccaaaggaaaaagaggagaccgcaaaatcccggtcccggtgcctgcatactgcactgcatattgctgaggctcctggttag

SEQ ID NO: 66097 - DNA, 1602 bp, Artificial Sequence
  derived and/or modified sequence
acagagccgtaaaggcgcgcgggaacatggggctgtatgctgcagctgcaggcgtgttggccggcgtggagagccgccagggctctatcaaggggttggtgtactccagcaacttccagaacgtgaagcagctgtacgcgctggtgtgcgaaacgcagcgctactccgccgtgctggatgctgtgatcgccagcgccggcctcctccgtgcggagaagaagctgcggccgcacctggccaaggtgctagtgtatgagttgttgttgggaaagggctttcgagggggtgggggccgatggaaggctctgttgggccggcaccaggcgaggctcaaggctgagttggctcggctcaaggttcatcggggtgtgagccggaatgaggacctgttggaagtgggatccaggcctggtccagcctcccagctgcctcgatttgtgcgtgtgaacactctcaagacctgctccgatgatgtagttgattatttcaagagacaaggtttctcctatcagggtcgggcttccagcctcgatgacttacgagccctcaaggggaagcattttctcctggaccccttgatgccggagctgctggtgtttcccgcccagacagatctgcatgaacacccactgtaccgggccggacacctcattctgcaggacagggccagctgtctcccagccatgctgctggaccccccgccaggctcccatgtcatcgatgcctgtgccgccccaggcaataagaccagtcacttggctgctcttctgaagaaccaagggaagatctttgcctttgacctggatgccaagcggctggcatccatggccacgctgctggcccgggctggcgtctcttgctgtgaactggctgaggaggacttcctggcggtctccccctcggatccacgctaccatgaggtccactacatcctgctggatccttcctgcagtggctcgggtatgccgagcagacagctggaggagcccggggcaggcacacctagcccggtgcgtctgcatgccctggcagggttccagcagcgagccctgtgccacgcgctcactttcccttccctgcagcggctcgtctactccacgtgctccctctgccaggaggagaatgaagacgtggtgcgagatgcgctgcagcagaacccgggcgccttcaggctagctcccgccctgcctgcctggccccaccgaggcctgagcacgttcccgggtgccgagcactgcctccgggcctcccctgagaccacactcagcagtggcttcttcgttgctgtaattgaacgggtcgaggtgccaagcctcacaggccaaagcatcagcaccagaacgcacacccagcccagccccaaagagaaagaagagacagcaaagagccgcagccggtgcttgcacaccgccttgcacatagcagaggctccgggctgactccttcctggtgggaaaggaagatgcctgtcctctccgtggaggaccctgggccctcaccgcaggaagcagtttgggttttgaaaggttattgggtcccttccttgggctgtgttcttgctggtgagcaaagtgttgcctgcaaaaataaaatgcagaacgt

SEQ ID NO: 66098 - DNA, 2269 bp, Artificial Sequence
  derived and/or modified sequence
aggcgcgcgggaacatggggctgtatgctgcagctgcaggcgtgttggccggcgtggagagccgccagggctctatcaaggggttggtgtactccagcaacttccagaacgtgaagcagctgtacgcgctggtgtgcgaaacgcagcgctactccgccgtgctggatgctgtgatcgccagcgccggcctcctccgtgcggagaagaagctgcggccgcacctggccaaggttcatcggggtgtgagccggaatgaggacctgttggaagtgggatccaggcctggtccagcctcccagctgcctcgatttgtgcgtgtgaacactctcaagacctgctccgatgatgtagttgattatttcaagagacaaggtttctcctatcagggtcgggcttccagcctcgatgacttacgagccctcaaggggaagcattttctcctggaccccttgatgccggagctgctggtgtttcccgcccagacagatctgcatgaacacccactgtaccgggccggacacctcattctgcaggacagggccagctgtctcccagccatgctgctggaccccccgccaggctcccatgtcatcgatgcctgtgccgccccaggcaataagaccagtcacttggctgctcttctgaagaaccaagggaagatctttgcctttgacctggatgccaagcggctggcatccatggccacgctgctggcccgggctggcgtctcttgctgtgaactggctgaggaggacttcctggcggtctccccctcggatccacgctaccatgaggtccactacatcctgctggatccttcctgcagtggctcgggtatgccgagcagacagctggaggagcccggggcaggcacacctagcccggtgcgtctgcatgccctggcagggttccagcagcgagccctgtgccacgcgctcactttcccttccctgcagcggctcgtctactccacgtgctccctctgccaggaggagaatgaagacgtggtgcgagatgcgctgcagcagaacccgggcgccttcaggctagctcccgccctgcctgcctggccccaccgaggcctgagcacgttcccgggtgccgagcactgcctccgggcctcccctgagaccacactcagcagtggcttcttcgttgctgtaattgaacgggtcgaggtgccaaggtgagtgagtgggggcgtgcttgggaggcgcaggatggcaccggcacatctaacatctacacttctctagctcagcctcacaggccaaagcatcagcaccagaacgcacacccagcccagccccaaagagaaagaagagacagcaaagagccgcagccggtgcttgcacaccgccttgcacatagcagaggctccgggctgactccttcctggtgggaaaggaagatgcctgtcctctccgtggaggaccctgggccctcaccgcaggaagcagtttgggttttgaaaggttattgggtcccttccttgggctgtgttcttgctggtgagcaaagtgttgcctgcaaaaataaaatgcagaacgtactctacgatagatcacagttttttattcttaatgtcacaagcaggagaaaaatctcacattcatactaaaagttccaactagactcaacaggaatgaagtctctatttgtaatggaaagtcccagcctcccgctgccgtccagtgcgtgtactgtacacatccacactcacactcactcagggttcccggaccggctgtcctgcctgcggaactgaggtaaactagctcaggtgctgacactaggagggtctaccttacataaggtacaggtagaagcttgattgctaggcccaggcccacccagaccctccaatcctaacaggtatttaggcttgaggttcactccctcctcagctgcacacgcagccaggtattaacgaggatcagagctgttctgaggggtgggaaggagcagccccaccaccactcactcaccctcagtcacatcggggagggggcaccagttacatttacatcacattatttataaaataagaattacatttcatataacatggccagaaggagctctagtcccccaggaaagctgccggggacagcatttgagcctcttctttgcacaggcataacttaactatacagctaattcctagttaatagcatttatacttaaccacctcaatgaaccaagcttgaaggaatttaaaaggcaatttagcttaaatacaaaaataaatttttgttaaaaaacgttt

SEQ ID NO: 66099 - DNA, 1672 bp, Artificial Sequence
  derived and/or modified sequence
aaaggcgcgcgggaacatggggctgtatgctgcagctgcaggcgtgttggccggcgtggagagccgccagggctctatcaaggggttggtgtactccagcaacttccagaacgtgaagcagctgtacgcgctggtgtgcgaaacgcagcgctactccgccgtgctggatgctgtgatcgccagcgccggcctcctccgtgcggagaagaagctgcggccgcacctggccaaggtgctagtgtatgagttgttgttgggaaagggctttcgagggggtgggggccgatggaaggctctgttgggccggcaccaggcgaggctcaaggctgagttggctcggctcaaggttcatcggggtgtgagccggaatgaggacctgttggaagtgggatccaggcctggtccagcctcccagctgcctcgatttgtgcgtgtgaacactctcaagacctgctccgatgatgtagttgattatttcaagagacaaggtttctcctatcagggtcgggcttccagcctcgatgacttacgagccctcaaggggaagcattttctcctggaccccttgatgccggagctgctggtgtttcccgcccagacagatctgcatgaacacccactgtaccgggccggacacctcattctgcaggacagggccagctgtctcccagccatgctgctggaccccccgccaggctcccatgtcatcgatgcctgtgccgccccaggcaataagaccagtcacttggctgctcttctgaagaaccaagggaagatctttgcctttgacctggatgccaagcggctggcatccatggccacgctgctggcccgggctggcgtctcttgctgtgaactggctgaggaggacttcctggcggtctccccctcggatccacgctaccatgaggtccactacatcctgctggatccttcctgcagtggctcgggtatgccgagcagacagctggaggagcccggggcaggcacacctagcccggtgcgtctgcatgccctggcagggttccagcagcgagccctgtgccacgcgctcactttcccttccctgcagcggctcgtctactccacgtgctccctctgccaggaggagaatgaagacgtggtgcgagatgcgctgcagcagaacccgggcgccttcaggctagctcccgccctgcctgcctggccccaccgaggcctgagcacgttcccgggtgccgagcactgcctccgggcctcccctgagaccacactcagcagtggcttcttcgttgctgtaattgaacgggtcgaggtgccaaggtgagtgagtgggggcgtgcttgggaggcgcaggatggcaccggcacatctaacatctacacttctctagctcagcctcacaggccaaagcatcagcaccagaacgcacacccagcccagccccaaagagaaagaagagacagcaaagagccgcagccggtgcttgcacaccgccttgcacatagcagaggctccgggctgactccttcctggtgggaaaggaagatgcctgtcctctccgtggaggaccctgggccctcaccgcaggaagcagtttgggttttgaaaggttattgggtcccttccttgggctgtgttcttgctggtgagcaaagtgttgcctgcaaaaataaaatgcagaacgtactct

SEQ ID NO: 66100 - DNA, 1413 bp, Artificial Sequence
  derived and/or modified sequence
atgggcctgtacgccgctgctgccggagtccttgcaggtgtggaaagcagacaggggtccatcaaaggtctggtgtatagttcaaattttcaaaatgtgaaacagctgtacgcacttgtgtgtgagacgcagcggtacagtgctgtgctggatgccgtcatcgcctctgccggactgctcagagcagagaagaagttgcgtccacacctagccaaagtccttgtatatgagcttctgttaggcaagggctttcgcggaggcggtggtcgctggaaagctctcctgggtagacatcaggccaggctgaaggctgaactggccaggctgaaggtccatcgaggcgtttcaaggaacgaggacctgctggaggtgggctccagacctgggcctgcatctcagctccctaggttcgtgagagtgaacaccctaaaaacttgtagtgatgacgttgtggactattttaaacgccaggggtttagctatcagggcagagcaagtagcctcgacgacttgagagcgctcaagggcaagcactttctgcttgatccactgatgcccgagcttttagtgttcccagcccagacagatctccacgagcatcccctgtaccgggctgggcacctcattctgcaagatagggcctcatgcctcccagccatgttgctcgatcctccaccaggctctcatgtaattgacgcctgtgccgcacccggaaacaagacttctcatctggccgcactcctgaagaaccagggcaaaatttttgcctttgacctggacgcgaaacgactagccagtatggcaaccctgctggctagagcaggggtgtcttgctgcgaactcgcagaagaggatttcttagctgtttctccctcagacccccgttaccatgaagtgcactacatcttgttagacccatcttgcagcggtagcggcatgccgtctaggcagttggaagagcccggagctggcacccccagtcctgtccgattgcacgccctggccggattccaacaaagagccctatgtcatgcactgactttcccgagtctccagaggctggtttacagtacttgcagtctctgccaagaggaaaacgaggatgtcgtgcgggacgccctgcagcagaatccaggagcatttaggctggctcctgccttacccgcttggcctcaccggggattaagcacattccccggtgccgaacattgtctgagagcctctcctgagacaacacttagctcgggcttctttgtggcagtgattgaaagagttgaagtaccttcactgacagggcagtcaatcagtactcgaactcacacacagccctctccaaaagaaaaggaggagaccgctaaaagcagatctcgatgcttgcatacggccctgcacattgctgaagccccaggctag

SEQ ID NO: 66101 - protein, 391 aa, Artificial Sequence
  derived and/or modified sequence
MGLYAAAAGVLAGVESRQGSIKGLVYSSNFQNVKQLYALVCETQRYSAVLDAVIASAGLLRAEKKLRPHLAKVHRGVSRNEDLLEVGSRPGPASQLPRFVRVNTLKTCSDDVVDYFKRQGFSYQGRASSLDDLRALKGKHFLLDPLMPELLVFPAQTDLHEHPLYRAGHLILQDRASCLPAMLLDPPPGSHVIDACAAPGNKTSHLAALLKNQGKIFAFDLDAKRLASMATLLARAGVSCCELAEEDFLAVSPSDPRYHEVHYILLDPSCSGSGMPSRQLEEPGAGTPSPVRLHALAGFQQRALCHALTFPSLQRLVYSTCSLCQEENEDVVRDALQQNPGAFRLAPALPAWPHRGLSTFPGAEHCLRASPETTLSSGFFVAVIERVEVPR

SEQ ID NO: 66102 - DNA, 1176 bp, Artificial Sequence
  derived and/or modified sequence
atgggcctgtacgccgccgccgccggcgtgctggccggcgtggagagcagacagggcagcatcaagggcctggtgtacagcagcaacttccagaacgtgaagcagctgtacgccctggtgtgcgagacccagagatacagcgccgtgctggacgccgtgatcgccagcgccggcctgctgagagccgagaagaagctgagaccccacctggccaaggtgcacagaggcgtgagcagaaacgaggacctgctggaggtgggcagcagacccggccccgccagccagctgcccagattcgtgagagtgaacaccctgaagacctgcagcgacgacgtggtggactacttcaagagacagggcttcagctaccagggcagagccagcagcctggacgacctgagagccctgaagggcaagcacttcctgctggaccccctgatgcccgagctgctggtgttccccgcccagaccgacctgcacgagcaccccctgtacagagccggccacctgatcctgcaggacagagccagctgcctgcccgccatgctgctggaccccccccccggcagccacgtgatcgacgcctgcgccgcccccggcaacaagaccagccacctggccgccctgctgaagaaccagggcaagatcttcgccttcgacctggacgccaagagactggccagcatggccaccctgctggccagagccggcgtgagctgctgcgagctggccgaggaggacttcctggccgtgagccccagcgaccccagataccacgaggtgcactacatcctgctggaccccagctgcagcggcagcggcatgcccagcagacagctggaggagcccggcgccggcacccccagccccgtgagactgcacgccctggccggcttccagcagagagccctgtgccacgccctgaccttccccagcctgcagagactggtgtacagcacctgcagcctgtgccaggaggagaacgaggacgtggtgagagacgccctgcagcagaaccccggcgccttcagactggcccccgccctgcccgcctggccccacagaggcctgagcaccttccccggcgccgagcactgcctgagagccagccccgagaccaccctgagcagcggcttcttcgtggccgtgatcgagagagtggaggtgcccagatag

SEQ ID NO: 66103 - DNA, 1176 bp, Artificial Sequence
  derived and/or modified sequence
atgggtctatacgcagcagcagcaggcgtgcttgctggggtggagtccagacagggctcaatcaaaggactggtgtattcatccaactttcaaaatgttaagcagctttacgctctggtgtgcgagacccaaagatattcagcagtgttggacgccgtcatagcctctgcgggcctcctgcgtgcggagaagaaactccgtccgcacctcgctaaagtgcatcgcggtgtcagtcggaacgaggacttactcgaggtgggctcacgccccggcccagccagccagctcccccgattcgtgcgcgttaacacactgaaaacctgttcagacgacgtggtggactatttcaagagacagggctttagctaccaaggacgtgcgagcagtctggatgatctgcgggcccttaagggtaagcactttctgttggacccactaatgccagagcttctcgtgttccctgctcagaccgacctccacgagcatcctctgtaccgggccggacacttgattttgcaggatcgagccagctgcctgccagcgatgttgctcgatcctccaccaggctcccacgtgatagatgcttgcgccgccccgggcaataagacgagtcatttggcggcactccttaaaaatcagggaaagatcttcgctttcgatctggacgctaagcgcctggcttcaatggctacccttttggcacgggccggcgtgagctgctgtgagcttgcggaggaagacttcctcgccgtgtcaccctccgatccgcgctatcacgaggtccattacattctgctcgatccctcctgttctggcagcggcatgccctcacgacagttggaagagcctggggccggtacgccctccccggttcgcctccacgctctcgccggattccaacaacgggcattgtgtcacgccctgactttcccaagtctgcagaggcttgtgtactccacttgtagcctttgtcaggaggagaacgaggatgtcgtccgagacgccctccagcaaaaccccggcgcttttcggctcgcaccagctctcccagcttggccacacaggggcctatctacctttcctggagccgagcactgtctaagggctagtcccgagacaactctgtcgtccggtttctttgtagcagtcatagagagagtagaagtacccagatag

SEQ ID NO: 66104 - DNA, 1176 bp, Artificial Sequence
  derived and/or modified sequence
atgggcctgtatgctgctgctgctggggtgctggccggcgtggagagccggcagggcagcatcaagggcctggtgtacagcagcaacttccagaatgtgaagcagctgtatgccctggtgtgtgagacccagcgctacagcgctgtgctggatgctgtgattgccagcgctggcctgctgcgggcagagaagaagctgcggccccacctggccaaggtgcaccggggcgtgtccagaaatgaagacctgctggaggtgggcagccggcccggccctgccagccagctgcccaggtttgtgcgggtgaacaccctgaagacctgcagtgatgatgtggtggactacttcaagaggcagggcttctcctaccagggccgggccagcagcctggatgacctgcgggccctgaagggcaagcacttcctgctggaccccctgatgcctgagctgctggtgtttcctgcccagacagacctgcacgagcaccccctgtacagagctggccacctgatcctgcaggaccgggccagctgcctgcctgccatgctgctggaccccccacctggcagccacgtgattgatgcctgtgccgcccctggcaacaagaccagccacctggccgccctgctgaagaaccagggcaagatctttgcctttgacctggatgccaagaggctggcctccatggccaccctgctggcccgggccggcgtgtcctgctgtgagctggccgaggaggacttcctggccgtgagccccagcgacccccgctaccacgaggtgcactacatcctgctggaccccagctgcagcggcagcggcatgcccagccggcagctggaggagcctggagctggcacccccagccctgtgcggctgcacgccctggccggcttccagcagagggccctgtgccacgccctgaccttccccagcctgcagaggctggtgtacagcacctgcagcctgtgccaggaggagaatgaagatgtggtgagagatgccctgcagcagaaccctggggccttccggctggccccagccctgcctgcctggccccaccggggcctgagcaccttccctggagctgagcactgcctgcgggccagccctgagaccaccctgagcagcggcttctttgtggccgtcatcgagcgggtggaggtgcccaggtag

SEQ ID NO: 66105 - DNA, 1176 bp, Artificial Sequence
  derived and/or modified sequence
atgggcctgtacgccgccgccgccggcgtgctggccggcgtggagtccaggcagggaagcattaagggattagtatattcttccaacttccagaatgtgaagcagctctatgccctggtttgtgaaacccagcgctactctgctgtacttgacgccgtgatagcatcagccggtctactcagggccgagaagaaattacgacctcatctggctaaagtccaccggggagtgtcccgcaatgaggacctcttggaggtgggcagcagaccaggccctgcaagccaactccctcgattcgtgcgcgtgaacacacttaaaacctgttccgacgacgtggtcgactactttaaaaggcaggggttttcgtatcaggggcgcgccagctctttagatgacctgagggccttgaagggcaagcactttctcctggaccccctcatgcccgagctgctggtgttccccgcacagaccgatctccacgaacatcccctctacagggctggacatctaattttgcaggatcgggcatcttgtctgcccgctatgcttctggatccgcctccaggctcccatgtgatagatgcatgcgctgcccccgggaataaaacaagccatttggccgcactgctgaagaatcaagggaaaatattcgcctttgacctggacgccaagaggctggcctccatggctactctgcttgcacgcgccggcgtgagttgttgcgaattggcagaagaggactttttggcggtgtctcctagtgaccccagataccatgaagtccattatattttgctggaccctagctgctcaggctccggcatgccttctaggcagttagaagagcctggtgccggcactccctcaccagtgcgccttcacgctctggctgggttccagcaacgggctctctgtcacgcgctcacctttccctcattgcagcgcttggtttattccacgtgtagcctatgtcaggaggagaacgaggatgtagtccgggatgcactgcagcagaaccccggggctttccggcttgctcccgctctgcccgcatggccacatagaggcctgtccacattcccgggagcagaacactgcctgcgggcgtcgcctgaaactacattgtcaagcggcttttttgtggccgtgattgagcgcgtggaggtgccccggtag

SEQ ID NO: 66106 - DNA, 1176 bp, Artificial Sequence
  derived and/or modified sequence
atgggcctatacgcggctgcggcaggtgtgctggcgggagtcgagtcccggcaggggtctattaagggacttgtttactcttcaaatttccagaatgtaaagcagttatacgcccttgtgtgcgaaacacagcgctactctgccgtgctagatgctgtgatagctagtgccggactgctgcgtgctgagaaaaaactcagacctcacctggctaaagttcaccggggagtgagccgcaatgaggatctgctcgaggtgggcagtcggcctggacctgcgtcccagcttccaagattcgtgagggtgaatacgctcaagacctgttcagatgatgtggtggactacttcaagcgccaaggattctcctatcaggggagagcctcctctctggacgatctgagagccctcaagggaaagcacttcctgctggaccctctgatgcctgaactcctggtcttcccagcacagacagacctacatgagcaccccctgtatcgtgccggtcacttgattcttcaagaccgagcctcctgcttgccggcaatgctattggaccctccgcctggctcccacgtaattgacgcatgtgccgcaccagggaataagaccagccacctggctgccctgctaaagaaccaaggaaagatctttgcattcgatctggatgctaaaaggctcgcttcgatggccactctgcttgcacgagcaggagtgtcctgttgcgaactcgccgaggaagattttctcgccgtcagtccttctgatcctaggtatcatgaggtgcattacatcctgctcgatccaagctgttccggatcgggaatgcccagcaggcaactcgaagaacccggtgcaggaactccatcacctgtacgactgcatgcccttgcgggatttcagcagagagctctgtgccatgctctcacatttccaagcttgcagcggctggtatacagtacttgctccctgtgccaagaagagaacgaggatgtggttcgggacgcgctgcagcaaaacccaggtgcattccggctcgcccctgctctgcctgcttggcctcatcgaggtctgagcacctttccaggtgcagagcattgtctccgtgccagccccgagacaacgctttcaagcggattctttgtggcagtgatcgaacgagtggaggtcccacgatag

SEQ ID NO: 66107 - protein, 342 aa, Artificial Sequence
  derived and/or modified sequence
MALFAVFQTTFFLTLLSLRTYQSEVLAERLPLTPVSLKVSTNSTRQSLHLQWTVHNLPYHQELKMVFQIQISRIETSNVIWVGNYSTTVKWNQVLHWSWESELPLECATHFVRIKSLVDDAKFPEPNFWSNWSSWEEVSVQDSTGQDILFVFPKDKLVEEGTNVTICYVSRNIQNNVSCYLEGKQIHGEQLDPHVTAFNLNSVPFIRNKGTNIYCEASQGNVSEGMKGIVLFVSKVLEEPKDFSCETEDFKTLHCTWDPGTDTALGWSKQPSQSYTLFESFSGEKKLCTHKNWCNWQITQDSQETYNFTLIAENYLRKRSVNILFNLTHRGETRVVTAHRGH

SEQ ID NO: 66108 - DNA, 1029 bp, Artificial Sequence
  derived and/or modified sequence
atggccctcttcgcggtgtttcagactacattttttctcacactgctgagtcttcgcacctatcagtcagaagtgctggctgaaagacttccactgacacctgtgagtctaaaggtcagcacaaacagtacacgccagagtctgcacctgcagtggaccgttcataatctaccctaccaccaagagctcaagatggtgtttcagatccaaattagccgcatcgagactagcaatgtaatttgggtagggaactactctaccacagtgaagtggaatcaggtgttgcattggtcttgggaaagcgaactgccgcttgagtgtgctacccactttgtcaggattaaatcactcgtggatgatgccaagttcccagaaccaaatttttggtccaactggtcctcctgggaggaggtctctgtccaggattccaccgggcaggatattttattcgtgttccctaaagacaagctggtggaggagggtacgaacgtgactatttgttacgtgtccagaaacatacaaaacaacgtctcctgctacctcgaaggtaaacaaatacacggcgaacagttggacccgcatgttaccgctttcaacttgaattccgtgcccttcatccggaacaagggcacaaatatctactgtgaggcaagtcagggtaacgtgtctgaggggatgaaagggattgtactcttcgttagcaaggtgctggaggagccaaaggatttttcttgcgagacagaggactttaagaccctccattgcacatgggatcccggtaccgacactgccctcggctggtccaagcagccaagtcagtcttataccctatttgaatcattcagcggcgagaagaaactgtgtacacacaaaaattggtgtaactggcagatcacacaggacagccaggaaacctacaatttcaccttaatcgccgaaaactaccttcgcaaacggtctgtcaatattttgttcaacctgacccacaggggcgagacaagagtcgtgaccgcgcatcgtggccattag

SEQ ID NO: 66109 - DNA, 1029 bp, Artificial Sequence
  derived and/or modified sequence
atggccctgtttgctgtgttccagaccaccttcttcctgaccctgctgagcctgcggacctaccagagcgaggtgctggccgagcggctgcccctgacccctgtgtccctgaaggtgtccaccaacagcacccggcagagcctgcacctgcagtggacagtgcacaacctgccctaccaccaggagctgaagatggtgttccagatccagatcagccgcatcgagaccagcaatgtcatctgggtgggcaactacagcaccaccgtgaagtggaaccaggtgctgcactggagctgggagagcgagctgcccctggagtgtgccacccactttgtgcgcatcaagagcctggtggatgatgccaagtttcctgagcccaacttctggagcaactggagctcctgggaggaggtgtctgtgcaggacagcacaggccaggacatcctgtttgtgttccccaaggacaagctggtggaggagggcaccaacgtgaccatctgctacgtgtccaggaacatccagaacaacgtgtcctgctacctggagggcaagcagatccatggagagcagctggacccccacgtgacagccttcaacctgaacagcgtgcccttcatcagaaataaaggcaccaacatctactgtgaggccagccagggcaatgtgtctgagggcatgaagggcatcgtgctgtttgtgtccaaggtgctggaggagcccaaggacttcagctgtgaaacagaggacttcaagaccctgcactgcacctgggaccctggaacagacacagccctgggctggagcaagcagcccagccagagctacaccctgtttgagagcttcagcggggagaagaagctgtgcacccacaagaactggtgcaactggcagatcacccaggacagccaggagacctacaacttcaccctgattgctgagaactacctgaggaagaggtctgtgaacatcctcttcaacctgacccacagaggagagaccagggtggtgacagcccaccggggccactag

SEQ ID NO: 66110 - DNA, 1029 bp, Artificial Sequence
  derived and/or modified sequence
atggccctgttcgccgtgttccagaccaccttcttcctgaccctgctgagcctgaggacgtaccagtctgaagtactcgcggagagactgcccctgacacccgtgtccctgaaggttagtaccaactctactcggcagtcattgcatctgcagtggacagtccataatctcccttatcatcaggagttgaagatggtgtttcagatccaaatttcccgtattgagacttccaacgtgatctgggtggggaactactctaccaccgtgaaatggaatcaggtgctccactggagctgggaatcagagctcccattagagtgtgcaacccacttcgtgcgaattaaatccctggtggacgacgctaagttccccgaaccaaatttctggtccaattggtcttcttgggaagaggtaagcgtgcaggacagtaccgggcaggatattctctttgttttccccaaggataaactggtagaggaaggcacgaatgtgactatctgttatgttagcagaaacattcagaataacgtgtcatgctatctcgagggcaagcagatccatggcgagcagctcgatccacatgtgaccgcatttaacctgaattctgtgccattcataaggaataagggcaccaacatctattgcgaagcgtctcagggaaacgtaagtgaaggtatgaaagggatagttctcttcgtttccaaggttcttgaggaacctaaggatttttcgtgtgagaccgaggatttcaaaacgctccactgtacttgggatccagggaccgacactgcgctcggttggtccaagcagccttcgcagtcctacacactgttcgagtcgtttagcggggagaagaagctttgcacacacaagaattggtgcaactggcagatcacacaggattctcaggaaacatacaatttcaccctgatagcagagaattacctgcgcaagaggtccgtaaacatcctatttaatcttacccatcgtggggagacaagggtggttacagcacaccggggacactag

SEQ ID NO: 66111 - DNA, 1740 bp, Artificial Sequence
  derived and/or modified sequence
gcggccgcctccccccgggactgaagggagggaattcctgtgggtcccaggagtgccaagagtgcgcagcaagacgggaaattgcaaaagacctcacccctctgccctcccccgcggttttccagtaactcccgcccctccgcgcttgccccgcagctgattcatagccccggcccgggccgcctctgcacgtccgccccggagcccgcacccgcgccccacgcgccgccgaggactcggcccggctcgtggagcccttcgcccgcggcaaaaccagaactgatggctctatttgcagtctttcagacaacattcttcttaacattgctgtccttgaggacttaccagagtgaagtcttggctgaacgtttaccattgactcctgtatcacttaaagtttccaccaattctacgcgtcagagtttgcacttacaatggactgtccacaaccttccttatcatcaggaattgaaaatggtatttcagatccagatcagtaggattgaaacatccaatgtcatctgggtggggaattacagcaccactgtgaagtggaaccaggttctgcattggagctgggaatctgagctccctttggaatgtgccacacactttgtaagaataaagagtttggtggacgatgccaagttccctgagccaaatttctggagcaactggagttcctgggaggaagtcagtgtacaagattctactggacaggatatattgttcgttttccctaaagataagctggtggaagaaggcaccaatgttaccatttgttacgtttctaggaacattcaaaataatgtatcctgttatttggaagggaaacagattcatggagaacaacttgatccacatgtaactgcattcaacttgaatagtgtgcctttcattaggaataaagggacaaatatctattgtgaggcaagtcaaggaaatgtcagtgaaggcatgaaaggcatcgttctttttgtctcaaaagtacttgaggagcccaaggacttttcttgtgaaaccgaggacttcaagactttgcactgtacttgggatcctgggacggacactgccttggggtggtctaaacaaccttcccaaagctacactttatttgaatcattttctggggaaaagaaactttgtacacacaaaaactggtgtaattggcaaataactcaagactcacaagaaacctataacttcacactcatagctgaaaattacttaaggaagagaagtgtcaatatcctttttaacctgactcatcgaggtgagactagagttgtcacagcccaccgtggccactaacgtgtctttgtttcacagactgtgtgatcaagtaaatgtgctgtagatctttgcctcattcacagcggaggtgagagttagaatttatacctattgttcatgccacgtttctcctcatggatgcacgcatcccctattatttgtttcttttaataatgtcacgagcaccaatgagcttactacccaacttcaaaactaggactctaacaataacttctgtcatatctcatcctgtaacgcccccaccttcgctccttccgccaagataattatcactttaaattgtgtgcgtgtgtattctcatttcttatgtgatggtaaaaatgcctttattttgtttggttttaatgcatagaaaggacatcaagctgtatgtaataattcagtaattatgtttatataatattaaattgctaatatttgcccata

SEQ ID NO: 66112 - DNA, 1029 bp, Artificial Sequence
  derived and/or modified sequence
atggctctcttcgcagttttccagaccacattctttttgactctgctcagcctcaggacatatcagagcgaggtgctggctgaacgccttcctctcacacctgtgtcactgaaagtcagcacaaatagtaccagacagtctctacatctgcagtggacagtccataacttgccctatcatcaggaactgaaaatggtgtttcaaatccagataagtagaatagagacatccaatgtgatatgggtgggaaattatagcacaacagtcaaatggaatcaggtcttgcattggtcttgggagagcgagcttccacttgaatgtgcaacacattttgtgaggataaagtctcttgtggacgacgccaaatttcccgagccaaatttctggtctaactggagttcatgggaggaggtttcggttcaggactctacaggacaggacatcttgttcgtcttccctaaggacaaattggtggaagagggcaccaacgtgactatttgttacgtgtccaggaatatccaaaataacgtgtcttgttatttggagggcaagcaaatccatggggagcagctggaccctcacgtgacggccttcaatctgaatagcgtgcccttcattcggaacaaaggcactaatatttattgcgaggcaagccagggtaacgtgtccgagggcatgaaggggatcgtgctcttcgtaagcaaggtactggaggagccaaaagacttcagttgtgaaaccgaagactttaagactctccattgcacttgggatcccggaaccgacaccgccctcggctggtcaaaacaaccgtctcagagctacactctcttcgaatcgttttctggagagaaaaagctgtgcacccacaaaaattggtgcaattggcaaataacacaggacagccaagagacgtacaatttcactctgatcgcagaaaactatttacgtaaaagatcagtgaacatcttatttaacttaacacatagaggcgaaacaagagtggtcacagctcatagaggacactag

SEQ ID NO: 66113 - DNA, 1029 bp, Artificial Sequence
  derived and/or modified sequence
atggccctgttcgccgtgttccagaccaccttcttcctgaccctgctgagcctgagaacctaccagagcgaggtgctggccgagagactgcccctgacccccgtgagcctgaaggtgagcaccaacagcaccagacagagcctgcacctgcagtggaccgtgcacaacctgccctaccaccaggagctgaagatggtgttccagatccagatcagcagaatcgagaccagcaacgtgatctgggtgggcaactacagcaccaccgtgaagtggaaccaggtgctgcactggagctgggagagcgagctgcccctggagtgcgccacccacttcgtgagaatcaagagcctggtggacgacgccaagttccccgagcccaacttctggagcaactggagcagctgggaggaggtgagcgtgcaggacagcaccggccaggacatcctgttcgtgttccccaaggacaagctggtggaggagggcaccaacgtgaccatctgctacgtgagcagaaacatccagaacaacgtgagctgctacctggagggcaagcagatccacggcgagcagctggacccccacgtgaccgccttcaacctgaacagcgtgcccttcatcagaaacaagggcaccaacatctactgcgaggccagccagggcaacgtgagcgagggcatgaagggcatcgtgctgttcgtgagcaaggtgctggaggagcccaaggacttcagctgcgagaccgaggacttcaagaccctgcactgcacctgggaccccggcaccgacaccgccctgggctggagcaagcagcccagccagagctacaccctgttcgagagcttcagcggcgagaagaagctgtgcacccacaagaactggtgcaactggcagatcacccaggacagccaggagacctacaacttcaccctgatcgccgagaactacctgagaaagagaagcgtgaacatcctgttcaacctgacccacagaggcgagaccagagtggtgaccgcccacagaggccactag

SEQ ID NO: 66114 - protein, 2066 aa, Artificial Sequence
  derived and/or modified sequence
MCSTPGMPAPGASLALRVSFVDVHPDVIPVQLWGLVGERRGEYLRLSREIQEAAATRGQWALGSASASPGELCLVQVGLLWHRCRVVSRQAQESRVFLLDEGRTITAGAGSLAPGRREFFNLPSEVLGCVLAGLVPAGCGAGSGEPPQHWPADAVDFLSNLQGKEVHGCVLDVLLLHRLVLLEVPDVFQQMRELGLARRVPDSLFRSLLERYLTAATASVGSGVPVLSRVPLKQKQPGLDYFYPQLQLGVTEAVVITQVCHPHRIHCQLRSVSQEIHRLSESMAQVYRGSTGTGDENSTSATWEEREESPDKPGSPCASCGLDGHWYRALLLETFRPQRCAQVLHVDYGRKELVSCSSLRYLLPEYFRMPVVTYPCALYGLWDGGRGWSRSQVGDLKTLILGKAVNAKIEFYCSFEHVYYVSLYGEDGINLNRVFGVQSCCLADRVLQSQATEEEEPETSQSQSPAEEVDEEISLPALRSIRLKMNAFYDAQVEFVKNPSEFWIRLRKHNVTFSKLMRRMCGFYSSASKLDGVVLKPEPDDLCCVKWKENGYYRAIVTKLDDKSVDVFLVDRGNSENVDWYDVRMLLPQFRQLPILAVKCTLADIWPLGKTWSQEAVSFFKKTVLHKELVIHILDKQDHQYVIEILDESRTGEENISKVIAQAGYAKYQEFETKENILVNAHSPGHVSNHFTTESNKIPFAKTGEGEQKAKRENKTTSVSKALSDTTVVTNGSTELVVQEKVKRASVYFPLMQNCLEIKPGSSSKGELEVGSTVEVRVSYVENPGYFWCQLTRNIQGLKTLMSDIQYYCKNTAAPHQRNTLACLAKRTVNRQWSRALISGIQSVEHVNVTFVDYGDREMVSVKNIYSISEEFLKVKAQAFRCSLYNLIQPVGQNPFVWDVKAIQAFNEFIDNAWQKNLELKCTIFALASINEELFNIVDLLTPFQSACHFLVEKRLARPVKLQKPLESSVQLHSYFYSTHDMKIGSEELVYITHIDDPWTFYCQLARNANILEQLSCSITQLSKVLLNLKTSPLNPGTLCLAKYTDGNWYRGIVIEKEPKKVFFVDFGNIYVVTSDDLLPIPSDAYDVLLLPMQAVRCSLSDIPDHIPEEVVVWFQETILDKSLKALVVAKDPDGTLIIELYGDNIQISASINKKLGLLSYKDRIRKKESEVLCSTTETLEEKNENMKLPCTEYLSKSVGYKLPNKEILEESYKPQINSSYKELKLLQSLTKTNLVTQYQDSVGNKNSQVFPLTTEKKEEISAETPLKTARVEATLSERKIGDSCDKDLPLKFCEFPQKTIMPGFKTTVYVSHINDLSDFYVQLIEDEAEISHLSERLNSVKTRPEYYVGPPLQRGDMICAVFPEDNLWYRAVIKEQQPNDLLSVQFIDYGNVSVVHTNKIGRLDLVNAILPGLCIHCSLQGFEVPDNKNSKKMMHYFSQRTSEAAIRCEFVKFQDRWEVILADEHGIIADDMISRYALSEKSQVELSTQVIKSASSKSVNKSDIDTSVFLNWYNPEKKMIRAYATVIDGPEYFWCQFADTEKLQCLEVEVQTAGEQVADRRNCIPCPYIGDPCIVRYREDGHYYRALITNICEDYLVSVRLVDFGNIEDCVDPKALWAIPSELLSVPMQAFPCCLSGFNISEGLCSQEGNDYFYEIITEDVLEITILEIRRDVCDIPLAIVDLKSKGKSINEKMEKYSKTGIKSALPYENIDSEIKQTLGSYNLDVGLKKLSNKAVQNKIYMEQQTDELAEITEKDVNIIGTKPSNFRDPKTDNICEGFENPCKDKIDTEELEGELECHLVDKAEFDDKYLITGFNTLLPHANETKEILELNSLEVPLSPDDESKEFLELESIELQNSLVVDEEKGELSPVPPNVPLSQECVTKGAMELFTLQLPLSCEAEKQPELELPTAQLPLDDKMDPLSLGVSQKAQESMCTEDMRKSSCVESFDDQRRMSLHLHGADCDPKTQNEMNICEEEFVEYKNRDAISALMPLFSEEESSDGSKHNNGLPDHISAQLQNTYTLKAFTVGSKCVVWSSLRNTWSKCEILETAEEGTRKRGLEVMEI

SEQ ID NO: 66115 - DNA, 6201 bp, Artificial Sequence
  derived and/or modified sequence
atgtgcagcacccccggcatgcccgcccccggcgccagcctggccctgagagtgagcttcgtggacgtgcaccccgacgtgatccccgtgcagctgtggggcctggtgggcgagagaagaggcgagtacctgagactgagcagagagatccaggaggccgccgccaccagaggccagtgggccctgggcagcgccagcgccagccccggcgagctgtgcctggtgcaggtgggcctgctgtggcacagatgcagagtggtgagcagacaggcccaggagagcagagtgttcctgctggacgagggcagaaccatcaccgccggcgccggcagcctggcccccggcagaagagagttcttcaacctgcccagcgaggtgctgggctgcgtgctggccggcctggtgcccgccggctgcggcgccggcagcggcgagcccccccagcactggcccgccgacgccgtggacttcctgagcaacctgcagggcaaggaggtgcacggctgcgtgctggacgtgctgctgctgcacagactggtgctgctggaggtgcccgacgtgttccagcagatgagagagctgggcctggccagaagagtgcccgacagcctgttcagaagcctgctggagagatacctgaccgccgccaccgccagcgtgggcagcggcgtgcccgtgctgagcagagtgcccctgaagcagaagcagcccggcctggactacttctacccccagctgcagctgggcgtgaccgaggccgtggtgatcacccaggtgtgccacccccacagaatccactgccagctgagaagcgtgagccaggagatccacagactgagcgagagcatggcccaggtgtacagaggcagcaccggcaccggcgacgagaacagcaccagcgccacctgggaggagagagaggagagccccgacaagcccggcagcccctgcgccagctgcggcctggacggccactggtacagagccctgctgctggagaccttcagaccccagagatgcgcccaggtgctgcacgtggactacggcagaaaggagctggtgagctgcagcagcctgagatacctgctgcccgagtacttcagaatgcccgtggtgacctacccctgcgccctgtacggcctgtgggacggcggcagaggctggagcagaagccaggtgggcgacctgaagaccctgatcctgggcaaggccgtgaacgccaagatcgagttctactgcagcttcgagcacgtgtactacgtgagcctgtacggcgaggacggcatcaacctgaacagagtgttcggcgtgcagagctgctgcctggccgacagagtgctgcagagccaggccaccgaggaggaggagcccgagaccagccagagccagagccccgccgaggaggtggacgaggagatcagcctgcccgccctgagaagcatcagactgaagatgaacgccttctacgacgcccaggtggagttcgtgaagaaccccagcgagttctggatcagactgagaaagcacaacgtgaccttcagcaagctgatgagaagaatgtgcggcttctacagcagcgccagcaagctggacggcgtggtgctgaagcccgagcccgacgacctgtgctgcgtgaagtggaaggagaacggctactacagagccatcgtgaccaagctggacgacaagagcgtggacgtgttcctggtggacagaggcaacagcgagaacgtggactggtacgacgtgagaatgctgctgccccagttcagacagctgcccatcctggccgtgaagtgcaccctggccgacatctggcccctgggcaagacctggagccaggaggccgtgagcttcttcaagaagaccgtgctgcacaaggagctggtgatccacatcctggacaagcaggaccaccagtacgtgatcgagatcctggacgagagcagaaccggcgaggagaacatcagcaaggtgatcgcccaggccggctacgccaagtaccaggagttcgagaccaaggagaacatcctggtgaacgcccacagccccggccacgtgagcaaccacttcaccaccgagagcaacaagatccccttcgccaagaccggcgagggcgagcagaaggccaagagagagaacaagaccaccagcgtgagcaaggccctgagcgacaccaccgtggtgaccaacggcagcaccgagctggtggtgcaggagaaggtgaagagagccagcgtgtacttccccctgatgcagaactgcctggagatcaagcccggcagcagcagcaagggcgagctggaggtgggcagcaccgtggaggtgagagtgagctacgtggagaaccccggctacttctggtgccagctgaccagaaacatccagggcctgaagaccctgatgagcgacatccagtactactgcaagaacaccgccgccccccaccagagaaacaccctggcctgcctggccaagagaaccgtgaacagacagtggagcagagccctgatcagcggcatccagagcgtggagcacgtgaacgtgaccttcgtggactacggcgacagagagatggtgagcgtgaagaacatctacagcatcagcgaggagttcctgaaggtgaaggcccaggccttcagatgcagcctgtacaacctgatccagcccgtgggccagaaccccttcgtgtgggacgtgaaggccatccaggccttcaacgagttcatcgacaacgcctggcagaagaacctggagctgaagtgcaccatcttcgccctggccagcatcaacgaggagctgttcaacatcgtggacctgctgacccccttccagagcgcctgccacttcctggtggagaagagactggccagacccgtgaagctgcagaagcccctggagagcagcgtgcagctgcacagctacttctacagcacccacgacatgaagatcggcagcgaggagctggtgtacatcacccacatcgacgacccctggaccttctactgccagctggccagaaacgccaacatcctggagcagctgagctgcagcatcacccagctgagcaaggtgctgctgaacctgaagaccagccccctgaaccccggcaccctgtgcctggccaagtacaccgacggcaactggtacagaggcatcgtgatcgagaaggagcccaagaaggtgttcttcgtggacttcggcaacatctacgtggtgaccagcgacgacctgctgcccatccccagcgacgcctacgacgtgctgctgctgcccatgcaggccgtgagatgcagcctgagcgacatccccgaccacatccccgaggaggtggtggtgtggttccaggagaccatcctggacaagagcctgaaggccctggtggtggccaaggaccccgacggcaccctgatcatcgagctgtacggcgacaacatccagatcagcgccagcatcaacaagaagctgggcctgctgagctacaaggacagaatcagaaagaaggagagcgaggtgctgtgcagcaccaccgagaccctggaggagaagaacgagaacatgaagctgccctgcaccgagtacctgagcaagagcgtgggctacaagctgcccaacaaggagatcctggaggagagctacaagccccagatcaacagcagctacaaggagctgaagctgctgcagagcctgaccaagaccaacctggtgacccagtaccaggacagcgtgggcaacaagaacagccaggtgttccccctgaccaccgagaagaaggaggagatcagcgccgagacccccctgaagaccgccagagtggaggccaccctgagcgagagaaagatcggcgacagctgcgacaaggacctgcccctgaagttctgcgagttcccccagaagaccatcatgcccggcttcaagaccaccgtgtacgtgagccacatcaacgacctgagcgacttctacgtgcagctgatcgaggacgaggccgagatcagccacctgagcgagagactgaacagcgtgaagaccagacccgagtactacgtgggcccccccctgcagagaggcgacatgatctgcgccgtgttccccgaggacaacctgtggtacagagccgtgatcaaggagcagcagcccaacgacctgctgagcgtgcagttcatcgactacggcaacgtgagcgtggtgcacaccaacaagatcggcagactggacctggtgaacgccatcctgcccggcctgtgcatccactgcagcctgcagggcttcgaggtgcccgacaacaagaacagcaagaagatgatgcactacttcagccagagaaccagcgaggccgccatcagatgcgagttcgtgaagttccaggacagatgggaggtgatcctggccgacgagcacggcatcatcgccgacgacatgatcagcagatacgccctgagcgagaagagccaggtggagctgagcacccaggtgatcaagagcgccagcagcaagagcgtgaacaagagcgacatcgacaccagcgtgttcctgaactggtacaaccccgagaagaagatgatcagagcctacgccaccgtgatcgacggccccgagtacttctggtgccagttcgccgacaccgagaagctgcagtgcctggaggtggaggtgcagaccgccggcgagcaggtggccgacagaagaaactgcatcccctgcccctacatcggcgacccctgcatcgtgagatacagagaggacggccactactacagagccctgatcaccaacatctgcgaggactacctggtgagcgtgagactggtggacttcggcaacatcgaggactgcgtggaccccaaggccctgtgggccatccccagcgagctgctgagcgtgcccatgcaggccttcccctgctgcctgagcggcttcaacatcagcgagggcctgtgcagccaggagggcaacgactacttctacgagatcatcaccgaggacgtgctggagatcaccatcctggagatcagaagagacgtgtgcgacatccccctggccatcgtggacctgaagagcaagggcaagagcatcaacgagaagatggagaagtacagcaagaccggcatcaagagcgccctgccctacgagaacatcgacagcgagatcaagcagaccctgggcagctacaacctggacgtgggcctgaagaagctgagcaacaaggccgtgcagaacaagatctacatggagcagcagaccgacgagctggccgagatcaccgagaaggacgtgaacatcatcggcaccaagcccagcaacttcagagaccccaagaccgacaacatctgcgagggcttcgagaacccctgcaaggacaagatcgacaccgaggagctggagggcgagctggagtgccacctggtggacaaggccgagttcgacgacaagtacctgatcaccggcttcaacaccctgctgccccacgccaacgagaccaaggagatcctggagctgaacagcctggaggtgcccctgagccccgacgacgagagcaaggagttcctggagctggagagcatcgagctgcagaacagcctggtggtggacgaggagaagggcgagctgagccccgtgccccccaacgtgcccctgagccaggagtgcgtgaccaagggcgccatggagctgttcaccctgcagctgcccctgagctgcgaggccgagaagcagcccgagctggagctgcccaccgcccagctgcccctggacgacaagatggaccccctgagcctgggcgtgagccagaaggcccaggagagcatgtgcaccgaggacatgagaaagagcagctgcgtggagagcttcgacgaccagagaagaatgagcctgcacctgcacggcgccgactgcgaccccaagacccagaacgagatgaacatctgcgaggaggagttcgtggagtacaagaacagagacgccatcagcgccctgatgcccctgttcagcgaggaggagagcagcgacggcagcaagcacaacaacggcctgcccgaccacatcagcgcccagctgcagaacacctacaccctgaaggccttcaccgtgggcagcaagtgcgtggtgtggagcagcctgagaaacacctggagcaagtgcgagatcctggagaccgccgaggagggcaccagaaagagaggcctggaggtgatggagatctag

SEQ ID NO: 66116 - DNA, 6201 bp, Artificial Sequence
  derived and/or modified sequence
atgtgcagcacaccaggcatgccagcccctggggcctctctcgctctaagggtgtccttcgtcgatgtgcacccagatgtgattccagtccaattatgggggctggtgggagaaaggcggggcgaatacctccgcttgtcccgcgagatccaggaagcagcagccactagggggcaatgggctctgggatctgcctcagcatcccctggcgaactatgtctggtgcaggtaggtctcctttggcataggtgcagagtcgtgtctcgccaagcccaagagagcagagttttccttctggatgagggtcggaccataacagcaggagcgggcagtctggcccccggccgcagagagtttttcaacctcccttcggaagtgttgggctgcgtgctggctggcctggtgcctgccgggtgcggtgccggttccggcgaacccccgcagcactggccagcggacgccgttgacttcctctccaacttgcagggaaaagaggtgcatgggtgtgtgctggacgtcctattgctgcaccgcttagtgctcctggaggtaccagatgtttttcagcagatgagagagctcggacttgcaagacgggtgcctgattccctttttaggtcgctgctggagcggtacttgaccgctgctacagcctctgtgggtagcggggtccccgtcctctctagagtcccactgaaacagaaacagcctggacttgattatttttaccctcagctacagcttggggtgactgaagccgtggtaattacccaggtgtgccaccctcaccgcattcactgccagctgaggtccgtctcccaagagatccacagactgagcgaaagcatggctcaggtgtaccgaggcagcactggcactggggacgagaatagtacgagcgccacttgggaggagcgtgaggagagtcccgacaaacctgggtccccttgtgctagctgcggcctcgatggacactggtatcgtgctctgctgctggaaacgttccgtccccagagatgtgctcaagtgctgcatgtcgactacggtcggaaagaactcgtctcatgctcttcattacgatatctactgcccgagtactttaggatgcccgtcgttacgtacccgtgcgctctgtatggcttgtgggacgggggccgagggtggtctaggtcccaagtgggagatcttaaaactctgatactgggcaaggcagtaaatgcaaaaatcgagttttattgttcatttgaacacgtctactatgtcagtctgtacggtgaggacggcattaacctgaatagagtattcggcgtccaatcctgctgcctggctgaccgagtgttacagagtcaggccacagaggaagaggagccggaaacttcccagagccagtccccagctgaagaagtagatgaggaaatttccctgcccgctttgcgctccatacgccttaagatgaatgcattctacgatgcgcaagtggagtttgtaaaaaatccatccgaattctggatccggctgagaaagcataacgttactttctccaaactcatgcgtcgaatgtgcggtttttatagcagtgccagcaagctggatggggttgttttgaaacccgagccggatgacctgtgctgtgtgaagtggaaagagaacggatactaccgcgccatcgtaacgaaactggatgataagtctgtggacgtctttcttgtggatcgtggcaattcagagaatgttgactggtacgacgtgaggatgttgctcccccagttccggcaactgccgatcctggctgtgaagtgcactcttgcagatatctggccactggggaaaacttggtcgcaagaggccgtgtcattttttaagaagacagtgcttcacaaagaactcgttattcatatactggacaaacaggatcaccagtacgttatagagatcttggacgagtcacgcacaggcgaggaaaatatttctaaggtgattgctcaggcaggttatgctaaataccaggaattcgagacaaaagaaaacatcttggtgaacgcccattccccagggcacgtgagtaatcacttcaccaccgagagcaacaagattccattcgccaagacaggggaaggagagcagaaagccaaacgggagaataagaccacctcagtgagtaaggcgctttctgacacaaccgttgtgacaaacggcagtactgaactggtggtccaggagaaagtgaaacgggcgagtgtgtatttcccattgatgcagaattgtttggaaataaaacctggctccagcagcaagggagaactggaggtggggtcgacagtggaagtcagagtgagctacgtagagaacccggggtacttttggtgccagctgacaagaaacatacagggactgaaaaccctgatgtcagatatccagtactattgtaagaatacagctgcccctcaccagcgcaacaccctggcatgtctagccaaacgcacagtcaaccggcagtggagcagggccctcatcagtggcattcagagcgtggaacacgtaaacgttaccttcgtagattacggggaccgggagatggtctccgtaaagaacatctactctatctctgaagagtttctgaaggtaaaggcgcaggcctttagatgctctctctacaatctgatacagccagtgggtcaaaatccttttgtctgggatgtgaaagctattcaggccttcaatgaatttatcgacaacgcgtggcaaaagaatctggaacttaagtgtacaatttttgcactggcctctattaacgaagaactgttcaatatcgtggatctgctgactccgtttcagtctgcgtgccactttttggtagagaagcgcctcgccaggcccgtgaagctccagaagcccctcgagtcctccgtgcagctgcacagttatttctactcaacccacgacatgaaaatcgggtctgaggaacttgtctatattactcacattgacgacccctggacgttttattgccagctggccaggaatgcaaatatcctggagcaacttagctgctctataactcagctgtccaaggtattgctaaacctgaaaacgtcccccttgaaccccggcacactgtgcctcgcaaaatataccgatggcaactggtatcgcgggatcgtgatcgaaaaggaacctaagaaggttttctttgtggactttggaaacatatatgtggtcacaagtgatgaccttctgcctatcccaagcgatgcgtatgacgttctgctgttgcctatgcaggcagtaaggtgttctttgtctgacattcccgatcatatacccgaagaggtggtggtgtggttccaggaaacgatcttggacaagagtctgaaggctctggtggtcgcaaaagatcctgatggtactctcataatcgaattgtacggagacaacatccagatttccgcttcaataaataagaaactgggcctgctgagctataaggatcgtatccgaaagaaagaaagcgaagtgttgtgtagcactaccgaaacactggaggagaagaacgagaatatgaaactgccttgcaccgagtatctgagcaaaagtgtcggctataagctacctaataaggaaattcttgaggaaagttataagcctcagataaatagctcctacaaagaattgaagctgctacagagcctgaccaagacaaatctggtcacccagtaccaagattccgttggcaacaagaattcccaagtttttcctctgaccactgagaagaaagaggagataagtgccgagacacccttaaaaaccgcacgtgttgaggcaactctatctgagcgcaagattggcgacagctgtgacaaagatcttcctcttaagttttgtgagttcccacagaagactatcatgcctggatttaaaactaccgtctacgtttcacatattaacgacctctctgatttctacgtgcagctaatagaggacgaggctgaaatttcccatttatctgagaggcttaacagtgtgaaaacacggcctgaatattatgtgggccccccccttcagcgcggcgatatgatctgcgcagtgttccctgaagataacctgtggtatcgcgccgttatcaaagaacagcagcccaacgacttgctatccgtgcagtttatcgattacggaaatgtcagcgtggtccatacaaacaagatagggagactggacttggtcaacgctatcttaccaggcctatgcattcactgcagtctccagggctttgaggtgcccgacaataaaaatagcaagaaaatgatgcactattttagtcagagaaccagtgaagctgccatcagatgcgagtttgtaaaattccaagataggtgggaggtgatcctggctgacgagcatgggatcatcgcagacgatatgatttcacgctacgcacttagcgaaaagtcacaagttgagctgtcaacacaggtgatcaaaagcgcttcatcaaaaagcgtgaataagtctgatattgatacttctgtttttctcaattggtataaccctgagaaaaaaatgataagggcctacgccacagtcattgatggacccgaatatttctggtgtcagttcgcagataccgagaagctgcaatgcctggaagttgaggtgcagacagctggggaacaggttgccgataggcgtaattgtatcccttgtccatatataggcgatccctgcattgtgcgctaccgggaggatggacactattaccgagctctgattactaatatctgtgaagattacctggtatctgtcaggctggtggattttgggaacatcgaagattgtgtcgaccccaaggctctctgggcaatcccctccgagttgctgagcgtgccaatgcaagcatttccttgttgtctgtcgggatttaacatttcggaagggctgtgttctcaggagggtaatgactatttctacgaaatcattacggaggacgtcttagagatcactatcctggaaatccggcgcgatgtatgcgatattcctctcgccattgtggatttgaaatctaaaggaaagagcatcaatgaaaaaatggagaaatattctaagacaggcataaaaagcgccctaccgtacgagaatatagattccgagattaagcagaccctggggagttataacttggacgtgggtctgaagaaattgtccaataaagcagttcagaacaagatctatatggaacaacagacagatgagctcgctgagatcacagaaaaagacgttaacatcattgggactaagccttccaattttcgggaccccaagaccgataacatctgcgagggcttcgagaacccatgcaaagacaaaattgatacagaggagctcgaaggggagttggagtgccatctagtcgacaaggcggagtttgacgataagtacctgatcaccggtttcaacaccctgctgcctcatgctaacgagacaaaggagatccttgagttgaattctctcgaggttccactctccccagacgatgaaagtaaagagttcttggaattggaatctattgagcttcagaattccttagttgtcgacgaagaaaagggggaactcagtcccgtccccccaaacgtccctctcagccaggaatgtgttaccaagggagctatggaattgtttactctgcagttgccattgtcctgtgaggccgaaaaacaacctgagcttgagctgccaaccgcccaactgcccctcgacgacaagatggatccactgtcactcggtgtgagccaaaaagctcaagaaagtatgtgcacagaagacatgcggaaaagcagctgtgttgagtcctttgacgatcagcggcggatgtcgttacatttgcatggggctgactgtgatcctaaaacccagaacgagatgaacatctgtgaggaagagttcgtggagtataagaatagagatgccatcagcgccttaatgccgcttttttcagaggaagagagtagcgatggttctaaacacaataatggtctccccgaccacatctcagcacagttgcagaacacatatactctgaaggctttcaccgtcggatcaaagtgcgtggtatggtcctccctgaggaatacttggagcaaatgtgaaatcctggagacagccgaagaaggaactcgcaagcgagggctcgaggtcatggaaatctag

SEQ ID NO: 66117 - DNA, 6201 bp, Artificial Sequence
  derived and/or modified sequence
atgtgcagcaccccaggcatgcctgcccctggggccagcctggccctgcgggtgtcctttgtggatgtgcacccagatgtgattcctgtgcagctgtggggcctggtgggggagaggagaggagagtacctgcggctgagccgggagatccaggaggccgccgccacccggggccagtgggccctgggcagcgccagcgccagccctggagagctgtgcctggtgcaggtgggcctgctgtggcaccgctgccgggtggtgtcccggcaggcccaggagagcagggtcttcctgctggatgagggccgcaccatcacagctggagctggcagcctggcccctggccggcgggagttcttcaacctgcccagcgaggtgctgggctgtgtgctggccggcctggtgcctgctggctgtggggccggcagcggggagcccccccagcactggccagcagatgctgtggacttcctgagcaacctgcagggcaaggaggtgcacggctgtgtgctggatgtgctgctgctgcaccggctggtgctgctggaggtgcctgatgtgttccagcagatgagggagctgggcctggcccggcgggtgcctgacagcctcttccgcagcctgctggagcgctacctgacagctgccacagcctctgtgggcagcggcgtgcctgtgctgagccgggtgcccctgaagcagaagcagcccggcctggactacttctacccccagctgcagctgggcgtgacagaagctgtggtgatcacccaggtgtgccacccccaccgcatccactgccagctgcggtctgtgtcccaggagatccaccggctgtctgagagcatggcccaggtgtaccggggcagcactggaactggagatgagaacagcaccagcgccacctgggaggagcgggaggagagcccagacaagccaggcagcccctgtgccagctgtggcctggatggccactggtaccgggccctgctgctggagaccttccggccccagagatgtgcccaggtgctgcacgtggactatggcaggaaggagctggtgtcctgcagcagcctgcgctacctgctgcctgagtacttcaggatgcctgtggtgacctacccctgtgccctgtatggcctgtgggatggcggccggggctggagccgcagccaggtgggggacctgaagaccctcatcctgggcaaggctgtgaatgccaagattgagttctactgcagctttgaacatgtgtactacgtgtccctgtatggagaagatggcatcaacctgaacagagtgtttggagtgcagagctgctgcctggccgacagagtgctgcagagccaggccacagaggaggaggagcctgagaccagccagagccagagccctgctgaggaggtggatgaggagatcagcctgcctgccctgcggagcatccggctgaagatgaatgccttctatgatgcccaggtggagtttgtgaagaaccccagcgagttctggatccggctgaggaagcacaacgtgaccttcagcaagctgatgaggaggatgtgtggcttctacagcagcgccagcaagctggatggagtggtgctgaagccagagccagatgacctgtgctgcgtgaagtggaaggaaaatggctactaccgggccatcgtgaccaagctggatgacaagtctgtggatgtgttcctggtggaccggggcaacagtgaaaatgtggactggtatgatgtgaggatgctgctgccccagttccggcagctgcccatcctggccgtgaagtgcaccctggccgacatctggcccctgggcaagacctggagccaggaggccgtgtccttcttcaagaagacagtgctgcacaaggagctggtgatccacatcctggacaagcaggaccaccagtatgtgattgagatcctggatgagagcaggactggagaggagaacatcagcaaggtgattgcccaggccggctacgccaagtaccaggagtttgagaccaaggagaacatcctggtgaatgcccacagccctggccacgtgagcaaccacttcaccacagagagcaacaagatcccctttgccaagacaggagagggggagcagaaggccaagcgggagaacaagaccacctctgtgtccaaggccctgagtgacaccaccgtggtgaccaacggcagcacagagctggtggtgcaggagaaggtgaagagggcctctgtgtacttccccctgatgcagaactgcctggagatcaagccaggcagcagcagcaaaggagagctggaggtgggcagcacagtggaggtgcgggtgtcctatgtggagaaccctggctacttctggtgccagctgaccaggaacatccagggcctgaagaccctgatgtctgacatccagtactactgcaagaacacagctgccccccaccagaggaacaccctggcctgcctggccaagaggacagtgaaccggcagtggagccgggccctgatcagcggcatccagagcgtggagcacgtgaatgtgacctttgtggactatggagaccgggagatggtgtctgtgaagaacatctacagcatcagcgaggagttcctgaaggtgaaggcccaggccttccgctgcagcctgtacaacctgatccagcctgtgggccagaacccctttgtgtgggatgtgaaggccatccaggccttcaatgagttcatcgacaatgcctggcagaagaacctggagctgaagtgcaccatctttgccctggccagcatcaatgaggagctgttcaacatcgtggacctgctgacccccttccagagcgcctgccacttcctggtggagaagaggctggcccggcctgtgaagctgcagaagcccctggagagctctgtgcagctgcacagctacttctacagcacccatgacatgaagattggcagcgaggagctggtgtacatcacccacattgatgacccctggaccttctactgccagctggccagaaatgccaacatcctggagcagctgagctgcagcatcacccagctgagcaaggtgctgctgaacctgaagaccagccccctgaaccctggcaccctgtgcctggccaagtacacagatggcaactggtaccggggcatcgtgattgagaaggagcccaagaaggtgttctttgtggactttggaaacatctacgtggtgaccagtgatgacctgctgcccatccccagtgatgcctatgatgtgctgctgctgcccatgcaggccgtgcgctgcagcctgagtgacatcccagaccacatccctgaggaggtggtggtgtggttccaggagaccatcctggacaagagcctgaaggccctggtggtggccaaggaccctgatggcaccctcatcatcgagctgtatggagacaacatccagatcagcgccagcatcaacaagaagctgggcctgctgagctacaaggaccgcatcaggaagaaggagagcgaggtgctgtgcagcaccacagagaccctggaggagaagaatgaaaacatgaagctgccctgcacagagtacctgagcaagtctgtgggctacaagctgcccaacaaggagatcctggaggagagctacaagccccagatcaacagcagctacaaggagctgaagctgctgcagagcctgaccaagaccaacctggtgacccagtaccaggacagcgtgggcaacaagaacagccaggtgttccccctgaccacagagaagaaggaggagatctctgctgagacccccctgaagacagcccgggtggaggccaccctgtctgagaggaagattggagacagctgtgacaaggacctgcccctgaagttctgtgagttcccccagaagaccatcatgcctggcttcaagaccaccgtgtatgtgagccacatcaatgacctgagtgacttctacgtgcagctgattgaagatgaagctgagatcagccacctgtctgagcggctgaacagcgtgaagaccaggcctgagtactacgtgggcccccccctgcagagaggagacatgatctgtgctgtgtttcctgaggacaacctgtggtaccgggccgtcatcaaggagcagcagcccaatgacctgctgtctgtgcagttcatcgactatggaaatgtgtctgtggtgcacaccaacaagattggccgcctggacctggtgaatgccatcctgcccggcctgtgcatccactgcagcctgcagggctttgaggtgcctgacaacaagaacagcaagaagatgatgcactacttcagccagaggaccagcgaggccgccatccgctgtgaatttgtgaagttccaggaccgctgggaggtgatcctggctgatgagcacggcatcatcgcagatgacatgatcagccgctatgccctgtctgagaagagccaggtggagctgagcacccaggtgatcaagagcgccagcagcaagtctgtgaacaagagtgacatcgacaccagcgtcttcctgaactggtacaaccctgagaagaagatgatccgggcctatgccaccgtgattgatggccctgagtacttctggtgccagtttgctgacacagagaagctgcagtgcctggaggtggaggtgcagacagctggggagcaggtggccgacagaagaaactgcatcccctgcccctacatcggggacccctgcatcgtgcgctaccgggaggatggccactactaccgggccctgatcaccaacatctgtgaggactacctggtgtctgtgcggctggtggactttggaaatattgaggactgtgtggaccccaaggccctgtgggccatccccagcgagctgctgtctgtgcccatgcaggccttcccctgctgcctgagcggcttcaacatcagcgagggcctgtgcagccaggagggcaatgactacttctatgagatcatcacagaagatgtgctggagatcaccatcctggagatcagaagagatgtgtgtgacatccccctggccatcgtggacctgaagagcaagggcaagagcatcaatgagaagatggagaagtacagcaagacaggcatcaagagcgccctgccctatgagaacatcgacagcgagatcaagcagaccctgggcagctacaacctggatgtgggcctgaagaagctgagcaacaaggctgtgcagaacaagatctacatggagcagcagacagatgagctggccgagatcacagagaaggatgtgaacatcatcggcaccaagcccagcaacttccgggaccccaagacagacaacatctgtgagggctttgagaacccctgcaaggacaagattgacacagaggagctggagggggagctggagtgccacctggtggacaaggccgagtttgatgacaagtacctgatcaccggcttcaacaccctgctgccccacgccaatgagaccaaggagatcctggagctgaacagcctggaggtgcccctgagcccagatgatgagagcaaggagttcctggagctggagagcattgagctgcagaacagcctggtggtggatgaggagaagggggagctgagccctgtgcccccaaatgtgcccctgagccaggagtgtgtgaccaagggggccatggagctgttcaccctgcagctgcccctgagctgtgaggccgagaagcagcctgagctggagctgcccacagcccagctgcccctggatgacaagatggaccccctgagcctgggcgtgtcccagaaggcccaggagagcatgtgcacagaggacatgaggaagagcagctgtgtggagagctttgatgaccagaggaggatgagcctgcacctgcacggggctgactgtgaccccaagacccagaatgagatgaacatctgtgaggaggagtttgtggagtacaagaacagagatgccatcagcgccctgatgcccctcttcagcgaggaggagagcagtgatggcagcaagcacaacaacggcctgcctgaccacatcagcgcccagctgcagaacacctacaccctgaaggccttcaccgtgggcagcaaatgtgtggtgtggagcagcctgaggaacacctggagcaaatgtgagatcctggagacagctgaggagggcaccaggaagaggggcctggaggtgatggagatctag

SEQ ID NO: 66118 - DNA, 6201 bp, Artificial Sequence
  derived and/or modified sequence
atgtgcagcacccccggcatgcccgcccccggcgccagcctggccctacgagtctcttttgtagatgtacacccagacgtgatcccagttcagctgtggggactcgttggcgaaaggaggggggaatatctgcgactcagccgagagattcaggaagctgccgcaactcgcggccagtgggccctcgggtcagccagcgcaagccccggagaactctgcctcgtgcaagtcggactgctttggcatcggtgccgcgtagtatcccggcaagcccaggagagcagggttttcttactggacgagggtagaaccattactgccggagctggttccctcgcacctggtcggcgcgaatttttcaacctcccctccgaggtgttgggctgcgtgctcgccgggttggtacccgctggctgcggcgccggatcaggcgagccaccccaacactggccggcagatgccgttgactttctctcaaatctgcagggaaaggaagttcatgggtgcgtgcttgatgtgctcctgctgcaccggctggtgcttcttgaggtgccagacgtgtttcagcagatgagggagctgggattggctcgcagagtgcccgacagcctgttccggtcactgctggagcgctacctcacagccgccaccgcatctgtgggatctggagtcccggtgctctctcgcgttccactgaaacaaaagcagcctggccttgactatttttacccacagctgcagctgggagtgaccgaagctgtggtaataacacaggtgtgccacccgcaccgaatccactgccagctcaggtctgtgtcccaggagatccatcgactgtctgaaagcatggcacaggtgtaccgcggtagcacgggcaccggcgatgagaattcaacctcagccacttgggaggaacgcgaggagtccccggacaaaccaggcagtccatgcgccagctgtggactggatggtcattggtatagagctctgctgctggagacttttcgtccgcagaggtgtgcgcaagttctccatgtggactacggcagaaaggagctggtgagctgcagtagtctgcggtatctcttgccagaatactttcggatgcccgtggtgacctatccctgcgccctgtacggtctttgggatggcggacgaggctggagtcggagccaagttggggacttaaaaaccctaattctgggcaaggctgtaaatgccaaaatcgaattttattgcagctttgagcatgtgtactacgtctccctgtatggagaagacggaataaatctcaaccgagtgttcggtgttcagagttgttgcttggccgaccgggtcctccaatcgcaagctaccgaagaggaggagccagaaacatcccagtcccagtctcctgcagaggaggtggacgaagagatttccctccctgcactccggtctattagactaaaaatgaacgccttctatgatgcccaagtggagtttgttaagaatccctccgagttttggataaggctgcgcaagcacaacgtgactttctctaagctgatgcgacggatgtgcggattttacagctctgcatccaagctagatggcgtggttctgaaacccgaacctgatgatctgtgttgtgtaaagtggaaggagaatgggtactaccgtgccatcgtaacaaaacttgatgataagtcagtcgacgtgtttttggtggaccggggaaacagtgagaacgtggactggtatgacgtgagaatgctgctcccccagtttcgccagctgcctattctggcggttaagtgcaccctagccgatatttggccactggggaaaacttggtcccaagaagcagttagcttcttcaagaagacggtgcttcacaaggagttagtcattcatattctggataaacaggaccatcagtacgtaatagaaatccttgacgagagtaggacaggggaagagaacatctctaaagttatcgcccaggctgggtatgccaaataccaggagtttgaaaccaaggagaacattctggtgaatgcccattcaccaggccacgtgtcaaaccactttaccaccgaatctaataaaattccatttgcgaagaccggcgagggggagcagaaggccaaacgggagaataaaacgacatcagtgtctaaggcactatcagataccacggtggtgacaaatggcagcacagaactggtcgtccaggagaaggtgaaacgggcctcagtatacttccctcttatgcaaaattgcctggagattaaacctggatcttcatcaaaaggagaactcgaagtagggtccacggtggaggtgcgggtctcctatgtcgagaaccccggctacttctggtgccaactgaccagaaatatacagggtctgaagactctgatgtctgacatccagtattattgtaaaaacactgctgcccctcatcagcgtaacaccttagcatgcctcgccaaacggaccgtcaacagacagtggtcgcgcgccctgatatcaggcatacagtctgtggaacatgtcaacgtcaccttcgtggactacggggatagagagatggtaagcgtaaaaaacatctactcgattagtgaggagttcctgaaagtcaaggcccaagctttcagatgttcactgtataatctcatccagcccgtagggcaaaatccttttgtatgggacgtgaaggctatccaagccttcaatgagttcatcgacaatgcttggcagaaaaatctcgaactgaagtgcacaattttcgccctggcctccattaatgaagagctgtttaatattgtggacttgttgactccgtttcagtcagcctgtcacttcctcgtggaaaagcgccttgcaaggcccgtaaagctgcagaagcccctggagagctcagtccagcttcactcctatttctattcaacccacgatatgaaaatcggttcagaagaattggtttacataacccatatcgacgacccttggacattctattgccagctggcccgaaacgcgaacattctggaacagttatcttgtagtattacgcagctgtctaaggtgctgttgaacttgaagacctccccactcaaccctgggacactgtgcctggccaagtatacggacggaaactggtaccgtggtatcgttattgagaaggaacctaagaaggtattcttcgtcgattttggtaatatctatgttgtgacttccgacgaccttcttccgatcccctcagatgcatacgatgtgttgttgctacctatgcaggccgtacgttgctcccttagtgatatccccgaccacattccggaggaggtcgtcgtttggttccaagagacaatcctcgacaaaagcctgaaagccctcgttgtggccaaagaccccgacggaacacttattatcgaactgtacggagataacatacaaatttctgcatctatcaacaagaagctggggctgctatcatacaaagacagaattcggaagaaggaatccgaggtgctttgttccaccacagagactctggaggagaagaatgagaacatgaagctaccttgtacggaatatctctcaaaaagtgtcggttacaaactgcccaacaaggagatcctggaggagtcgtacaaacctcagatcaactcttcctacaaggagctgaagctgctccagtctctcaccaaaactaacctggttacccagtatcaggactctgtgggcaacaaaaacagccaggtatttcccctgactacagagaagaaggaagagatctcagccgagacacccttgaaaactgctcgggtcgaggccaccctctccgagcgaaagataggagattcctgcgataaagacctgcctctgaagttttgcgaattcccccagaagacgatcatgcctgggttcaagactaccgtgtacgtgtcccacatcaacgacttaagtgacttctacgtccagctgatcgaggatgaggccgagattagccacctgtccgaacggttgaacagcgttaagacacgtccggaatactacgtgggaccgccacttcagaggggggacatgatctgcgcggtgtttccggaggataatctctggtatcgagcggtgattaaggagcagcagcccaatgacctattaagtgtccagttcatcgattacggaaacgtgagcgtggtacacaccaataaaatcggccgtcttgacctggtgaacgcaatcttacccggcctgtgtattcactgctcgctgcagggttttgaggtacccgataacaagaatagtaaaaaaatgatgcactattttagtcagcggacgagcgaggccgcaattagatgcgagttcgtcaaatttcaggacagatgggaggtgatcttggctgacgagcacggaataatagcggacgacatgattagccgctacgcgctgagtgaaaagtctcaggttgaactgtcaactcaagtgatcaagagcgctagctccaagtccgttaataagtccgatatagacacctcagtgttcctcaactggtacaacccagagaaaaaaatgatcagggcctatgcgacagtaatcgatgggccggagtatttctggtgccagttcgctgatacggagaagctccaatgtctggaagtggaggttcaaaccgccggtgagcaggtcgctgaccgacggaactgcatcccgtgtccgtacatcggcgacccctgcatagtgagataccgggaagatggacattattatagagccctaattaccaacatttgcgaagactaccttgtaagcgttcgccttgtggattttggaaacatcgaagactgtgtggaccctaaggccctatgggcaatcccgagtgagctcctctctgtccccatgcaggcgttcccctgttgtctctctggcttcaacatctctgagggcttatgctcccaagaaggaaatgattacttctacgagatcatcactgaggatgtacttgaaattacaatcctggaaattaggcgcgacgtgtgcgacattccactggccatcgtggacctcaaatctaaaggcaaatcaattaacgagaaaatggaaaaatactctaaaacaggaattaagtcagctttgccttatgaaaatatcgattctgaaatcaagcagaccttgggaagttataatctggatgtggggctgaagaaactatcgaacaaagccgttcagaataagatttacatggagcagcagacagacgagctcgccgaaataaccgaaaaggacgtcaacatcatcgggaccaaaccctcaaatttccgcgacccaaagactgacaatatatgcgagggcttcgagaacccttgtaaggacaagatcgataccgaagagctggaaggggagctagaatgtcacctcgtggacaaggctgaatttgatgacaaatacctgatcaccgggttcaataccctccttccacacgccaatgagacaaaagagatactggaattgaacagtctagaggtccctctgagcccggatgacgagagtaaagaattcctcgaactggaaagcattgagctgcagaacagccttgttgtcgatgaggagaaaggcgaattatctcctgttcccccgaatgtgcccctgagtcaggagtgcgttaccaagggcgcgatggaattgttcactcttcagttgccactgtcttgcgaagccgagaaacaacctgagctcgagctaccaactgcccaactgccgctggatgataagatggatcccttatcactcggcgtaagccagaaggcacaggagtctatgtgtacagaggacatgcgcaagagttcttgtgtagagtcatttgatgaccagagacgcatgtccctgcacttacacggagccgactgtgatcccaagactcaaaacgagatgaacatttgcgaggaggaattcgtagagtacaagaatcgcgatgccatttccgcactcatgccactcttctcagaggaagagtcctcggatgggagcaaacacaacaatggactgccagatcacatttcagcacagctccagaatacctatactctaaaggccttcaccgtagggtcaaagtgcgtagtttggtcctcactccgaaacacttggtccaaatgcgagatcctggaaactgcggaagagggaactaggaagcgtgggctcgaagtgatggaaatttag

SEQ ID NO: 66119 - DNA, 6200 bp, Artificial Sequence
  derived and/or modified sequence
atgtgctcaacaccaggaatgcccgcaccaggagcatcattagccctgcgtgtgagtttcgtagatgtgcatcccgacgtaattcccgtgcagctgtggggactggtgggcgagcgcaggggagagtatctgcggctgtcgagagagatccaggaggccgcagccacaagggggcagtgggctctggggtccgcttccgcaagccctggggagctgtgcctggtacaggtgggactgctatggcacaggtgcagagtagtctcccggcaggcccaggaaagcagagttttcctcctcgatgaggggcgtaccataaccgccggagccggaagcctagctccaggccgaagagaattcttcaatctgccctccgaagtcctgggctgtgtgctggcgggactggtgcccgcaggctgcggtgctggctcaggagaacccccacaacactggcccgcagatgcggttgacttcctctccaatctacagggcaaggaggtgcatggatgtgtcctcgatgtgttgttgttacacaggctggtcttgctggaagtccctgatgtttttcagcagatgcgcgagctcggcctggctcggagagtcccagactccttgtttagaagcctgttggagcgctatctgaccgcagcgacagcgtccgtcggctctggtgttcccgtgctaagcagagtcccactaaagcagaaacagccaggcctggactacttttacccacagctgcagcttggcgtcaccgaagcagtagtgataacacaggtttgtcacccccatagaattcactgtcagctcagatctgtctcgcaggaaatccataggctcagcgagtctatggcacaggtctatcgaggtagtacgggcaccggggacgagaacagcacctcagcaacatgggaagagagggaggagagtcctgataagcccggttctccttgtgctagttgtggcctcgacgggcactggtatagagcactgcttttggagacctttagaccccagagatgtgctcaggtgctgcacgtcgattacggcaggaaagagctggttagttgcagctccctgagatatctgctgcccgagtacttccgtatgccagttgtcacctacccttgcgccttatacgggttatgggacggcggacgcggatggagccgtagccaggttggcgatctcaagaccctcatcctgggcaaggccgtgaacgccaagatcgagttctactgcagctttgaacatgtatattatgttagcctttacggtgaagatgggattaacctaaatcgcgtgtttggtgtgcagtcctgctgcctcgctgatagggtgctgcaatctcaggcgacagaagaagaggagcctgaaacttcccagagccaatcacccgcagaggaggtggatgaagaaatttccttacctgctctgagatccattcgcctgaagatgaacgctttctacgatgcacaagtggagtttgtcaagaaccccagtgagttttggatacgacttaggaagcacaatgttacgttctccaaattaatgaggcgaatgtgtggcttctattctagtgcttccaaacttgatggggtggtcctgaagcctgagcctgatgacctgtgctgcgttaaatggaaggaaaacggatattacagagcaatcgttaccaaattggacgataagtcagtggacgtgttcctcgtcgatcgcggtaacagcgagaatgtcgattggtacgacgtccgcatgttgctcccacagtttaggcagctgcccatcttggctgtaaaatgtacactggctgacatatggccgttaggcaagacttggtcccaggaggccgtgtcattttttaagaaaaccgtccttcataaggaacttgttatccacattctcgacaagcaggatcatcagtatgtcatcgagattctggatgagagcaggactggcgaggaaaacatttctaaagtgattgcacaagctgggtatgcaaagtatcaagagttcgagactaaagaaaacatactggtcaacgcccactccccagggcacgtcagcaaccacttcacgactgagagcaataagatcccattcgcgaaaactggggagggagaacagaaagctaagagagaaaataaaactacatctgtgtctaaagccctgagcgatacaacagttgttaccaatgggtcgaccgagttggttgtgcaggaaaaagttaaacgggcatctgtatatttcccattaatgcaaaattgtttagaaataaagcctggctcgtcttcaaaaggagagttagaagtgggcagcacagtggaggtgcgcgtctcatatgttgagaaccccggttacttctggtgtcagctgacccgaaacatacaggggcttaaaacactcatgagtgatatccaatactactgcaagaacaccgctgcccctcaccagcggaataccctcgcctgtctggccaagaggacagtgaaccgtcagtggtcccgcgctctaatctccggcatccagtccgtagagcatgtcaatgtgacgtttgtggattatggcgaccgcgaaatggtttcggtgaaaaatatctattctatcagcgaggaatttttgaaagtgaaggcacaggcattccgatgcagtctttacaatctcattcagccagtcggccagaatccttttgtgtgggacgtgaaagcaattcaggctttcaatgagtttatcgataacgcctggcagaagaacctcgagctcaagtgtacaatattcgctctggctagtatcaatgaagagctgttcaatatcgtggacctgctgacccctttccagtcagcatgtcactttctcgtagagaagcggttggctaggcctgtgaagctccagaaaccactggagagttccgtccagctgcacagttacttctatagcacccacgatatgaagatcggctcagaggaactggtttatattacacacatcgacgatccctggaccttctattgtcagctggctaggaacgccaatatcctcgagcagctatcctgcagcattacccagttaagtaaggtgctgctgaaccttaagacatcacccctgaacccaggcaccctctgccttgctaagtacacggacggtaactggtatcgaggtattgtcatcgagaaggaaccgaaaaaagtgttcttcgtcgactttgggaatatttacgttgtgaccagcgatgacctgttacccatcccttcggatgcctatgacgttctcctgctgccaatgcaggctgtccgctgttccctatctgacatcccagatcatatccccgaagaagttgtggtgtggtttcaagaaacgatactggacaaatcactgaaggccctggtcgtggcaaaggaccccgatggcacactcatcattgaattgtacggggataacatccagatctccgccagcatcaataaaaagttgggcctcctgtcctacaaggacaggattcggaaaaaggagtccgaggtcctgtgctcaaccacagagacactcgaggagaaaaacgaaaacatgaagctgccctgcaccgagtatctgtccaagtccgtcgggtataagttacctaacaaggaaattctcgaggaaagctacaagccccagatcaacagcagctataaggagctgaaattactgcagtctctcactaagaccaatctggtgacccagtatcaggactctgtcggcaacaaaaactctcaggtgttccctttaaccacggagaagaaagaagagatctctgcagaaacaccacttaaaaccgctcgagtcgaggccacactgtccgagaggaagatcggtgacagctgtgacaaggacttgcctctgaagttctgcgaattccctcaaaagacaatcatgcctggatttaaaaccaccgtgtacgtgagtcacatcaatgatctttcagacttctacgtacaactgattgaggatgaagcggagatcagccacctcagtgagagattgaatagcgtgaaaacccgtcccgagtattatgtgggaccgccactccagcgcggtgatatgatatgcgctgttttcccagaagacaacctctggtaccgcgcagtcatcaaagagcagcagccaaacgatctactatcagtccaattcattgattatggaaacgtgagtgtcgtgcataccaataaaattggcaggctggatctggtaaatgcaatcctccctggactttgcatccactgctcgctgcagggctttgaggtgccagacaacaagaactcaaagaagatgatgcactattttagccagcgcacaagtgaagctgccatccggtgtgagttcgtgaaattccaggatcgctgggaggtaatattggccgatgaacacggaataattgccgacgatatgatctcccgctacgcgctgtccgaaaaaagccaagtggaattaagcactcaggtcattaaaagtgcctcgagcaagtcagttaacaaatccgacatagacacgtccgtgttcctgaattggtacaaccccgagaagaaaatgatacgggcatatgccactgtgatagatggacccgagtacttctggtgtcagtttgcagacacggagaaactgcaatgcctggaagtggaggtgcaaactgccggtgagcaggtggccgaccgacggaattgtattccttgcccgtatatcggtgacccatgcattgttagatatagagaggacggccattactatcgagctctcataaccaatatatgtgaggactatctggtctctgtgagactggtcgactttgggaatattgaggattgtgtagacccaaaggctctgtgggccatcccgagtgaactgctctcggtcccaatgcaggcatttccttgttgtctatctggattcaatataagtgaaggtttgtgttctcaggaggggaacgactacttttacgagataatcactgaagacgtgctggaaatcaccattctcgagatcagacgggatgtgtgcgatattccattagccattgtggaccttaagagcaagggaaaatctatcaacgagaaaatggagaaatactctaagacaggtattaaatcagccttgccatacgagaacattgattcagagatcaaacagactctgggcagttataatcttgacgtgggcctgaaaaaactttctaataaggccgttcagaataaaatctacatggagcaacaaacagatgaactggctgagattactgaaaaggatgtgaatataatcggtactaaaccctccaattttagagacccgaaaacagacaatatttgcgaaggcttcgaaaatccgtgcaaagataagatcgacaccgaggaactagaaggcgaactggagtgtcacctggtggacaaagccgagttcgacgacaaatatctgattactggattcaacaccctgttgccccacgcaaatgagacaaaagagatcctggagctgaactcattggaggtgccactgagcccagacgacgagtctaaagaatttctagaactggagtctatcgaactccaaaactctctggtggtggatgaggaaaaaggtgagttgtctcccgtacccccaaatgtgcccctatcgcaagagtgtgtaacgaaaggcgcaatggagttgttcaccttgcagctccccctgagttgtgaagccgagaaacagccggagctggaactgccaactgctcagctcccattagacgataagatggaccccctctcattgggagtgtctcagaaagcccaggaaagcatgtgcactgaggacatgcgaaagtcgtcctgcgtggagtctttcgatgaccaacggagaatgagtttgcacctgcacggcgcagactgcgaccctaagacacaaaacgaaatgaacatctgtgaggaggagttcgtcgaatataagaaccgggatgccatctccgctttaatgcccctatttagcgaagaagaaagttcagacggctccaaacataacaacggactgcctgatcacataagcgcccagctccagaatacctatacactgaaagcctttacagtgggtagcaaatgcgtggtctggtccagtctcagaaatacatggtctaagtgtgagatcctggaaacagccgaggagggaactcggaaacgtggcctggaggtcatggagattta

SEQ ID NO: 66120 - DNA, 8887 bp, Artificial Sequence
  derived and/or modified sequence
aggtaaatgcgtgcccggaagcgcgacctcgggcggttggaggggctaccgggtcttaccagtccgtggcgggagtcccggaggaccctcgacgggggagttgccgagaaaaggcctcgccggcattcttcccctccactgggtcctttgaacctagtttggctgggactcgccttcaggcggcgcggaggatttcgaggccctgaggcgcggcccttaatttccggaagtgggggccgcgccgcgccgtcaagatgtgctcgacgcccggaatgccggcgccgggggcctcgctggccctgcgggtgtccttcgtggacgtgcatcccgatgtgatcccggtgcagctgtgggggctggtgggcgagcggcggggcgagtacctgcggctgagccgggaaatccaggaagcggcggccacgcgcggccagtgggcgctgggcagcgcctcggcctcgcccggcgagctgtgcctggtgcaggtcgggcttttgtggcaccgctgccgcgtggtcagccggcaggcacaggagagccgtgtcttcctgctggacgagggccgcaccatcacggccggagcaggctcgctggcgcctgggcgcagagagttcttcaatttgccctcggaagtgctgggctgcgtgctagcgggcctggtgccggcaggctgcggcgcgggctcaggcgagccgccgcagcactggcccgccgacgccgtggacttccttagcaaccttcagggcaaggaggtgcacgggtgcgtcctggacgtgctgctgctccatcgcctggtcctcctggaggtgcctgatgtgttccaacagatgcgggagctgggcctggctcggcgggtgcccgacagcctcttccgttcgctgctggagcgctatctcacagcggccactgctagcgtgggctccggggtcccggttctctcgcgagtcccgctcaagcaaaagcagcctggtctggattacttctatccccagctgcagctgggcgtgacggaggccgtggtcataacccaagtgtgccatccccaccgcattcactgccagctccgcagcgtctcgcaggagatccaccgcctctccgagagcatggcccaggtataccggggttccacggggacaggggatgagaactctaccagtgccacctgggaggagagggaggagagcccagataagccgggctctccgtgtgcatcctgtggcctggatggacattggtacagagcactgttgcttgagacttttcggccccagcgctgtgcccaggtgcttcatgtggactatggaaggaaggagttagtgagttgcagcagccttcggtacttgctgcctgaatattttcgaatgccggtggtgacctacccttgtgctttgtatggactctgggacggtgggagaggctggtctcggtcacaggtcggtgacctgaagacactgatactaggcaaggcagtgaatgcaaagattgaattttattgctcctttgagcatgtgtattatgtcagcctgtatggagaagatgggattaatctgaaccgtgtgtttggagtacagtcgtgttgcttggctgaccgagtccttcagagccaggcaacagaggaggaggaaccagaaacatctcagtctcagtctcctgctgaagaagtagatgaagagatttcactcccagccttaagatctatcaggttaaagatgaatgccttctacgatgcgcaggtagagtttgttaaaaatccttctgagttttggattaggttgaggaaacacaatgtcaccttcagtaagctgatgaggagaatgtgtggtttctattcctctgccagtaagctggatggtgtagttttgaaacctgaacctgatgacctttgctgtgtcaagtggaaagaaaatggttattatagggccatagtcaccaaattggatgacaagagtgtggatgtattcttagttgaccgaggcaattcggaaaatgtggactggtatgacgtaaggatgctgcttcctcagtttaggcagctaccaatattggctgtgaagtgcaccctggctgatatttggcctttgggaaaaacttggagccaggaggcagtttccttttttaaaaagactgtgctccacaaagaattagtcatccatattcttgataaacaggatcatcaatatgttattgagattcttgacgaatcaagaacaggggaagaaaacattagtaaggtaattgcccaagctggatatgccaagtatcaggaatttgaaacaaaggaaaatatcctggtaaatgcccactccccagggcatgtttcaaaccactttactacggagagtaacaaaataccttttgccaagactggagaaggagagcagaaagccaagagagagaataaaaccacatctgtttcaaaagctttgagtgacacaacagttgtaacaaatggttcaactgaactagttgtgcaggaaaaagtgaaaagagcatctgtttattttcctcttatgcagaattgcttggaaattaagccaggctcctctagtaaaggagagctggaagttggaagtacagtagaagtcagagtgtcttatgttgaaaaccctggctatttctggtgtcagctgaccaggaacatacaaggacttaaaactctaatgtctgatattcagtactattgcaaaaatacagctgctcctcaccagagaaacacccttgcttgtttggctaagcgaacagtaaacagacagtggtccagagcacttattagtgggatacagtctgtggagcatgtcaatgtaacatttgtagattatggagacagagaaatggtatctgtgaagaatatttattcaattagtgaagaatttctgaaggttaaggcacaggcttttaggtgcagtctttataatttaattcaaccagttggccagaatccctttgtttgggatgtaaaggcaatacaagctttcaatgaatttatagataatgcatggcaaaaaaatctagaattaaaatgtacaatatttgctctggcttcaattaatgaagaactgtttaacattgtggatttgctaaccccctttcagagtgcatgccatttcttggtagaaaagagacttgcaagaccagtaaaacttcagaagcctttggagtcctctgttcagctacattcctacttctattctacacatgatatgaaaattggaagtgaagaattagtttatataacgcatattgatgacccttggacattttattgccagctggcaagaaatgcaaatattttagaacagttgtcatgtagtattacacaattaagtaaagttttgctgaatttaaaaacatctcccttgaaccctggaaccttgtgccttgccaagtatactgatggaaactggtataggggcatagtaatagagaaagagccaaagaaagtcttctttgttgattttgggaatatttatgtagtaacaagtgatgatctgcttccaatacctagtgatgcatatgatgtcttacttttgcccatgcaagctgtcagatgttcattatctgatattcctgatcatataccagaagaagtggtggtgtggtttcaggagactattttagataagtcattgaaggctttagttgtagcaaaagatccagatggaacactgattatagaactatatggtgacaatattcaaattagtgctagtattaataagaagttggggctacttagttacaaagatagaataagaaaaaaagaaagtgaagtcctctgttctacaactgaaactcttgaagaaaaaaatgagaatatgaagttgccatgtacagagtatttaagtaaatcagtagggtacaagttacctaataaagaaattttggaagagtcatataaacctcagatcaactcatcatacaaggaactcaaacttttacaaagtttaacaaaaacaaacttagtcactcaatatcaagactctgtgggaaataaaaatagtcaagtgtttccattaacaacagaaaagaaagaagaaatttctgctgagacacccttgaaaacagcaagagtagaagctactctttcagagagaaaaataggagattcatgtgacaaagatttgcctctgaaattttgtgagttcccacagaagactataatgcctggatttaaaacaactgtatatgtttctcatataaatgacctttcagacttttatgttcaactaatagaagatgaagctgaaattagtcatctttcagagagattaaacagtgttaaaacaaggcccgaatattatgtaggtccacctttgcaaagaggagatatgatatgtgctgttttcccagaagataatttatggtatcgtgctgtgatcaaggagcaacaacccaatgaccttctctctgtgcagtttatagattatggcaatgtttctgtggttcatactaacaaaataggtaggcttgaccttgttaatgcaatattgccggggttgtgcattcattgctccttgcagggatttgaggttcctgacaataaaaattctaagaaaatgatgcattacttttcccaacggaccagcgaggctgcaataagatgtgaatttgttaaatttcaagacagatgggaagttattcttgctgatgaacatgggatcatagcagatgatatgattagcaggtatgctctcagtgaaaaatctcaagtagaactttctacccaagtaattaaaagtgccagttcaaagtctgttaacaaatcagacattgacacttcagtatttcttaactggtataatccagaaaaaaaaatgataagagcttatgccactgtgatagatggacctgagtacttttggtgtcagtttgctgatacggagaaacttcagtgtttagaagtagaagtacagactgctggagaacaggtagcagacaggagaaattgtatcccatgtccttatattggagatccttgtatagtaagatacagagaagatggacattattatagggcacttatcactaatatttgtgaagattatcttgtatctgtcaggcttgtggactttggaaacattgaagactgtgtggacccaaaagcactctgggccattccttctgaacttctgtcggttcccatgcaagcctttccatgttgcctctcagggtttaacatttcagaaggattatgttctcaagagggaaatgactatttctatgaaataataacagaagatgtgttggaaataacaatactagaaatcagaagggatgtttgtgatatccctttagcaattgttgacttgaaaagcaaaggtaaaagtattaatgagaaaatggagaaatattctaagactggtattaaaagtgctcttccctatgaaaatattgactcagagataaagcagactcttgggtcctacaatcttgatgtaggacttaagaaattaagtaataaagctgtacaaaataaaatatatatggaacaacagacagatgagcttgctgaaataactgaaaaagatgtaaacattattggaaccaaaccaagtaacttccgtgaccctaaaactgataacatttgtgaagggtttgaaaacccctgcaaagataaaattgatactgaggaactggaaggtgaattagagtgccatctggttgacaaagcagagtttgatgataaatacctgattacaggatttaacacattactaccacatgctaatgaaacaaaggagatactagaactgaattcacttgaggtgccgctttctcctgatgatgaatcaaaagaattcttagaactggaatctattgagttacagaattctctggtggtggatgaagaaaaaggggagctaagcccggtgccaccgaatgtgccactctcccaagagtgtgtcacaaaaggcgccatggagctatttacactgcagcttcctctcagctgtgaagctgagaaacagccagaactagaactacctacagcccagctgcctttagatgacaagatggatcctttgtctttaggagttagtcagaaagcacaggaatccatgtgtactgaggacatgagaaagtcaagttgtgtagaatcttttgatgaccagcgcaggatgtcattgcatctacatggagcagattgtgatcctaaaacacagaatgaaatgaatatatgtgaagaagaatttgtagagtataaaaacagggatgccatttcggcattgatgcctttgttctctgaggaagaaagcagtgatggaagcaagcacaataatggtttaccagatcatatctcagctcaactacagaacacctacactctgaaagcctttactgttggatctaaatgtgttgtgtggtcaagtctaagaaacacatggtctaaatgtgagattttagaaacagctgaagaaggaacaaggaaaaggggtttggaggtgatggagatttaaccgtggatctatagctgtggccaatcagtcagaagctgcccttgaacaagtggcatcttacgcagaccaacagagtatttgagaaaattgaaaacatgtaaccacaagaagttgtcattttcaaaaacttctatataggtggaaaacaaattaggtctcaggttgatggtggggtgtgtttatagtgatcctgttatatatacagatctgggatctttcgtctttattgtcttacgtttctaattagttgggaggatttattttgctaaacagtttactaacacattacatttcaaaaactattttggtacctttcaaatacagtgtttaaattaaaatagaaaaataagggctcatgacaagtacattatttgattctacttaggatagctttttagcaggatctccttcagaatttttgtcttgactttgaatctttgcctgtttgtctaaacatttgactaacattctgtttgaatttggaagtattctaatacaagatttgaataaagtttatccttaaataaagtttatccttaatatgatggtctcattttattaaaaaggaaatagaactcttaaatatacttggttccatctctcctctgtaatggaggattggggaaagcatagtaatattaaatgttagctcttatgtattagtcacttagcttatactttaaatgcattttttcactttattcatcaactttgaagtgcatatcaatattatccatattttataggtgagaaaattgaagcttcataaagaggttaaataacttgcctaaggtcagatagctgatgagtctcagaggcttgatcaaacccagacctacctaactttgaagcccatgactttttaaacatgattttgcaaagcatagatcttagcttttagaaacagatctgagctatatgctgcttaacagatatgtgacatgggcaaattatgtaatattttgaactttgatcttcatctgtaaagtggtgataataaaacctttcttgcagtgtttttttaagatgagaaataattgatataaagtccctgaaaaggagtaggcatttgataaatgtgtctttctttaccctgaaaaatactcagtgtgcactatgttaggttatttctttttaaccttaacttattagatattttcaatagttattttctcctttcagcatcagcatgcgccaccaacaaaagactgtaaaaaacaaacaaacaaaaaagtgttgaatgggacatccatacagttggaatgcttatttctaaaatgaatagggaaaaggtttgctaaatgagactggggtaaaggtgtatctctgtgaagcattatcagactctgaagcctaatggaaatagaattatgaaccttaaaaacccattataatttccgtaagtagaagggagagaggtttgcattaaaagtaattgaggtagatgagtatattacttattcctggaataatgaatagacaagtttggcttactcatatagataatataatgtgaattgccagaagcaaagctcagagaagatgcattaggatcagattataggaagccttcaatttcaagctgagtttaactccctattttaaaaaatttaatctgaatggctacagaagtaaaatttctcagaatgagtgactttgcacctgacaccactaagataggactagggtaccaaatgagtggtataaatttttatgtcccctgggaaataaaatcattttccatgattcccatatttataagtataaattcttaagctatatttttacctccatttaatcgtgttattctgttttactactacatatagaattgaaaacattaaataaaattaactggaatatgaagaagctaaatgtaattctgaatgttttattatccttcacagcctttgtgtgagtaactaatgtattctaactggaatccctgctatatgctgtaatacctgtggaacctttctttagcaagtagaatgccttaaagaattaaagaaagtgtcaaaaaattaccaatttaatccactgcctttgcctcatctctaatattcttaacccttctctactccttttagtcatcatttgaaattgtgtagtaccaccaatcctgtgctgaaacaatggcttttgcttgttctaatttttcttaccgtgaccaaaagtcaaagagaagagctgccaaattctacctagaatatcatgttgctataattaaactccactgcccatagtagataataaaaggcaagaaattgttttttactctatgtttagggagtcttgtatcattgcaacaggttttcactgggattttgcctgttttaatctacttgtctgtcaaagtaatgtaaaaacagtttttaacttcgacactgaaaaggaatcatctttaaaattaaaatttaggctgatatgaa

SEQ ID NO: 66121 - protein, 1339 aa, Artificial Sequence
  derived and/or modified sequence
MDLLSGTYIFAVLLACVVFHSGAQEKNYTIREEMPENVLIGDLLKDLNLSLIPNKSLTTAMQFKLVYKTGDVPLIRIEEDTGEIFTTGARIDREKLCAGIPRDEHCFYEVEVAILPDEIFRLVKIRFLIEDINDNAPLFPATVINISIPENSAINSKYTLPAAVDPDVGINGVQNYELIKSQNIFGLDVIETPEGDKMPQLIVQKELDREEKDTYVMKVKVEDGGFPQRSSTAILQVSVTDTNDNHPVFKETEIEVSIPENAPVGTSVTQLHATDADIGENAKIHFSFSNLVSNIARRLFHLNATTGLITIKEPLDREETPNHKLLVLASDGGLMPARAMVLVNVTDVNDNVPSIDIRYIVNPVNDTVVLSENIPLNTKIALITVTDKDADHNGRVTCFTDHEIPFRLRPVFSNQFLLETAAYLDYESTKEYAIKLLAADAGKPPLNQSAMLFIKVKDENDNAPVFTQSFVTVSIPENNSPGIQLTKVSAMDADSGPNAKINYLLGPDAPPEFSLDCRTGMLTVVKKLDREKEDKYLFTILAKDNGVPPLTSNVTVFVSIIDQNDNSPVFTHNEYNFYVPENLPRHGTVGLITVTDPDYGDNSAVTLSILDENDDFTIDSQTGVIRPNISFDREKQESYTFYVKAEDGGRVSRSSSAKVTINVVDVNDNKPVFIVPPSNCSYELVLPSTNPGTVVFQVIAVDNDTGMNAEVRYSIVGGNTRDLFAIDQETGNITLMEKCDVTDLGLHRVLVKANDLGQPDSLFSVVIVNLFVNESVTNATLINELVRKSTEAPVTPNTEIADVSSPTSDYVKILVAAVAGTITVVVVIFITAVVRCRQAPHLKAAQKNKQNSEWATPNPENRQMIMMKKKKKKKKHSPKNLLLNFVTIEETKADDVDSDGNRVTLDLPIDLEEQTMGKYNWVTTPTTFKPDSPDLARHYKSASPQPAFQIQPETPLNSKHHIIQELPLDNTFVACDSISKCSSSSSDPYSVSDCGYPVTTFEVPVSVHTRPPMKEVVRSCTPMKESTTMEIWIHPQPQRKSEGKVAGKSQRRVTFHLPEGSQESSSDGGLGDHDAGSLTSTSHGLPLGYPQEEYFDRATPSNRTEGDGNSDPESTAEITVQPTVEEASDNCTQECLIYGHSDACWMPASLDHSSSSQAQASALCHSPPLSQASTQHHSPRVTQTIALCHSPPVTQTIALCHSPPPIQVSALHHSPPLVQATALHHSPPSAQASALCYSPPLAQAAAISHSSPLPQVIALHRSQAQSSVSLQQGWVQGADGLCSVDQGVQGSATSQFYTMSERLHPSDDSIKVIPLTTFTPRQQARPSRGDSPIMEEHPL

SEQ ID NO: 66122 - protein, 1065 aa, Artificial Sequence
  derived and/or modified sequence
MDLLSGTYIFAVLLACVVFHSGAQEKNYTIREEMPENVLIGDLLKDLNLSLIPNKSLTTAMQFKLVYKTGDVPLIRIEEDTGEIFTTGARIDREKLCAGIPRDEHCFYEVEVAILPDEIFRLVKIRFLIEDINDNAPLFPATVINISIPENSAINSKYTLPAAVDPDVGINGVQNYELIKSQNIFGLDVIETPEGDKMPQLIVQKELDREEKDTYVMKVKVEDGGFPQRSSTAILQVSVTDTNDNHPVFKETEIEVSIPENAPVGTSVTQLHATDADIGENAKIHFSFSNLVSNIARRLFHLNATTGLITIKEPLDREETPNHKLLVLASDGGLMPARAMVLVNVTDVNDNVPSIDIRYIVNPVNDTVVLSENIPLNTKIALITVTDKDADHNGRVTCFTDHEIPFRLRPVFSNQFLLETAAYLDYESTKEYAIKLLAADAGKPPLNQSAMLFIKVKDENDNAPVFTQSFVTVSIPENNSPGIQLTKVSAMDADSGPNAKINYLLGPDAPPEFSLDCRTGMLTVVKKLDREKEDKYLFTILAKDNGVPPLTSNVTVFVSIIDQNDNSPVFTHNEYNFYVPENLPRHGTVGLITVTDPDYGDNSAVTLSILDENDDFTIDSQTGVIRPNISFDREKQESYTFYVKAEDGGRVSRSSSAKVTINVVDVNDNKPVFIVPPSNCSYELVLPSTNPGTVVFQVIAVDNDTGMNAEVRYSIVGGNTRDLFAIDQETGNITLMEKCDVTDLGLHRVLVKANDLGQPDSLFSVVIVNLFVNESVTNATLINELVRKSTEAPVTPNTEIADVSSPTSDYVKILVAAVAGTITVVVVIFITAVVRCRQAPHLKAAQKNKQNSEWATPNPENRQMIMMKKKKKKKKHSPKNLLLNFVTIEETKADDVDSDGNRVTLDLPIDLEEQTMGKYNWVTTPTTFKPDSPDLARHYKSASPQPAFQIQPETPLNSKHHIIQELPLDNTFVACDSISKCSSSSSDPYSVSDCGYPVTTFEVPVSVHTRPPMKEVVRSCTPMKESTTMEIWIHPQPQRKSEGKVAGKTVLTSSSPSAMTLSYLD

SEQ ID NO: 66123 - DNA, 3198 bp, Artificial Sequence
  derived and/or modified sequence
atggatctgctctcaggcacttatatcttcgccgttttgctcgcctgtgtggtgtttcatagcggagctcaggaaaaaaactacaccatcagggaggagatgcccgagaatgtgctcatcggcgatctcctgaaagacctgaatctgtccttaattcccaacaaatcgctgaccactgcgatgcagtttaagcttgtgtataagacaggtgacgtgcctcttatccgcatagaggaggataccggagagatttttaccacaggcgcgagaatcgatagagaaaaactgtgcgcaggcattccgagagatgaacactgtttttatgaggttgaggtcgctattttgccggacgagatctttcgccttgttaagattcgctttttgattgaggatatcaatgataacgcacccctttttcctgccacggtaattaacatttcaatacccgagaattccgcaattaacagtaagtataccctccccgccgctgtagatccagatgttggtattaatggcgttcagaattacgagctcattaaaagtcaaaatatcttcggactcgacgtgattgagacaccggaaggcgataaaatgccccagctcatcgtccagaaagagctggaccgggaggaaaaagatacatatgtgatgaaggtcaaggtcgaagatggcggctttccgcagaggtccagtactgccatactgcaggtgagcgtgacagatacgaatgacaatcacccagtgttcaaagagaccgagatagaggtcagtattcccgagaacgcgcccgtgggtacatctgtcacccagttacatgcaacagatgcggatatcggcgaaaacgccaagatccacttttcattctctaacctggtgtcgaacatcgctagaaggctgtttcacctgaacgccaccacagggttaatcactataaaggaaccactggacagggaagagacgccaaaccacaagctgctggtgctggctagtgatggagggctgatgcccgcaagggcaatggtcctggtgaatgtgacagacgtgaatgataatgttccgtcaatcgacattcgctacattgtgaatcctgtcaatgacacggtggtactttcagaaaacattcctcttaacacaaaaattgcgctcatcactgtaactgataaggatgctgatcataacggccgcgtcacctgctttactgaccacgagatacccttcaggttgagaccggtgttctccaaccaattcctgctggagaccgcagcataccttgattatgagtctacaaaagagtacgccattaagctgctggctgctgacgcagggaagccgcctctcaaccagagtgccatgctattcatcaaagtgaaggatgagaacgataatgccccagtatttactcaaagctttgttactgtctctatcccagaaaataacagccctggtattcaattgaccaaggtgtcagcaatggacgcagactccgggcccaatgccaaaatcaattacctattgggccccgatgccccaccggagttctccctggattgtcgcacaggcatgctgaccgtggttaaaaagctggaccgggagaaggaagataaatacctctttaccatactagccaaagataacggtgttcccccactcacatctaacgtgactgtcttcgtgagcataatcgaccagaatgacaacagtcctgtgttcacacataatgaatacaacttctacgtgcctgaaaatctgcctcggcatggcactgttggactgatcacggtgacagatcctgattacggcgataactctgccgtcaccctgtccatactggacgagaacgacgatttcaccatagattcccaaactggcgtgatacgccctaacatatccttcgaccgagagaaacaagagagttacactttttacgtgaaggctgaagacggcggtcgtgtgagccgtagcagcagcgctaaggttactattaatgtggttgatgtcaatgacaacaaacccgtctttatcgtgcccccttccaattgctcctacgaactcgtgctccccagcactaacccaggtacagtcgtttttcaggtgatcgcagttgacaacgacaccgggatgaacgcagaggtgcgttacagtattgtgggtggcaatacacgggacctctttgccatagaccaggagacaggcaacattaccctgatggagaagtgtgacgtgacagatttaggactacatagagtgctggtcaaggccaacgatctggggcagcccgactccctcttctccgtagtcatcgtgaatcttttcgtaaatgagtcagtgaccaatgcaactctgatcaacgagctcgttcgcaagagcacggaagccccagtcacgccaaatactgagatcgccgatgtgagttcacctaccagtgattatgtgaagattctggtggctgcagtggcaggcacaatcaccgtcgtggtcgtcatcttcatcacagccgttgtgaggtgccggcaggcccctcatcttaaggccgcacagaaaaataagcagaatagtgagtgggccacacctaatcctgagaatcgccagatgatcatgatgaaaaaaaagaagaaaaagaagaagcattcccctaaaaatctgctccttaatttcgtcaccattgaggagaccaaggctgatgacgtagactcagatggcaacagggttacacttgatctgcctattgatctagaggagcagacgatgggaaaatacaattgggtgactaccccgactacatttaaacccgactctccagatctcgctcggcattataaatccgcaagcccccagccggcgtttcaaatccaacccgaaactccgctaaactcgaaacaccatataatacaggagctgccgctggacaacacctttgtggcgtgcgattcaatttcaaagtgttctagctcatccagcgatccttacagcgtctctgactgcggatacccagtgactacatttgaggtgcctgtgtccgtgcacacacgccccccgatgaaggaggtggtccgctcctgtacccctatgaaagagtccaccacaatggagatttggattcatccccagccacaacggaagagcgagggtaaagttgcaggtaaaacggtgctgacgagctcgagcccatctgctatgaccctatcctacctggattag

SEQ ID NO: 66124 - DNA, 3198 bp, Artificial Sequence
  derived and/or modified sequence
atggacctgctgagcggcacctacatctttgctgtgctgctggcctgtgtggtgttccacagcggggcccaggagaagaactacaccatccgggaggagatgccagaaaatgtgctgattggagacctgctgaaggacctgaacctgagcctcatccccaacaagagcctgaccacagccatgcagttcaagctggtgtacaagacaggagatgtgcccctcatcagaattgaagaagatactggagagatcttcaccactggagccagaattgaccgggagaagctgtgtgccggcatccccagagatgagcactgcttctatgaggtggaggtggccatcctgcctgatgagatcttccggctggtgaagatccgcttcctgattgaggacatcaatgacaatgcccccctcttccctgccaccgtcatcaacatcagcatccctgagaacagcgccatcaacagcaagtacaccctgcctgctgctgtggaccctgatgtgggcatcaatggagtgcagaactatgagctgatcaagagccagaacatcttcggcctggatgtgattgagaccccagagggggacaagatgccccagctgattgtgcagaaggagctggaccgggaggagaaggacacctacgtgatgaaggtgaaggtggaggatggcggcttcccccagaggagcagcacagccatcctgcaggtgtctgtgacagacaccaatgacaaccaccctgtgttcaaggagacagaaattgaggtgtccatcccagaaaatgcccctgtgggcacctctgtgacccagctgcacgccacagatgctgacatcggggagaatgccaagatccacttctccttcagcaacctggtgagcaacatcgcccggcggctcttccacctgaatgccaccaccggcctcatcaccatcaaggagcccctggaccgggaggagacccccaaccacaagctgctggtgctggccagtgatggcggcctgatgcctgcccgggccatggtgctggtgaatgtgacagatgtgaatgacaacgtgcccagcattgacatccgctacatcgtgaaccctgtgaatgacacagtggtgctgtctgagaacatccccctgaacaccaagatcgccctgatcaccgtgacagacaaggatgctgaccacaacggccgggtgacctgcttcacagaccacgagatccccttccggctgcggcctgtgttcagcaaccagttcctgctggagacagctgcctacctggactatgagagcaccaaggagtatgccatcaagctgctggccgcagatgctgggaagccacccctgaaccagagcgccatgctgttcatcaaggtgaaggatgaaaatgacaatgcccctgtgttcacccagagctttgtgacagtgtccatccctgagaacaacagccctggcatccagctgaccaaggtgtctgccatggatgctgacagcggccccaatgccaagatcaactacctgctgggcccagatgcccctcctgagttcagcctggactgcaggacaggcatgctgactgtggtgaagaagctggaccgggagaaggaggacaagtacctgttcaccatcctggccaaggacaatggagtgccccccctgaccagcaatgtgacagtgtttgtgtccatcatcgaccagaatgacaacagccctgtgttcacccacaatgagtacaacttctacgtgcctgagaacctgcccaggcatggcaccgtgggcctcatcaccgtgacagatcctgactatggagacaacagcgctgtgaccctgagcatcctggatgaaaatgatgacttcaccatcgacagccagacaggagtcatccggcccaacatcagctttgaccgggagaagcaggagagctacaccttctacgtgaaggccgaggatggcggccgggtgagccgcagcagcagcgccaaggtgaccatcaacgtggtggatgtgaatgacaacaagcctgtgttcatcgtgccccccagcaactgcagctatgagctggtgctgcccagcaccaaccctggcaccgtggtgttccaggtgattgctgtggacaatgacaccggcatgaatgctgaggtgcgctacagcatcgtgggcggcaacacccgggacctgtttgccatcgaccaggagaccggcaacatcaccctgatggagaagtgtgatgtgacagacctgggcctgcaccgggtgctggtgaaggccaatgacctgggccagcctgacagcctcttctctgtggtgattgtgaacctgtttgtgaatgaatctgtgaccaatgccaccctcatcaatgagctggtgaggaagagcacagaggcccctgtgacccccaacacagaaattgctgatgtgagcagccccaccagtgactatgtgaagatcctggtggccgctgtggccggcaccatcaccgtggtggtggtgatcttcatcacagctgtggtgcgctgccggcaggccccccacctgaaggccgcccagaagaacaagcagaacagcgagtgggccacccccaaccctgagaaccggcagatgatcatgatgaagaagaagaagaagaagaagaagcacagccccaagaacctgctgctgaactttgtgaccatcgaggagaccaaggcagatgatgtggacagtgatggcaacagagtgaccctggacctgcccatcgacctggaggagcagaccatgggcaagtacaactgggtgaccacccccaccaccttcaagccagacagcccagacctggcccggcactacaagagcgccagcccccagcctgccttccagatccagcctgagacccccctgaacagcaagcaccacatcatccaggagctgcccctggacaacacctttgtggcctgtgacagcatcagcaagtgcagcagcagcagcagtgacccctacagcgtgtctgactgtggctaccctgtgaccacctttgaggtgcctgtgtctgtgcacaccaggcctcccatgaaggaggtggtgcgcagctgcacccccatgaaggagagcaccaccatggagatctggatccacccccagccccagaggaagtctgagggcaaggtggccggcaagacagtgctgaccagcagcagccccagcgccatgaccctgagctacctggactag

SEQ ID NO: 66125 - DNA, 3198 bp, Artificial Sequence
  derived and/or modified sequence
atggacctgctgagcggcacctacatcttcgccgtgctgctggcctgtgtggttttccatagcggtgcccaggagaagaactataccatcagagaagaaatgcctgaaaatgtgctcatcggcgatctccttaaggacctgaatttgtccctgattccgaacaagtccttgactaccgcgatgcagttcaagctggtttataaaaccggagatgtccccctgattagaattgaagaggataccggcgagatttttacaacgggagcccggattgatagagaaaagctgtgtgctggcatacctcgggatgaacattgcttctatgaggtcgaggtcgcaattctgcctgacgagattttcagactggtgaagatccgctttctaatcgaggatatcaatgataatgctcccctttttccagccactgtcatcaacataagtatccctgagaactctgccattaatagtaagtacacactgccagcagccgttgatcctgacgtgggcattaacggcgtccagaactacgaattgattaagagccaaaacatctttggtcttgacgtgatcgaaactcctgagggcgacaagatgcctcaactgattgtccagaaggaactcgatcgtgaggagaaagatacgtatgtcatgaaggtcaaagtcgaagatggcggtttcccccaacggtctagcactgcaatattacaggtcagcgtgactgacaccaatgacaatcatcctgtcttcaaagaaactgaaatagaagtaagcatcccagagaatgcacctgttggcacttctgtcacccagttacacgcaactgacgccgacattggggagaatgctaagatccacttttccttctccaatctcgtgagcaacattgctcgcaggctgtttcaccttaacgccaccaccgggctgataactatcaaagaaccgctggatcgggaagagaccccaaatcataaactgcttgtcctggcgtcagacggaggattaatgcccgctcgtgcaatggttcttgtgaacgtaactgacgtgaatgacaatgtcccatcgatcgatatcagatacattgtcaaccctgtcaatgataccgttgtgttgtcagaaaacatcccgctcaacaccaaaatagcactaatcacggtgacagacaaagacgctgatcacaatggaagggtcacctgctttaccgatcacgagatccccttcagactgagaccagtgttttctaatcagttcctgctggaaacagccgcctatctagactacgaaagtacaaaggaatacgcgatcaagctgctggcagccgatgctggaaagccccctctgaaccagtccgccatgctgttcatcaaggtgaaagatgagaacgacaatgctcccgtgtttacccaatccttcgtcaccgtctctatcccagagaataattccccgggtatccagcttacgaaagtttctgctatggacgctgattcaggaccaaatgctaaaattaactatctactcggtcctgacgcccccccggaatttagcctggattgtaggacaggcatgttgacagtcgtcaagaagctcgacagggaaaaggaagataagtatctgtttaccattttggccaaggacaatggtgtcccacccttaacttccaacgtgaccgtgtttgtgtccattattgatcagaatgacaatagccccgtcttcacacacaacgaatacaatttttatgtccccgagaaccttccaaggcacggcacggtcggcctgatcaccgtaacggacccagactacggcgataactccgcagttaccttgagcattcttgatgagaacgacgatttcactatcgacagtcagacaggcgttatccggcccaatatatcatttgaccgggaaaagcaggaaagttatacattttatgtgaaagccgaagacggaggccgagtgtctagatctagtagtgcgaaagtaactatcaacgttgtcgacgtgaacgataacaaacctgtctttattgtgccaccgtctaactgcagctatgagctggtgctgccctctaccaacccgggcactgtggtattccaggtcattgcggtggacaacgatactggcatgaatgcggaggtgcggtactccattgtgggaggcaacacaagagacttgttcgcaattgaccaggaaacggggaacattacactcatggaaaaatgcgacgttactgacctgggactacaccgtgtgctggtgaaagccaatgatctaggtcagcccgactccctcttttccgtcgttatcgtgaatctttttgtcaatgagtcggtaactaacgcaaccttgatcaacgaactggtgcggaagtctacagaggcgcccgtcacacctaataccgaaatagctgacgttagctctccaacctccgattatgtcaaaatcttagtggcagccgtggccggaaccattaccgtcgtggttgtgatttttatcactgccgtagtccgttgcagacaggcgcctcatctgaaagctgcccagaagaacaaacagaatagcgaatgggctacgcctaatccagaaaacagacaaatgatcatgatgaagaagaagaaaaaaaagaagaaacattctccaaaaaaccttctcctgaattttgtaaccattgaagaaaccaaggcagatgatgtggactccgatgggaatcgcgtgacgcttgatctgcctatcgatttagaggaacagactatgggaaaatacaattgggtgaccacacctacgactttcaaacccgatagtccagatctcgcccggcactacaagtctgcaagtccgcagcccgccttccagatccagcccgaaaccccactgaactctaagcaccatattatacaggagctaccactggacaatacattcgtcgcctgcgactcgatctctaagtgtagttcaagctcaagcgacccttactctgttagtgactgcggttacccggtgaccacctttgaagtacccgtgagtgtacacaccagacccccaatgaaggaggtggtgagaagctgtacacctatgaaggagagcaccaccatggaaatctggattcacccacagcctcagcgtaaaagcgaaggtaaggtggctggcaagactgtgctgacatcttcttcgccaagcgcaatgaccctgagttacttggactag

SEQ ID NO: 66126 - DNA, 3198 bp, Artificial Sequence
  derived and/or modified sequence
atggacctcctttctggaacgtatatttttgccgttctcctggcctgcgtcgtctttcactcaggggctcaggaaaagaactacaccatccgcgaggaaatgccggagaatgtgttaattggagatctgctgaaagacctcaacttgtcactgattccaaataagagcctgacaacagctatgcaattcaagttagtgtataagacaggggacgtgccactgatccggattgaggaggacacaggggaaatcttcaccacaggggcaaggatcgacagggagaaactatgtgctgggatcccccgtgatgagcactgcttctacgaagttgaggtggctattttgccagacgaaatctttagattggtcaagatcaggtttcttatcgaagacatcaacgataacgctcccttgttccccgcaacagttatcaatatttccattcccgagaactctgccattaacagtaagtacaccttaccagctgccgtcgaccctgacgtcgggatcaatggtgtgcagaactacgaactcatcaagagccagaacatctttgggctggacgtcatcgaaacgccagaaggcgataaaatgccccagttgatagtgcagaaggaactcgacagagaggagaaagacacctacgtaatgaaagtgaaggttgaagacgggggattcccgcaaaggtcatctacagcaattctacaagtgtccgtcacagacacaaatgataaccatccggtcttcaaagaaacagagatcgaagtgtcaattccagagaatgctccagtggggacaagcgtcacccagctgcacgccaccgacgccgatataggggagaacgccaaaatccacttttcattttctaaccttgtgtctaacatcgccaggcgcttgtttcatcttaatgccaccacagggctgataactatcaaggagccgctggatcgcgaagaaacgcccaaccacaagctgctcgtgctggccagcgacgggggactgatgcccgctcgtgcaatggtgttggtgaatgtgacagacgtgaacgataacgtaccatctatcgatattcgctacatagtcaatccagtcaacgacacggtcgtcttaagtgagaacatccctctgaataccaagatcgctctcattactgttaccgataaagatgctgatcataatggtcgggtcacttgctttaccgatcacgagatccctttccgcctgcgtccggtgttctctaaccagtttctgctggagacagccgcatacctggactacgagtccacaaaagaatacgccatcaaactgcttgccgcagacgctgggaagccacccctgaaccaatccgctatgctgttcattaaggttaaggatgagaatgacaacgcacccgtgtttacacagtcgtttgtgaccgtctcaatccccgagaacaattcccccggaattcagctcaccaaggtttccgccatggatgccgactctgggcctaacgctaagatcaactatctgctgggccctgatgctcccccagaattcagcctggattgccggacgggaatgctaacagtggtcaagaaactggacagggaaaaggaagataaatacctcttcacgatactcgcaaaggataatggcgttcctcctctgacctcaaacgtcacagtatttgtgagtattattgaccagaatgacaacagcccggttttcacccacaatgagtacaacttctatgtaccggagaatctgcccagacacggcacagtcggactaattacagtgaccgatccagattacggagacaactccgctgtgacacttagcatcctggacgaaaatgacgactttaccatcgacagccagacgggagtcatcagaccaaacatctcatttgatcgggagaaacaagagtcctataccttctatgtgaaagccgaagacggaggcagagtttctaggtcctcctcagcaaaggttacaatcaatgtggtggatgtaaacgacaataagcctgtcttcatcgtacctccaagtaattgctcctacgagcttgttctgccctccacaaaccccggaacggtggtattccaagtaattgccgtagataacgatacgggcatgaacgctgaggtgagatattccattgtgggtggcaatactagagacctgttcgccattgaccaggaaacaggaaatattaccctgatggagaaatgcgacgtgactgatctgggcttacaccgtgtgttggtgaaagcaaacgatctcggacagcctgattcccttttttcagtagtgatagttaatctgttcgtaaacgagagcgtcaccaatgctacgttgataaacgaactggttagaaagagcacagaggccccagtgacaccaaacacggaaatcgctgatgtgtcatcccccacgtctgattacgtgaaaatacttgtcgccgctgttgctggtaccattactgtggtcgtcgtgatcttcatcacagcagtggtgaggtgcaggcaggcaccgcacttgaaggccgctcaaaagaataaacaaaattccgaatgggcaaccccgaaccctgaaaacaggcagatgataatgatgaagaaaaagaagaagaaaaagaagcattcccctaaaaatttacttttaaactttgtcacaatcgaggaaacaaaggctgacgatgtggactccgacggcaatcgagtgaccctcgacttgccaatagacctggaagaacagactatgggcaagtataattgggtgacgacaccgactacattcaaacctgactctcccgatttggctcgtcactacaaatccgcttctccccagccggcatttcagatccagcctgaaacgcccctgaactccaaacatcacattatccaagaactgccccttgataacaccttcgtggcgtgcgactccatttccaaatgctcctcatcatcatccgacccttactccgtgtctgattgcgggtaccctgtgacaacgtttgaggtgccagtgtcggtgcacacaagacctcccatgaaagaggtagtacgaagttgtaccccaatgaaggagtcgacaaccatggaaatctggatccacccccagccgcaacgcaagtccgagggcaaagtcgccggtaagaccgtgcttacttcgtccagtccttccgccatgaccctctcttacttggactag

SEQ ID NO: 66127 - DNA, 4019 bp, Artificial Sequence
  derived and/or modified sequence
atggacttgttgtccgggacgtacattttcgcggtcctgctagcatgcgtggtgttccactctggcgcccaggagaaaaactacaccatccgagaagaaatgccagaaaacgtcctgataggcgacttgttgaaagaccttaacttgtcgctgattccaaacaagtccttgacaactgctatgcagttcaagctagtgtacaagaccggagatgtgccactgattcgaattgaagaggatactggtgagatcttcactactggcgctcgcattgatcgtgagaaattatgtgctggtatcccaagggatgagcattgcttttatgaagtggaggttgccattttgccggatgaaatatttagactggttaagatacgttttctgatagaagatataaatgataatgcaccattgttcccagcaacagttatcaacatatcaattccagagaactcggctataaactctaaatatactctcccagcggctgttgatcctgacgtaggaataaacggagttcaaaactacgaactaattaagagtcaaaacatttttggcctcgatgtcattgaaacaccagaaggagacaagatgccacaactgattgttcaaaaggagttagatagggaagagaaggatacctacgtgatgaaagtaaaggttgaagatggtggctttcctcaaagatccagtactgctattttgcaagtgagtgttactgatacaaatgacaaccacccagtctttaaggagacagagattgaagtcagtataccagaaaatgctcctgtaggcacttcagtgacacagctccatgccacagatgctgacataggtgaaaatgccaagatccacttctctttcagcaatctagtctccaacattgccaggagattatttcacctcaatgccaccactggacttatcacaatcaaagaaccactggatagggaagaaacaccaaaccacaagttactggttttggcaagtgatggtggattgatgccagcaagagcaatggtgctggtaaatgttacagatgtcaatgataatgtcccatccattgacataagatacatcgtcaatcctgtcaatgacacagttgttctttcagaaaatattccactcaacaccaaaattgctctcataactgtgacggataaggatgcggaccataatggcagggtgacatgcttcacagatcatgaaatccctttcagattaaggccagtattcagtaatcagttcctcctggagactgcagcatatcttgactatgagtccacaaaagaatatgccattaaattactggctgcagatgctggcaaacctcctttgaatcagtcagcaatgctcttcatcaaagtgaaagatgaaaatgacaatgctccagttttcacccagtctttcgtaactgtttctattcctgagaataactctcctggcatccagttgacgaaagtaagtgcaatggatgcagacagtgggcctaatgctaagatcaattacctgctaggccctgatgctccacctgaattcagcctggattgtcgtacaggcatgctgactgtagtgaagaaactagatagagaaaaagaggataaatatttattcacaattctggcaaaagataacggggtaccacccttaaccagcaatgtcacagtctttgtaagcattattgatcagaatgacaatagcccagttttcactcacaatgaatacaacttctatgtcccagaaaaccttccaaggcatggtacagtaggactaatcactgtaactgatcctgattatggagacaattctgcagttacgctctccattttagatgagaatgatgacttcaccattgattcacaaactggtgtcatccgaccaaatatttcatttgatagagaaaaacaagaatcttacactttctatgtaaaggctgaggatggtggtagagtatcacgttcttcaagtgccaaagtaaccataaatgtggttgatgtcaatgacaacaaaccagttttcattgtccctccttccaactgttcttatgaattggttctaccgtccactaatccaggcacagtggtctttcaggtaattgctgttgacaatgacactggcatgaatgcagaggttcgttacagcattgtaggaggaaacacaagagatctgtttgcaatcgaccaagaaacaggcaacataacattgatggagaaatgtgatgttacagaccttggtttacacagagtgttggtcaaagctaatgacttaggacagcctgattctctcttcagtgttgtaattgtcaatctgttcgtgaatgagtcggtgaccaatgctacactgattaatgaactggtgcgcaaaagcactgaagcaccagtgaccccaaatactgagatagctgatgtatcctcaccaactagtgactatgtcaagatcctggttgcagctgttgctggcaccataactgtcgttgtagttattttcatcactgctgtagtaagatgtcgccaggcaccacaccttaaggctgctcagaaaaacaagcagaattctgaatgggctaccccaaacccagaaaacaggcagatgataatgatgaagaaaaagaaaaagaagaagaagcattcccctaagaacttgctgcttaattttgtcactattgaagaaactaaggcagatgatgttgacagtgatggaaacagagtcacactagaccttcctattgatctagaagagcaaacaatgggaaagtacaattgggtaactacacctactactttcaagcccgacagccctgatttggcccgacactacaaatctgcctctccacagcctgccttccaaattcagcctgaaactcccctgaattcgaagcaccacatcatccaagaactgcctctcgataacacctttgtggcctgtgactctatctccaagtgttcctcaagcagttcagatccctacagcgtttctgactgtggctatccagtgacgaccttcgaggtacctgtgtccgtacacaccagaccgccaatgaaggaggttgtgcgatcttgcacccccatgaaagagtctacaactatggagatctggattcatccccaaccacagcggaaatctgaagggaaagtggcaggaaagactgtgcttacttcctcttccccttctgccatgaccctttcatacctggactaaagaaagagctgcagaaataactgttcaaccaactgtggaagaggcctctgacaactgcactcaagaatgtctcatctatggccattctgatgcctgctggatgccggcatctctggatcattccagctcttcgcaagcacaggcctctgctctatgccacagcccaccactgtcacaggcctctactcagcaccacagcccacgagtgacacagaccattgctctctgccacagccctccagtgacacagaccatcgcattgtgccacagcccaccaccgatacaggtgtctgctctccaccacagtcctcctctagtgcaggctactgcacttcaccacagcccaccatcagcacaggcctcagccctctgctacagccctcctttagcacaggctgctgcaatcagccacagctctcctctgccacaggttattgccctccatcgtagtcaggcccaatcatcagtcagtttgcagcaaggttgggtgcaaggtgctgatgggctatgctctgttgatcagggagtgcaaggtagtgcaacatctcagttttacaccatgtctgaaagacttcatcccagtgatgattcaattaaagtcattcctttgacaaccttcactccacgccaacaggccagaccgtccagaggtgattcccccattatggaagaacatcccttgtaaagctaaaatagttacttcaaattttcagaaaagatgtatatagtcaaaatttaagatacaattccaatgagtattctgattatcagatttgtaaataactatgtaaatagaaacagataccagaataaatctacag

SEQ ID NO: 66128 - DNA, 3198 bp, Artificial Sequence
  derived and/or modified sequence
atggacctgctgagcggcacctacatcttcgccgtgctgctggcctgcgtggtgttccacagcggcgcccaggagaagaactacaccatcagagaggagatgcccgagaacgtgctgatcggcgacctgctgaaggacctgaacctgagcctgatccccaacaagagcctgaccaccgccatgcagttcaagctggtgtacaagaccggcgacgtgcccctgatcagaatcgaggaggacaccggcgagatcttcaccaccggcgccagaatcgacagagagaagctgtgcgccggcatccccagagacgagcactgcttctacgaggtggaggtggccatcctgcccgacgagatcttcagactggtgaagatcagattcctgatcgaggacatcaacgacaacgcccccctgttccccgccaccgtgatcaacatcagcatccccgagaacagcgccatcaacagcaagtacaccctgcccgccgccgtggaccccgacgtgggcatcaacggcgtgcagaactacgagctgatcaagagccagaacatcttcggcctggacgtgatcgagacccccgagggcgacaagatgccccagctgatcgtgcagaaggagctggacagagaggagaaggacacctacgtgatgaaggtgaaggtggaggacggcggcttcccccagagaagcagcaccgccatcctgcaggtgagcgtgaccgacaccaacgacaaccaccccgtgttcaaggagaccgagatcgaggtgagcatccccgagaacgcccccgtgggcaccagcgtgacccagctgcacgccaccgacgccgacatcggcgagaacgccaagatccacttcagcttcagcaacctggtgagcaacatcgccagaagactgttccacctgaacgccaccaccggcctgatcaccatcaaggagcccctggacagagaggagacccccaaccacaagctgctggtgctggccagcgacggcggcctgatgcccgccagagccatggtgctggtgaacgtgaccgacgtgaacgacaacgtgcccagcatcgacatcagatacatcgtgaaccccgtgaacgacaccgtggtgctgagcgagaacatccccctgaacaccaagatcgccctgatcaccgtgaccgacaaggacgccgaccacaacggcagagtgacctgcttcaccgaccacgagatccccttcagactgagacccgtgttcagcaaccagttcctgctggagaccgccgcctacctggactacgagagcaccaaggagtacgccatcaagctgctggccgccgacgccggcaagccccccctgaaccagagcgccatgctgttcatcaaggtgaaggacgagaacgacaacgcccccgtgttcacccagagcttcgtgaccgtgagcatccccgagaacaacagccccggcatccagctgaccaaggtgagcgccatggacgccgacagcggccccaacgccaagatcaactacctgctgggccccgacgccccccccgagttcagcctggactgcagaaccggcatgctgaccgtggtgaagaagctggacagagagaaggaggacaagtacctgttcaccatcctggccaaggacaacggcgtgccccccctgaccagcaacgtgaccgtgttcgtgagcatcatcgaccagaacgacaacagccccgtgttcacccacaacgagtacaacttctacgtgcccgagaacctgcccagacacggcaccgtgggcctgatcaccgtgaccgaccccgactacggcgacaacagcgccgtgaccctgagcatcctggacgagaacgacgacttcaccatcgacagccagaccggcgtgatcagacccaacatcagcttcgacagagagaagcaggagagctacaccttctacgtgaaggccgaggacggcggcagagtgagcagaagcagcagcgccaaggtgaccatcaacgtggtggacgtgaacgacaacaagcccgtgttcatcgtgccccccagcaactgcagctacgagctggtgctgcccagcaccaaccccggcaccgtggtgttccaggtgatcgccgtggacaacgacaccggcatgaacgccgaggtgagatacagcatcgtgggcggcaacaccagagacctgttcgccatcgaccaggagaccggcaacatcaccctgatggagaagtgcgacgtgaccgacctgggcctgcacagagtgctggtgaaggccaacgacctgggccagcccgacagcctgttcagcgtggtgatcgtgaacctgttcgtgaacgagagcgtgaccaacgccaccctgatcaacgagctggtgagaaagagcaccgaggcccccgtgacccccaacaccgagatcgccgacgtgagcagccccaccagcgactacgtgaagatcctggtggccgccgtggccggcaccatcaccgtggtggtggtgatcttcatcaccgccgtggtgagatgcagacaggccccccacctgaaggccgcccagaagaacaagcagaacagcgagtgggccacccccaaccccgagaacagacagatgatcatgatgaagaagaagaagaagaagaagaagcacagccccaagaacctgctgctgaacttcgtgaccatcgaggagaccaaggccgacgacgtggacagcgacggcaacagagtgaccctggacctgcccatcgacctggaggagcagaccatgggcaagtacaactgggtgaccacccccaccaccttcaagcccgacagccccgacctggccagacactacaagagcgccagcccccagcccgccttccagatccagcccgagacccccctgaacagcaagcaccacatcatccaggagctgcccctggacaacaccttcgtggcctgcgacagcatcagcaagtgcagcagcagcagcagcgacccctacagcgtgagcgactgcggctaccccgtgaccaccttcgaggtgcccgtgagcgtgcacaccagaccccccatgaaggaggtggtgagaagctgcacccccatgaaggagagcaccaccatggagatctggatccacccccagccccagagaaagagcgagggcaaggtggccggcaagaccgtgctgaccagcagcagccccagcgccatgaccctgagctacctggactag

SEQ ID NO: 66129 - protein, 1310 aa, Artificial Sequence
  derived and/or modified sequence
MDLLSGTYIFAVLLACVVFHSGAQEKNYTIREEMPENVLIGDLLKDLNLSLIPNKSLTTAMQFKLVYKTGDVPLIRIEEDTGEIFTTGARIDREKLCAGIPRDEHCFYEVEVAILPDEIFRLVKIRFLIEDINDNAPLFPATVINISIPENSAINSKYTLPAAVDPDVGINGVQNYELIKSQNIFGLDVIETPEGDKMPQLIVQKELDREEKDTYVMKVKVEDGGFPQRSSTAILQVSVTDTNDNHPVFKETEIEVSIPENAPVGTSVTQLHATDADIGENAKIHFSFSNLVSNIARRLFHLNATTGLITIKEPLDREETPNHKLLVLASDGGLMPARAMVLVNVTDVNDNVPSIDIRYIVNPVNDTVVLSENIPLNTKIALITVTDKDADHNGRVTCFTDHEIPFRLRPVFSNQFLLETAAYLDYESTKEYAIKLLAADAGKPPLNQSAMLFIKVKDENDNAPVFTQSFVTVSIPENNSPGIQLTKVSAMDADSGPNAKINYLLGPDAPPEFSLDCRTGMLTVVKKLDREKEDKYLFTILAKDNGVPPLTSNVTVFVSIIDQNDNSPVFTHNEYNFYVPENLPRHGTVGLITVTDPDYGDNSAVTLSILDENDDFTIDSQTGVIRPNISFDREKQESYTFYVKAEDGGRVSRSSSAKVTINVVDVNDNKPVFIVPPSNCSYELVLPSTNPGTVVFQVIAVDNDTGMNAEVRYSIVGGNTRDLFAIDQETGNITLMEKCDVTDLGLHRVLVKANDLGQPDSLFSVVIVNLFVNESVTNATLINELVRKSTEAPVTPNTEIADVSSPTSDYVKILVAAVAGTITVVVVIFITAVVRCRQAPHLKAAQKNKQNSEWATPNPENRQMIMMKKKKKKKKHSPKNLLLNFVTIEETKADDVDSDGNRVTLDLPIDLEEQTMGKYNWVTTPTTFKPDSPDLARHYKSASPQPAFQIQPETPLNSKHHIIQELPLDNTFVACDSISKCSSSSSDPYSVSDCGYPVTTFEVPVSVHTRPSQRRVTFHLPEGSQESSSDGGLGDHDAGSLTSTSHGLPLGYPQEEYFDRATPSNRTEGDGNSDPESTFIPRSPTAAEITVQPTVEEASDNCTQECLIYGHSDACWMPASLDHSSSSQAQASALCHSPPLSQASTQHHSPRVTQTIALCHSPPVTQTIALCHSPPPIQVSALHHSPPLVQATALHHSPPSAQASALCYSPPLAQAAAISHSSPLPQVIALHRSQAQSSVSLQQGWVQGADGLCSVDQGVQGSATSQFYTMSERLHPSDDSIKVIPLTTFTPRQQARPSRGDSPIMEEHPL

SEQ ID NO: 66130 - protein, 1310 aa, Artificial Sequence
  derived and/or modified sequence
MDLLSGTYIFAVLLACVVFHSGAQEKNYTIREEMPENVLIGDLLKDLNLSLIPNKSLTTAMQFKLVYKTGDVPLIRIEEDTGEIFTTGARIDREKLCAGIPRDEHCFYEVEVAILPDEIFRLVKIRFLIEDINDNAPLFPATVINISIPENSAINSKYTLPAAVDPDVGINGVQNYELIKSQNIFGLDVIETPEGDKMPQLIVQKELDREEKDTYVMKVKVEDGGFPQRSSTAILQVSVTDTNDNHPVFKETEIEVSIPENAPVGTSVTQLHATDADIGENAKIHFSFSNLVSNIARRLFHLNATTGLITIKEPLDREETPNHKLLVLASDGGLMPARAMVLVNVTDVNDNVPSIDIRYIVNPVNDTVVLSENIPLNTKIALITVTDKDADHNGRVTCFTDHEIPFRLRPVFSNQFLLETAAYLDYESTKEYAIKLLAADAGKPPLNQSAMLFIKVKDENDNAPVFTQSFVTVSIPENNSPGIQLTKVSAMDADSGPNAKINYLLGPDAPPEFSLDCRTGMLTVVKKLDREKEDKYLFTILAKDNGVPPLTSNVTVFVSIIDQNDNSPVFTHNEYNFYVPENLPRHGTVGLITVTDPDYGDNSAVTLSILDENDDFTIDSQTGVIRPNISFDREKQESYTFYVKAEDGGRVSRSSSAKVTINVVDVNDNKPVFIVPPSNCSYELVLPSTNPGTVVFQVIAVDNDTGMNAEVRYSIVGGNTRDLFAIDQETGNITLMEKCDVTDLGLHRVLVKANDLGQPDSLFSVVIVNLFVNESVTNATLINELVRKSTEAPVTPNTEIADVSSPTSDYVKILVAAVAGTITVVVVIFITAVVRCRQAPHLKAAQKNKQNSEWATPNPENRQMIMMKKKKKKKKHSPKNLLLNFVTIEETKADDVDSDGNRVTLDLPIDLEEQTMGKYNWVTTPTTFKPDSPDLARHYKSASPQPAFQIQPETPLNSKHHIIQELPLDNTFVACDSISKCSSSSSDPYSVSDCGYPVTTFEVPVSVHTRPSQRRVTFHLPEGSQESSSDGGLGDHDAGSLTSTSHGLPLGYPQEEYFDRATPSNRTEGDGNSDPESTFIPGLKKAAEITVQPTVEEASDNCTQECLIYGHSDACWMPASLDHSSSSQAQASALCHSPPLSQASTQHHSPRVTQTIALCHSPPVTQTIALCHSPPPIQVSALHHSPPLVQATALHHSPPSAQASALCYSPPLAQAAAISHSSPLPQVIALHRSQAQSSVSLQQGWVQGADGLCSVDQGVQGSATSQFYTMSERLHPSDDSIKVIPLTTFTPRQQARPSRGDSPIMEEHPL

SEQ ID NO: 66131 - DNA, 3933 bp, Artificial Sequence
  derived and/or modified sequence
atggatctgctttctgggacgtatatctttgcagtgctgctggcttgtgtggtgtttcacagcggcgcgcaggagaaaaattatacaatccgcgaagagatgcccgagaacgtcctaattggcgatctgctcaaagacctaaatctgtctttaatccccaacaagtcccttactaccgcgatgcaattcaaattggtgtataagacaggcgatgttccgttgatcagaattgaggaggacacaggcgagattttcacaacaggcgctagaattgatcgcgagaagctctgcgcaggaatacccagagacgaacactgcttctacgaggtggaggttgctatcctccctgatgaaatttttcggttagttaagatccgattcttgattgaggatatcaatgataatgctccactcttccctgccacagtgataaatatctccatccctgaaaatagcgctattaatagcaaatacactctcccagcagccgtggaccctgatgtcggaatcaacggagttcagaactacgagttgatcaagtctcagaacatcttcggactcgacgtaatcgagacaccagagggagataagatgccccagctcattgttcagaaggagctggatcgggaggagaaagacacatatgtcatgaaggtcaaagtagaggatgggggatttcctcagagatcttctactgctattctgcaggtgtctgtcacagatacaaatgataaccacccagtgttcaaggagaccgaaatagaagtgtcaattcccgaaaatgcacctgtgggtacttccgtcacacagctccacgccacagatgcagatattggggagaacgcaaagatacacttctcatttagtaacctggtgtccaatatcgctaggcggctgttccatttgaatgcaaccactggcctcatcacaatcaaggagccgttggaccgcgaagaaacgccgaatcacaaattactggtgctggcatccgacgggggattgatgcctgctagagcgatggtccttgtgaacgtaaccgatgttaacgacaacgtgccaagcatcgacatacgttacatagtgaatcccgtgaatgacacggtggttctgtcggaaaatattcccttgaacactaagattgccttaataaccgtcaccgacaaagacgctgaccacaacgggcgtgtgacttgcttcaccgatcacgaaatcccatttcggctgcgacccgtgttttcaaatcaattcttactcgaaactgccgcttatttggactatgaaagcacaaaggagtatgccataaagctactcgccgctgacgccggaaagccaccactaaaccagtcagccatgctgtttatcaaggtgaaggacgaaaatgataatgccccagtcttcacccagtcatttgtcaccgtgtctatcccagaaaacaactctcccggcattcagctaacgaaggtgagtgccatggacgccgacagtgggcctaacgccaaaattaattatctgctggggcctgacgcaccaccagagttcagtctggactgcagaacaggcatgctgactgttgtgaagaagctggaccgcgagaaggaggacaagtatctgttcaccatccttgctaaggataacggagtgcccccccttactagcaatgtgaccgtgtttgtctccataattgaccagaacgataattcccctgtgtttacacacaatgaatacaatttctacgtgcccgagaatctcccacgacacggcacggtcggcctgatcacagtaaccgatcccgattacggtgataactcagcagtcactctgtctatccttgatgaaaatgacgatttcaccattgactcccaaacgggagtcattcggcccaatatatcctttgatcgtgagaagcaggaatcatataccttctacgtaaaagccgaggatggagggagagtcagtaggtcctcgtcagcgaaagtcaccatcaatgttgttgatgtgaatgacaacaagccggtattcatcgtgccaccctcaaactgtagctatgagctcgtgctgccaagcactaatcccggcaccgtggtgttccaggtcatcgcagtggataacgatacgggcatgaacgccgaagtgcggtattccatagtgggagggaacaccagggacctgttcgcaatcgaccaggaaaccgggaacatcaccctgatggagaaatgtgacgttaccgatctgggcttacatcgggtcctggtaaaagcaaatgacctgggccagccagatagtctgttcagcgtggtcattgtgaatttgttcgtcaacgagtccgttaccaacgccacactgataaatgagctggtgcgaaaaagcaccgaagcgcccgttacacctaatactgaaatcgccgacgtctcctcaccgacctcagattatgtcaagatacttgtggctgcagtggcgggaacaatcacagtagtagtagttatttttataacagccgtagtccgatgtcggcaggccccccatctgaaggcagcccagaagaataagcagaatagtgagtgggcgacacctaatcctgagaatcggcagatgatcatgatgaagaagaaaaaaaagaaaaaaaagcatagcccgaaaaacctcttgctcaacttcgttacaatagaggaaactaaagctgacgatgtggatagcgatggtaatagagttacgcttgacctaccaattgacctggaggaacaaacaatgggcaagtacaactgggtgaccacccctaccacttttaaacccgactctccagatttggccagacattataagtccgccagccctcagcccgcttttcaaatacagcctgagacacccctgaatagtaagcatcacattattcaggagcttcccttggataatacattcgttgcctgcgattctatctccaagtgttcctcatccagttccgatccatatagcgtaagcgattgtggttatcctgtgacaaccttcgaagtccctgtttcagtgcacactaggccatcgcagaggcgcgtcaccttccatttgcccgagggatcacaggagtcatctagcgacggcggactgggggatcatgatgcggggagtttgactagtacttcacacggccttcctttgggctacccccaggaagaatactttgaccgcgccacaccgagcaatagaacagaaggagatggcaacagtgaccctgagtcaacattcatcccccgctcacccacagccgccgaaatcacagtgcagcctacagtggaggaggccagcgacaattgcacccaggagtgcctgatttatggtcactcagacgcctgttggatgccagcctcgctggaccactccagcagtagccaggcccaggcttccgcgctgtgccattcgccccccctatctcaggcttcaacacagcaccactctccaagggtcacccagaccattgccctgtgtcacagccccccagtgacccagaccatagcactctgccactctcctccgccaattcaggtttctgcactacaccattcacctccactggtgcaggccactgcactacatcatagcccgccttccgcccaggcttccgctctgtgttactctcctccgctcgcccaagccgctgccattagccactccagtcctctaccacaggttatcgctctgcatcggtctcaagcacagagttccgtgtcattgcagcaaggttgggttcagggggctgacggtctttgcagtgtggatcagggggtccagggaagtgctacatctcaattttacactatgagtgagaggctgcacccttctgacgactctataaaggtcatcccattgactactttcactccacgtcagcaagcacggcctagtcgtggagatagcccaattatggaggaacatcccctgtag

SEQ ID NO: 66132 - DNA, 3933 bp, Artificial Sequence
  derived and/or modified sequence
atggacctcctgagcggaacttacatctttgcggtcctactggcttgcgtcgtgttccactccggagctcaggaaaaaaactataccattcgcgaagagatgcctgaaaacgtcctgattggtgacctcttgaaggacctgaacctaagcctgataccgaacaaatctctgaccacagctatgcagtttaagctggtgtataagactggggacgtcccgctgattcggatcgaagaagataccggcgagattttcacgacaggtgctcgaatcgatcgggagaaattgtgcgccggcatccccagagatgagcattgcttttatgaagtggaggtggcaattcttccagacgaaatatttcgactggttaagattaggtttctcatcgaagatatcaacgacaacgcacctctgtttccggcaactgtgatcaacatttcaatccctgaaaatagtgccatcaattctaagtacacacttccagccgccgtggaccctgacgtaggcattaatggagtgcaaaattatgagctcattaaaagccaaaacatttttgggctcgacgttattgagacacctgagggagataagatgccccaactgatagtgcagaaggagctagacagggaggagaaggatacatatgtcatgaaggtcaaggtagaggacggggggttcccccagagaagctccacggccatcctgcaggttagcgtgacagacaccaacgacaaccatccagtctttaaggaaacagaaatcgaagtgtctatcccggagaacgcacccgtaggaacctcagtgactcagctccacgccaccgacgcagatattggcgagaatgccaagattcacttttcattctccaatctggtgagcaatattgcccggcgactgtttcatctgaacgcaacaaccggactcatcacaataaaggagcctctggaccgcgaagagactcccaatcacaagcttctcgtgttggcatctgatggagggttaatgccagcccgcgctatggtccttgttaacgtaacagatgtcaatgacaatgtgcctagtattgacatccggtatatcgtgaatcccgtaaatgacactgtcgtgcttagcgaaaacattcctctaaacacgaagattgcactgatcactgtgactgacaaagatgccgaccataatggacgcgtgacgtgcttcaccgaccacgagattccattcaggttgaggcctgtttttagcaaccaatttctgctggaaacagctgcctacctcgactatgagtctacgaaggagtatgcaatcaagctgttggccgctgacgctggcaagccacccttaaaccaaagcgccatgctgttcattaaagtgaaagatgaaaacgataatgccccagtgttcacccaatcattcgtgacagtatcaataccagagaacaatagtccaggaattcagctgacgaaggtgtccgctatggatgcagacagcggcccaaacgctaagatcaactacctgttgggaccagatgcgcctcccgagttttctttggactgcagaaccggcatgttgactgttgttaagaagctggatcgggaaaaggaggacaaatatctgttcaccatacttgccaaagataatggtgtgcctccattgacgtcaaacgtgacagtgttcgtttctatcatagatcaaaatgacaatagtcccgtgtttacacacaacgaatacaatttctatgtgcccgaaaacttgccgagacatggtaccgtcggattgataaccgttacggaccctgattatggcgataacagcgctgtgaccctatccatccttgacgaaaacgatgactttaccatcgattcccagactggagtgattcgcccaaatatatcgttcgatcgggaaaaacaggagtcttacaccttttacgtgaaagcagaggatggtggcagggtaagtaggtcatctagcgcaaaagtgacaataaatgtagtggacgtgaacgacaataagcccgtcttcatcgttccgccatccaactgttcttatgaacttgtacttcctagcaccaacccagggacggtggttttccaagtgattgcagtggacaacgacaccggaatgaatgccgaggttagatattctatagttgggggaaatacacgcgatctgtttgccatagatcaggagaccgggaatattaccctcatggagaagtgtgacgtcactgatctgggactgcaccgggtgcttgttaaagcgaacgatttgggccaacccgatagcctcttttcggttgtgatcgtaaacttgttcgtaaacgaaagcgttacaaacgctacattaattaacgagctggtccggaaaagcaccgaagctcccgtgactcctaacacagagattgctgacgtgagctctcccaccagtgactacgtgaaaattctggtggccgcagtcgccggcacgattaccgtggttgtcgtcatcttcatcacggcagtggttcggtgccgccaggcaccacacctcaaggcagcgcagaagaacaaacagaatagcgagtgggcaacacccaacccggaaaaccgccagatgattatgatgaaaaaaaaaaaaaagaagaagaagcactctcccaagaacctgcttctgaattttgtcactatcgaagaaactaaagctgacgatgtggattcggatggcaatcgtgtgacactggacctgcccatcgacctggaagaacaaactatgggcaaatacaactgggtgaccaccccaaccaccttcaaacctgattcccctgacctagcccgacactacaaatctgcttcaccccaaccggcatttcaaattcagccagaaactccgttaaattctaagcatcatattatacaggagctgccactggataacaccttcgtggcatgcgatagcatctctaagtgttcatcctctagctctgatccatattcggtttcagactgcggctaccccgtgactacctttgaagtccctgtgtctgtgcacactaggccttcacagaggcgtgtaacattccacctccctgaagggtcccaagagagctcttcggacggtggtctgggagatcatgacgcaggtagcttgacgtctacatctcacggcttgccactgggatacccccaagaggaatacttcgatcgggcgaccccaagcaaccggactgaaggcgatgggaacagcgacccagagtcaacttttatacctggattgaagaaggcagcagagataacagttcaacctaccgtggaggaggcatcagacaactgcacacaagaatgcttaatctacggtcacagcgatgcatgttggatgccggccagccttgaccatagctcttctagtcaggctcaagcttccgcgctgtgtcactccccaccactctcccaagcttcaactcagcaccactctccccgggttacccagacaattgcgctgtgccattccccaccagtcacacagactattgcactctgccacagtccacctccaatccaggtttcagcgttacaccattcacctcccctcgtgcaagctacagctctgcaccattcaccacccagtgcacaggcgtcagccctgtgctattcacctcctctcgcccaagcagctgccatcagccatagtagccctctgcctcaagtaattgccctacatcggtcacaagctcagagctctgtttccctgcaacaaggttgggtgcagggtgctgacgggctctgcagcgtcgaccagggagtccaaggctccgctacgagccagttttacacaatgagcgagcgactgcatccctccgatgactctattaaagttattccattgacgacttttacaccaagacagcaggcccgcccttcacggggagactctcccataatggaagagcaccccttgtag

SEQ ID NO: 66133 - DNA, 3933 bp, Artificial Sequence
  derived and/or modified sequence
atggacctgctgagcggcacctacatctttgctgtgctgctggcctgtgtggtgttccacagcggggcccaggagaagaactacaccatccgggaggagatgccagaaaatgtgctgattggagacctgctgaaggacctgaacctgagcctcatccccaacaagagcctgaccacagccatgcagttcaagctggtgtacaagacaggagatgtgcccctcatcagaattgaagaagatactggagagatcttcaccactggagccagaattgaccgggagaagctgtgtgccggcatccccagagatgagcactgcttctatgaggtggaggtggccatcctgcctgatgagatcttccggctggtgaagatccgcttcctgattgaggacatcaatgacaatgcccccctcttccctgccaccgtcatcaacatcagcatccctgagaacagcgccatcaacagcaagtacaccctgcctgctgctgtggaccctgatgtgggcatcaatggagtgcagaactatgagctgatcaagagccagaacatcttcggcctggatgtgattgagaccccagagggggacaagatgccccagctgattgtgcagaaggagctggaccgggaggagaaggacacctacgtgatgaaggtgaaggtggaggatggcggcttcccccagaggagcagcacagccatcctgcaggtgtctgtgacagacaccaatgacaaccaccctgtgttcaaggagacagaaattgaggtgtccatcccagaaaatgcccctgtgggcacctctgtgacccagctgcacgccacagatgctgacatcggggagaatgccaagatccacttctccttcagcaacctggtgagcaacatcgcccggcggctcttccacctgaatgccaccaccggcctcatcaccatcaaggagcccctggaccgggaggagacccccaaccacaagctgctggtgctggccagtgatggcggcctgatgcctgcccgggccatggtgctggtgaatgtgacagatgtgaatgacaacgtgcccagcattgacatccgctacatcgtgaaccctgtgaatgacacagtggtgctgtctgagaacatccccctgaacaccaagatcgccctgatcaccgtgacagacaaggatgctgaccacaacggccgggtgacctgcttcacagaccacgagatccccttccggctgcggcctgtgttcagcaaccagttcctgctggagacagctgcctacctggactatgagagcaccaaggagtatgccatcaagctgctggccgcagatgctgggaagccacccctgaaccagagcgccatgctgttcatcaaggtgaaggatgaaaatgacaatgcccctgtgttcacccagagctttgtgacagtgtccatccctgagaacaacagccctggcatccagctgaccaaggtgtctgccatggatgctgacagcggccccaatgccaagatcaactacctgctgggcccagatgcccctcctgagttcagcctggactgcaggacaggcatgctgactgtggtgaagaagctggaccgggagaaggaggacaagtacctgttcaccatcctggccaaggacaatggagtgccccccctgaccagcaatgtgacagtgtttgtgtccatcatcgaccagaatgacaacagccctgtgttcacccacaatgagtacaacttctacgtgcctgagaacctgcccaggcatggcaccgtgggcctcatcaccgtgacagatcctgactatggagacaacagcgctgtgaccctgagcatcctggatgaaaatgatgacttcaccatcgacagccagacaggagtcatccggcccaacatcagctttgaccgggagaagcaggagagctacaccttctacgtgaaggccgaggatggcggccgggtgagccgcagcagcagcgccaaggtgaccatcaacgtggtggatgtgaatgacaacaagcctgtgttcatcgtgccccccagcaactgcagctatgagctggtgctgcccagcaccaaccctggcaccgtggtgttccaggtgattgctgtggacaatgacaccggcatgaatgctgaggtgcgctacagcatcgtgggcggcaacacccgggacctgtttgccatcgaccaggagaccggcaacatcaccctgatggagaagtgtgatgtgacagacctgggcctgcaccgggtgctggtgaaggccaatgacctgggccagcctgacagcctcttctctgtggtgattgtgaacctgtttgtgaatgaatctgtgaccaatgccaccctcatcaatgagctggtgaggaagagcacagaggcccctgtgacccccaacacagaaattgctgatgtgagcagccccaccagtgactatgtgaagatcctggtggccgctgtggccggcaccatcaccgtggtggtggtgatcttcatcacagctgtggtgcgctgccggcaggccccccacctgaaggccgcccagaagaacaagcagaacagcgagtgggccacccccaaccctgagaaccggcagatgatcatgatgaagaagaagaagaagaagaagaagcacagccccaagaacctgctgctgaactttgtgaccatcgaggagaccaaggcagatgatgtggacagtgatggcaacagagtgaccctggacctgcccatcgacctggaggagcagaccatgggcaagtacaactgggtgaccacccccaccaccttcaagccagacagcccagacctggcccggcactacaagagcgccagcccccagcctgccttccagatccagcctgagacccccctgaacagcaagcaccacatcatccaggagctgcccctggacaacacctttgtggcctgtgacagcatcagcaagtgcagcagcagcagcagtgacccctacagcgtgtctgactgtggctaccctgtgaccacctttgaggtgcctgtgtctgtgcacacccggcccagccagaggagagtgaccttccacctgcctgagggcagccaggagagcagcagtgatggcggcctgggggaccatgatgctggcagcctgaccagcaccagccacggcctgcccctgggctacccccaggaggagtactttgaccgggccacccccagcaacagaacagaaggagatggcaacagcgaccctgagagcaccttcatccccaggagccccacagctgctgagatcaccgtgcagcccaccgtggaggaggccagtgacaactgcacccaggagtgcctgatctacggccacagtgatgcctgctggatgcctgccagcctggaccacagcagcagcagccaggcccaggccagcgccctgtgccacagcccccccctgagccaggccagcacccagcaccacagcccccgggtgacccagaccatcgccctgtgccacagcccccctgtgacccagaccatcgccctgtgccacagccccccacccatccaggtgtctgccctgcaccacagcccccccctggtgcaggccacagccctgcaccacagcccccccagcgcccaggccagcgccctgtgctacagcccccccctggcccaggccgccgccatcagccacagcagccccctgccccaggtgattgccctgcacaggagccaggcccagagctctgtgtccctgcagcagggctgggtgcagggcgcagatggcctgtgcagcgtggaccagggcgtgcagggcagcgccaccagccagttctacaccatgtctgagcggctgcaccccagtgatgacagcatcaaggtgatccccctgaccaccttcaccccccggcagcaggcccggcccagcagaggagacagccccatcatggaggagcaccccctgtag

SEQ ID NO: 66134 - DNA, 3933 bp, Artificial Sequence
  derived and/or modified sequence
atggacctgctgagcggcacctacatctttgctgtgctgctggcctgtgtggtgttccacagcggggcccaggagaagaactacaccatccgggaggagatgccagaaaatgtgctgattggagacctgctgaaggacctgaacctgagcctcatccccaacaagagcctgaccacagccatgcagttcaagctggtgtacaagacaggagatgtgcccctcatcagaattgaagaagatactggagagatcttcaccactggagccagaattgaccgggagaagctgtgtgccggcatccccagagatgagcactgcttctatgaggtggaggtggccatcctgcctgatgagatcttccggctggtgaagatccgcttcctgattgaggacatcaatgacaatgcccccctcttccctgccaccgtcatcaacatcagcatccctgagaacagcgccatcaacagcaagtacaccctgcctgctgctgtggaccctgatgtgggcatcaatggagtgcagaactatgagctgatcaagagccagaacatcttcggcctggatgtgattgagaccccagagggggacaagatgccccagctgattgtgcagaaggagctggaccgggaggagaaggacacctacgtgatgaaggtgaaggtggaggatggcggcttcccccagaggagcagcacagccatcctgcaggtgtctgtgacagacaccaatgacaaccaccctgtgttcaaggagacagaaattgaggtgtccatcccagaaaatgcccctgtgggcacctctgtgacccagctgcacgccacagatgctgacatcggggagaatgccaagatccacttctccttcagcaacctggtgagcaacatcgcccggcggctcttccacctgaatgccaccaccggcctcatcaccatcaaggagcccctggaccgggaggagacccccaaccacaagctgctggtgctggccagtgatggcggcctgatgcctgcccgggccatggtgctggtgaatgtgacagatgtgaatgacaacgtgcccagcattgacatccgctacatcgtgaaccctgtgaatgacacagtggtgctgtctgagaacatccccctgaacaccaagatcgccctgatcaccgtgacagacaaggatgctgaccacaacggccgggtgacctgcttcacagaccacgagatccccttccggctgcggcctgtgttcagcaaccagttcctgctggagacagctgcctacctggactatgagagcaccaaggagtatgccatcaagctgctggccgcagatgctgggaagccacccctgaaccagagcgccatgctgttcatcaaggtgaaggatgaaaatgacaatgcccctgtgttcacccagagctttgtgacagtgtccatccctgagaacaacagccctggcatccagctgaccaaggtgtctgccatggatgctgacagcggccccaatgccaagatcaactacctgctgggcccagatgcccctcctgagttcagcctggactgcaggacaggcatgctgactgtggtgaagaagctggaccgggagaaggaggacaagtacctgttcaccatcctggccaaggacaatggagtgccccccctgaccagcaatgtgacagtgtttgtgtccatcatcgaccagaatgacaacagccctgtgttcacccacaatgagtacaacttctacgtgcctgagaacctgcccaggcatggcaccgtgggcctcatcaccgtgacagatcctgactatggagacaacagcgctgtgaccctgagcatcctggatgaaaatgatgacttcaccatcgacagccagacaggagtcatccggcccaacatcagctttgaccgggagaagcaggagagctacaccttctacgtgaaggccgaggatggcggccgggtgagccgcagcagcagcgccaaggtgaccatcaacgtggtggatgtgaatgacaacaagcctgtgttcatcgtgccccccagcaactgcagctatgagctggtgctgcccagcaccaaccctggcaccgtggtgttccaggtgattgctgtggacaatgacaccggcatgaatgctgaggtgcgctacagcatcgtgggcggcaacacccgggacctgtttgccatcgaccaggagaccggcaacatcaccctgatggagaagtgtgatgtgacagacctgggcctgcaccgggtgctggtgaaggccaatgacctgggccagcctgacagcctcttctctgtggtgattgtgaacctgtttgtgaatgaatctgtgaccaatgccaccctcatcaatgagctggtgaggaagagcacagaggcccctgtgacccccaacacagaaattgctgatgtgagcagccccaccagtgactatgtgaagatcctggtggccgctgtggccggcaccatcaccgtggtggtggtgatcttcatcacagctgtggtgcgctgccggcaggccccccacctgaaggccgcccagaagaacaagcagaacagcgagtgggccacccccaaccctgagaaccggcagatgatcatgatgaagaagaagaagaagaagaagaagcacagccccaagaacctgctgctgaactttgtgaccatcgaggagaccaaggcagatgatgtggacagtgatggcaacagagtgaccctggacctgcccatcgacctggaggagcagaccatgggcaagtacaactgggtgaccacccccaccaccttcaagccagacagcccagacctggcccggcactacaagagcgccagcccccagcctgccttccagatccagcctgagacccccctgaacagcaagcaccacatcatccaggagctgcccctggacaacacctttgtggcctgtgacagcatcagcaagtgcagcagcagcagcagtgacccctacagcgtgtctgactgtggctaccctgtgaccacctttgaggtgcctgtgtctgtgcacacccggcccagccagaggagagtgaccttccacctgcctgagggcagccaggagagcagcagtgatggcggcctgggggaccatgatgctggcagcctgaccagcaccagccacggcctgcccctgggctacccccaggaggagtactttgaccgggccacccccagcaacagaacagaaggagatggcaacagcgaccctgagagcaccttcatccctggcctgaagaaggctgctgagatcaccgtgcagcccaccgtggaggaggccagtgacaactgcacccaggagtgcctgatctacggccacagtgatgcctgctggatgcctgccagcctggaccacagcagcagcagccaggcccaggccagcgccctgtgccacagcccccccctgagccaggccagcacccagcaccacagcccccgggtgacccagaccatcgccctgtgccacagcccccctgtgacccagaccatcgccctgtgccacagccccccacccatccaggtgtctgccctgcaccacagcccccccctggtgcaggccacagccctgcaccacagcccccccagcgcccaggccagcgccctgtgctacagcccccccctggcccaggccgccgccatcagccacagcagccccctgccccaggtgattgccctgcacaggagccaggcccagagctctgtgtccctgcagcagggctgggtgcagggcgcagatggcctgtgcagcgtggaccagggcgtgcagggcagcgccaccagccagttctacaccatgtctgagcggctgcaccccagtgatgacagcatcaaggtgatccccctgaccaccttcaccccccggcagcaggcccggcccagcagaggagacagccccatcatggaggagcaccccctgtag

SEQ ID NO: 66135 - DNA, 3933 bp, Artificial Sequence
  derived and/or modified sequence
atggacctgctgagcggcacctacatcttcgccgtgctgctggcctgtgtggtgttccactccggggctcaggagaagaattacacaatccgtgaggagatgccagagaatgtgcttatcggagatttgctaaaggatctgaacctctcgctgatccccaataagagcctaacaaccgccatgcagtttaagctggtgtataagactggtgatgtgccactgatcagaattgaagaagataccggagagatatttaccactggagctaggatagaccgggaaaaactctgtgctgggatccctagggacgagcattgcttctatgaagtcgaggtcgcgattttgcctgatgagatttttcgactggtcaagattcggttcctcatcgaggatattaatgacaatgcccctctcttccccgcgaccgtgatcaacatctcaatccccgagaattctgcgataaatagtaaatacaccctccccgcagccgtggatccggacgtcggaattaacggagtccaaaactacgagctcattaaaagtcagaatatatttgggcttgacgtcattgagaccccagagggcgacaagatgcctcaattgatcgtgcaaaaggagttagatcgcgaggaaaaagatacatacgtcatgaaggttaaggtcgaggatggcgggtttccgcaacggtcttccaccgcaattctgcaggttagcgtgactgatacaaacgacaaccatccggtcttcaaggaaactgagattgaagtgagcatcccagagaatgcgccagtaggaacttccgttactcaactgcacgcgactgacgcagacatcggggagaatgccaaaatccacttctcctttagcaatctggtgagtaacattgcaaggcgcttatttcacctgaacgcaaccacgggcctaatcacaattaaggagccgctggacagagaagagacacccaaccataagctgctggttctggcctccgacggtggcctcatgccagctagggccatggtgctggtcaacgtaacggatgtgaacgacaacgtcccaagcatcgacatcagatacattgtgaacccagtgaatgacaccgtggtgttatcagagaacatccctttgaataccaagattgcccttatcaccgtgaccgacaaggacgctgaccataatggccgagtgacctgttttacagatcacgaaattccatttcgcctgcgccctgtgttcagtaaccagttccttctggaaaccgcagcctatctggactacgagtctacgaaggaatacgccataaaattactcgctgcggacgccggcaaaccgcccctgaatcagtcggctatgctgtttatcaaagtgaaggatgaaaacgataacgcccccgtgttcacccaatcgtttgtcacagtaagcatacccgagaacaactccccaggcatacagctgacgaaagtatcggccatggacgctgattctggccctaacgctaagattaattacctgctcggccccgatgcccctcccgagttcagtctggattgccgcaccggcatgctgactgtggtcaaaaagctggatcgagaaaaggaggataagtacctctttaccattctggctaaagacaatggcgtaccacccctaacctctaacgtgaccgttttcgtgtccataatagatcagaatgacaatagccctgtatttacccacaatgagtataatttttatgtcccagagaatctgccaaggcatggtaccgtgggactgattaccgttaccgacccagactacggagacaactccgcggtgaccttgagcatcctggacgaaaatgacgattttaccatcgattcacagaccggggtgatcaggcccaacatctccttcgatagagaaaagcaagaaagctataccttctatgtcaaagctgaagatggcggccgggtcagccggtcgtccagtgctaaggtcaccattaacgtggtggacgtaaatgacaataagcctgtctttatagtgccacctagtaattgcagttacgaactcgtgctccctagcacaaacccagggacggttgtgttccaggtcattgccgtggataatgataccggcatgaatgccgaggtcaggtattccatcgtgggcgggaacactagagatctgttcgccatcgaccaagagacaggaaacattacattgatggagaagtgtgacgtgacagaccttggcctgcaccgtgtgctggtgaaggccaatgacctcggccaacccgatagcctcttctcggtggtgatcgtgaatctgttcgtgaacgaatcagtgactaatgcaaccctaatcaacgaattggtgaggaagtcaacggaggctccagttaccccaaacactgaaatcgctgatgtttcatcccccactagtgattacgtaaaaatactggtggcagccgtggccggcacgatcacagtcgtggtggtaatctttattacagccgtggtgcggtgcaggcaggcccctcacctgaaggccgctcagaaaaacaaacagaactccgagtgggcaacgccgaaccctgagaacaggcagatgattatgatgaaaaagaaaaagaaaaagaagaagcactcccccaagaatctgctgcttaacttcgtcaccatagaagaaacaaaggccgatgacgtggactctgacggcaatagggtaacgctggacctccccatcgatcttgaggagcagaccatgggcaagtacaactgggtgaccactcctacaacctttaagcctgactcccctgatctggcacggcactacaagagcgcatcccctcagccagcctttcaaatccagccagagacccccctgaatagtaaacaccacattatccaggagctaccactagacaatacattcgtcgcctgcgatagcatttccaagtgtagctcttcctcctcggatccttactcagtcagtgattgtggctatccagtcacaaccttcgaagtcccagtgagcgttcatacgagaccaagccagagacgcgtgacctttcatctgcctgaggggtcccaagagtcctcctctgatggtggtctcggcgaccatgacgctggcagtctgacatccacaagccacggtctgcctctggggtacccacaagaagaatacttcgaccgagcaacacctagcaatcgaaccgagggcgacggcaatagcgacccagaaagtacatttatccctagaagtccaacggcagccgagataacggtccagccaacggtagaggaggcatccgataactgcacgcaggagtgtctaatctatggccattctgacgcttgttggatgccagcatcgcttgatcattcctcatccagccaggcacaggcctcggccctttgtcacagcccccccttaagccaggcgagtactcaacaccacagcccacgcgtgacccaaaccattgccctgtgccatagcccccccgtaacgcagacaattgctctctgccactccccgccccccatccaagtctctgctctgcatcattcccccccactggtccaggccacagcgctgcatcactcccctccgagtgcgcaggcctctgcactgtgctacagtcctccactggcacaagctgcggccatttctcactcctcacctctgcctcaggttatcgcacttcacaggagccaggcccagagcagcgttagtctgcaacaggggtgggtccaaggagcagacggcctgtgcagtgtggaccagggtgtccaggggagtgccacgtctcagttctataccatgtccgagcgactacacccctcggatgactcaattaaggtgatacctctcactacattcactcctcgccagcaggcccggccgagccggggagatagccctatcatggaggagcatcctttatag

SEQ ID NO: 66136 - DNA, 3933 bp, Artificial Sequence
  derived and/or modified sequence
atggacctgctgagcggcacctacatcttcgccgtgctgctggcctgtgtggtgttccattcaggcgcacaagagaagaactacaccatcagggaagagatgccggaaaatgtcctgattggcgatttgctcaaggatctgaatctatcactgattcccaataagagcctgacaacagcgatgcaatttaagctcgtttacaaaacgggggatgttccgttaatcagaatcgaagaggatactggcgaaatttttactactggagcccggattgaccgggagaaactgtgcgccggcattcctcgggacgaacattgtttttacgaagtggaagtggctattcttcctgacgagatttttaggctggtcaaaatcagattcctgatagaggatatcaatgacaacgcccccctgttccccgcaaccgttatcaatatcagtatccccgaaaacagtgctattaattcgaagtatacgttgccagccgcggtagatcctgatgtcggcatcaacggggtccagaattatgagctgatcaaatctcagaacatctttggtctggatgtgatcgagactcctgagggagacaagatgcctcaattgattgtccagaaggagcttgatagggaggagaaagacacctatgttatgaaggtgaaagtggaagacggcgggttccctcaacgtagtagcacagccatcctccaggtgtccgtgacagacaccaatgataaccatcccgttttcaaggagaccgagattgaagtcagcatccccgagaatgccccagtggggacctcggtgacccagctccatgctaccgacgctgacattggcgagaatgcgaagattcatttctccttctcaaacctggttagcaatatcgctcgacggcttttccacttaaacgcaacgacaggtctgatcaccattaaggagccactggacagagaagaaactccaaaccacaaactattggtcctcgcctctgatggcggactgatgccggcccgggctatggtactggttaatgttacagatgtgaatgacaatgtgccttcaatagacataaggtatatcgtgaaccctgtcaacgatactgtggtgctgagcgaaaacatcccgctcaacactaagatcgcactcataacggttaccgacaaagacgccgaccacaacgggcgggtgacttgtttcacagaccacgaaattcctttccgacttagacccgttttctctaaccagttcttactggagactgctgcatacttggactacgaatctaccaaagaatatgcaatcaaacttttggctgctgatgcaggcaagccaccgttgaaccagtccgcaatgctgtttatcaaggtcaaggacgaaaatgataacgcccccgtgtttacacagtcattcgtgaccgtatctattcccgaaaataactcccccggtattcaattgactaaagtaagcgccatggatgccgactctggtccaaacgctaagatcaactacctcttaggacctgacgccccacctgagtttagcctcgactgccgaacaggaatgttgactgtggtcaagaagcttgaccgcgagaaagaggacaaatacttatttaccatactggccaaagacaatggagtcccaccgctgacttcgaatgttacagtcttcgtgagtataatcgatcagaacgataatagccctgttttcacccacaacgaatacaatttttacgtcccggagaacctccctcggcatgggaccgttggcttgatcacagtcactgatcccgactacggagataattctgctgtgacgcttagtatccttgacgaaaatgacgatttcactattgacagccagacaggagttatccgtcccaatataagctttgatcgcgagaaacaggagtcttatactttctacgtgaaagctgaagacgggggtagagtgagtaggtcctcatcagcaaaggtgaccattaatgtcgtcgacgtgaacgacaacaagcccgtgttcatcgtgcctcccagcaactgctcctacgagttagtgctgcctagcaccaaccccggaacagtggtgtttcaggtaatcgccgttgacaacgatactggcatgaacgccgaggtgcgatatagcatcgtcggagggaacactcgagacctatttgcaatagatcaggaaactggcaatatcaccctcatggaaaaatgcgacgtgaccgatctcgggctgcatcgcgtgctcgtcaaggctaatgatttgggtcagccagacagcctgttctctgtggtgattgtgaacctgttcgtgaacgagtctgtgacgaatgccacactcataaacgaattggtgagaaaaagcacagaagccccagttacccctaatactgaaattgctgatgtttcatccccgacctcggactatgtgaagatcttggttgccgcagttgccggcaccatcaccgtggtcgtggtgatcttcatcactgcggtcgtccgttgtcgacaagcaccacacctgaaggctgcccagaagaataagcagaactccgagtgggctacccccaatcccgaaaatcggcaaatgattatgatgaagaaaaagaaaaagaagaaaaaacatagtccaaagaacttgctgttgaatttcgtgaccatagaagaaaccaaagctgacgatgtggattccgacggcaatcgggtgacattggatctgccaattgatctggaagaacagacgatgggtaaatacaattgggtgactactcccactacatttaagccagactctcctgacctcgctagacactacaaatcagccagtccccagcctgccttccagattcaaccagagaccccgctgaactcaaagcaccatatcatccaggagttacctctggataacaccttcgtggcatgtgactcgatctctaagtgttcctcttccagcagtgatccttatagcgtcagcgactgtggctacccagtaaccacatttgaagtgccagtttccgttcacacccgcccctcccagcggcgagtgacgttccatctgcctgagggcagtcaggaaagctcttctgatggcggcctgggtgatcatgacgccggttctcttaccagcaccagccacggccttccgcttggatacccacaggaggaatactttgatcgcgctacccctagtaaccgaacggagggggacgggaacagtgatcccgagagcacctttatccctggcctgaagaaggctgctgaaattaccgttcaacccaccgtcgaagaggcaagtgacaactgtacgcaggaatgcctgatttatgggcattcagatgcctgttggatgcctgcctcattggaccattcatccagctcccaggcacaggctagtgcgctatgtcactctccccccctttctcaggcctccacccagcatcattctccgagagtaacgcaaacaattgcgttgtgccattccccacccgtcactcaaactattgccctgtgccactccccaccccctatccaagtctctgcactgcaccacagtccccccttagtgcaagctaccgctctgcaccatagcccacccagcgcgcaagctagtgccttatgttactcaccgcctttagcccaggcagccgccattagccacagctcccctttgccacaggtgattgctctgcacaggagccaggctcagagttccgtgtccctccagcagggctgggtccagggcgccgatggactgtgcagtgtggatcaaggagtgcaggggtccgcgactagccagttctacactatgtccgagcgcttgcaccctagcgacgattctattaaggtaatcccactaactacttttacacctcgccaacaggcccgccccagcaggggcgattccccaatcatggaagaacacccactctag

SEQ ID NO: 66137 - DNA, 3933 bp, Artificial Sequence
  derived and/or modified sequence
atggatctgctgtccggaacctatatcttcgcagtgctgctggcctgtgtggtgttccatagcggggcacaagagaagaattatacaataagggaggaaatgcccgagaatgttctgatcggagatctcctcaaggacctcaatttgagtctcataccaaataagagtctcaccacagccatgcagttcaagctggtgtacaagaccggagatgtgcctctgataaggatagaagaagacacaggcgagatcttcacaacaggggcaagaattgaccgcgagaaactgtgcgcagggataccaagagatgagcactgtttttacgaggttgaagtggcgatcttaccagatgaaatttttcgtctcgtgaagatccgtttcctcattgaagatattaacgataacgcaccactcttccctgcaacggttattaacatcagcatacccgagaatagtgccatcaattcaaagtacactttgcctgctgccgtggaccctgacgtaggcattaatggtgtgcagaactacgagctgatcaagagtcagaatatcttcggactggacgtgattgagactccagaaggagacaaaatgccccagctgattgtgcaaaaggaactggatcgcgaagagaaggatacttatgtaatgaaggtgaaggttgaggatggaggcttcccccagcgctcgagcactgccatcttgcaggtatcagtgacggatacgaacgataatcacccagtatttaaagaaactgaaatcgaggtctcaattccagaaaatgcaccagtgggtaccagcgtgacccagctgcatgctaccgatgccgacattggagagaatgcaaagattcacttctctttctctaatctggtgagcaatatcgccaggcggctattccacctcaacgctacaactggattgatcaccattaaggagccactggaccgcgaggaaacacccaaccacaaactgctggtcctggcatctgatggtggtctaatgccagcgagagctatggtacttgtaaatgttaccgacgtgaatgataatgtgccttcaatcgacataaggtatatcgtaaacccagtgaatgatactgtggtcctgtcggagaatatccccctcaatactaaaatcgcattgattactgtgaccgacaaggacgccgatcacaatggccgtgtgacctgtttcacagaccatgagatcccattccgcctccggccagtgttctcgaatcagtttctcctggagaccgctgcatatctggattacgagagtacgaaggagtatgctataaagctactagcggctgacgctggcaaacctcctctgaatcagagtgccatgttatttattaaggtgaaagacgaaaacgataatgcccctgtgttcacacagtccttcgttaccgtgtccatcccggagaacaattctcctggcatacaactgaccaaggtgagcgctatggatgccgattcaggccctaatgccaaaatcaactacctgctgggtccggacgcaccgccagaattctccctggattgccgaaccggtatgctgacagtcgtgaaaaaactggatagagaaaaggaggataaatatttatttacaatactagccaaggataatggagtccctcctctcaccagtaacgttacggtttttgtcagcataatcgaccagaacgataatagccccgtttttactcataatgagtacaacttctacgtgcccgagaacctgccgcgacatgggaccgtgggtctgatcacagtgactgacccagactatggcgataactccgcggttactctgagcatactcgacgagaacgacgacttcaccatcgacagccagactggtgtgattaggcccaatatttcttttgaccgcgaaaagcaagaatcttacacattctacgtgaaggccgaggatggcggtagagtgtcacgaagctcctccgctaaggtgacgatcaacgtagttgatgtgaatgataataaacccgtttttattgtgcctccaagcaactgttcctacgagctggtactgcccagtaccaaccctggtaccgtggtttttcaggtgatcgccgtggacaacgacactggcatgaacgcagaagtgcggtatagcatcgtgggcggaaatacccgggatctctttgccatcgatcaggagaccggtaacatcacactcatggaaaagtgtgatgtcactgacttaggcttacatagggttctcgttaaggccaacgatctcggtcagcccgacagcttgtttagcgtggttatcgtgaatctctttgtgaatgaaagcgtgacaaatgcgacccttattaacgagctcgttcggaaaagcactgaagcacccgtgacgccaaacacagagatagctgacgtgtcttccccgacctcggactatgtaaagatcctggtggccgcagtggccggaaccataactgtggtggtagttattttcataacggcagtagtgcggtgcagacaggcaccgcatctgaaagcggcacagaagaataaacaaaattccgagtgggcaacccccaaccctgaaaaccggcagatgatcatgatgaagaaaaaaaagaagaaaaagaagcatagcccgaagaaccttctgcttaactttgtgacaattgaggagacaaaagcagatgacgtcgactctgacgggaacagagtgacgctggatcttcccatagatctagaggagcaaaccatgggaaaatataattgggtgacaactccgacaaccttcaagccagacagcccagatctggcacgccactataaaagcgcatcacctcagccagcattccagatccagcctgaaacacccttgaactctaaacatcatatcatacaggagctgcctctcgataacactttcgtggcttgtgattctataagtaagtgtagcagttcttcatcagacccctattcagtcagtgattgcggatatccggtcacaacattcgaggttccggtgtccgtacacactcggccatcgcagcgtcgggtgacatttcacctccctgaaggtagccaggagtcctccagtgatgggggactgggcgaccacgatgccggatcattaacttctacctctcatggccttccactggggtacccacaagaggagtatttcgatcgagctaccccgtccaataggacagagggagatggcaactctgatcccgagagcactttcatacctaggagcccaacggccgctgaaatcaccgtgcagccgaccgtcgaggaagccagcgacaactgtacccaagaatgtctgatttatgggcatagtgatgcctgttggatgcccgcatctttggatcatagcagtagttctcaagcccaggcttctgcactgtgtcactcacctccactgtcccaggcatcgactcagcaccacagccccagagtaactcaaacaattgccctatgccattctcctccggtgacccaaacaatcgcactgtgtcactccccacccccaattcaggtgtctgcgcttcaccatagcccgcctctcgttcaagctaccgcactgcaccactctccaccctccgcccaggcctcagcactgtgctactcccccccactagcccaggccgctgcaatcagccacagttctccgctacctcaagtgatcgcactgcatcgaagccaggctcagtctagcgtctctctccagcagggctgggtccagggtgcagacgggctttgttctgtggatcaaggagtgcagggcagcgctacatcgcagttttacaccatgtcagagcgactgcaccctagcgacgatagtataaaggtgatccccttgacaacattcacccctcgccagcaggctcggccttcaaggggggatagccccattatggaagagcatccactgtag

SEQ ID NO: 66138 - DNA, 3933 bp, Artificial Sequence
  derived and/or modified sequence
atggacttattgtctggcacctacatttttgccgtacttttggcatgcgttgtgttccactccggtgctcaagagaagaactacactatccgtgaggaaatgccagagaatgtcctcatcggggacttgctgaaagacctgaacctgtccttaattcccaacaagagtttgacaactgccatgcagtttaagctggtctacaagacaggcgatgtcccgctcatccggatagaagaagacacaggcgaaattttcacaaccggcgctcgcatagaccgcgaaaagctgtgcgccggtataccaagagacgagcactgcttttacgaggtggaggtggccattctgccggacgaaattttcagattggtgaagattcgctttctgatcgaagatatcaatgacaacgcaccactgttcccggctaccgtcatcaatatcagcatccctgaaaacagtgcgatcaacagtaagtacaccctccctgcggctgtcgatcctgacgtaggaattaatggcgtccagaactatgaactgattaaatctcagaacatattcgggctggatgttatcgaaactcccgagggagacaagatgccccagctcatcgtgcaaaaagagctggaccgggaggagaaggatacatatgtgatgaaagtgaaagtggaggacgggggattcccacaaaggagctccacagccattcttcaggtgtcagttaccgacactaacgacaaccaccctgtattcaaagagactgaaattgaggtttccattcccgagaacgcccctgtggggactagcgtcacccagttgcatgctactgacgcggacatcggggaaaatgcgaagattcactttagcttctctaacctggttagcaatatcgcacgtcgactgttccatctcaatgcaactactggcctgatcactataaaggagccactggaccgcgaggaaacaccaaatcataagctgctggttcttgccagtgatggaggcctgatgcctgcaagagcaatggttctggttaacgtgacagacgtaaatgacaatgtgcctagtatagacattagatacattgtgaacccggtcaatgatacagtggttttaagtgagaacatccctcttaatacaaaaatcgccctgattaccgtcacggacaaagatgcagaccacaacggaagagtaacctgcttcactgatcatgaaatccccttcagactgagacctgtgtttagcaatcagttcttgctggaaacggccgcatatctagattatgagtcaaccaaggagtacgcaatcaaactcctggcggcagatgccggaaaacctcccctgaatcagtctgccatgctgttcattaaggttaaggacgagaatgataacgcccctgtgttcacccaatcctttgtgacggtttccatccctgagaataatagccctggcatccagctgactaaagtgtccgccatggacgccgactcaggcccaaacgccaagatcaactacctactcggtccagacgctcctcctgagttcagtctggactgccgcaccggtatgctcaccgtagtgaagaagttagacagagaaaaggaggacaagtatttgtttacaattctcgccaaagacaatggagtgccaccactgacctctaacgtcaccgtttttgttagcataatcgatcagaatgataacagccctgtattcacacacaatgagtacaatttctacgtccctgagaacctgccacgccacggaacagttgggcttatcaccgtgactgatcctgactacggcgataactcagctgtcactctgtcaattctggacgagaatgacgacttcaccatcgatagccagaccggagtaattcgaccaaatataagtttcgatcgcgaaaagcaggaatcctacactttctatgttaaagcagaggacggtggtagggttagtcgcagctcaagcgctaaagtaaccattaatgtcgtggatgtaaatgacaacaaaccagtgttcattgtcccaccatcgaactgtagctatgagttggtgctgccgagtacgaaccctggaaccgtggtctttcaggtgatcgcagtggacaatgacaccggaatgaatgcggaagtgcgatacagcattgtagggggaaatacaagagatctctttgctatcgaccaagaaactggcaacattactctaatggaaaagtgtgacgtgaccgatcttgggctgcaccgcgtgttggttaaagctaatgacctagggcaacccgatagcctttttagcgtggtgatagttaacctttttgtgaatgagtccgttaccaacgccaccttgatcaacgaattggtgcgaaagtcaacggaggcgcctgtgacccctaacacggagattgcagacgttagtagcccaacgtctgactacgtgaaaatcttagtcgccgctgtggccggaactatcaccgttgtggtggtgatttttattacagccgttgttaggtgcaggcaagcaccacacctgaaagctgcccagaagaacaagcagaactctgaatgggctactcctaatcctgaaaatcgccagatgatcatgatgaagaagaaaaagaaaaagaaaaaacactcccctaaaaatttgttactgaatttcgtgaccatcgaagaaaccaaagccgatgacgttgattctgacggaaacagggtgacactggacctgcccatcgaccttgaagaacaaactatggggaagtataactgggtcactacccctacgacgttcaaaccagatagccctgatctggccagacactataaaagtgcctctccccagccggctttccaaattcaacccgaaacccccctgaatagcaagcaccacatcatccaggagctgcctctggacaacacattcgttgcctgtgactcgatcagcaaatgttcctcctcctccagcgacccttacagcgtgtcagactgcggttatcccgttaccaccttcgaggtaccagtgtcagtgcacacccgcccttcccagagacgcgttacctttcacttacctgaaggctctcaagaatccagctctgacggaggacttggggatcacgacgccggatctctgacatccacaagtcatgggctgcccttaggctaccctcaggaggagtactttgatcgggcaaccccaagcaatcggaccgagggcgacggcaactctgatccagaatctaccttcattcctggcttaaagaaggccgctgagataacggtgcagcccacagtcgaggaagcttctgacaactgcacccaggaatgtctgatctatggtcattctgatgcctgttggatgcccgcatcactggatcactcatcctcgagccaggctcaagctagcgccctatgccattccccccctctgagccaagctagtacacagcaccactcacctagggtgacacagacgatcgcactgtgtcactcccctcccgttacccagaccatagcattgtgtcactcacccccaccaatccaggtgtccgctctgcatcactccccgcctttagtgcaggctaccgccctgcatcatagtccaccctccgcacaggccagcgcattgtgctactctcctccactggcacaggcagctgcaatcagccactcctcgccactaccacaagtcatcgccttacaccggagccaagctcaatccagcgtgtccctgcagcagggatgggtgcagggcgcagacggcctgtgttccgtggaccagggcgttcagggctccgctacctcccagttttataccatgagtgagagattacacccaagcgacgactccattaaggtcattccactcactactttcaccccacgtcagcaggccagaccctcccggggagacagccctatcatggaggagcaccccctgtag

SEQ ID NO: 66139 - DNA, 3933 bp, Artificial Sequence
  derived and/or modified sequence
atggacttgttgtccgggacgtacattttcgcggtcctgctagcatgcgtggtgttccactctggcgcccaggagaaaaactacaccatccgagaagaaatgccagaaaacgtcctgataggcgacttgttgaaagaccttaacttgtcgctgattccaaacaagtccttgacaactgctatgcagttcaagctagtgtacaagaccggagatgtgccactgattcgaattgaagaggatactggtgagatcttcactactggcgctcgcattgatcgtgagaaattatgtgctggtatcccaagggatgagcattgcttttatgaagtggaggttgccattttgccggatgaaatatttagactggttaagatacgttttctgatagaagatataaatgataatgcaccattgttcccagcaacagttatcaacatatcaattccagagaactcggctataaactctaaatatactctcccagcggctgttgatcctgacgtaggaataaacggagttcaaaactacgaactaattaagagtcaaaacatttttggcctcgatgtcattgaaacaccagaaggagacaagatgccacaactgattgttcaaaaggagttagatagggaagagaaggatacctacgtgatgaaagtaaaggttgaagatggtggctttcctcaaagatccagtactgctattttgcaagtgagtgttactgatacaaatgacaaccacccagtctttaaggagacagagattgaagtcagtataccagaaaatgctcctgtaggcacttcagtgacacagctccatgccacagatgctgacataggtgaaaatgccaagatccacttctctttcagcaatctagtctccaacattgccaggagattatttcacctcaatgccaccactggacttatcacaatcaaagaaccactggatagggaagaaacaccaaaccacaagttactggttttggcaagtgatggtggattgatgccagcaagagcaatggtgctggtaaatgttacagatgtcaatgataatgtcccatccattgacataagatacatcgtcaatcctgtcaatgacacagttgttctttcagaaaatattccactcaacaccaaaattgctctcataactgtgacggataaggatgcggaccataatggcagggtgacatgcttcacagatcatgaaatccctttcagattaaggccagtattcagtaatcagttcctcctggagactgcagcatatcttgactatgagtccacaaaagaatatgccattaaattactggctgcagatgctggcaaacctcctttgaatcagtcagcaatgctcttcatcaaagtgaaagatgaaaatgacaatgctccagttttcacccagtctttcgtaactgtttctattcctgagaataactctcctggcatccagttgacgaaagtaagtgcaatggatgcagacagtgggcctaatgctaagatcaattacctgctaggccctgatgctccacctgaattcagcctggattgtcgtacaggcatgctgactgtagtgaagaaactagatagagaaaaagaggataaatatttattcacaattctggcaaaagataacggggtaccacccttaaccagcaatgtcacagtctttgtaagcattattgatcagaatgacaatagcccagttttcactcacaatgaatacaacttctatgtcccagaaaaccttccaaggcatggtacagtaggactaatcactgtaactgatcctgattatggagacaattctgcagttacgctctccattttagatgagaatgatgacttcaccattgattcacaaactggtgtcatccgaccaaatatttcatttgatagagaaaaacaagaatcttacactttctatgtaaaggctgaggatggtggtagagtatcacgttcttcaagtgccaaagtaaccataaatgtggttgatgtcaatgacaacaaaccagttttcattgtccctccttccaactgttcttatgaattggttctaccgtccactaatccaggcacagtggtctttcaggtaattgctgttgacaatgacactggcatgaatgcagaggttcgttacagcattgtaggaggaaacacaagagatctgtttgcaatcgaccaagaaacaggcaacataacattgatggagaaatgtgatgttacagaccttggtttacacagagtgttggtcaaagctaatgacttaggacagcctgattctctcttcagtgttgtaattgtcaatctgttcgtgaatgagtcggtgaccaatgctacactgattaatgaactggtgcgcaaaagcactgaagcaccagtgaccccaaatactgagatagctgatgtatcctcaccaactagtgactatgtcaagatcctggttgcagctgttgctggcaccataactgtcgttgtagttattttcatcactgctgtagtaagatgtcgccaggcaccacaccttaaggctgctcagaaaaacaagcagaattctgaatgggctaccccaaacccagaaaacaggcagatgataatgatgaagaaaaagaaaaagaagaagaagcattcccctaagaacttgctgcttaattttgtcactattgaagaaactaaggcagatgatgttgacagtgatggaaacagagtcacactagaccttcctattgatctagaagagcaaacaatgggaaagtacaattgggtaactacacctactactttcaagcccgacagccctgatttggcccgacactacaaatctgcctctccacagcctgccttccaaattcagcctgaaactcccctgaattcgaagcaccacatcatccaagaactgcctctcgataacacctttgtggcctgtgactctatctccaagtgttcctcaagcagttcagatccctacagcgtttctgactgtggctatccagtgacgaccttcgaggtacctgtgtccgtacacaccagaccgtcccagcggcgtgtcacatttcacctgccagaaggctctcaggaaagcagcagtgatggtggactgggagaccatgatgcaggcagccttaccagcacatctcatggcctgccccttggctatcctcaggaggagtactttgatcgtgctacacccagcaatcgcactgaaggggatggcaactccgatcctgaatctaccttcatcccaaggagcccaacagctgcagaaataactgttcaaccaactgtggaagaggcctctgacaactgcactcaagaatgtctcatctatggccattctgatgcctgctggatgccggcatctctggatcattccagctcttcgcaagcacaggcctctgctctatgccacagcccaccactgtcacaggcctctactcagcaccacagcccacgagtgacacagaccattgctctctgccacagccctccagtgacacagaccatcgcattgtgccacagcccaccaccgatacaggtgtctgctctccaccacagtcctcctctagtgcaggctactgcacttcaccacagcccaccatcagcacaggcctcagccctctgctacagccctcctttagcacaggctgctgcaatcagccacagctctcctctgccacaggttattgccctccatcgtagtcaggcccaatcatcagtcagtttgcagcaaggttgggtgcaaggtgctgatgggctatgctctgttgatcagggagtgcaaggtagtgcaacatctcagttttacaccatgtctgaaagacttcatcccagtgatgattcaattaaagtcattcctttgacaaccttcactccacgccaacaggccagaccgtccagaggtgattcccccattatggaagaacatcccttgtaa

SEQ ID NO: 66140 - DNA, 4061 bp, Artificial Sequence
  derived and/or modified sequence
atggacttgttgtccgggacgtacattttcgcggtcctgctagcatgcgtggtgttccactctggcgcccaggagaaaaactacaccatccgagaagaaatgccagaaaacgtcctgataggcgacttgttgaaagaccttaacttgtcgctgattccaaacaagtccttgacaactgctatgcagttcaagctagtgtacaagaccggagatgtgccactgattcgaattgaagaggatactggtgagatcttcactactggcgctcgcattgatcgtgagaaattatgtgctggtatcccaagggatgagcattgcttttatgaagtggaggttgccattttgccggatgaaatatttagactggttaagatacgttttctgatagaagatataaatgataatgcaccattgttcccagcaacagttatcaacatatcaattccagagaactcggctataaactctaaatatactctcccagcggctgttgatcctgacgtaggaataaacggagttcaaaactacgaactaattaagagtcaaaacatttttggcctcgatgtcattgaaacaccagaaggagacaagatgccacaactgattgttcaaaaggagttagatagggaagagaaggatacctacgtgatgaaagtaaaggttgaagatggtggctttcctcaaagatccagtactgctattttgcaagtgagtgttactgatacaaatgacaaccacccagtctttaaggagacagagattgaagtcagtataccagaaaatgctcctgtaggcacttcagtgacacagctccatgccacagatgctgacataggtgaaaatgccaagatccacttctctttcagcaatctagtctccaacattgccaggagattatttcacctcaatgccaccactggacttatcacaatcaaagaaccactggatagggaagaaacaccaaaccacaagttactggttttggcaagtgatggtggattgatgccagcaagagcaatggtgctggtaaatgttacagatgtcaatgataatgtcccatccattgacataagatacatcgtcaatcctgtcaatgacacagttgttctttcagaaaatattccactcaacaccaaaattgctctcataactgtgacggataaggatgcggaccataatggcagggtgacatgcttcacagatcatgaaatccctttcagattaaggccagtattcagtaatcagttcctcctggagactgcagcatatcttgactatgagtccacaaaagaatatgccattaaattactggctgcagatgctggcaaacctcctttgaatcagtcagcaatgctcttcatcaaagtgaaagatgaaaatgacaatgctccagttttcacccagtctttcgtaactgtttctattcctgagaataactctcctggcatccagttgacgaaagtaagtgcaatggatgcagacagtgggcctaatgctaagatcaattacctgctaggccctgatgctccacctgaattcagcctggattgtcgtacaggcatgctgactgtagtgaagaaactagatagagaaaaagaggataaatatttattcacaattctggcaaaagataacggggtaccacccttaaccagcaatgtcacagtctttgtaagcattattgatcagaatgacaatagcccagttttcactcacaatgaatacaacttctatgtcccagaaaaccttccaaggcatggtacagtaggactaatcactgtaactgatcctgattatggagacaattctgcagttacgctctccattttagatgagaatgatgacttcaccattgattcacaaactggtgtcatccgaccaaatatttcatttgatagagaaaaacaagaatcttacactttctatgtaaaggctgaggatggtggtagagtatcacgttcttcaagtgccaaagtaaccataaatgtggttgatgtcaatgacaacaaaccagttttcattgtccctccttccaactgttcttatgaattggttctaccgtccactaatccaggcacagtggtctttcaggtaattgctgttgacaatgacactggcatgaatgcagaggttcgttacagcattgtaggaggaaacacaagagatctgtttgcaatcgaccaagaaacaggcaacataacattgatggagaaatgtgatgttacagaccttggtttacacagagtgttggtcaaagctaatgacttaggacagcctgattctctcttcagtgttgtaattgtcaatctgttcgtgaatgagtcggtgaccaatgctacactgattaatgaactggtgcgcaaaagcactgaagcaccagtgaccccaaatactgagatagctgatgtatcctcaccaactagtgactatgtcaagatcctggttgcagctgttgctggcaccataactgtcgttgtagttattttcatcactgctgtagtaagatgtcgccaggcaccacaccttaaggctgctcagaaaaacaagcagaattctgaatgggctaccccaaacccagaaaacaggcagatgataatgatgaagaaaaagaaaaagaagaagaagcattcccctaagaacttgctgcttaattttgtcactattgaagaaactaaggcagatgatgttgacagtgatggaaacagagtcacactagaccttcctattgatctagaagagcaaacaatgggaaagtacaattgggtaactacacctactactttcaagcccgacagccctgatttggcccgacactacaaatctgcctctccacagcctgccttccaaattcagcctgaaactcccctgaattcgaagcaccacatcatccaagaactgcctctcgataacacctttgtggcctgtgactctatctccaagtgttcctcaagcagttcagatccctacagcgtttctgactgtggctatccagtgacgaccttcgaggtacctgtgtccgtacacaccagaccgtcccagcggcgtgtcacatttcacctgccagaaggctctcaggaaagcagcagtgatggtggactgggagaccatgatgcaggcagccttaccagcacatctcatggcctgccccttggctatcctcaggaggagtactttgatcgtgctacacccagcaatcgcactgaaggggatggcaactccgatcctgaatctactttcatacctggactaaagaaagctgcagaaataactgttcaaccaactgtggaagaggcctctgacaactgcactcaagaatgtctcatctatggccattctgatgcctgctggatgccggcatctctggatcattccagctcttcgcaagcacaggcctctgctctatgccacagcccaccactgtcacaggcctctactcagcaccacagcccacgagtgacacagaccattgctctctgccacagccctccagtgacacagaccatcgcattgtgccacagcccaccaccgatacaggtgtctgctctccaccacagtcctcctctagtgcaggctactgcacttcaccacagcccaccatcagcacaggcctcagccctctgctacagccctcctttagcacaggctgctgcaatcagccacagctctcctctgccacaggttattgccctccatcgtagtcaggcccaatcatcagtcagtttgcagcaaggttgggtgcaaggtgctgatgggctatgctctgttgatcagggagtgcaaggtagtgcaacatctcagttttacaccatgtctgaaagacttcatcccagtgatgattcaattaaagtcattcctttgacaaccttcactccacgccaacaggccagaccgtccagaggtgattcccccattatggaagaacatcccttgtaaagctaaaatagttacttcaaattttcagaaaagatgtatatagtcaaaatttaagatacaattccaatgagtattctgattatcagatttgtaaataactatgtaaatagaaacagataccagaataa

SEQ ID NO: 66141 - DNA, 3933 bp, Artificial Sequence
  derived and/or modified sequence
atggacctgctgagcggcacctacatcttcgccgtgctgctggcctgcgtggtgttccacagcggcgcccaggagaagaactacaccatcagagaggagatgcccgagaacgtgctgatcggcgacctgctgaaggacctgaacctgagcctgatccccaacaagagcctgaccaccgccatgcagttcaagctggtgtacaagaccggcgacgtgcccctgatcagaatcgaggaggacaccggcgagatcttcaccaccggcgccagaatcgacagagagaagctgtgcgccggcatccccagagacgagcactgcttctacgaggtggaggtggccatcctgcccgacgagatcttcagactggtgaagatcagattcctgatcgaggacatcaacgacaacgcccccctgttccccgccaccgtgatcaacatcagcatccccgagaacagcgccatcaacagcaagtacaccctgcccgccgccgtggaccccgacgtgggcatcaacggcgtgcagaactacgagctgatcaagagccagaacatcttcggcctggacgtgatcgagacccccgagggcgacaagatgccccagctgatcgtgcagaaggagctggacagagaggagaaggacacctacgtgatgaaggtgaaggtggaggacggcggcttcccccagagaagcagcaccgccatcctgcaggtgagcgtgaccgacaccaacgacaaccaccccgtgttcaaggagaccgagatcgaggtgagcatccccgagaacgcccccgtgggcaccagcgtgacccagctgcacgccaccgacgccgacatcggcgagaacgccaagatccacttcagcttcagcaacctggtgagcaacatcgccagaagactgttccacctgaacgccaccaccggcctgatcaccatcaaggagcccctggacagagaggagacccccaaccacaagctgctggtgctggccagcgacggcggcctgatgcccgccagagccatggtgctggtgaacgtgaccgacgtgaacgacaacgtgcccagcatcgacatcagatacatcgtgaaccccgtgaacgacaccgtggtgctgagcgagaacatccccctgaacaccaagatcgccctgatcaccgtgaccgacaaggacgccgaccacaacggcagagtgacctgcttcaccgaccacgagatccccttcagactgagacccgtgttcagcaaccagttcctgctggagaccgccgcctacctggactacgagagcaccaaggagtacgccatcaagctgctggccgccgacgccggcaagccccccctgaaccagagcgccatgctgttcatcaaggtgaaggacgagaacgacaacgcccccgtgttcacccagagcttcgtgaccgtgagcatccccgagaacaacagccccggcatccagctgaccaaggtgagcgccatggacgccgacagcggccccaacgccaagatcaactacctgctgggccccgacgccccccccgagttcagcctggactgcagaaccggcatgctgaccgtggtgaagaagctggacagagagaaggaggacaagtacctgttcaccatcctggccaaggacaacggcgtgccccccctgaccagcaacgtgaccgtgttcgtgagcatcatcgaccagaacgacaacagccccgtgttcacccacaacgagtacaacttctacgtgcccgagaacctgcccagacacggcaccgtgggcctgatcaccgtgaccgaccccgactacggcgacaacagcgccgtgaccctgagcatcctggacgagaacgacgacttcaccatcgacagccagaccggcgtgatcagacccaacatcagcttcgacagagagaagcaggagagctacaccttctacgtgaaggccgaggacggcggcagagtgagcagaagcagcagcgccaaggtgaccatcaacgtggtggacgtgaacgacaacaagcccgtgttcatcgtgccccccagcaactgcagctacgagctggtgctgcccagcaccaaccccggcaccgtggtgttccaggtgatcgccgtggacaacgacaccggcatgaacgccgaggtgagatacagcatcgtgggcggcaacaccagagacctgttcgccatcgaccaggagaccggcaacatcaccctgatggagaagtgcgacgtgaccgacctgggcctgcacagagtgctggtgaaggccaacgacctgggccagcccgacagcctgttcagcgtggtgatcgtgaacctgttcgtgaacgagagcgtgaccaacgccaccctgatcaacgagctggtgagaaagagcaccgaggcccccgtgacccccaacaccgagatcgccgacgtgagcagccccaccagcgactacgtgaagatcctggtggccgccgtggccggcaccatcaccgtggtggtggtgatcttcatcaccgccgtggtgagatgcagacaggccccccacctgaaggccgcccagaagaacaagcagaacagcgagtgggccacccccaaccccgagaacagacagatgatcatgatgaagaagaagaagaagaagaagaagcacagccccaagaacctgctgctgaacttcgtgaccatcgaggagaccaaggccgacgacgtggacagcgacggcaacagagtgaccctggacctgcccatcgacctggaggagcagaccatgggcaagtacaactgggtgaccacccccaccaccttcaagcccgacagccccgacctggccagacactacaagagcgccagcccccagcccgccttccagatccagcccgagacccccctgaacagcaagcaccacatcatccaggagctgcccctggacaacaccttcgtggcctgcgacagcatcagcaagtgcagcagcagcagcagcgacccctacagcgtgagcgactgcggctaccccgtgaccaccttcgaggtgcccgtgagcgtgcacaccagacccagccagagaagagtgaccttccacctgcccgagggcagccaggagagcagcagcgacggcggcctgggcgaccacgacgccggcagcctgaccagcaccagccacggcctgcccctgggctacccccaggaggagtacttcgacagagccacccccagcaacagaaccgagggcgacggcaacagcgaccccgagagcaccttcatccccagaagccccaccgccgccgagatcaccgtgcagcccaccgtggaggaggccagcgacaactgcacccaggagtgcctgatctacggccacagcgacgcctgctggatgcccgccagcctggaccacagcagcagcagccaggcccaggccagcgccctgtgccacagcccccccctgagccaggccagcacccagcaccacagccccagagtgacccagaccatcgccctgtgccacagcccccccgtgacccagaccatcgccctgtgccacagccccccccccatccaggtgagcgccctgcaccacagcccccccctggtgcaggccaccgccctgcaccacagcccccccagcgcccaggccagcgccctgtgctacagcccccccctggcccaggccgccgccatcagccacagcagccccctgccccaggtgatcgccctgcacagaagccaggcccagagcagcgtgagcctgcagcagggctgggtgcagggcgccgacggcctgtgcagcgtggaccagggcgtgcagggcagcgccaccagccagttctacaccatgagcgagagactgcaccccagcgacgacagcatcaaggtgatccccctgaccaccttcacccccagacagcaggccagacccagcagaggcgacagccccatcatggaggagcaccccctgtag

SEQ ID NO: 66142 - DNA, 3933 bp, Artificial Sequence
  derived and/or modified sequence
atggacctgctgagcggcacctacatcttcgccgtgctgctggcctgcgtggtgttccacagcggcgcccaggagaagaactacaccatcagagaggagatgcccgagaacgtgctgatcggcgacctgctgaaggacctgaacctgagcctgatccccaacaagagcctgaccaccgccatgcagttcaagctggtgtacaagaccggcgacgtgcccctgatcagaatcgaggaggacaccggcgagatcttcaccaccggcgccagaatcgacagagagaagctgtgcgccggcatccccagagacgagcactgcttctacgaggtggaggtggccatcctgcccgacgagatcttcagactggtgaagatcagattcctgatcgaggacatcaacgacaacgcccccctgttccccgccaccgtgatcaacatcagcatccccgagaacagcgccatcaacagcaagtacaccctgcccgccgccgtggaccccgacgtgggcatcaacggcgtgcagaactacgagctgatcaagagccagaacatcttcggcctggacgtgatcgagacccccgagggcgacaagatgccccagctgatcgtgcagaaggagctggacagagaggagaaggacacctacgtgatgaaggtgaaggtggaggacggcggcttcccccagagaagcagcaccgccatcctgcaggtgagcgtgaccgacaccaacgacaaccaccccgtgttcaaggagaccgagatcgaggtgagcatccccgagaacgcccccgtgggcaccagcgtgacccagctgcacgccaccgacgccgacatcggcgagaacgccaagatccacttcagcttcagcaacctggtgagcaacatcgccagaagactgttccacctgaacgccaccaccggcctgatcaccatcaaggagcccctggacagagaggagacccccaaccacaagctgctggtgctggccagcgacggcggcctgatgcccgccagagccatggtgctggtgaacgtgaccgacgtgaacgacaacgtgcccagcatcgacatcagatacatcgtgaaccccgtgaacgacaccgtggtgctgagcgagaacatccccctgaacaccaagatcgccctgatcaccgtgaccgacaaggacgccgaccacaacggcagagtgacctgcttcaccgaccacgagatccccttcagactgagacccgtgttcagcaaccagttcctgctggagaccgccgcctacctggactacgagagcaccaaggagtacgccatcaagctgctggccgccgacgccggcaagccccccctgaaccagagcgccatgctgttcatcaaggtgaaggacgagaacgacaacgcccccgtgttcacccagagcttcgtgaccgtgagcatccccgagaacaacagccccggcatccagctgaccaaggtgagcgccatggacgccgacagcggccccaacgccaagatcaactacctgctgggccccgacgccccccccgagttcagcctggactgcagaaccggcatgctgaccgtggtgaagaagctggacagagagaaggaggacaagtacctgttcaccatcctggccaaggacaacggcgtgccccccctgaccagcaacgtgaccgtgttcgtgagcatcatcgaccagaacgacaacagccccgtgttcacccacaacgagtacaacttctacgtgcccgagaacctgcccagacacggcaccgtgggcctgatcaccgtgaccgaccccgactacggcgacaacagcgccgtgaccctgagcatcctggacgagaacgacgacttcaccatcgacagccagaccggcgtgatcagacccaacatcagcttcgacagagagaagcaggagagctacaccttctacgtgaaggccgaggacggcggcagagtgagcagaagcagcagcgccaaggtgaccatcaacgtggtggacgtgaacgacaacaagcccgtgttcatcgtgccccccagcaactgcagctacgagctggtgctgcccagcaccaaccccggcaccgtggtgttccaggtgatcgccgtggacaacgacaccggcatgaacgccgaggtgagatacagcatcgtgggcggcaacaccagagacctgttcgccatcgaccaggagaccggcaacatcaccctgatggagaagtgcgacgtgaccgacctgggcctgcacagagtgctggtgaaggccaacgacctgggccagcccgacagcctgttcagcgtggtgatcgtgaacctgttcgtgaacgagagcgtgaccaacgccaccctgatcaacgagctggtgagaaagagcaccgaggcccccgtgacccccaacaccgagatcgccgacgtgagcagccccaccagcgactacgtgaagatcctggtggccgccgtggccggcaccatcaccgtggtggtggtgatcttcatcaccgccgtggtgagatgcagacaggccccccacctgaaggccgcccagaagaacaagcagaacagcgagtgggccacccccaaccccgagaacagacagatgatcatgatgaagaagaagaagaagaagaagaagcacagccccaagaacctgctgctgaacttcgtgaccatcgaggagaccaaggccgacgacgtggacagcgacggcaacagagtgaccctggacctgcccatcgacctggaggagcagaccatgggcaagtacaactgggtgaccacccccaccaccttcaagcccgacagccccgacctggccagacactacaagagcgccagcccccagcccgccttccagatccagcccgagacccccctgaacagcaagcaccacatcatccaggagctgcccctggacaacaccttcgtggcctgcgacagcatcagcaagtgcagcagcagcagcagcgacccctacagcgtgagcgactgcggctaccccgtgaccaccttcgaggtgcccgtgagcgtgcacaccagacccagccagagaagagtgaccttccacctgcccgagggcagccaggagagcagcagcgacggcggcctgggcgaccacgacgccggcagcctgaccagcaccagccacggcctgcccctgggctacccccaggaggagtacttcgacagagccacccccagcaacagaaccgagggcgacggcaacagcgaccccgagagcaccttcatccccggcctgaagaaggccgccgagatcaccgtgcagcccaccgtggaggaggccagcgacaactgcacccaggagtgcctgatctacggccacagcgacgcctgctggatgcccgccagcctggaccacagcagcagcagccaggcccaggccagcgccctgtgccacagcccccccctgagccaggccagcacccagcaccacagccccagagtgacccagaccatcgccctgtgccacagcccccccgtgacccagaccatcgccctgtgccacagccccccccccatccaggtgagcgccctgcaccacagcccccccctggtgcaggccaccgccctgcaccacagcccccccagcgcccaggccagcgccctgtgctacagcccccccctggcccaggccgccgccatcagccacagcagccccctgccccaggtgatcgccctgcacagaagccaggcccagagcagcgtgagcctgcagcagggctgggtgcagggcgccgacggcctgtgcagcgtggaccagggcgtgcagggcagcgccaccagccagttctacaccatgagcgagagactgcaccccagcgacgacagcatcaaggtgatccccctgaccaccttcacccccagacagcaggccagacccagcagaggcgacagccccatcatggaggagcaccccctgtag

SEQ ID NO: 66143 - protein, 1782 aa, Artificial Sequence
  derived and/or modified sequence
MSRGFWLAEPLAGTGPHPAPVAADSRGCSSVPRRHAPSRLSVSTPSRGPGARMVGELRYREFRVPLGPGLHAYPDELIRQRVGHDGHPEYQIRWLILRRGDEGDGGSGQVDCKAEHILLWMSKDEIYANCHKMLGEDGQVIGPSQESAGEVGALDKSVLEEMETDVKSLIQRALRQLEECVGTIPPAPLLHTVHVLSAYASIEPLTGVFKDPRVLDLLMHMLSSPDYQIRWSAGRMIQALSSHDAGEGQCGEEGKAGEGLGRLRDSQDTVAGASDLIRTRTQILLSLSQQEAIEKHLDFDSRCALLALFAQATLSEHPMSFEGIQLPQVPGRVLFSLVKRYLHVTSLLDQLNDSAAEPGAQNTSAPEELSGERGQLELEFSMAMGTLISELVQAMRWDQASDRPRSSARSPGSIFQPQLADVSPGLPAAQAQPSFRRSRRFRPRSEFASGNTYALYVRDTLQPGMRVRMLDDYEEISAGDEGEFRQSNNGVPPVQVFWESTGRTYWVHWHMLEILGFEEDIEDMVEADEYQGAVASRVLGRALPAWRWRPMTELYAVPYVLPEDEDTEECEHLTLAEWWELLFFIKKLDGPDHQEVLQILQENLDGEILDDEILAELAVPIELAQDLLLTLPQRLNDSALRDLINCHVYKKYGPEALAGNQAYPSLLEAQEDVLLLDAQAQAKDSEDAAKVEAKEPPSQSPNTPLQRLVEGYGPAGKILLDLEQALSSEGTQENKVKPLLLQLQRQPQPFLALMQSLDTPETNRTLHLTVLRILKQLVDFPEALLLPWHEAVDACMACLRSPNTDREVLQELIFFLHRLTSVSRDYAVVLNQLGARDAISKALEKHLGKLELAQELRDMVFKCEKHAHLYRKLITNILGGCIQMVLGQIEDHRRTHQPINIPFFDVFLRYLCQGSSVEVKEDKCWEKVEVSSNPHRASKLTDHNPKTYWESNGSAGSHYITLHMRRGILIRQLTLLVASEDSSYMPARVVVCGGDSTSSLHTELNSVNVMPSASRVILLENLTRFWPIIQIRIKRCQQGGIDTRIRGLEILGPKPTFWPVFREQLCRHTRLFYMVRAQAWSQDMAEDRRSLLHLSSRLNGALRQEQNFADRFLPDDEAAQALGKTCWEALVSPVVQNITSPDEDGISPLGWLLDQYLECQEAVFNPQSRGPAFFSRVRRLTHLLVHVEPCEAPPPVVATPRPKGRNRSHDWSSLATRGLPSSIMRNLTRCWRAVVEKQVNNFLTSSWRDDDFVPRYCEHFNILQNSSSELFGPRAAFLLALQNGCAGALLKLPFLKAAHVSEQFARHIDQQIQGSRIGGAQEMERLAQLQQCLQAVLIFSGLEIATTFEHYYQHYMADRLLGVVSSWLEGAVLEQIGPCFPNRLPQQMLQSLSTSKELQRQFHVYQLQQLDQELLKLEDTEKKIQVGLGASGKEHKSEKEEEAGAAAVVDVAEGEEEEEENEDLYYEGAMPEVSVLVLSRHSWPVASICHTLNPRTCLPSYLRGTLNRYSNFYNKSQSHPALERGSQRRLQWTWLGWAELQFGNQTLHVSTVQMWLLLYLNDLKAVSVESLLAFSGLSADMLNQAIGPLTSSRGPLDLHEQKDIPGGVLKIRDGSKEPRSRWDIVRLIPPQTYLQAEGEDGQNLEKRRNLLNCLIVRILKAHGDEGLHIDQLVCLVLEAWQKGPCPPRGLVSSLGKGSACSSTDVLSCILHLLGKGTLRRHDDRPQVLSYAVPVTVMEPHTESLNPGSSGPNPPLTFHTLQIRSRGVPYASCTATQSFSTFR

SEQ ID NO: 66144 - DNA, 5349 bp, Artificial Sequence
  derived and/or modified sequence
atgagcagaggattctggcttgccgagcctcttgccggaactggcccgcaccctgcgccagtcgctgccgacagtcgtggctgctcatccgtgccccgcagacacgccccatctcgcctctctgtgtcaactccctctaggggtcctggagcgagaatggtgggcgagctccggtacagggagttccgcgttcctcttggcccgggactacacgcctaccccgacgagctgatccgtcagagagtgggccacgatggtcatcccgaatatcaaatccgctggttgatcctgagaagaggagacgaaggcgacgggggttctggccaggttgactgtaaagctgagcacattctcctttggatgtcgaaagacgaaatctacgccaactgtcataagatgctaggggaagatgggcaggtgatcgggccaagccaggagagcgctggcgaagtcggcgcactggataagagtgtgcttgaggagatggaaaccgacgttaagtcactcattcagcgcgcccttcgccagctggaggagtgtgtggggactatccctcccgcccccctgctacacactgttcatgtcctgtctgcttacgccagcatcgagcctctgactggcgtttttaaagatccgcgggtccttgatctgctcatgcatatgctcagcagtccagattaccaaatacggtggtcagctggaaggatgatccaggccctgtcaagtcacgatgccggcgaaggacagtgcggggaagaaggcaaggccggcgaaggcctagggagactacgcgattcacaggacaccgtcgcaggcgcaagtgatctcatcagaacacggacacagatcctcctgtcgctcagtcagcaggaagcgatcgaaaagcatcttgacttcgactcacggtgtgcgctcttggcactcttcgcccaggccactctgtcagaacatcccatgtcatttgaaggaattcagctgccccaggtccctggacgcgtgctctttagcctcgtcaagcggtatttacatgtgacaagcctcctggaccagttgaacgacagcgcggccgagccaggcgcacagaacacatcagcgccggaagagctctccggggaacgcggacaactcgagctggagttctctatggcaatgggcacattaatcagcgaactcgtccaggctatgagatgggaccaagcgagcgaccgcccccgatcgtcggcccgatctccagggagcatttttcagccgcaattggccgatgtgagccccggtttgccagcggcccaggctcagccctcttttagacggagtcgaagatttaggcctaggtctgagttcgcctccgggaacacttacgccctgtatgtgcgcgacacgctccagcccggtatgcgcgtccgaatgctagacgactacgaggagatcagtgccggggatgagggggaattccgtcagagcaataacggggtacccccggtccaagtgttttgggaatccacaggcaggacatactgggtgcactggcacatgttagaaatcctggggttcgaggaagacatcgaggatatggtcgaggccgatgagtaccaaggggccgtcgcctctagagtcctgggacgagctctgccagcttggcgctggcgccctatgaccgagctttacgccgttccttacgtgctccccgaggatgaagataccgaggaatgcgagcacctgacgctggccgagtggtgggaactgctgttttttataaaaaaactagacggccccgatcaccaggaagtgctgcagattctgcaggagaatttagacggtgaaatcttggacgatgaaatcctggccgagcttgccgtccccattgaacttgcacaggacctactattgaccttgccccaacggctgaacgactctgccctgagggacttgattaactgtcatgtgtacaagaaatacgggcctgaggccttggccggcaatcaggcttacccgtccctgctcgaggcacaagaagacgtgctgctgctggatgcccaggcccaggccaaggattcagaggatgccgcaaaagtggaggcgaaggagccacctagccaatctcccaatactccgctccagcgtctggttgagggatatggaccggcagggaaaatactgcttgaccttgaacaagccctgtccagtgagggcactcaagaaaataaggtcaaacctctgctgctgcaactgcagaggcagccccagccgtttctggctctaatgcagagcctggacacaccagaaactaacaggactttgcacctaacagtgctgcggatcttgaaacagttggtcgacttcccagaggccttactgctgccctggcacgaggcggtagatgcctgcatggcctgtttacggagtccaaataccgaccgcgaagtgctgcaggagctgatctttttcttgcacagactgacctccgtgtctcgcgactacgccgtggtgctcaatcagctgggcgcccgcgacgcaatcagcaaagcactggagaaacacctgggtaaactagagctggcccaggagctgagggacatggtcttcaagtgcgaaaaacatgcccatctgtatcgtaagcttatcaccaatatactgggcgggtgcatccagatggtgctcggacagattgaggaccatagaagaacacaccagccgatcaatattcctttcttcgatgtgttcctgagatacctatgtcagggctcgagcgttgaggtcaaagaagataagtgctgggaaaaggtcgaggtcagcagtaacccacatcgggctagcaagctgacggaccataaccccaagacatattgggaaagtaacggttcagcagggtcacactacattacgcttcacatgagacgcgggattctcatccggcaacttacactgttagtggcatcggaggacagcagctatatgccagccagggttgtcgtctgtggtggcgattccacctctagtctgcataccgaactgaatagtgtgaatgttatgccatctgcctcgcgagttatcctcctcgaaaatctaacgaggttctggcccatcatccagatcaggatcaagagatgccagcagggcggcatcgacacccgcatccgaggcctcgagatacttgggccgaagccgaccttctggcccgtgttccgggagcaactctgtagacatacgagactgttctacatggtgagagcccaggcttggtcccaggacatggcggaggaccgcaggtcacttctgcacctctcatcacgcttgaacggcgccctccggcaggagcagaacttcgctgaccgctttctgcctgacgacgaggcagcacaggcccttggcaaaacttgttgggaggcactggtgtctcctgtcgtccagaacataacctctcccgacgaagacggaattagtccgcttggttggcttctggatcaatatcttgagtgccaggaggctgtgtttaaccctcagtcccgaggtccggcattcttttcccgggttcgtcgtctgactcatctgctagtccatgttgaaccctgtgaagcacctccacccgtagtagccactccccgaccgaagggccggaaccgctctcacgactggtcatcattagccactagaggactgccctccagtatcatgcgcaatctgactcgctgctggcgagctgtggtggaaaaacaggtgaacaattttctcacctcttcttggagggacgatgatttcgttccacgttactgcgagcattttaacatcctgcaaaattcctcctcagagctattcgggccccgcgcagcctttctgctggcattacagaatggctgtgctggcgccctgctgaagttacccttcttaaaggcggctcacgtgtctgagcagttcgctcggcatattgaccagcagatccaaggctctcggattggcggcgcacaggagatggagcgcctggcgcaactgcaacagtgtttgcaggcagtactgatcttttccggactggaaatcgcaacaacatttgagcattattatcagcactatatggccgaccgtcttctgggtgttgtgtcgtcttggctggaaggtgcggtcttggaacagattggaccctgctttccgaacaggctgccccagcagatgctgcaatctctcagtacatccaaggagctccagcggcagttccacgtatatcagctgcagcagctcgatcaggaactgctaaaattggaagacactgaaaagaaaatacaggtggggttgggggcctccggcaaagaacacaagtccgaaaaggaagaggaggctggagccgcagcagttgtcgacgtggctgagggagaagaagaggaggaagaaaatgaggacctctattacgaaggcgccatgccggaggtgagtgtgctggtcctctcccggcactcttggccggttgccagcatttgccacaccctgaacccgaggacatgcctgccttcctacttacggggtaccctgaataggtattccaacttttataataagtcacagtcgcaccccgcgctggagcgcggtagccagcgacgtctacagtggacatggttggggtgggctgaattgcagttcggtaaccaaaccctccacgtcagcaccgtgcaaatgtggttgcttttatatttgaatgatttgaaagccgtttctgttgagtcactacttgccttctccggtttgtccgccgatatgttaaatcaggcaattggccctttgacctcctcgcggggccccctggatctgcacgaacaaaaagatattccaggcggagtgctcaaaatccgcgatggctctaaagagcccaggtcccggtgggatattgttcggctcatccctcctcaaacgtacctccaagccgaaggggaagacggccagaacctcgagaagcggcgcaacctgctgaattgtcttattgtgaggattctgaaagcccacggcgatgagggactgcacattgaccaacttgtctgcctggttctcgaagcttggcaaaagggcccatgccctccgcgtggactcgtctccagcctagggaagggctctgcgtgctcctctaccgatgtgctctcctgcattctccatttgcttggtaaaggcacccttcgccggcatgatgaccgcccccaagtactgtcgtatgcagttcctgttacggtcatggaaccccatactgagtccctcaatcccggatccagtgggccaaaccctcccttgacattccatacactccagataaggtctcggggagtcccttacgcttcgtgcaccgccacacagagcttcagcacattcagatag

SEQ ID NO: 66145 - DNA, 5349 bp, Artificial Sequence
  derived and/or modified sequence
atgagccggggcttctggctggccgagcccctggccggcaccggcccccacccagcccctgtggccgctgacagccggggctgcagctctgtgcccaggagacatgcccccagccggctgtctgtgtccacccccagccggggccctggggccaggatggtgggggagctgcgctaccgggagttccgggtgcccctgggccctggcctgcacgcctacccagatgagctgatccggcagagggtgggccatgatggccaccctgagtaccagatccgctggctgatcctgcggagaggagatgaaggagatggcggcagcggccaggtggactgcaaggccgagcacatcctgctgtggatgagcaaggatgagatctatgccaactgccacaagatgctgggggaggatggccaggtgattggccccagccaggagagcgctggggaggtgggcgccctggacaagtctgtgctggaggagatggagacagatgtgaagagcctcatccagagggccctgcggcagctggaggagtgtgtgggcaccatccccccagcccccctgctgcacacagtgcacgtgctgagcgcctatgccagcattgagcccctgactggagtcttcaaggacccccgggtgctggacctgctgatgcacatgctgagcagcccagactaccagatccgctggagcgctggccgcatgatccaggccctgagcagccatgatgctggggagggccagtgtggggaggagggcaaggccggggagggcctgggccgcctgcgggacagccaggacacagtggccggggccagtgacctgatccgcaccaggacccagatcctgctgagcctgagccagcaggaggccatcgagaagcacctggactttgacagccgctgtgccctgctggccctgtttgcccaggccaccctgtctgagcaccccatgagctttgagggcatccagctgccccaggtgcccggccgggtgctcttcagcctggtgaagcgctacctgcacgtgaccagcctgctggaccagctgaatgacagcgctgctgagcccggggcccagaacaccagcgcccctgaggagctgagcggggagcggggccagctggagctggagttctccatggccatgggcaccctcatcagcgagctggtgcaggccatgcgctgggaccaggccagtgaccggcccaggagcagcgcccggagccctggcagcatcttccagccccagctggctgatgtgtccccaggcctgcctgctgcccaggcccagcccagcttccgccgcagccgccgcttccggcccaggagtgaatttgccagcggcaacacctacgccctgtatgtgcgggacaccctgcagcccggcatgagggtgaggatgctggatgattatgaggagatctctgctggagatgaaggagagttccggcagagcaacaatggagtgccccctgtgcaggtgttctgggagagcactggaagaacctactgggtgcactggcacatgctggagatcctgggctttgaagaagatattgaggacatggtggaggctgatgagtaccagggcgctgtggccagccgggtgctgggccgggccctgcctgcctggcgctggaggcccatgacagagctgtatgctgtgccctacgtgctgcctgaagatgaggacacagaagaatgtgagcacctgaccctggccgagtggtgggagctgctcttcttcatcaagaagctggatggccctgaccaccaggaggtgctgcagatcctgcaggagaacctggatggagagatcctggatgatgagatcctggccgagctggccgtgcccatcgagctggcccaggacctgctgctgaccctgccccagaggctgaatgacagcgccctgcgggacctgatcaactgccacgtgtacaagaagtatggccctgaggccctggccggcaaccaggcctaccccagcctgctggaggcccaggaggatgtgctgctgctggatgcccaggcccaggccaaggacagtgaagatgctgccaaggtggaggccaaggagccccccagccagagccccaacacccccctgcagaggctggtggagggctacggccctgctgggaagatcctgctggacctggagcaggccctgagcagcgagggcacccaggagaacaaggtgaagcccctgctgctgcagctgcagaggcagccccagcccttcctggccctgatgcagagcctggacaccccagagaccaacagaaccctgcacctgactgtgctgcgcatcctgaagcagctggtggacttccctgaggccctgctgctgccctggcatgaagctgtggatgcctgcatggcctgcctgcggagccccaacacagaccgggaggtgctgcaggagctgatcttcttcctgcaccggctgacctctgtgtcccgggactatgctgtggtgctgaaccagctgggcgccagagatgccatcagcaaggccctggagaagcacctgggcaagctggagctggcccaggagctgcgggacatggtgttcaagtgtgagaagcacgcccacctgtacaggaagctgatcaccaacatcctgggcggctgcatccagatggtgctgggccagatcgaggaccacaggaggacccaccagcccatcaacatccccttctttgatgtgttcctgcgctacctgtgccagggcagctctgtggaggtgaaggaggacaagtgctgggagaaggtggaggtgagcagcaacccccaccgggccagcaagctgacagaccacaaccccaagacctactgggagagcaatggcagcgctggcagccactacatcaccctgcacatgagaagaggcatcctgatccggcagctgaccctgctggtggccagcgaggacagcagctacatgcctgcccgggtggtggtgtgtggcggggacagcaccagcagcctgcacacagagctgaacagcgtgaatgtgatgcccagcgccagcagggtcatcctgctggagaacctgacccgcttctggcccatcatccagatccgcatcaagcgctgccagcagggcggcatcgacacccgcatccggggcctggagatcctgggccccaagcccaccttctggcctgtgttccgggagcagctgtgccgccacaccaggctcttctacatggtgcgggcccaggcctggagccaggacatggccgaggaccggcgcagcctgctgcacctgagcagccggctgaatggagccctgcggcaggagcagaactttgctgaccgcttcctgcctgatgatgaggccgcccaggccctgggcaagacctgctgggaggccctggtgtcccctgtggtgcagaacatcaccagcccagatgaagatggcatcagccccctgggctggctgctggaccagtacctggagtgccaggaggccgtgttcaacccccagagccggggccctgccttcttcagccgggtgcggcggctgacccacctgctggtgcacgtggagccctgtgaggcccctcctcctgtggtggccaccccccggcccaagggcaggaacagaagccatgactggagcagcctggccacccggggcctgcccagcagcatcatgaggaacctgacccgctgctggagggctgtggtggagaagcaggtgaacaacttcctgaccagctcctggagagatgatgactttgtgccccgctactgtgagcacttcaacatcctgcagaacagcagcagcgagctgtttggccccagggctgccttcctgctggccctgcagaatggctgtgccggggccctgctgaagctgcccttcctgaaggccgcccacgtgtctgagcagtttgcccggcacatcgaccagcagatccagggcagcagaattggaggagcccaggagatggagcggctggcccagctgcagcagtgcctgcaggccgtgctgatcttcagcggcctggagatcgccaccacctttgagcactactaccagcactacatggctgaccggctgctgggcgtggtgtcctcctggctggagggcgctgtgctggagcagatcggcccctgcttccccaaccggctgccccagcagatgctgcagagcctgagcaccagcaaggagctgcagaggcagttccacgtgtaccagctgcagcagctggaccaggagctgctgaagctggaggacacagagaagaagatccaggtgggcctgggcgccagcggcaaggagcacaagtctgagaaggaggaggaggccggggctgctgctgtggtggatgtggccgagggggaggaggaggaggaggagaatgaagacctgtactatgagggcgccatgcctgaggtgtctgtgctggtgctgagccgccacagctggcctgtggccagcatctgccacaccctgaaccccaggacctgcctgcccagctacctgcggggcaccctgaaccgctacagcaacttctacaacaagagccagagccacccagccctggagcggggcagccagaggcggctgcagtggacctggctgggctgggccgagctgcagtttggaaaccagaccctgcacgtgtccacagtgcagatgtggctgctgctgtacctgaatgacctgaaggctgtgtctgtggagagcctgctggccttcagcggcctgtctgctgacatgctgaaccaggccatcggccccctgaccagcagccggggccccctggacctgcacgagcagaaggacatccctggaggagtgctgaagatcagagatggcagcaaggagcccaggagccgctgggacatcgtgcggctcatccccccccagacctacctgcaggccgagggagaagatggccagaacctggagaagagaagaaacctgctgaactgcctgattgtgcgcatcctgaaggcccatggagatgagggcctgcacatcgaccagctggtgtgcctggtgctggaggcctggcagaagggcccctgccccccccggggcctggtgagcagcctgggcaagggcagcgcctgcagcagcacagatgtgctgagctgcatcctgcacctgctgggcaagggcaccctgcggagacatgatgaccggccccaggtgctgtcctatgctgtgcctgtgacagtgatggagccccacacagagagcctgaaccctggcagcagcggccccaacccccccctgaccttccacaccctgcagatccgcagccggggcgtgccctatgccagctgcacagccacccagagcttcagcaccttcagatag

SEQ ID NO: 66146 - DNA, 5349 bp, Artificial Sequence
  derived and/or modified sequence
atgagccggggcttctggctggccgagcccctggccggcaccggcccccacccagccccagtggcggccgacagccgtggttgttcatcagtaccccgtcgacatgccccatctagactgtcagtttctacgccatctagagggcccggggcgaggatggtcggagagctgcgttacagggagttccgcgtgcccctgggacccggtctacatgcctacccagatgagctcatccgacaacgtgtgggacacgatgggcaccccgagtatcagattagatggctaatcttgcgtcggggggacgaaggggatgggggctctggtcaggttgattgtaaggctgaacacatcctgctctggatgtccaaagacgagatttatgcaaactgccataaaatgctgggcgaggacggacaggtcattggcccctctcaagagtctgctggagaggtgggggcgcttgacaagtctgtgctggaagaaatggagacagacgtgaaatctctgattcagcgagccctaaggcagctggaggagtgcgtgggaacaatccctccagccccattattgcacaccgtgcacgtgcttagcgcttatgcctccattgaaccactcactggagtcttcaaagacccacgtgtgctggacctgctgatgcatatgctgagcagtccggactatcagattaggtggagcgcaggtaggatgattcaggccctatcttcacatgacgctggagaagggcaatgtggtgaagaggggaaagctggcgaaggactcggcagactgagagacagccaggacaccgttgctggtgcatctgatttgatcagaaccaggacccagatcctgttgtcccttagccaacaggaggccatcgaaaaacacttagactttgactctcgctgcgccctgctggccctgttcgcgcaggcaaccttaagtgagcaccccatgtcattcgaagggatccagttgcctcaggtgcccggccgtgtactgttcagcttggtaaagcgttaccttcacgtaaccagcctgttggaccagctcaatgactctgccgccgagcccggagctcagaacacttctgcgccagaagagctgagcggagaacggggccagctggaactggaattctctatggccatgggtacactcatatccgagttggtgcaggccatgagatgggaccaggcctccgatagaccccgtagcagtgcccgatccccagggtccatttttcagccacagctcgccgacgtgtcaccgggcttgcctgccgcccaggcccagccttcttttagacgaagccgccgcttcagacctcggtcagagtttgctagcggtaacacttatgccctctacgttcgtgataccctccaacccggaatgagagtccgcatgctggacgattatgaggaaattagcgcaggtgacgaaggagagttcagacaatcaaacaatggggtgccacccgtgcaggtgttttgggaatcaacaggacgaacatactgggtacactggcacatgttggagatcttaggttttgaggaggatatcgaagacatggtcgaagccgacgaataccagggtgcggtagcctcgcgagttcttggaagagccttgcccgcatggaggtggcggccaatgacagagctgtacgccgtgccttatgtacttcctgaggacgaggatacagaggaatgcgaacatttaacactggccgagtggtgggaacttcttttttttataaagaaactggacggccccgaccaccaggaggtcctccagatcctccaggagaacttggacggcgagatcttagacgacgaaatcttagcggaattggcagtgcccatcgaactcgctcaggatctgctcctgacacttccacagcgcctgaacgactcagcactgagagacctcatcaactgtcacgtgtacaagaaatatggacctgaggcactcgctgggaaccaggcttatccaagcctcctggaggcccaagaagacgtgctcctgctagacgctcaagcgcaggccaaggattcagaagacgcggcaaaggtggaggctaaagagcccccatcccagtctccaaacacccctctgcagcgcttggtggagggatacgggccagccggaaagatcctgttagacctggaacaagccctctcttctgaggggacacaggagaacaaagtgaagccactgctgctccaactacagaggcagcctcagccattcctagctctcatgcagagcctggacaccccggaaacaaatcgcactctccacttgaccgttctgaggatcctcaaacagctggtggactttccggaagccctccttctgccttggcacgaggcagtcgacgcctgcatggcatgtttaagaagccccaacacagacagagaagtgctgcaagaacttattttcttcctgcatcgccttactagtgtatcccgggattacgctgtggtgctaaatcaattgggggcaagagacgcaatctccaaagctctcgagaaacacctgggcaaactagagctggcccaggaactgcgggatatggtgtttaagtgtgagaaacatgcgcatctttatcgcaaactcattaccaacatacttggggggtgcattcagatggttctcggtcagatcgaggaccataggcgcacacaccaacccattaatatccccttcttcgatgtgtttctgagatatctttgtcagggaagctcggtggaggtcaaggaggacaagtgctgggagaaggttgaggtgtcctccaatccccatcgggctagcaagctgactgaccacaaccctaagacatactgggagtcaaatggaagcgccgggtcccattatatcactttgcacatgagacggggcatactcatcaggcaacttacactcctggtagctagcgaggactcatcctatatgccggctagggtggtagtttgtggtggagactccacgtctagcctgcatactgaactcaactctgtcaacgttatgccctctgcctctagggtgatactcctcgagaatttgacacggttttggcccattatacagattcgtatcaaacggtgccagcaagggggtatagacactcgcattcgggggctggagatcctgggcccaaaacctacattttggcctgtttttagggaacagttatgtaggcatactcgcctcttctacatggtgagggctcaggcgtggtcacaggacatggctgaggatagacggtcactccttcatctctccagtaggcttaatggcgccttgagacaggagcaaaacttcgcggaccggttccttcccgacgacgaagccgcccaggcactggggaagacctgctgggaggctttggtctctcctgtcgtgcagaatatcaccagtccagacgaggacggaatttcacccttaggatggctgcttgatcaatatctggaatgtcaagaagccgtgtttaacccacagtccaggggccctgccttcttctcacgtgtgcgaaggttaacgcatttgctggtgcatgtggagccctgcgaagctccccccccagtcgtggcaactcctaggccgaagggtcgcaacaggtcccacgactggtcgtctctggcaacacgcggcttacccagctcgattatgcgcaatctcactcgttgctggagagccgtggtggagaagcaagttaataattttctcacgtctagttggcgggacgacgattttgttccgagatattgcgagcattttaatattctgcagaattcatctagcgagttgttcggtccaagagcggcttttttgctggctctccagaatggctgcgctggagcactgctgaagttaccatttcttaaagcggcccacgtgtctgaacaattcgcgcggcatatcgatcagcagatccaaggttcgagaatcggaggagcccaggaaatggaacgactggcacagctgcagcagtgcctccaggctgtcctcattttttccgggctggagattgccacaacatttgagcattactaccagcattacatggcagaccgcctgctcggtgttgtgagctcgtggttagagggcgccgtgctcgaacagattgggccgtgcttcccaaaccgcctccctcagcagatgttacagagcttatccacgtcgaaagagctgcagcggcagtttcatgtgtaccagctgcagcagctggaccaggaattactgaaactggaagataccgaaaagaaaattcaggtaggcctaggcgcatcaggcaaggagcacaagtccgaaaaggaagaggaggccggagccgcagcagtagtggatgtggccgagggggaggaggaagaagaggaaaacgaagatctgtattatgaaggcgccatgcccgaagtttccgtactggtactgtcgagacattcctggcccgtggctagcatttgccacacgctcaaccctcggacatgtttacccagttatttgaggggtacccttaaccgttactctaacttctacaacaagtctcaatcccacccggcactcgagaggggaagtcagcgccgtctgcaatggacctggttgggctgggctgagcttcagttcggaaaccaaactcttcacgtgtctacggtacagatgtggcttctcttatacctgaacgatcttaaggcagtctccgtcgaaagtttactcgcattctctggcctctctgccgatatgttaaatcaggcaattggtcctctgacttctagcaggggtccactggatctgcacgagcagaaagatattcctggaggcgtgctcaaaatcagggacggcagtaaagagccccgctcccgctgggacatagtaaggctgatcccgccgcagacatacttacaagcggaaggagaggacgggcagaacttggagaaaaggcgcaacctgctgaattgcttgatcgtcaggattctcaaggcccatggggatgaaggcctgcacatcgaccagctggtttgcctcgtcctggaagcctggcagaagggaccttgtcctcccaggggccttgtttccagcctggggaaagggagcgcctgctcatctaccgacgtgctgtcatgcatcctgcatttattgggaaaaggcaccctgagacgtcacgatgaccggccccaggttttgtcatatgcagttcccgtgaccgtgatggaaccgcatacagagtccctaaatcccggatcctccgggccgaatccccctctcacctttcacacattgcaaattcggagccgaggcgtgccctacgctagctgcactgcaacccagtcattttctacttttaggtag

SEQ ID NO: 66147 - DNA, 5348 bp, Artificial Sequence
  derived and/or modified sequence
atgtccagagggttctggttggccgaaccccttgcaggcacagggcctcatccagcacctgttgccgcagattcccgtgggtgctcctcagttccgcgtaggcacgccccatccagattgagcgtcagcacgccctctcggggtccgggtgccaggatggtgggggaattgagatatcgcgaatttcgggtgccactggggcctggcctgcatgcctaccctgatgagctgatccgacagcgggtgggacacgatggccatcccgagtatcagattcgctggttgattctgaggaggggggacgaaggagacgggggatctggtcaggtggactgcaaggctgagcatatcctgctgtggatgtccaaagatgaaatatacgcgaattgtcacaagatgttaggagaggacggacaagtgataggacccagccaagagagcgcaggcgaagtgggggctcttgataagtcagtgctggaagagatggagacagatgttaagagtctgatccagagggcgctgcgccaactcgaggagtgcgtcggcaccattccccctgcaccactcctgcacacggtgcacgtgctgtctgcctacgccagcatagaaccactgacaggggtctttaaggatcctagggttctggacctgttgatgcacatgctgtcatccccagactaccagattagatggtcagccggacgaatgatccaggccttatcatcgcatgacgccggtgaggggcagtgtggtgaagaaggcaaagctggggaaggacttggcaggctgagagattcgcaggacacagtggctggggcaagcgacctaatcaggaccaggacccaaatcctcctctccctgtcccagcaggaagcgatagaaaagcaccttgacttcgacagcaggtgcgccttgcttgctctgttcgcccaggccacccttagcgaacatcccatgtcatttgagggaatccagcttccacaggtgcctggcagggtcttgttttccttagtgaagagatacctgcatgtcaccagcctactggatcagttaaatgattctgcagccgagcccggagcccagaatacaagcgccccagaagagctcagtggcgagcgtggacagctcgaacttgagttctccatggccatggggacactcatttcggaactcgtgcaggccatgcgttgggaccaagcttccgacagacccagatcttcagctagaagccctggctctattttccagccccagctggctgatgtgtcacctggcctgcccgctgcccaggcacagccgtccttcagaagaagtagaaggttccggcctaggtccgagtttgcgagtggtaacacttacgccctttatgtgcgcgacacactgcagcccggaatgagagtccgcatgctggatgactacgaggagatcagcgccggtgacgagggcgagttccgccaatctaacaatggagttcccccagtgcaggtgttttgggagtctaccgggcgaacttattgggtccactggcatatgctggagatcctgggattcgaggaagatatagaagatatggtggaggccgacgagtaccagggcgcagtggcttcaagagttctggggcgtgcccttccagcatggcgttggaggcccatgacggaactgtatgctgtgccgtatgttctgccagaggacgaggacaccgaggagtgtgagcatctaacactggcggaatggtgggaacttctgtttttcatcaaaaagttagacgggcctgaccaccaggaagtcctccagatcctccaagagaaccttgacggggagattcttgatgacgaaatactagctgaactggccgtgcccatcgaactggcccaagacctgttgctaaccttgccccagcgcttgaatgacagcgcattgcgcgatcttataaactgccacgtgtacaagaaatatggtccagaggctctggccggaaaccaggcttatcctagcctgcttgaggcacaggaagacgttctcctgctcgacgctcaagcacaggccaaggattctgaggatgcagcaaaggtggaggccaaggaacccccaagccagagccctaacacacctctgcagaggctggtggaaggatacggaccggcagggaagatactgctcgaccttgagcaagctctctctagcgaaggaactcaggagaataaagtgaaacccctgttgctgcagcttcagcgccagccacagccgttcttggcgctcatgcagagcctagatacccctgagaccaatcgaaccctgcacctgacagtactccgcatattgaaacagttggttgattttcctgaggcactcttgctgccatggcatgaggcggttgacgcttgtatggcctgcctgcggtcccccaacacagaccgagaagtgctacaagagctgatcttcttcctgcatagactgacgagcgtttcacgagattatgctgtcgtgctcaatcagttgggcgcaagggatgctatttcgaaagccctggagaagcacctcggaaaactggagctcgcgcaggagcttcgggacatggtgttcaaatgcgagaagcatgcacatttataccgcaagctcattactaacatattaggaggttgcatacagatggtcctcggtcagatcgaggaccaccgccgaacccaccagccaataaacatacccttctttgacgtttttctgcggtatttgtgccagggttctagtgtcgaggtgaaagaagacaaatgttgggaaaaggtggaggtgtcttcaaatcctcacagagcaagtaagttgaccgatcacaatcccaaaacatattgggaatcaaatggttccgccggatcccattatattaccttgcatatgcgccgtggaatcctcattcggcagcttaccctgctggtggcgtccgaagactcatcttacatgcctgcacgggtcgtggtgtgtgggggtgactcaacctcctccttacatacagagctcaactctgtgaatgtaatgccatcggcttcacgggtaatcctgttggaaaacctcacccgtttctggccaatcatccagattaggatcaagcggtgtcagcagggcggaatcgatacccggattcggggactggaaattctgggcccaaagcctacattttggccggtttttcgcgaacagttgtgccggcatactaggctcttttacatggtgcgggctcaggcttggtcacaagacatggccgaagacaggcggagtctcttacatctcagctctcggctgaatggggcactcaggcaggaacagaatttcgcagaccgctttttaccggacgatgaggcagcccaggccctgggtaaaacctgctgggaggccctggttagcccagtcgttcagaacattacgagcccagacgaggacggcatatctccgcttggatggttgttggaccaatacttggagtgccaggaggctgtatttaacccacagtcgcgcggacccgcatttttttctcgggtaagacggctcactcatctgctcgtacacgtggaaccatgcgaggcccctcctccagttgtggctacaccgagacctaaaggaagaaatagatctcacgattggtcttctctggcaacgagaggactgccttcttcaatcatgcgaaatctaaccagatgttggcgagctgtagtggagaagcaggtgaacaacttcctgacctcctcatggcgcgatgatgactttgtcccgaggtattgcgaacatttcaacattctgcaaaacagtagctcagagctctttggcccaagggcggcatttctacttgccctccagaatgggtgtgccggagctcttcttaagctcccttttttgaaagctgcacacgtgagtgaacaatttgcacgacatattgaccagcagatacagggatctaggatcgggggagcccaagaaatggagcggttagcccagttacagcagtgcctgcaggctgttttaatattcagcggccttgagatagctactacctttgagcattattatcagcactacatggcggaccgcctactgggggtggtcagcagctggcttgaaggtgctgtgctagaacagattggcccatgtttccccaatcgtctgccccagcagatgctccagtctctttccacttccaaagagcttcagcgccagttccacgtgtatcagctacagcaactggatcaggaactgcttaaactggaagacactgagaagaagatccaagtgggtctgggagcatccggcaaggagcacaaatccgagaaggaggaggaggccggagcagctgctgtcgtggatgtggcagagggcgaagaagaggaagaagaaaatgaggatctctactatgaaggggcaatgccagaggtgagcgtgctcgtgctatccagacattcttggccagtcgcgtctatctgccatactctgaacccacggacgtgcctgccgagctatcttagaggaacgctcaatcgttattcgaacttctacaacaagtcacagtctcatccagccttggaacggggatcacaaaggaggctgcagtggacttggctgggatgggctgaactacaatttggaaatcagacactccatgtttcgacagtccaaatgtggctcctgctctatttaaatgatctaaaggcagtatcagtagaatctctgctggccttcagtggactcagcgcagatatgttgaaccaggcaatcggtccattaacgtcttctcgtggtccactggatctgcatgagcagaaggacattccaggcggagttctgaaaattcgtgacgggtccaaggagcctcggtctaggtgggacatagtacgtctcatccctccccagacatatctgcaggctgaaggggaggacggtcagaacttggagaagcgccgtaatttgcttaattgcctcattgtccgtatattaaaagcccatggagatgagggactgcacatcgatcagttggtgtgcctggttctggaggcatggcagaaagggccttgtccacctcgaggccttgtttcatctttggggaaagggtcagcttgttctagtacagatgtgttgtcttgcattctgcacctgctgggcaagggaacgctacggcgacatgatgatagaccccaagtactctcctatgctgtccccgtgacagtgatggaaccacacacggagagccttaatcccggaagttccggaccaaatccacctcttactttccatactctgcagattcgctcccgtggcgtcccgtacgcctcctgtacagcaactcaaagcttcagcactttcagata

SEQ ID NO: 66148 - DNA, 5504 bp, Artificial Sequence
  derived and/or modified sequence
aggaggtgctgcgtcgccaaggtggcatcctcggctccgccccggcgctctcccagggcccctagctttccgctgggtcgggcggaaatgagccgtggcttttggctggcggagccgctggcagggaccgggccccaccctgccccagtggctgccgactcacgcgggtgcagctctgttccgcggaggcacgccccctcccgtctctccgtctcgaccccctcgcggggcccaggtgccaggatggtgggagaactccgctacagggaattcagggtgcccctggggcccggcttacatgcctatcctgatgagctgatccgccagcgcgtgggccatgatgggcatcctgagtaccagatccgttggctcatcctgcggcgtggcgatgagggggacgggggctctggccaagtggactgcaaggctgagcacatcctgctgtggatgtccaaggatgagatctatgccaactgccacaagatgctgggcgaggatggccaggtcatcgggccctcccaggagtctgcaggggaggttggggccctggacaaatctgtgctggaggagatggaaaccgacgtgaagtccctcattcagagagcccttcggcagctggaggagtgtgtgggcactatccctcctgctcctctacttcacactgtccacgtgctcagcgcctatgccagcattgagcccctcactggagtattcaaggacccaagggtcctggacttgctcatgcacatgttgagtagtcctgattatcagattcgctggagtgcaggccggatgatacaagccctgtcctcccatgacgctggtgaggggcagtgtggggaggaagggaaagcaggagaagggctgggtcggctcagggactcacaggacactgtggcaggagcctctgatctcatcaggacccggactcagatccttctgtcactgagccaacaagaagccattgagaaacacctggattttgacagccgctgtgctctgctagcactgtttgcacaggccacgctctctgaacaccccatgtctttcgagggcattcagctaccacaggtcccaggaagggtgctcttctccctggtgaagcggtatttgcatgtcacctcgctcctggatcagctgaacgacagtgctgcggagccaggagcccagaacacctctgctcctgaggagttgagtggggagaggggtcaactggagctggagttcagtatggccatgggcaccctgatctcggagctggtgcaagccatgcgctgggaccaggcctcagacagaccaaggagctcagcacggtcccccggttccatcttccagcctcagctggcagatgtgagcccagggctccccgctgcccaggctcagccctccttcaggaggtcaagacgttttcgccctcgttctgagttcgcaagtggcaatacctatgctttgtatgtgcgggacacactgcagccggggatgcgagtgcggatgctggatgattatgaggagatcagtgccggggatgagggcgagtttcggcagagcaacaacggtgtgcctcctgtgcaggtattttgggagtcaacaggccgcacctattgggtgcactggcacatgctggagatcttgggctttgaggaagacattgaggacatggttgaggctgatgagtaccaaggggcagtggccagtagagtcctgggtagagccctgcctgcctggcgctggaggcccatgacagaactctatgctgtgccttatgtgctgcctgaggatgaggacactgaggagtgtgaacacctgaccctggctgagtggtgggaactcctcttcttcatcaagaagctggatggacctgaccatcaggaggttctccagatcctccaggagaacctagatggggagattctggatgatgagatcctagctgaactggccgtgcccatagaattggcccaggacttgctgctgactctgccacagcgactcaatgacagtgccctcagggacctgatcaactgccatgtctacaagaagtatgggcctgaagccctagcagggaaccaagcctacccatcccttctagaagcccaagaagatgtcctcctgctagacgcgcaggcccaggctaaggactcagaagatgcagccaaagtggaagcaaaagaacccccatctcagagtcccaacactcccctgcagcgtctggtggagggttatggtccagctgggaaaatcctcctggatctagagcaagccctcagctcagaggggacccaggagaacaaggtcaagccactcctgctgcagctgcagcggcagccgcagcccttcctggcactgatgcagagcctggacactccggagactaacaggaccctgcacctgactgtgctgagaatcctgaagcagctggtggacttccccgaggcactgctgctcccctggcacgaggccgtggatgcctgcatggcctgcctgcggtccccaaacactgatcgagaggtgctccaggaactgattttcttcctgcaccgcctgacctcagtgagcagggactatgccgtggtgctgaatcagctgggagcaagagacgctatctccaaggccctggaaaagcacctgggaaagctggagctggctcaggagctgcgggacatggtgttcaagtgtgagaagcatgcccacctctaccgcaaactcatcaccaacatcctgggaggctgcatccagatggtgctgggccagatcgaagaccacagacgaacccaccaacccatcaacatccctttctttgatgtgttcctcagatacctgtgccagggctccagtgtggaagtgaaggaggacaagtgctgggagaaggtggaggtgtcctccaacccgcaccgggccagcaagctgacggaccacaaccccaagacctattgggagtccaacggcagcgccggctcccactacatcaccctgcacatgcgccggggcatcctcatcaggcaactgactctgcttgtggctagtgaggactcgagttacatgccggcccgagtggtggtgtgcgggggtgatagcactagctctcttcacacggaactcaactcggtgaatgtgatgccctctgccagccgggtgatcctcctggagaacctgacccgcttctggcccatcatccagatccgcataaagcgctgccagcagggtggcattgatacgcgcattcgggggttagagatcctaggccccaagcccacgttctggccagtgttccgggagcagctctgtcgtcacacacgcctcttctacatggttcgggcacaggcctggagccaggacatggcagaggaccgcaggagcctcctgcacctgagttctagactcaacggtgctctgcgccaggagcagaattttgctgaccgcttcctccctgatgacgaggctgcccaagctctgggcaagacctgctgggaggccctggtcagccccgtggtgcagaacatcacctcccctgatgaggatggcattagccccctgggttggctgctggaccagtacctggagtgtcaggaagctgtcttcaacccccagagccgcggcccagctttcttctcgcgggtgcgccgtctcactcacctgctggtgcatgtcgagccctgtgaggcaccccctcctgtggtggccactcctcggcccaaaggcagaaacagaagccacgactggagctccttggctacccggggccttccaagcagcatcatgagaaacctgacgcgctgttggcgggccgtggtggagaagcaggtgaacaattttctgacctcatcctggcgggatgatgactttgtgccacgctactgtgagcactttaatattctgcagaactcaagctctgaactgtttgggcctcgggcagccttcttgctggcgctgcaaaatggctgtgcgggagccttgctgaagctcccttttctcaaagctgcccacgtgagtgagcagttcgcccggcacattgaccagcagatccagggcagccggatcggtggagcccaggaaatggagaggctggcacagctgcagcaatgcctgcaagctgtcctgattttctccggcttggagatagccaccacttttgagcattattaccagcactacatggcggaccgtctcctgggcgtggtctcgagctggctggagggggccgtgctggagcagatcggtccctgcttccccaaccgcctcccccagcagatgttgcagagcctgagcacctctaaggagctgcagcgccagttccacgtctaccagctccagcagctggatcaggaactcctgaagctggaggatacagagaagaaaatacaggtgggccttggggccagtggcaaggagcacaagagcgagaaggaagaggaagctggggcagcagcagtggtggatgtggcggagggagaggaggaagaggaggagaatgaggacctctactatgaaggggcaatgccagaagtgtctgtgcttgtcctgtcccgacactcctggcctgttgcctcaatctgccacacactgaaccccagaacctgcctgccctcctacctgaggggcactttgaacagatactccaacttctacaacaagagtcagagccaccctgcccttgagcgaggctcacagaggcgactgcagtggacgtggctgggctgggctgagctgcagtttgggaaccagaccctgcatgtgtccaccgtgcagatgtggctactgctgtatctcaacgacctgaaggcggtctctgtggagagtctgctggcgttctcagggctctccgcagacatgctcaatcaggcgattgggcccctcacctcttcaagaggccccctggaccttcacgagcaaaaggatataccaggaggggtcctcaagattcgagatggcagcaaggaacccaggtcgagatgggacattgtgcggctcatcccacctcagacgtacctgcaagctgagggtgaagacggccagaacttggagaagagacggaatcttctgaactgcctcatcgtccgaatcctcaaggcccatggagatgaggggctgcacattgaccagcttgtctgtctggtgctggaggcttggcagaagggcccgtgtcctcccaggggtttggtcagcagccttggtaaggggtctgcatgcagcagcactgacgtcctctcctgcatcctacacctcctgggcaagggcacgctgagacgccatgacgaccggccccaggtgctgtcctatgcagtccctgtgactgtcatggagcctcacactgagtccctgaacccaggctcctcaggccccaacccacccctcaccttccataccctacagattcgctcccggggtgtgccctatgcctcctgcactgccacccagagcttctctaccttccggtagccctagacttggggtcaggggaaggtagagctggagcttttacagaaataaaacccaagagtttgatt

SEQ ID NO: 66149 - DNA, 5349 bp, Artificial Sequence
  derived and/or modified sequence
atgagcagaggcttctggctggccgagcccctggccggcaccggcccccaccccgcccccgtggccgccgacagcagaggctgcagcagcgtgcccagaagacacgcccccagcagactgagcgtgagcacccccagcagaggccccggcgccagaatggtgggcgagctgagatacagagagttcagagtgcccctgggccccggcctgcacgcctaccccgacgagctgatcagacagagagtgggccacgacggccaccccgagtaccagatcagatggctgatcctgagaagaggcgacgagggcgacggcggcagcggccaggtggactgcaaggccgagcacatcctgctgtggatgagcaaggacgagatctacgccaactgccacaagatgctgggcgaggacggccaggtgatcggccccagccaggagagcgccggcgaggtgggcgccctggacaagagcgtgctggaggagatggagaccgacgtgaagagcctgatccagagagccctgagacagctggaggagtgcgtgggcaccatcccccccgcccccctgctgcacaccgtgcacgtgctgagcgcctacgccagcatcgagcccctgaccggcgtgttcaaggaccccagagtgctggacctgctgatgcacatgctgagcagccccgactaccagatcagatggagcgccggcagaatgatccaggccctgagcagccacgacgccggcgagggccagtgcggcgaggagggcaaggccggcgagggcctgggcagactgagagacagccaggacaccgtggccggcgccagcgacctgatcagaaccagaacccagatcctgctgagcctgagccagcaggaggccatcgagaagcacctggacttcgacagcagatgcgccctgctggccctgttcgcccaggccaccctgagcgagcaccccatgagcttcgagggcatccagctgccccaggtgcccggcagagtgctgttcagcctggtgaagagatacctgcacgtgaccagcctgctggaccagctgaacgacagcgccgccgagcccggcgcccagaacaccagcgcccccgaggagctgagcggcgagagaggccagctggagctggagttcagcatggccatgggcaccctgatcagcgagctggtgcaggccatgagatgggaccaggccagcgacagacccagaagcagcgccagaagccccggcagcatcttccagccccagctggccgacgtgagccccggcctgcccgccgcccaggcccagcccagcttcagaagaagcagaagattcagacccagaagcgagttcgccagcggcaacacctacgccctgtacgtgagagacaccctgcagcccggcatgagagtgagaatgctggacgactacgaggagatcagcgccggcgacgagggcgagttcagacagagcaacaacggcgtgccccccgtgcaggtgttctgggagagcaccggcagaacctactgggtgcactggcacatgctggagatcctgggcttcgaggaggacatcgaggacatggtggaggccgacgagtaccagggcgccgtggccagcagagtgctgggcagagccctgcccgcctggagatggagacccatgaccgagctgtacgccgtgccctacgtgctgcccgaggacgaggacaccgaggagtgcgagcacctgaccctggccgagtggtgggagctgctgttcttcatcaagaagctggacggccccgaccaccaggaggtgctgcagatcctgcaggagaacctggacggcgagatcctggacgacgagatcctggccgagctggccgtgcccatcgagctggcccaggacctgctgctgaccctgccccagagactgaacgacagcgccctgagagacctgatcaactgccacgtgtacaagaagtacggccccgaggccctggccggcaaccaggcctaccccagcctgctggaggcccaggaggacgtgctgctgctggacgcccaggcccaggccaaggacagcgaggacgccgccaaggtggaggccaaggagccccccagccagagccccaacacccccctgcagagactggtggagggctacggccccgccggcaagatcctgctggacctggagcaggccctgagcagcgagggcacccaggagaacaaggtgaagcccctgctgctgcagctgcagagacagccccagcccttcctggccctgatgcagagcctggacacccccgagaccaacagaaccctgcacctgaccgtgctgagaatcctgaagcagctggtggacttccccgaggccctgctgctgccctggcacgaggccgtggacgcctgcatggcctgcctgagaagccccaacaccgacagagaggtgctgcaggagctgatcttcttcctgcacagactgaccagcgtgagcagagactacgccgtggtgctgaaccagctgggcgccagagacgccatcagcaaggccctggagaagcacctgggcaagctggagctggcccaggagctgagagacatggtgttcaagtgcgagaagcacgcccacctgtacagaaagctgatcaccaacatcctgggcggctgcatccagatggtgctgggccagatcgaggaccacagaagaacccaccagcccatcaacatccccttcttcgacgtgttcctgagatacctgtgccagggcagcagcgtggaggtgaaggaggacaagtgctgggagaaggtggaggtgagcagcaacccccacagagccagcaagctgaccgaccacaaccccaagacctactgggagagcaacggcagcgccggcagccactacatcaccctgcacatgagaagaggcatcctgatcagacagctgaccctgctggtggccagcgaggacagcagctacatgcccgccagagtggtggtgtgcggcggcgacagcaccagcagcctgcacaccgagctgaacagcgtgaacgtgatgcccagcgccagcagagtgatcctgctggagaacctgaccagattctggcccatcatccagatcagaatcaagagatgccagcagggcggcatcgacaccagaatcagaggcctggagatcctgggccccaagcccaccttctggcccgtgttcagagagcagctgtgcagacacaccagactgttctacatggtgagagcccaggcctggagccaggacatggccgaggacagaagaagcctgctgcacctgagcagcagactgaacggcgccctgagacaggagcagaacttcgccgacagattcctgcccgacgacgaggccgcccaggccctgggcaagacctgctgggaggccctggtgagccccgtggtgcagaacatcaccagccccgacgaggacggcatcagccccctgggctggctgctggaccagtacctggagtgccaggaggccgtgttcaacccccagagcagaggccccgccttcttcagcagagtgagaagactgacccacctgctggtgcacgtggagccctgcgaggcccccccccccgtggtggccacccccagacccaagggcagaaacagaagccacgactggagcagcctggccaccagaggcctgcccagcagcatcatgagaaacctgaccagatgctggagagccgtggtggagaagcaggtgaacaacttcctgaccagcagctggagagacgacgacttcgtgcccagatactgcgagcacttcaacatcctgcagaacagcagcagcgagctgttcggccccagagccgccttcctgctggccctgcagaacggctgcgccggcgccctgctgaagctgcccttcctgaaggccgcccacgtgagcgagcagttcgccagacacatcgaccagcagatccagggcagcagaatcggcggcgcccaggagatggagagactggcccagctgcagcagtgcctgcaggccgtgctgatcttcagcggcctggagatcgccaccaccttcgagcactactaccagcactacatggccgacagactgctgggcgtggtgagcagctggctggagggcgccgtgctggagcagatcggcccctgcttccccaacagactgccccagcagatgctgcagagcctgagcaccagcaaggagctgcagagacagttccacgtgtaccagctgcagcagctggaccaggagctgctgaagctggaggacaccgagaagaagatccaggtgggcctgggcgccagcggcaaggagcacaagagcgagaaggaggaggaggccggcgccgccgccgtggtggacgtggccgagggcgaggaggaggaggaggagaacgaggacctgtactacgagggcgccatgcccgaggtgagcgtgctggtgctgagcagacacagctggcccgtggccagcatctgccacaccctgaaccccagaacctgcctgcccagctacctgagaggcaccctgaacagatacagcaacttctacaacaagagccagagccaccccgccctggagagaggcagccagagaagactgcagtggacctggctgggctgggccgagctgcagttcggcaaccagaccctgcacgtgagcaccgtgcagatgtggctgctgctgtacctgaacgacctgaaggccgtgagcgtggagagcctgctggccttcagcggcctgagcgccgacatgctgaaccaggccatcggccccctgaccagcagcagaggccccctggacctgcacgagcagaaggacatccccggcggcgtgctgaagatcagagacggcagcaaggagcccagaagcagatgggacatcgtgagactgatccccccccagacctacctgcaggccgagggcgaggacggccagaacctggagaagagaagaaacctgctgaactgcctgatcgtgagaatcctgaaggcccacggcgacgagggcctgcacatcgaccagctggtgtgcctggtgctggaggcctggcagaagggcccctgcccccccagaggcctggtgagcagcctgggcaagggcagcgcctgcagcagcaccgacgtgctgagctgcatcctgcacctgctgggcaagggcaccctgagaagacacgacgacagaccccaggtgctgagctacgccgtgcccgtgaccgtgatggagccccacaccgagagcctgaaccccggcagcagcggccccaacccccccctgaccttccacaccctgcagatcagaagcagaggcgtgccctacgccagctgcaccgccacccagagcttcagcaccttcagatag

SEQ ID NO: 66150 - protein, 1063 aa, Artificial Sequence
  derived and/or modified sequence
MTRLGWPSPCCARKQCSEGRTYSNAVISPNLETTRIMRVSHTFPVVDCTAACCDLSSCDLAWWFEGRCYLVSCPHKENCEPKKMGPIRSYLTFVLRPVQRPAQLLDYGDMMLNRGSPSGIWGDSPEDIRKDLTFLGKDWGLEEMSEYSDDYRELEKDLLQPSGKQEPRGSAEYTDWGLLPGSEGAFNSSVGDSPAVPAETQQDPELHYLNESASTPAPKLPERSVLLPLPTTPSSGEVLEKEKASQLQEQSSNSSGKEVLMPSHSLPPASLELSSVTVEKSPVLTVTPGSTEHSIPTPPTSAAPSESTPSELPISPTTAPRTVKELTVSAGDNLIITLPDNEVELKAFVAPAPPVETTYNYEWNLISHPTDYQGEIKQGHKQTLNLSQLSVGLYVFKVTVSSENAFGEGFVNVTVKPARRVNLPPVAVVSPQLQELTLPLTSALIDGSQSTDDTEIVSYHWEEINGPFIEEKTSVDSPVLRLSNLDPGNYSFRLTVTDSDGATNSTTAALIVNNAVDYPPVANAGPNHTITLPQNSITLNGNQSSDDHQIVLYEWSLGPGSEGKHVVMQGVQTPYLHLSAMQEGDYTFQLKVTDSSRQQSTAVVTVIVQPENNRPPVAVAGPDKELIFPVESATLDGSSSSDDHGIVFYHWEHVRGPSAVEMENIDKAIATVTGLQVGTYHFRLTVKDQQGLSSTSTLTVAVKKENNSPPRARAGGRHVLVLPNNSITLDGSRSTDDQRIVSYLWIRDGQSPAAGDVIDGSDHSVALQLTNLVEGVYTFHLRVTDSQGASDTDTATVEVQPDPRKSGLVELTLQVGVGQLTEQRKDTLVRQLAVLLNVLDSDIKVQKIRAHSDLSTVIVFYVQSRPPFKVLKAAEVARNLHMRLSKEKADFLLFKVLRVDTAGCLLKCSGHGHCDPLTKRCICSHLWMENLIQRYIWDGESNCEWSIFYVTVLAFTLIVLTGGFTWLCICCCKRQKRTKIRKKTKYTILDNMDEQERMELRPKYGIKHRSTEHNSSLMVSESEFDSDQDTIFSREKMERGNPKVSMNGSIRNGASFSYCSKDR

SEQ ID NO: 66151 - DNA, 3192 bp, Artificial Sequence
  derived and/or modified sequence
atgacccggctgggttggccctccccatgttgtgcaagaaagcagtgttccgaaggccgcacctactcaaatgcggtgatttctcccaacttggaaaccactcgtataatgcgggtgagtcacacatttcccgtggtagattgtactgcagcgtgttgcgacttatctagctgcgatttagcatggtggtttgaaggtaggtgttaccttgtgagctgccctcataaagaaaattgtgagcccaagaagatgggcccaattaggagttacctcacctttgttctgagacctgtgcagcgacctgcccagttactagattacggggatatgatgctcaacagaggcagccctagtggtatctggggagattctcccgaagacatccgaaaagatcttacttttctcggcaaggattggggactggaggaaatgtccgaatactctgatgactatagagagctggaaaaagacctactccagccttctgggaaacaagaaccccggggctccgccgaatacacagattggggcctgctccctgggagcgagggggcattcaattcttctgtgggcgattctccagcagtgccggcagagacccagcaggatccagagctgcattatcttaatgagtccgcctcaacacccgctccaaagctgcccgaaagatccgtgctgctccctctcccgacgacccctagctctggggaagtcctggaaaaagagaaagcgagccagctgcaagaacagagcagtaattcctcgggaaaggaggtgctgatgccctcccattctctgccgcccgccagcctggaactctctagcgtcacagtggagaagagccccgtgctcacagtgacaccaggaagcacagaacacagtatcccaacgccaccaacttctgctgccccatcagagtctacaccgagcgagctccctatcagcccaacaactgccccccgtaccgtgaaggagctgactgtgtccgccggggacaatctgattattacgttgcccgataacgaggtggaactgaaggcatttgtcgccccggccccaccagttgagactacttacaattacgagtggaacctgatcagtcacccaaccgattaccagggagaaattaagcagggccacaagcagacactgaacttgagccagctgtcagtcggactctatgtattcaaggtgacagtctccagcgagaatgcctttggcgaaggattcgtgaacgtcacagttaaacccgctcgcagagtgaacctccccccagtcgccgtagtgagccctcaacttcaagaactaaccctgcctctcacctctgccctcatcgatggatcccaatccaccgatgacaccgagattgtctcctaccactgggaagaaattaatggtcccttcatcgaagagaagacttccgtggattctccagtgctgagactgtccaacctggaccctggaaactacagcttcagactgactgtaacggacagcgacggcgcgactaatagcacgaccgccgccttgatcgtcaacaatgccgtggactaccccccagtggccaacgccggccctaatcacaccatcactctgccccagaactcgataacactgaacgggaaccagagcagtgatgatcatcaaatcgttctttacgaatggagtctggggccaggaagtgaaggcaagcacgtggtcatgcaaggagtacaaaccccttacctgcacctgtcagctatgcaggaaggcgactatacctttcagctgaaggtgacagactctagtaggcagcagagcacagcggtggtcaccgtgatcgtgcagccagagaataacagaccgccggtggcggtggctggccctgataaggagctgatttttcccgtcgagagcgccaccctagacggcagctcgagctccgacgatcacggtattgtcttttatcattgggagcacgtgagaggccccagcgctgtggaaatggaaaatatcgacaaggccattgccaccgtgaccgggctgcaggtgggaacctatcactttcgcctaaccgttaaagaccagcagggccttagcagcaccagtacactaactgtggcagtgaaaaaggaaaataatagcccccccagagccagagccggcggcaggcatgtcctggtcctgcccaacaatagcatcaccctcgacggatctaggagcacagacgatcaaagaattgtcagttacctgtggataagggacggccagagcccagccgctggtgatgtgatcgatggtagcgatcactcggtggccctccagttaactaacctggtcgagggtgtctacactttccatcttagagtcacagattcccagggagcatccgacacagatacggctacagtagaggttcagcctgatcccaggaaaagtggacttgtggaactgacattacaggtgggcgtgggacagttaacagagcagagaaaagacacactagtaagacagcttgcagtgctcctgaacgtgctcgactcggacattaaggtacagaagattcgagcacattccgatctgagcactgttattgtgttctacgtccagagtcgaccccccttcaaagtgctgaaggcagcggaggtggcacgcaatctgcacatgcgattaagtaaagagaaagcagattttctgctattcaaggtattaagagtcgataccgcagggtgtttgctgaaatgttcgggccacgggcactgcgaccctttaacaaaaagatgtatatgttcacatctgtggatggagaaccttattcagcgctacatttgggatggcgagagcaattgcgagtggtcaatcttttacgtgactgtactcgcctttaccttgattgtattgactggagggttcacctggctgtgcatctgttgttgcaagcgtcagaagcggacgaagatccggaagaagacaaaatacacaatcctggataatatggacgaacaggagcgcatggaactccggccaaagtacggcataaaacatcgctcaacagaacataacagctcccttatggtgtctgagtccgagtttgactcagatcaggacacaattttcagtcgcgagaaaatggaaagaggaaacccaaaggtgtcaatgaatggttccatacgaaacggggcttccttcagctactgctcgaaagatcgatag

SEQ ID NO: 66152 - DNA, 3192 bp, Artificial Sequence
  derived and/or modified sequence
atgacccggctgggctggcccagcccctgctgtgccaggaagcagtgcagcgagggccgcacctacagcaatgctgtgatcagccccaacctggagaccacccgcatcatgagggtgagccacaccttccctgtggtggactgcacagctgcctgctgtgacctgagcagctgtgacctggcctggtggtttgagggccgctgctacctggtgtcctgcccccacaaggagaactgtgagcccaagaagatgggccccatccgcagctacctgacctttgtgctgcggcctgtgcagaggcctgcccagctgctggactatggagacatgatgctgaacagaggcagccccagcggcatctggggagacagccctgaggacatcaggaaggacctgaccttcctgggcaaggactggggcctggaggagatgtctgagtacagtgatgactaccgggagctggagaaggacctgctgcagcccagcggcaagcaggagccccggggcagcgctgagtacacagactggggcctgctgcccggcagcgagggcgccttcaacagctctgtgggggacagccctgctgtgcctgctgagacccagcaggaccctgagctgcactacctgaatgaaagtgccagcaccccagcccccaagctgcctgagaggtctgtgctgctgcccctgcccaccacccccagcagtggagaggtgctggagaaggagaaggccagccagctgcaggagcagagcagcaacagcagcggcaaggaggtgctgatgcccagccacagcctgcccccagccagcctggagctgagctctgtgacagtggagaagagccctgtgctgactgtgaccccaggcagcacagagcacagcatccccaccccacccaccagcgctgcccccagcgagagcacccccagcgagctgcccatcagccccaccacagcccccaggacagtgaaggagctgactgtgtctgctggggacaacctgatcatcaccctgcctgacaatgaggtggagctgaaggcctttgtggccccagcccctcctgtggagaccacctacaactatgagtggaacctgatcagccaccccacagactaccagggcgagatcaagcagggccacaagcagaccctgaacctgagccagctgtctgtgggcctgtatgtgttcaaggtgacagtgtccagtgaaaatgccttcggggagggctttgtgaatgtgacagtgaagccagccaggagagtgaacctgccccctgtggccgtggtgagcccccagctgcaggagctgaccctgcccctgaccagcgccctgattgatggcagccagagcacagatgacacagagatcgtgtcctaccactgggaggagatcaatggccccttcatcgaggagaagacctctgtggacagccctgtgctgcggctgagcaacctggaccccggcaactacagcttccggctgactgtgacagacagtgatggagccaccaacagcaccacagctgccctgattgtgaacaatgctgtggactacccacctgtggccaatgccggccccaaccacaccatcaccctgccccagaacagcatcaccctgaatggaaaccagagcagtgatgaccaccagatcgtgctgtatgagtggagcctgggccctggcagcgagggcaagcacgtggtgatgcagggcgtgcagaccccctacctgcacctgagcgccatgcaggagggggactacaccttccagctgaaggtgacagacagcagccggcagcagagcacagctgtggtgacagtgattgtgcagcctgagaacaacagacctcctgtggccgtggccggccctgacaaggagctgatcttccctgtggagagcgccaccctggatggcagcagcagcagtgatgaccacggcatcgtgttctaccactgggagcacgtgcggggccccagcgctgtggagatggagaacatcgacaaggccatcgccaccgtgacaggcctgcaggtgggcacctaccacttccggctgactgtgaaggaccagcagggcctgagcagcaccagcaccctgactgtggccgtgaagaaggagaacaacagccccccccgggcccgggccggcggccgccacgtgctggtgctgcccaacaacagcatcaccctggatggcagccgcagcacagatgaccagagaattgtgtcctacctgtggatcagagatggccagagccctgctgctggagatgtgattgatggcagtgaccacagcgtggccctgcagctgaccaacctggtggagggcgtgtacaccttccacctgcgggtgacagacagccagggcgccagtgacacagacacagccaccgtggaggtgcagcctgaccccaggaagagcggcctggtggagctgaccctgcaggtgggcgtgggccagctgacagagcagaggaaggacaccctggtgcggcagctggccgtgctgctgaatgtgctggacagcgacatcaaggtgcagaagatccgggcccacagcgacctgagcaccgtcatcgtgttctacgtgcagagccggccccccttcaaggtgctgaaggctgctgaggtggccaggaacctgcacatgaggctgagcaaggagaaggctgacttcctgctcttcaaggtgctgcgggtggacacagctggctgcctgctgaagtgcagcggccacggccactgtgaccccctgaccaagcgctgcatctgcagccacctgtggatggagaacctgatccagcgctacatctgggatggagagagcaactgtgagtggagcatcttctacgtgacagtgctggccttcaccctcatcgtgctgactggaggcttcacctggctgtgcatctgctgctgcaagaggcagaagaggaccaagatcaggaagaagaccaagtacaccatcctggacaacatggatgagcaggagaggatggagctgcggcccaagtatggcatcaagcacaggagcacagagcacaacagcagcctgatggtgtctgagagcgagtttgacagcgaccaggacaccatcttcagccgggagaagatggagcggggcaaccccaaggtgtccatgaatggcagcatcagaaatggagccagcttctcctactgcagcaaggacagatag

SEQ ID NO: 66153 - DNA, 3192 bp, Artificial Sequence
  derived and/or modified sequence
atgacccggctgggctggcccagcccctgctgcgcccggaagcagtgctcagagggtcgcacttattcaaacgcagtgatatccccgaaccttgagactacacgcattatgcgggtaagccatacttttcccgtcgtcgactgtactgctgcctgctgtgatctgagtagttgtgatctggcctggtggtttgagggccggtgctacctcgtgagttgccctcacaaagaaaactgtgaaccaaaaaagatgggacccatccgatcgtacctgacttttgtcctccggcctgtgcaacggcccgctcagcttcttgactacggcgatatgatgcttaaccgggggtcgccctcgggaatttggggagactcgcccgaggatatccgaaaagatctgaccttcctgggtaaggattggggcctggaggaaatgagcgagtactcagacgactatcgggaactggagaaagacctgcttcagccgtcaggaaagcaagagcctcgcggctctgccgaatacaccgactgggggttgctgccaggctctgagggcgcattcaatagctcagtcggtgattcacctgctgtacctgccgagacccagcaggaccctgagctgcattacctgaacgagtccgctagcacccctgcacctaagctgcccgaaaggtccgtgttgctgcccttacccacaacaccctcatctggtgaggtgcttgagaaggagaaagcctcacagcttcaagagcagtcatctaacagcagcgggaaagaagtgcttatgccaagccatagtctgccgcccgcaagcctggagctatcatctgtgaccgtggagaaaagcccagtactcactgtcacaccaggcagcactgagcattcaattcccaccccacccacaagcgccgcgcctagcgaatctacccccagcgaactgcctatttctccaaccactgcacctaggacagtaaaggagctaacggtctccgctggggataatcttataattaccctgcccgacaacgaagttgagttgaaagcgtttgtcgcccctgccccacccgttgagaccacatacaactatgaatggaacctgatctctcatcccactgactaccagggagagattaaacagggccataagcaaactctcaacctgtcccaattgtccgtcggcctgtatgtgtttaaggtgaccgttagtagcgaaaacgcgtttggggagggcttcgtaaacgtcaccgtcaagccagccagaagggtcaatttgccaccagttgccgtagtctccccacagttgcaggagttgaccctgccactaactagcgctctaattgacggttcccagagcaccgacgacactgagatcgtgtcttatcattgggaggagatcaacggccctttcatcgaggagaaaacttcagtcgattctcctgtgctaaggctttctaatcttgacccaggcaactactccttccgcctcacagtgactgatagcgacggcgctaccaattctacaacggccgccctgatcgtcaataatgctgttgattaccctcctgtggcaaatgccggacccaaccatacaatcactctgccacaaaacagtataacattgaacggtaaccaatcctcagatgaccatcagattgtcttgtacgagtggagcctaggccccggttcagagggtaagcatgttgtgatgcaaggggtacaaaccccgtatctgcatctttcggccatgcaggagggagactatacattccagcttaaggtgaccgattcctctagacaacagagcaccgccgttgtcaccgtcatcgtgcaacccgaaaacaacaggccacccgtcgccgtagccggaccagataaggaactgatctttccagtggaatctgctaccttagatggctccagctcatcagacgatcatggcattgtgttctaccattgggaacacgtgcgcggcccgagcgccgtggaaatggaaaatatagacaaagcaattgctacggtgaccggtttacaggtaggcacttatcatttccgcctcaccgtgaaagaccagcagggtctttctagcacatccaccctgaccgtcgcggtgaagaaagaaaacaattccccacctcgagcgcgggccggaggccgacatgtgctcgtgttgcctaataattcgataacccttgacgggagccgctctactgacgaccagcggattgtttcttacctgtggatacgcgacgggcaaagcccagccgccggagatgtgatcgacggctccgaccatagtgtggctctacagctgaccaatctggtggagggggtttatacgttccatctgagagtgactgattcccaaggcgcaagtgacaccgataccgccacagtagaggtgcagcccgacccccggaaaagtgggctggtggagttgacacttcaagtgggggtcggacagctgactgaacagcgaaaggatacgcttgttaggcagttagcagtgctactgaacgtgttggactccgatatcaaagtgcaaaaaatcagagcccattcggacctgagtaccgtgatcgtgttttatgtgcagtcgcgccccccttttaaagtgctgaaagcagccgaagtggctcggaacttacacatgcgcctaagcaaagagaaagcagatttcctgctgttcaaggtgctgcgcgtggatactgctggctgcctgttaaaatgctccggccatgggcattgcgaccctctaacaaaaagatgtatctgtagccacctgtggatggaaaatcttatacagcgttatatttgggacggtgaatctaattgcgagtggtccatcttctatgtcaccgtgctagcgtttaccttgattgtcctgaccggggggtttacatggctgtgtatctgctgctgtaagagacagaagcgcaccaagatcaggaagaaaactaagtacacaattttagataacatggatgaacaagaaaggatggagctccgtcccaagtacggcatcaagcaccgctctacggagcataacagctcactcatggtaagcgagagcgagttcgactccgatcaggatactattttcagtcgggagaagatggagagggggaatcccaaagtttctatgaatggcagcattcggaacggagctagtttcagctactgttccaaggataggtag

SEQ ID NO: 66154 - DNA, 3192 bp, Artificial Sequence
  derived and/or modified sequence
atgacccgcctggggtggccaagtccctgttgtgccaggaagcagtgttcagagggccgtacatactcaaacgcagttatttcgccaaatctggagacgaccaggatcatgagggtgtcgcacactttccctgtggtcgactgcactgctgcctgctgcgacctgtcctcctgcgatctggcgtggtggttcgagggtcgttgctacttggtcagttgcccacataaggaaaactgtgagccaaagaagatgggcccaatccgctcctacctgacctttgtcctgcgacctgttcagagacccgctcagctcctcgattacggggatatgatgttaaacagggggagcccctccggaatctggggcgactcacctgaggatatcagaaaggatctcacctttcttggaaaagactggggcctggaagaaatgtccgaatactctgatgactatagggagcttgagaaggacctgctacagccgtcaggcaaacaggagccgcgaggcagtgcggaatacaccgattggggcttactgccaggatccgagggggcattcaacagtagcgtcggcgacagccctgccgttcctgcagaaacccagcaggaccctgaactacactatctcaacgagagcgcctcaaccccagcaccaaagctgcccgaacgatccgtactgctccctctgcccactaccccaagcagcggcgaggtgttagagaaagagaaagcctcacagctgcaagaacagtcttctaattcctctgggaaggaagttctcatgccctcacactcgctgccacctgcttcacttgaactgtcttctgttacggtcgaaaagagtcctgttttgacagtaacgcccggatccacggagcactcaataccgacgccacccaccagtgcagcgccaagcgagtcaaccccctcagagctcccaatttcgcctactactgccccaaggaccgtgaaagagctcaccgtgagcgccggagataatctgatcattacgctgcctgataacgaggtggaactcaaagccttcgtggccccagctcccccagtggagaccacttataactacgaatggaacctgattagccaccctacagactaccagggtgaaatcaaacaaggccataagcagacgttgaatttgtcacagctgtcggtgggattgtacgtgttcaaggtcaccgtttcctccgagaatgcatttggcgagggattcgtgaacgttactgtcaaacccgcacggcgagttaatctcccccctgtggctgtagtttctccgcaattgcaggaacttaccctaccactaacatcagccctcatagacggtagtcagagcaccgatgacacagagatcgttagctatcactgggaggaaatcaatggtccgtttattgaagagaagacgagcgtggattccccggtgctgaggctttcgaatctggaccctggcaactactcatttcgcttaacagtgactgactccgatggagcaactaactccaccactgccgctctaatcgtgaacaacgcagtagactatccgccagtggcaaacgctgggccaaaccacacgatcacactgccccagaattccattacccttaacgggaaccagagttcggacgaccaccagatcgtactgtacgagtggagcttgggaccagggagcgagggaaagcacgtggttatgcagggagtgcaaaccccatacctgcacctctccgctatgcaagagggggattatactttccagctcaaagttaccgacagttcccgccagcaatctaccgccgtggtaaccgttatagtccagcctgaaaataatcgaccacccgtggccgtcgctgggccagacaaggagcttatctttccagtagagagtgctactctcgacggcagttcctctagtgatgatcacgggatagtgttctatcactgggagcacgtcaggggtccaagcgccgtcgaaatggaaaacattgacaaggccatagccactgtcacagggctgcaggttggaacataccatttcaggctgaccgtgaaggatcagcagggcctgtcctcaacctcaaccctcacggttgctgttaagaaggagaataactctcctccaagggcacgcgctgggggtcggcacgtgctcgttctaccaaacaactcaattaccctagatggttcccgttccactgatgaccaacgcattgttagctacctttggatacgcgatggacagagtccagcagcaggcgacgtgatcgatggttcagaccatagcgtggctcttcagctgactaacctggtggaaggcgtgtacactttccacctcagagtcacagacagccagggagcttccgacacagatactgccacagttgaagtgcagcccgaccctcgcaagtctggacttgtcgaactcactcttcaggtcggcgtcggacagctgaccgagcagagaaaagatacactcgtacgacagctggctgttttgctgaacgtgctggactcggacattaaggtgcagaaaattcgggctcacagtgacctgtccacagtaatcgtgttttatgtgcagtcacggccaccctttaaggtgttaaaagcagctgaagttgcaagaaatctgcatatgcgcctgtctaaggaaaaagctgatttccttctctttaaggtacttagagtagatacagcgggttgcctgttaaaatgcagtggacatgggcattgtgacccccttaccaagcggtgcatttgttcacacctctggatggaaaacctgatacagcgatacatctgggacggagaatccaactgcgagtggtctatcttctatgttacggtattggccttcaccctcattgtgctgaccggtggcttcacttggttgtgtatatgctgttgcaagaggcagaagagaacaaagatcaggaagaagacgaagtataccattctggataacatggacgagcaggagcggatggagctacggccaaaatacggcatcaagcacagatcaactgaacacaattcaagtctgatggtatcggaaagcgaattcgacagcgaccaggataccatcttctccagagagaagatggagagaggtaacccgaaggtgtcaatgaacggcagtatccggaatggtgcatcctttagttattgttccaaggacaggtag

SEQ ID NO: 66155 - DNA, 6896 bp, Artificial Sequence
  derived and/or modified sequence
gctgccgcgggcggtgggcggggatcccccgggggtgcaaccttgctccacctgtgctgccctcggcgggcctggctggccccgcgcagagcggcggcggcgctcgctgtcactgccggaggtgagagcgcagcagtagcttcagcctgtcttgggcttggtccagattcgctcctctggggctacgtcccggggaagaggaagcgaggattttgctggggtggggctgtacctcttaacagcaggtgcgcgcgcgagggtgtgaacgtgtgtgtgtgtgtgtgtgtgtgtgtgtgtgtgtgtgtgtgtgtgtgtaagacctgcgatgacgacgaggaggaacaagtgggacggcgagtgatgctcagggccagcagcaacgcatggggcgagcttcagtgtcgccagcagtgaccacagttcttgaggccaaatctggctcctaaaaaacatcaaaggaagcttgcaccaaactctcttcagggccgcctcagaagcctgccatcacccactgtgtggtgcacaatggcgccccccacaggtgtgctctcttcattgctgctgctggtgacaattgcagtttgcttatggtggatgcactcatggcaaaaaaatcactggtgagcatcatttaagaagacccatgactagactgggctggccgagcccatgttgtgcccgtaagcagtgcagcgaggggaggacatattccaatgcagtcatttcacctaacttggaaaccaccagaatcatgcgggtgtctcacaccttccctgtcgtagactgcacggccgcttgctgtgacctgtccagctgtgacctggcctggtggttcgagggccgctgctacctggtgagctgcccccacaaagagaactgtgagcccaagaagatgggccccatcaggtcttatctcacttttgtgctccggcctgttcagaggcctgcacagctgctggactatggggacatgatgctgaacaggggctccccctcggggatctggggggactcacctgaggatatcagaaaggacttgacctttctaggcaaagattggggcctagaggagatgtctgagtactcagatgactaccgggagctggagaaggacctcttgcaacccagtggcaagcaggagcccagagggagtgccgagtacacggactggggcctactgccgggcagcgagggggccttcaactcctctgttggagacagtcctgcggtgccagcggagacgcagcaggaccctgagctccattacctgaatgagtcggcttcaacccctgccccaaaactccctgagagaagtgtgttgcttcccttgccgactactccatcttcaggagaggtgttggagaaagaaaaggcttctcagctccaggaacaatccagcaacagctctggaaaagaggttctaatgccttcccatagtcttcctccggcaagcctggagctcagctcagtcaccgtggagaaaagcccagtgctcacagtcaccccggggagtacagagcacagcatcccaacacctcccactagcgcagccccctctgagtccaccccatctgagctacccatatctcctaccactgctcccaggacagtgaaagaacttacggtatcggctggagataacctaattataactttacccgacaatgaagttgaactgaaggcctttgttgcgccagcgccacctgtagaaacaacctacaactatgaatggaatttaataagccaccccacagactaccaaggtgaaataaaacaaggacacaagcaaactcttaacctctctcaattgtccgtcggactttatgtcttcaaagtcactgtttctagtgaaaacgcctttggagaaggatttgtcaatgtcactgttaagcctgccagaagagtcaacctgccacctgtagcagttgtttctccccaactgcaagagctcactttgcctttgacgtcagccctcattgatggcagccaaagtacagatgatactgaaatagtgagttatcattgggaagaaataaacgggcccttcatagaagagaagacttcagttgactctcccgtcttacgcttgtctaaccttgatcctggtaactatagtttcaggttgactgttacagactcggacggagccactaactctacaactgcagccctaatagtgaacaatgctgtggactacccaccagttgctaatgcaggaccaaatcacaccataactttgccccaaaactccatcactttgaatggaaaccagagcagtgacgatcaccagattgtcctctatgagtggtccctgggtcctgggagtgagggcaaacatgtggtcatgcagggagtacagacgccataccttcatttatctgcaatgcaggaaggagattatacatttcagctgaaggtgacagattcttcaaggcaacagtctactgctgtggtgactgtgattgtccagcctgaaaacaatagacctccagtggctgtggccggccctgataaagagctgatcttcccagtggaaagtgctaccctggatgggagcagcagcagcgatgaccacggcattgtcttctaccactgggagcacgtcagaggccccagtgcagtggagatggaaaatattgacaaagcaatagccactgtgactggtctccaggtggggacctaccacttccgtttgacagtgaaagaccagcagggactgagcagcacgtccaccctcactgtggctgtgaagaaggaaaataatagtcctcccagagcccgggctggtggcagacatgttcttgtgcttcccaataattccattactttggatggttcaaggtctactgatgaccaaagaattgtgtcctatctgtggatccgggatggccagagtccagcagctggagatgtcatcgatggctctgaccacagtgtggctctgcagcttacgaatctggtggagggggtgtacactttccacttgcgagtcaccgacagtcagggggcctcggacacagacactgccactgtggaagtgcagccagaccctaggaagagtggcctggtggagctgaccctgcaggttggtgttgggcagctgacagagcagcggaaggacacccttgtgaggcagctggctgtgctgctgaacgtgctggactcggacattaaggtccagaagattcgggcccactcggatctcagcaccgtgattgtgttttatgtacagagcaggccgcctttcaaggttctcaaagctgctgaagtggcccgaaatctgcacatgcggctctcaaaggagaaggctgacttcttgcttttcaaggtcttgagggttgatacagcaggttgccttctgaagtgttctggccatggtcactgcgaccccctcacaaagcgctgcatttgctctcacttatggatggagaaccttatacagcgttatatctgggatggagagagcaactgtgagtggagtatattctatgtgacagtgttggcttttactcttattgtgctaacaggaggtttcacttggctttgcatctgctgctgcaaaagacaaaaaaggactaaaatcaggaaaaaaacaaagtacaccatcctggataacatggatgaacaggaaagaatggaactgaggcccaaatatggtatcaagcaccgaagcacagagcacaactccagcctgatggtatccgagtctgagtttgacagtgaccaggacacaatcttcagccgagaaaagatggagagagggaatccaaaggtttccatgaatggttccatcagaaatggagcttccttcagttattgctcaaaggacagataatggcgcagttcattgtaaagtggaaggaccccttgaatccaagaccagtcagtgggagttacagcacaaaacccactcttttagaatagttcattgaccttcttccccagtgggttagatgtgtatccccacgtactaaaagaccggtttttgaaggcacaaaacaaaaactttgctcttttaactgagatgcttgttaatagaaataaaggctgggtaaaactctaaggtatatacttaaaagagttttgagtttttgtagctggcacaatctcatattaaagatgaacaacgatttctatctgtagaaccttagagaaggtgaatgaaacaaggttttaaaaagggatgatttctgtcttagctgctgtgattgcctctaaggaacagcattctaaacacggtttctcttgtaggacctgcagtcagatggctgtgtatgttaaaatagcttgtctaagaggcacgggccatctgtggaggtacggagtcttgcatgtagcaagctttctgtgctgacggcaacactcgcacagtgccaagccctcctggtttttaattctgtgctatgtcaatggcagttttcatctctctcaagaaagcagctgttggccattcaagagctaaggaagaatcgtattctaaggactgaggcaatagaaaggggaggaggagcttaatgccgtgcaggttgaaggtagcattgtaacattatcttttctttctctaagaaaaactacactgactcctctcggtgttgtttagcagtatagttctctaatgtaaacggatccccagtttacattaaatgcaatagaagtgattaattcattaagcatttattatgttctgtaggctgtgcgtttggactgccatagatagggataacgactcagcaattgtgtatatattccaaaactctgaaatacagtcagtcttaacttggatggcgtggttatgatactctggtccccgacaggtactttccaaaataacttgacatagatgtattcacttcatatgtttaaaaatacatttaagtttttctaccgaataaatcttatttcaaacatgaaagacaattaaaacattcccacccacaaagcagtactcccgagcaattaactggagttaattgtagcctgctacgttgactggttcagggtagttccccatccacccttggtcctgaggctggtggccttggtggtgcccttggcattttttgtgggaagattagaatgagagatagaaccagtgttgtggtaccaagtgtgagcacacctaaacaatatcctgttgcacaatgcttttttaacacatgggaaaactaggaatgcattgctgatgaagaagcaaggtatttaaacaccagggcaggagtgccagagaaaatgtttccccatgggttcttaaaaaaaattcagcttttaggtgcttttgtcatctcccgcagtattcatcctcatgggaccatcttatttttacttattgtaatttactggggaaaggcagaactaaaaagtgtgtcattttatttttaaaataattgctttgcttatgcctacactttctgtataactagccaattcaatactgtctatagtgttagaaggaaaatgtgatttttttttttaaccagtattgagcttcataagcctagaatctgccttatcaggtgaccagggttatggttgtttgcatgcaaatgtgaatttctggcataggggacagcagcccaaatgtaaagtcatcgggcgtaatgaggaagaagggagtgaacatttaccgctttatgtacataacatatgcagtttacatactcatttgatccttataatcaaccttgaagaggagatactatcattcttatgttgcagatagccctctgaaggcccagagaggttaaataacttcccagaggtcatggccaagaagtagtggctccaagaactgaatgcaaattttttaaactgtagagttctgctttccactaaacaaagaactcctgccttgatggatggagggcaaattctggtggaacttttgggccacctgaaagttctattcccaggactaagaggaatttcttttaatggatccagagagccaaggtcagagggagagatggcctgcatagtctcctgtggatcacacccgggccacccctccctctaggtttacagtggacttcttctgcccctcctccttttctgtccttggccatctcagcctggcctctctgatccttccatcacagaaggatcttgaatctctgggaaatcaaacatcacagtagtgatcagaaagtgagtcctgtcttgtcaccccatttctcatcagaacaaagcacgagatggaatgaccaaccagcattcttcatggtggactgcttatcattgaggatctttgggagataaagcacgctaagagctctggacagagaaaaacaggccctagaatatgggagtgggtgtttgtagggctcacaggctaacaagcactttagttgctggtttacattcaatgaaggaggattcatacccatggcattacaaggctaagcatgtgtatgactaaggaactatctgaaaaacatgcagcaaggtaagaaaatgtaccactcaacaagccagtgatgccaccttttgtgcgcggggaggagagtgactaccattgttttttgtgtgacaaagctatcatggactattttaatcttggttttattgcttaaaatatattatttttccctatgtgttgacaaggtatttctaatatcacactattaaatatatgcactaatctaaataaaggtgtctgtattttctgtaatgcttatttttagggggaaatttgttttctttatgcttcagggtagagggatttcccttgagtataggtcagcaaactgtggcctacagcctgtgtgtgcacgccccatgagccgaaaagtgggtcttatgttttcaaatggttaaaaataaataaaaaaatttgaaacatgtgaactatatgacattcagatttgtgttcataaataaagttttattggaacatatcc

SEQ ID NO: 66156 - DNA, 3192 bp, Artificial Sequence
  derived and/or modified sequence
atgaccagactgggctggcccagcccctgctgcgccagaaagcagtgcagcgagggcagaacctacagcaacgccgtgatcagccccaacctggagaccaccagaatcatgagagtgagccacaccttccccgtggtggactgcaccgccgcctgctgcgacctgagcagctgcgacctggcctggtggttcgagggcagatgctacctggtgagctgcccccacaaggagaactgcgagcccaagaagatgggccccatcagaagctacctgaccttcgtgctgagacccgtgcagagacccgcccagctgctggactacggcgacatgatgctgaacagaggcagccccagcggcatctggggcgacagccccgaggacatcagaaaggacctgaccttcctgggcaaggactggggcctggaggagatgagcgagtacagcgacgactacagagagctggagaaggacctgctgcagcccagcggcaagcaggagcccagaggcagcgccgagtacaccgactggggcctgctgcccggcagcgagggcgccttcaacagcagcgtgggcgacagccccgccgtgcccgccgagacccagcaggaccccgagctgcactacctgaacgagagcgccagcacccccgcccccaagctgcccgagagaagcgtgctgctgcccctgcccaccacccccagcagcggcgaggtgctggagaaggagaaggccagccagctgcaggagcagagcagcaacagcagcggcaaggaggtgctgatgcccagccacagcctgccccccgccagcctggagctgagcagcgtgaccgtggagaagagccccgtgctgaccgtgacccccggcagcaccgagcacagcatccccaccccccccaccagcgccgcccccagcgagagcacccccagcgagctgcccatcagccccaccaccgcccccagaaccgtgaaggagctgaccgtgagcgccggcgacaacctgatcatcaccctgcccgacaacgaggtggagctgaaggccttcgtggcccccgccccccccgtggagaccacctacaactacgagtggaacctgatcagccaccccaccgactaccagggcgagatcaagcagggccacaagcagaccctgaacctgagccagctgagcgtgggcctgtacgtgttcaaggtgaccgtgagcagcgagaacgccttcggcgagggcttcgtgaacgtgaccgtgaagcccgccagaagagtgaacctgccccccgtggccgtggtgagcccccagctgcaggagctgaccctgcccctgaccagcgccctgatcgacggcagccagagcaccgacgacaccgagatcgtgagctaccactgggaggagatcaacggccccttcatcgaggagaagaccagcgtggacagccccgtgctgagactgagcaacctggaccccggcaactacagcttcagactgaccgtgaccgacagcgacggcgccaccaacagcaccaccgccgccctgatcgtgaacaacgccgtggactacccccccgtggccaacgccggccccaaccacaccatcaccctgccccagaacagcatcaccctgaacggcaaccagagcagcgacgaccaccagatcgtgctgtacgagtggagcctgggccccggcagcgagggcaagcacgtggtgatgcagggcgtgcagaccccctacctgcacctgagcgccatgcaggagggcgactacaccttccagctgaaggtgaccgacagcagcagacagcagagcaccgccgtggtgaccgtgatcgtgcagcccgagaacaacagaccccccgtggccgtggccggccccgacaaggagctgatcttccccgtggagagcgccaccctggacggcagcagcagcagcgacgaccacggcatcgtgttctaccactgggagcacgtgagaggccccagcgccgtggagatggagaacatcgacaaggccatcgccaccgtgaccggcctgcaggtgggcacctaccacttcagactgaccgtgaaggaccagcagggcctgagcagcaccagcaccctgaccgtggccgtgaagaaggagaacaacagcccccccagagccagagccggcggcagacacgtgctggtgctgcccaacaacagcatcaccctggacggcagcagaagcaccgacgaccagagaatcgtgagctacctgtggatcagagacggccagagccccgccgccggcgacgtgatcgacggcagcgaccacagcgtggccctgcagctgaccaacctggtggagggcgtgtacaccttccacctgagagtgaccgacagccagggcgccagcgacaccgacaccgccaccgtggaggtgcagcccgaccccagaaagagcggcctggtggagctgaccctgcaggtgggcgtgggccagctgaccgagcagagaaaggacaccctggtgagacagctggccgtgctgctgaacgtgctggacagcgacatcaaggtgcagaagatcagagcccacagcgacctgagcaccgtgatcgtgttctacgtgcagagcagaccccccttcaaggtgctgaaggccgccgaggtggccagaaacctgcacatgagactgagcaaggagaaggccgacttcctgctgttcaaggtgctgagagtggacaccgccggctgcctgctgaagtgcagcggccacggccactgcgaccccctgaccaagagatgcatctgcagccacctgtggatggagaacctgatccagagatacatctgggacggcgagagcaactgcgagtggagcatcttctacgtgaccgtgctggccttcaccctgatcgtgctgaccggcggcttcacctggctgtgcatctgctgctgcaagagacagaagagaaccaagatcagaaagaagaccaagtacaccatcctggacaacatggacgagcaggagagaatggagctgagacccaagtacggcatcaagcacagaagcaccgagcacaacagcagcctgatggtgagcgagagcgagttcgacagcgaccaggacaccatcttcagcagagagaagatggagagaggcaaccccaaggtgagcatgaacggcagcatcagaaacggcgccagcttcagctactgcagcaaggacagatag

SEQ ID NO: 66157 - protein, 1011 aa, Artificial Sequence
  derived and/or modified sequence
MAPPTGVLSSLLLLVTIAGCARKQCSEGRTYSNAVISPNLETTRIMRVSHTFPVVDCTAACCDLSSCDLAWWFEGRCYLVSCPHKENCEPKKMGPIRSYLTFVLRPVQRPAQLLDYGDMMLNRGSPSGIWGDSPEDIRKDLTFLGKDWGLEEMSEYSDDYRELEKDLLQPSGKQEPRGSAEYTDWGLLPGSEGAFNSSVGDSPAVPAETQQDPELHYLNESASTPAPKLPERSVLLPLPTTPSSGEVLEKEKASQLQEQSSNSSGKEVLMPSHSLPPASLELSSVTVEKSPVLTVTPGSTEHSIPTPPTSAAPSESTPSELPISPTTAPRTVKELTVSAGDNLIITLPDNEVELKAFVAPAPPVETTYNYEWNLISHPTDYQGEIKQGHKQTLNLSQLSVGLYVFKVTVSSENAFGEGFVNVTVKPARRVNLPPVAVVSPQLQELTLPLTSALIDGSQSTDDTEIVSYHWEEINGPFIEEKTSVDSPVLRLSNLDPGNYSFRLTVTDSDGATNSTTAALIVNNAVDYPPVANAGPNHTITLPQNSITLNGNQSSDDHQIVLYEWSLGPGSEGKHVVMQGVQTPYLHLSAMQEGDYTFQLKVTDSSRQQSTAVVTVIVQPENNRPPVAVAGPDKELIFPVESATLDGSSSSDDHGIVFYHWEHVRGPSAVEMENIDKAIATVTGLQVGTYHFRLTVKDQQGLSSTSTLTVAVKKENNSPPRARAGGRHVLVLPNNSITLDGSRSTDDQRIVSYLWIRDGQSPAAGDVIDGSDHSVALQLTNLVEGVYTFHLRVTDSQGASDTDTATVEVQPDPRKSGLVELTLQVGVGQLTEQRKDTLVRQLAVLLNVLDSDIKVQKIRAHSDLSTVIVFYVQSRPPFKVLKAAEVARNLHMRLSKEKADFLLFKVLRVDTAGCLLKCSGHGHCDPLTKRCICSHLWMENLIQRYIWDGESNCGIKHRSTEHNSSLMVSESEFDSDQDTIFSREKMERGNPKVSMNGSIRNGASFSYCSKDR

SEQ ID NO: 66158 - DNA, 3036 bp, Artificial Sequence
  derived and/or modified sequence
atggccccaccaaccggggtgctgtcttccttgcttcttctcgtaacaatcgctggatgtgcccgtaaacaatgtagcgaaggccggacatattccaatgccgtgatcagtcccaatttagaaaccacccggataatgcgggtgtcacacacatttcccgtggttgactgcacagctgcttgttgtgacttaagctcttgtgatctggcatggtggttcgagggtcgctgctatctagtcagctgtccccataaggagaattgcgaacccaagaagatggggcctatccgaagctaccttacctttgttctcaggccggtccaacgccccgcccagctgttggattatggcgatatgatgctgaaccgaggcagccccagcgggatttggggcgactctcccgaggatatccggaaggatttgacattcctgggtaaggactggggtctggaagagatgagcgagtattcggacgattaccgtgaattggagaaggacctgttacagcccagcgggaagcaggaaccacgaggatccgctgagtatacagactgggggctgctcccaggttctgaaggcgccttcaactcgtctgtgggagatagtccggctgtccccgccgagacacagcaggatccagaacttcattacctcaatgaatctgccagcactccagccccaaaactgccggaacgcagcgtacttctccctttgcccaccaccccctcaagcggcgaggtcctggaaaaagagaaggcatctcaacttcaggaacagagcagcaatagtagcgggaaggaggtcctgatgccctctcattctctcccacccgcctccctggagcttagttccgttaccgtggaaaagtcccctgtgctaacggtgaccccaggcagtactgagcacagcattcccacacctcccacatctgctgccccgtccgagtccacaccaagcgagttgcctatctctcctactaccgccccgcggacggttaaagaactgactgtatccgcaggagataacttaatcatcaccctgcccgacaatgaggtagagttgaaggcatttgtggcaccagcgccgcccgtggagaccacctataactacgagtggaaccttattagtcacccaaccgactatcaaggggagattaagcagggccacaaacaaactttgaatctatcccagctgtcagtggggctatatgtgtttaaagtgaccgtaagctccgaaaatgcgttcggggagggcttcgtgaacgtgacagtgaaacccgcccgcagggttaatttaccacccgtggcagtggttagtcctcagctccaagaactgactcttccactcacttcagccctaattgatggaagccagtccactgacgacacagagattgttagctaccactgggaggagattaacggcccattcatcgaagagaaaacctcagttgattcccctgtcctgagattgtcaaatttggaccccggaaactacagcttcaggctgactgtgacagactcagacggagcaaccaacagcacaactgcagctctcattgtgaataacgctgtggattaccctcctgtggctaatgccggacccaaccacaccatcacgctgccccagaattcgatcaccctcaacgggaaccaatcgtccgatgaccaccagatagtactgtatgagtggtccttgggtccaggatccgagggcaagcatgtggtcatgcagggagtccagacgccatatttacacctgtccgcgatgcaggaaggcgactacaccttccagctgaaagtcaccgacagttctcgtcagcagtccacagcggtggtgacagttattgtccagcctgagaataatcggccacccgtggcagttgcaggccccgataaggagcttatctttcccgtcgagtctgccaccctagatggcagtagctccagcgatgatcatggcatcgtgttctatcattgggagcatgtgcgcggtcctagcgcagtagaaatggaaaacattgataaagcaatcgcaactgtgaccggtttgcaggtcggcacctaccacttcagactcactgtcaaagatcagcagggacttagctcgacctcgacactcacagtagctgtcaagaaggaaaacaatagccccccaagggccagagctgggggcaggcacgttttagtgctgcccaataactcaatcaccctggatgggagtcggtctactgatgatcagcgaattgtttcgtacctgtggatcagagatggacagagccccgctgccggcgatgtaatcgatggatctgatcactcagtagcgctccagttaacaaacctggtcgagggggtgtacaccttccacctcagagtaaccgattctcagggcgcttcagatacggataccgctacagtggaagtgcagccagatcctcgtaaaagtgggctggtggagctcactctgcaggttggtgtgggtcaattaaccgaacaaagaaaagatacacttgtgaggcagttggctgtgctgcttaacgtcctggacagtgatatcaaggtccaaaaaataagagcacactctgatctgagtactgtaatcgtgttctatgtccagtctcgcccaccgttcaaggtgctgaaggccgctgaggtggctcgcaacctgcacatgagactttccaaggagaaggccgactttcttctttttaaagtccttagggtcgataccgctggctgcctcctcaaatgcagcggccatggccactgtgatcctctgaccaagcggtgtatctgttctcacctatggatggaaaacctcattcaaagatatatatgggatggggaatccaattgcggtatcaaacacaggtctactgagcataattctagcctaatggtctcagaatccgagttcgattccgaccaggataccatattcagtagagagaaaatggagagaggaaatcctaaagtgagcatgaatggctctataagaaacggggctagcttcagttattgtagcaaagataggtag

SEQ ID NO: 66159 - DNA, 3036 bp, Artificial Sequence
  derived and/or modified sequence
atggcccccccaactggagtgctgagcagcctgctgctgctggtgaccatcgccggctgtgccaggaagcagtgcagcgagggccgcacctacagcaatgctgtgatcagccccaacctggagaccacccgcatcatgagggtgagccacaccttccctgtggtggactgcacagctgcctgctgtgacctgagcagctgtgacctggcctggtggtttgagggccgctgctacctggtgtcctgcccccacaaggagaactgtgagcccaagaagatgggccccatccgcagctacctgacctttgtgctgcggcctgtgcagaggcctgcccagctgctggactatggagacatgatgctgaacagaggcagccccagcggcatctggggagacagccctgaggacatcaggaaggacctgaccttcctgggcaaggactggggcctggaggagatgtctgagtacagtgatgactaccgggagctggagaaggacctgctgcagcccagcggcaagcaggagccccggggcagcgctgagtacacagactggggcctgctgcccggcagcgagggcgccttcaacagctctgtgggggacagccctgctgtgcctgctgagacccagcaggaccctgagctgcactacctgaatgaaagtgccagcaccccagcccccaagctgcctgagaggtctgtgctgctgcccctgcccaccacccccagcagcggggaggtgctggagaaggagaaggccagccagctgcaggagcagagcagcaacagcagcggcaaggaggtgctgatgcccagccacagcctgcccccagccagcctggagctgagctctgtgacagtggagaagagccctgtgctgactgtgaccccaggcagcacagagcacagcatccccaccccacccaccagcgctgcccccagcgagagcaccccatctgagctgcccatcagccccaccacagcccccaggacagtgaaggagctgactgtgtctgctggggacaacctgatcatcaccctgcctgacaatgaggtggagctgaaggcctttgtggccccagcccctcctgtggagaccacctacaactatgagtggaacctgatcagccaccccacagactaccagggcgagatcaagcagggccacaagcagaccctgaacctgagccagctgtctgtgggcctgtatgtgttcaaggtgacagtgtccagtgaaaatgcctttggagagggctttgtgaatgtgacagtgaagccagcccggcgggtgaacctgccccctgtggccgtggtgagcccccagctgcaggagctgaccctgcccctgaccagcgccctgattgatggcagccagagcacagatgacacagaaattgtgtcctaccactgggaggagatcaatggccccttcatcgaggagaagacctctgtggacagccctgtgctgcggctgagcaacctggaccccggcaactacagcttccggctgactgtgacagacagtgatggagccaccaacagcaccacagctgccctgattgtgaacaatgctgtggactacccacctgtggccaatgccggccccaaccacaccatcaccctgccccagaacagcatcaccctgaatggaaaccagagcagtgatgaccaccagatcgtgctgtatgagtggagcctgggccctggcagcgagggcaagcacgtggtgatgcagggcgtgcagaccccctacctgcacctgagcgccatgcaggagggggactacaccttccagctgaaggtgacagacagcagccggcagcagagcacagctgtggtgaccgtcatcgtgcagcctgagaacaaccggccccctgtggccgtggccggccctgacaaggagctgatcttccctgtggagagcgccaccctggatggcagcagcagcagtgatgaccatggaattgtgttctaccactgggagcacgtgcggggccccagcgctgtggagatggagaacatcgacaaggccatcgccaccgtgacaggcctgcaggtgggcacctaccacttccggctgactgtgaaggaccagcagggcctgagcagcaccagcaccctgactgtggccgtgaagaaggagaacaacagccccccccgggcccgggccggcggcagacatgtgctggtgctgcccaacaacagcatcaccctggatggcagccgcagcacagatgaccagagaattgtgtcctacctgtggatcagagatggccagagccctgctgctggagatgtgattgatggcagtgaccacagcgtggccctgcagctgaccaacctggtggagggcgtgtacaccttccacctgcgggtgacagacagccagggcgccagtgacacagacacagccaccgtggaggtgcagcctgaccccaggaagagcggcctggtggagctgaccctgcaggtgggcgtgggccagctgacagagcagaggaaggacaccctggtgcggcagctggccgtgctgctgaatgtgctggacagcgacatcaaggtgcagaagatccgggcccacagcgacctgagcacagtgattgtgttctacgtgcagagcaggcctcccttcaaggtgctgaaggctgctgaggtggccaggaacctgcacatgaggctgagcaaggagaaggctgacttcctgctcttcaaggtgctgcgggtggacacagctggctgcctgctgaagtgcagcggccacggccactgtgaccccctgaccaagcgctgcatctgcagccacctgtggatggagaacctgatccagcgctacatctgggatggagagagcaactgtggcatcaagcacaggagcacagagcacaacagcagcctgatggtgtctgagagcgagtttgacagcgaccaggacaccatcttcagccgggagaagatggagcggggcaaccccaaggtgtccatgaatggcagcatcagaaatggagccagcttctcctactgcagcaaggacagatag

SEQ ID NO: 66160 - DNA, 3036 bp, Artificial Sequence
  derived and/or modified sequence
atggccccccccaccggcgtgctgagcagcctgctgctgctggtgaccattgctggatgtgcccggaaacagtgctctgaggggcgtacatactctaatgccgtgattagcccaaacctagaaacaacacgaattatgagggtgtcacacacttttccagttgtggactgtacagccgcctgttgcgatctgtcgagttgtgatttggcatggtggtttgagggtagatgctatttggtgtcctgtccccacaaagaaaactgcgagcctaagaagatgggcccaatccgaagttacctaacttttgtgttgcgccccgtgcaaagacctgcacagctactggattacggtgacatgatgctgaacagagggagccccagcggcatttggggggactcacccgaggacatcagaaaggatctgaccttcctcggcaaagactggggactagaagaaatgagcgaatactcagatgactaccgagagctagaaaaggacctcttgcagccctctggcaagcaagaaccccgggggtctgccgagtatacagattggggcttgcttcctggctccgagggcgcatttaacagcagcgtgggagattccccagctgtgcccgcggagactcaacaggaccctgaactgcattatctcaacgaatccgcttcaactcccgcgcccaagttaccagagcggagcgtgctcctgcctttgccaacgaccccatcctccggcgaggtactggaaaaggagaaggcttcccagctgcaggaacaaagttcaaactcatccgggaaagaagtccttatgcccagccacagcctcccacctgcctcactcgagctaagcagcgtgacagtggagaagtctccggtgttgactgtaacccccggctctacggaacacagcatccccacacccccgacaagcgccgcacccagcgagtctactccctcagagcttcctatctctccaactaccgcacctcgcacggtcaaagaactgaccgtttcagcgggcgataatctgatcattaccctgccggataacgaagtggaacttaaggcttttgtagcccccgccccccccgtagagaccacctacaattatgagtggaatctcatatcacatccaaccgattaccagggtgagatcaaacagggccacaaacagaccctcaatctgtcacaactgtctgttgggttgtacgtctttaaggtcactgtgtcttccgagaacgcatttggcgaaggcttcgttaacgttacggtgaagcccgcaagaagggtgaatcttcccccagttgcggtcgtttcacctcagttgcaggagctgactctgccactgacttcagccctgattgatggctcacaatccaccgacgacacggagatcgtgtcgtatcattgggaagagatcaatgggccgtttatcgaggaaaaaacctccgtcgactcacccgttctgcgcctgtccaatctggatcctgggaactacagtttccggcttaccgtgactgatagcgatggtgcaactaatagcacgaccgctgctctgatcgttaacaacgcagtcgattatccacccgtggccaatgctggaccaaatcacactatcacacttccacagaactctatcacgttaaacggcaaccagtcgtccgacgaccaccagattgtcctatacgaatggagcttaggtccaggctccgaaggaaagcacgtggtcatgcagggcgttcagactccatacctccacctgtccgcaatgcaggaaggagattatacctttcaactgaaagttactgactccagtaggcagcagtccacggcagttgttaccgtgatagtgcagcctgaaaataaccgccctcccgtggcggtggccggaccggacaaagaacttatattccccgtcgaaagcgccactttggacggtagcagctccagcgacgaccatggaatcgtgttctaccactgggaacacgtccggggacccagtgccgttgaaatggaaaacatcgataaggctatcgcaacggtgactggactgcaggtgggaacataccactttaggctgacagtgaaggaccaacaaggattatcgtctacatccaccttgacagtggccgtgaagaaagagaataatagtcctcctagagctagagctggagggagacacgtcctggtcctgccaaacaacagtattaccctcgacggatccaggagcacagatgatcagcgaatcgtcagttatctgtggatccgcgatggccagagcccagctgcgggggacgtgattgacggcagcgatcacagtgtcgcactgcaactcactaacctagtggagggagtctatacttttcacctgcgggtaactgacagccagggagcaagcgacactgatacggccaccgtggaggtccaaccagacccgagaaaatccggactggtcgagctgacgctgcaggttggtgtgggacagctgacggaacagaggaaggatacgctcgtgcggcagcttgccgtcctcctgaacgtgctcgattctgacatcaaagtgcagaaaatccgggctcactcggacctgtctaccgtcatcgtgttttatgtgcaaagcaggcctccgttcaaagtgctgaaggcagccgaagtagcaagaaatttgcacatgcggctatctaaggagaaggctgacttcctcctgttcaaagtcttgcgcgtcgacaccgccggctgcctgctcaaatgctccggccatgggcactgtgatcctctaacaaaaagatgtatttgttctcacctatggatggagaaccttatacagagatatatatgggacggagagagcaactgcgggatcaagcaccgctcaacggagcacaattcttctctgatggtatctgagagtgaattcgattctgatcaggataccatcttctcacgagagaagatggaaagaggaaaccccaaagtatcaatgaacggatccattcgcaacggggcctccttctcatactgctcaaaggatcggtag

SEQ ID NO: 66161 - DNA, 3036 bp, Artificial Sequence
  derived and/or modified sequence
atggccccaccaactggggtgcttagctcgctcttactcctggtcaccatagcaggctgcgcaaggaagcagtgttccgagggaagaacttactcaaacgccgtgatctcaccaaacctggagaccaccagaattatgcgggtgtcccataccttccccgttgttgactgcaccgcagcttgttgtgacctctctagctgcgatctggcgtggtggttcgaaggtcgatgttacttagtaagttgtccgcataaggaaaattgcgaaccaaaaaagatgggaccaatccggtcctacctcacattcgtgctgcgtccagtccaacgtccggcacagctcttagattatggagacatgatgctcaatagggggagcccaagcgggatatggggcgactcgcctgaggatattcggaaagatctgacgtttctggggaaggactggggactcgaggaaatgagcgagtatagtgatgattatagggagttggagaaggatctgcttcaaccgtccgggaagcaggaaccacgaggcagtgccgaatacactgattggggcctcctgcccggttcagaaggggcttttaattcaagtgtgggtgattctcccgctgtgccggctgagacacagcaagacccagagctgcactacttgaacgagagcgcgagcacgccagctcctaaactaccagagaggtccgtgctactgccactgccaaccacaccctcctcaggcgaggtgctcgaaaaggaaaaggcctcccaacttcaggaacaaagctctaacagctcagggaaggaggtcttaatgccctctcattcgctccctcctgcaagcctggagctgtcgagcgtcacagtggagaaatcaccagtgctgaccgtgacaccaggaagcaccgagcatagtatcccaacgccaccaacctccgcagcaccgtcagaatcaacacctagtgaacttcccatcagcccaaccacagccccacgaaccgtgaaggagctgacagtttctgccggagacaatctcataatcacactccccgacaacgaagtagagctgaaggcattcgtcgcacctgcacctccggtggagacaacgtataactacgagtggaacctgatcagccatcccaccgactatcagggcgagatcaagcagggccacaaacagaccctgaacctgagtcagctgtctgttgggctgtacgtatttaaggttaccgtgagcagcgagaatgcttttggggaagggttcgttaatgtcactgtcaagcctgcccgacgtgttaacctacccccagtagccgttgtctccccacagcttcaggaactgaccctgcctctgacgtccgcgcttatcgatgggtctcagagcacagatgataccgaaatcgtctcctaccattgggaagaaatcaacggcccatttattgaggaaaagactagtgtggacagtccggtcctgcgcctgagcaacctcgaccccggtaattacagctttcggctcacagtgactgacagcgatggcgctaccaacagcactactgcagcccttatcgtgaataatgcagtcgactatcctcctgttgccaatgctggcccaaatcacaccatcactcttccccagaattctattactctgaatggcaaccagtcatcggatgaccaccagatagtcctgtatgagtggtccctaggacccggtagtgagggaaagcatgtggtcatgcagggagtccagaccccatacctacatctctctgctatgcaagagggagactacacctttcagctgaaggtcaccgactcaagcagacagcaaagtactgccgtcgttacagtcatcgtgcagcccgagaataatcgtccaccagttgcagtcgccggaccggataaggagttaatatttccagtagaatcagccacacttgacggcagctcttcctctgatgatcacggcatagtattctatcattgggagcacgtacggggaccgagcgccgtggaaatggagaacatcgacaaggctattgccacagtgacagggcttcaagtgggcacttaccatttccgcttgacagttaaggaccagcaaggcctttcatctacgagcaccctgacagtggccgttaagaaggagaacaatagtcctccacgagccagggctgggggacgccacgtgttagtactgcctaacaacagtatcactcttgacggttcgaggagtacagatgatcagaggatagtatcctacctttggatccgagacggccagtctcccgctgctggagacgttatagacgggagtgaccacagcgtggcactccagctgaccaatctggtcgagggtgtctacacttttcatctccgggtaactgattcacagggcgcttctgacactgataccgcgaccgtggaggtgcagccagatccgaggaagagtggtttagtagagctcacattgcaggtaggagttgggcagctgacagagcagcgcaaggatacactggtacggcaactcgcagtgctgcttaacgttctggactctgacataaaagtgcagaaaattagagcccactccgatctgtccacagtgatcgtgttctatgttcagtcccggccaccttttaaagtattaaaagcagcggaagttgcccgaaacttgcacatgaggctgtctaaggaaaaagctgactttctgctatttaaggtgctacgggtcgacacagcgggttgtcttcttaagtgttccggtcacgggcattgcgaccctctgaccaaaagatgtatctgctctcacctatggatggagaatctgattcagcgatatatttgggatggagagagtaactgtggtataaaacataggagcacagagcacaacagtagtctgatggtttcagaatctgaattcgattctgaccaagacaccattttctctagggaaaaaatggaacgcggaaaccccaaggtgagcatgaacggctcaatccgtaacggagcatcattttcttattgctctaaagacagatag

SEQ ID NO: 66162 - DNA, 6622 bp, Artificial Sequence
  derived and/or modified sequence
gctgccgcgggcggtgggcggggatcccccgggggtgcaaccttgctccacctgtgctgccctcggcgggcctggctggccccgcgcagagcggcggcggcgctcgctgtcactgccggaggtgagagcgcagcagtagcttcagcctgtcttgggcttggtccagattcgctcctctggggctacgtcccggggaagaggaagcgaggattttgctggggtggggctgtacctcttaacagcaggtgcgcgcgcgagggtgtgaacgtgtgtgtgtgtgtgtgtgtgtgtgtgtgtgtgtgtgtgtgtgtgtgtaagacctgcgatgacgacgaggaggaacaagtgggacggcgagtgatgctcagggccagcagcaacgcatggggcgagcttcagtgtcgccagcagtgaccacagttcttgaggccaaatctggctcctaaaaaacatcaaaggaagcttgcaccaaactctcttcagggccgcctcagaagcctgccatcacccactgtgtggtgcacaatggcgccccccacaggtgtgctctcttcattgctgctgctggtgacaattgcaggttgtgcccgtaagcagtgcagcgaggggaggacatattccaatgcagtcatttcacctaacttggaaaccaccagaatcatgcgggtgtctcacaccttccctgtcgtagactgcacggccgcttgctgtgacctgtccagctgtgacctggcctggtggttcgagggccgctgctacctggtgagctgcccccacaaagagaactgtgagcccaagaagatgggccccatcaggtcttatctcacttttgtgctccggcctgttcagaggcctgcacagctgctggactatggggacatgatgctgaacaggggctccccctcggggatctggggggactcacctgaggatatcagaaaggacttgacctttctaggcaaagattggggcctagaggagatgtctgagtactcagatgactaccgggagctggagaaggacctcttgcaacccagtggcaagcaggagcccagagggagtgccgagtacacggactggggcctactgccgggcagcgagggggccttcaactcctctgttggagacagtcctgcggtgccagcggagacgcagcaggaccctgagctccattacctgaatgagtcggcttcaacccctgccccaaaactccctgagagaagtgtgttgcttcccttgccgactactccatcttcaggagaggtgttggagaaagaaaaggcttctcagctccaggaacaatccagcaacagctctggaaaagaggttctaatgccttcccatagtcttcctccggcaagcctggagctcagctcagtcaccgtggagaaaagcccagtgctcacagtcaccccggggagtacagagcacagcatcccaacacctcccactagcgcagccccctctgagtccaccccatctgagctacccatatctcctaccactgctcccaggacagtgaaagaacttacggtatcggctggagataacctaattataactttacccgacaatgaagttgaactgaaggcctttgttgcgccagcgccacctgtagaaacaacctacaactatgaatggaatttaataagccaccccacagactaccaaggtgaaataaaacaaggacacaagcaaactcttaacctctctcaattgtccgtcggactttatgtcttcaaagtcactgtttctagtgaaaacgcctttggagaaggatttgtcaatgtcactgttaagcctgccagaagagtcaacctgccacctgtagcagttgtttctccccaactgcaagagctcactttgcctttgacgtcagccctcattgatggcagccaaagtacagatgatactgaaatagtgagttatcattgggaagaaataaacgggcccttcatagaagagaagacttcagttgactctcccgtcttacgcttgtctaaccttgatcctggtaactatagtttcaggttgactgttacagactcggacggagccactaactctacaactgcagccctaatagtgaacaatgctgtggactacccaccagttgctaatgcaggaccaaatcacaccataactttgccccaaaactccatcactttgaatggaaaccagagcagtgacgatcaccagattgtcctctatgagtggtccctgggtcctgggagtgagggcaaacatgtggtcatgcagggagtacagacgccataccttcatttatctgcaatgcaggaaggagattatacatttcagctgaaggtgacagattcttcaaggcaacagtctactgctgtggtgactgtgattgtccagcctgaaaacaatagacctccagtggctgtggccggccctgataaagagctgatcttcccagtggaaagtgctaccctggatgggagcagcagcagcgatgaccacggcattgtcttctaccactgggagcacgtcagaggccccagtgcagtggagatggaaaatattgacaaagcaatagccactgtgactggtctccaggtggggacctaccacttccgtttgacagtgaaagaccagcagggactgagcagcacgtccaccctcactgtggctgtgaagaaggaaaataatagtcctcccagagcccgggctggtggcagacatgttcttgtgcttcccaataattccattactttggatggttcaaggtctactgatgaccaaagaattgtgtcctatctgtggatccgggatggccagagtccagcagctggagatgtcatcgatggctctgaccacagtgtggctctgcagcttacgaatctggtggagggggtgtacactttccacttgcgagtcaccgacagtcagggggcctcggacacagacactgccactgtggaagtgcagccagaccctaggaagagtggcctggtggagctgaccctgcaggttggtgttgggcagctgacagagcagcggaaggacacccttgtgaggcagctggctgtgctgctgaacgtgctggactcggacattaaggtccagaagattcgggcccactcggatctcagcaccgtgattgtgttttatgtacagagcaggccgcctttcaaggttctcaaagctgctgaagtggcccgaaatctgcacatgcggctctcaaaggagaaggctgacttcttgcttttcaaggtcttgagggttgatacagcaggttgccttctgaagtgttctggccatggtcactgcgaccccctcacaaagcgctgcatttgctctcacttatggatggagaaccttatacagcgttatatctgggatggagagagcaactgtggtatcaagcaccgaagcacagagcacaactccagcctgatggtatccgagtctgagtttgacagtgaccaggacacaatcttcagccgagaaaagatggagagagggaatccaaaggtttccatgaatggttccatcagaaatggagcttccttcagttattgctcaaaggacagataatggcgcagttcattgtaaagtggaaggaccccttgaatccaagaccagtcagtgggagttacagcacaaaacccactcttttagaatagttcattgaccttcttccccagtgggttagatgtgtatccccacgtactaaaagaccggtttttgaaggcacaaaacaaaaactttgctcttttaactgagatgcttgttaatagaaataaaggctgggtaaaactctaaggtatatacttaaaagagttttgagtttttgtagctggcacaatctcatattaaagatgaacaacgatttctatctgtagaaccttagagaaggtgaatgaaacaaggttttaaaaagggatgatttctgtcttagctgctgtgattgcctctaaggaacagcattctaaacacggtttctcttgtaggacctgcagtcagatggctgtgtatgttaaaatagcttgtctaagaggcacgggccatctgtggaggtacggagtcttgcatgtagcaagctttctgtgctgacggcaacactcgcacagtgccaagccctcctggtttttaattctgtgctatgtcaatggcagttttcatctctctcaagaaagcagctgttggccattcaagagctaaggaagaatcgtattctaaggactgaggcaatagaaaggggaggaggagcttaatgccgtgcaggttgaaggtagcattgtaacattatcttttctttctctaagaaaaactacactgactcctctcggtgttgtttagcagtatagttctctaatgtaaacggatccccagtttacattaaatgcaatagaagtgattaattcattaagcatttattatgttctgtaggctgtgcgtttggactgccatagatagggataacgactcagcaattgtgtatatattccaaaactctgaaatacagtcagtcttaacttggatggcgtggttatgatactctggtccccgacaggtactttccaaaataacttgacatagatgtattcacttcatatgtttaaaaatacatttaagtttttctaccgaataaatcttatttcaaacatgaaagacaattaaaacattcccacccacaaagcagtactcccgagcaattaactggagttaattgtagcctgctacgttgactggttcagggtagttccccatccacccttggtcctgaggctggtggccttggtggtgcccttggcattttttgtgggaagattagaatgagagatagaaccagtgttgtggtaccaagtgtgagcacacctaaacaatatcctgttgcacaatgcttttttaacacatgggaaaactaggaatgcattgctgatgaagaagcaaggtatttaaacaccagggcaggagtgccagagaaaatgtttccccatgggttcttaaaaaaaattcagcttttaggtgcttttgtcatctcccgcagtattcatcctcatgggaccatcttatttttacttattgtaatttactggggaaaggcagaactaaaaagtgtgtcattttatttttaaaataattgctttgcttatgcctacactttctgtataactagccaattcaatactgtctatagtgttagaaggaaaatgtgatttttttttttaaccagtattgagcttcataagcctagaatctgccttatcaggtgaccagggttatggttgtttgcatgcaaatgtgaatttctggcataggggacagcagcccaaatgtaaagtcatcgggcgtaatgaggaagaagggagtgaacatttaccgctttatgtacataacatatgcagtttacatactcatttgatccttataatcaaccttgaagaggagatactatcattcttatgttgcagatagccctctgaaggcccagagaggttaaataacttcccagaggtcatggccaagaagtagtggctccaagaactgaatgcaaattttttaaactgtagagttctgctttccactaaacaaagaactcctgccttgatggatggagggcaaattctggtggaacttttgggccacctgaaagttctattcccaggactaagaggaatttcttttaatggatccagagagccaaggtcagagggagagatggcctgcatagtctcctgtggatcacacccgggccacccctccctctaggtttacagtggacttcttctgcccctcctccttttctgtccttggccatctcagcctggcctctctgatccttccatcacagaaggatcttgaatctctgggaaatcaaacatcacagtagtgatcagaaagtgagtcctgtcttgtcaccccatttctcatcagaacaaagcacgagatggaatgaccaaccagcattcttcatggtggactgcttatcattgaggatctttgggagataaagcacgctaagagctctggacagagaaaaacaggccctagaatatgggagtgggtgtttgtagggctcacaggctaacaagcactttagttgctggtttacattcaatgaaggaggattcatacccatggcattacaaggctaagcatgtgtatgactaaggaactatctgaaaaacatgcagcaaggtaagaaaatgtaccactcaacaagccagtgatgccaccttttgtgcgcggggaggagagtgactaccattgttttttgtgtgacaaagctatcatggactattttaatcttggttttattgcttaaaatatattatttttccctatgtgttgacaaggtatttctaatatcacactattaaatatatgcactaatctaaataaaggtgtctgtattttctgtaatgcttatttttagggggaaatttgttttctttatgcttcagggtagagggatttcccttgagtataggtcagcaaactgtggcctacagcctgtgtgtgcacgccccatgagccgaaaagtgggtcttatgttttcaaatggttaaaaataaataaaaaaatttgaaacatgtgaactatatgacattcagatttgtgttcataaataaagttttattggaacatatcc

SEQ ID NO: 66163 - DNA, 3036 bp, Artificial Sequence
  derived and/or modified sequence
atggccccccccaccggcgtgctgagcagcctgctgctgctggtgaccatcgccggctgcgccagaaagcagtgcagcgagggcagaacctacagcaacgccgtgatcagccccaacctggagaccaccagaatcatgagagtgagccacaccttccccgtggtggactgcaccgccgcctgctgcgacctgagcagctgcgacctggcctggtggttcgagggcagatgctacctggtgagctgcccccacaaggagaactgcgagcccaagaagatgggccccatcagaagctacctgaccttcgtgctgagacccgtgcagagacccgcccagctgctggactacggcgacatgatgctgaacagaggcagccccagcggcatctggggcgacagccccgaggacatcagaaaggacctgaccttcctgggcaaggactggggcctggaggagatgagcgagtacagcgacgactacagagagctggagaaggacctgctgcagcccagcggcaagcaggagcccagaggcagcgccgagtacaccgactggggcctgctgcccggcagcgagggcgccttcaacagcagcgtgggcgacagccccgccgtgcccgccgagacccagcaggaccccgagctgcactacctgaacgagagcgccagcacccccgcccccaagctgcccgagagaagcgtgctgctgcccctgcccaccacccccagcagcggcgaggtgctggagaaggagaaggccagccagctgcaggagcagagcagcaacagcagcggcaaggaggtgctgatgcccagccacagcctgccccccgccagcctggagctgagcagcgtgaccgtggagaagagccccgtgctgaccgtgacccccggcagcaccgagcacagcatccccaccccccccaccagcgccgcccccagcgagagcacccccagcgagctgcccatcagccccaccaccgcccccagaaccgtgaaggagctgaccgtgagcgccggcgacaacctgatcatcaccctgcccgacaacgaggtggagctgaaggccttcgtggcccccgccccccccgtggagaccacctacaactacgagtggaacctgatcagccaccccaccgactaccagggcgagatcaagcagggccacaagcagaccctgaacctgagccagctgagcgtgggcctgtacgtgttcaaggtgaccgtgagcagcgagaacgccttcggcgagggcttcgtgaacgtgaccgtgaagcccgccagaagagtgaacctgccccccgtggccgtggtgagcccccagctgcaggagctgaccctgcccctgaccagcgccctgatcgacggcagccagagcaccgacgacaccgagatcgtgagctaccactgggaggagatcaacggccccttcatcgaggagaagaccagcgtggacagccccgtgctgagactgagcaacctggaccccggcaactacagcttcagactgaccgtgaccgacagcgacggcgccaccaacagcaccaccgccgccctgatcgtgaacaacgccgtggactacccccccgtggccaacgccggccccaaccacaccatcaccctgccccagaacagcatcaccctgaacggcaaccagagcagcgacgaccaccagatcgtgctgtacgagtggagcctgggccccggcagcgagggcaagcacgtggtgatgcagggcgtgcagaccccctacctgcacctgagcgccatgcaggagggcgactacaccttccagctgaaggtgaccgacagcagcagacagcagagcaccgccgtggtgaccgtgatcgtgcagcccgagaacaacagaccccccgtggccgtggccggccccgacaaggagctgatcttccccgtggagagcgccaccctggacggcagcagcagcagcgacgaccacggcatcgtgttctaccactgggagcacgtgagaggccccagcgccgtggagatggagaacatcgacaaggccatcgccaccgtgaccggcctgcaggtgggcacctaccacttcagactgaccgtgaaggaccagcagggcctgagcagcaccagcaccctgaccgtggccgtgaagaaggagaacaacagcccccccagagccagagccggcggcagacacgtgctggtgctgcccaacaacagcatcaccctggacggcagcagaagcaccgacgaccagagaatcgtgagctacctgtggatcagagacggccagagccccgccgccggcgacgtgatcgacggcagcgaccacagcgtggccctgcagctgaccaacctggtggagggcgtgtacaccttccacctgagagtgaccgacagccagggcgccagcgacaccgacaccgccaccgtggaggtgcagcccgaccccagaaagagcggcctggtggagctgaccctgcaggtgggcgtgggccagctgaccgagcagagaaaggacaccctggtgagacagctggccgtgctgctgaacgtgctggacagcgacatcaaggtgcagaagatcagagcccacagcgacctgagcaccgtgatcgtgttctacgtgcagagcagaccccccttcaaggtgctgaaggccgccgaggtggccagaaacctgcacatgagactgagcaaggagaaggccgacttcctgctgttcaaggtgctgagagtggacaccgccggctgcctgctgaagtgcagcggccacggccactgcgaccccctgaccaagagatgcatctgcagccacctgtggatggagaacctgatccagagatacatctgggacggcgagagcaactgcggcatcaagcacagaagcaccgagcacaacagcagcctgatggtgagcgagagcgagttcgacagcgaccaggacaccatcttcagcagagagaagatggagagaggcaaccccaaggtgagcatgaacggcagcatcagaaacggcgccagcttcagctactgcagcaaggacagatag

SEQ ID NO: 66164 - protein, 384 aa, Artificial Sequence
  derived and/or modified sequence
MPPFCRNAKLGLLSFLICAGRSLLPLGKNAFWLERIENNNTLWEKAQSQKMRYKTSLVMRKRLRLYRNTLKESSSSSGHHGPQLTAASSPSVFPGLHEEPPQASPSRPLNGLLRLGLPGDMYARPEPFPPGPAARSDALAAAAALHGYGGMNLTVNLAAPHGPGAFFRYMRQPIKQELICKWLAADGTATPSLCSKTFSTMHELVTHVTVEHVGGPEQANHICFWEECPRQGKPFKAKYKLVNHIRVHTGEKPFPCPFPGCGKVFARSENLKIHKRTHTGEKPFRCEFEGCERRFANSSDRKKHSHVHTSDKPYTCKVRGCDKCYTHPSSLRKHMKVHGRSPPPSSGYDSATPSALVSPSSDCGHKSQVASSAAVAARTADLSE

SEQ ID NO: 66165 - DNA, 4089 bp, Artificial Sequence
  derived and/or modified sequence
gcaggaaacgcgaacggctccagttcaaagccacatgcaccaacgtgacatataagccattaaaatatcatcctgacggctcatttctgcttcatcatacattccctaactgcttcctgaaagctggaaaaggagaagtgaaggatgaccgcctcgctggaaccacaaaagagaggcttggaggggtttgtggtcccctctcagccaccccgaaatgatgtgcagaaatgaggcgatcctggcaacaggtggagtggggctcaaagtcagaaaatgagatacaagacatccttggtgatgaggaaacgattacggctttaccgaaacactcttaaagagtcaagtagcagctctggacaccatggcccccagctcaccgccgcctccagcccctcggtgttcccgggcctccacgaggagcctccccaggcctcccccagccgtcctttgaatggactcctgcgtctggggctccctggagacatgtacgcgcggccggagcccttcccgccagggcctgcggcccgcagcgacgccctggcagctgccgcagccctgcatggctacgggggcatgaacctgacggtgaacctcgctgcgccccacggtcctggcgctttcttccgctacatgcgccagcccatcaaacaggagctcatctgcaagtggctggcggccgacggcaccgcgaccccgagcctctgctccaaaactttcagcaccatgcacgagctggtcacgcacgtcaccgtggagcacgtcggcggcccggaacaggccaaccacatttgcttctgggaggagtgtccgcgccagggaaagcccttcaaagccaaatacaaacttgtaaatcacatccgcgtgcacacgggcgagaagcccttcccttgtcctttcccggggtgtgggaaggtctttgctagatcagaaaatctcaaaatacacaaacgaactcacacaggcgagaagcccttcagatgcgagttcgagggctgcgagcggcgcttcgccaacagcagcgaccgtaagaagcattcgcacgtgcacactagcgacaagccatacacgtgcaaggtgcggggctgcgacaagtgctacacgcaccccagctcgctgcgtaagcacatgaaggtgcacgggcgctcgccgccgcccagctctggctacgattcggctacaccgtctgccctcgtgtcgccctcgtcggactgcggccacaagtcccaggtggcctcctcggcggcggtggcggcgcgtaccgccgacttgagcgaatgatgtccaccgcgttgctcgcaaggtaatctcgctccgcgcagctgagcgccccgcatctcgcgcctgctacatcaaagggcccgcgcacaaagcagtgtttcttcgccacggtgcatcttcatggtaagttaggatttctatggcaatgtgcaagtcgcactgaaatcctgaaaggccaagcctggagcccgtccaggcttttcattaaggacataatatttacgtctaacagaccttttttcttgtgtatacaagtatatatttttgtttgacgcggactaaatcattttcatttaatttccggtaaacaaaacccacgcgaatgggcacttgtacccgatcataataaaaatggataataatgtgaaggaagaaaagagccgcttgaatcgccgctcagccccctttgtttctgctttctgcggtgatcagagggcgcgtttgggtttgatggcgagtttctaaaggcgaggaaatggtttgtaagaggggaaagaaaaggagaaaggtctaatcaagctcgggttgttcaaagagtcgggttttggggttgaaagtgtgagtttgacggtgcatcagcatgccgcgttaggctcgccatggaaatacgcgcggggagcggccgcttcaaaggcggcacacttcactacagacactctattaagatacatttgcgctgacctttgctttcacgccatttaatactgtcactgcgctctccagtatatacttcctttctagaacccgacttgcccacgtttaggggttcactctgcaccctgatgtgggaggctttggcgcaggggacactttcaggaaagggaggagcacaaggactctgtgcatcttgactgcaccccaaagaggctccaggatcaggagtgaaagattttaaagcagcctccgaagcttaacaaatgagcattccaagctcagttttgtgcaaatcgcctttctgactcttgagtaggatggaggcttaaatttaatggcgacttggggggaagggagccaccctgggggagtctgaggagttcagactgtgcccttgggaatttccactctggctttccgtgccactcttcttcctttccatcccaaaagtctcttgcggcccctgaaacttgtttctttctaaggcagggtgtgtggtacccttaggcctggactagtcctagatgcaaactcaagagcccaaggccaaggggatgtggggaagatggcaggaaagttagaagtccatgttcccttaattgtcttgttgtttattttatccaagtaccccagtgaataggggaaaaataaacacagtgaaaaaaaaaatcaaacagtggagtcttctttagtgccagtccttgtggttgaataaaaaggatggtccgctttctattgagctgagaaatctttgaagtgggagttattatctgagacattcctgcttgtcgtcctaacaacgctgatgaaacgtaaaaggttctttgtcagcgatttgttctcctctctgtcaaactccctctgccccgttagtttcaaaccgtttctaaagagataaaaatcaaacttcttttaaaacaatatccacacactgcatcaatacataactttaggtctaagtcttgctaagggataaacaaaagcaatgcctagacatcagggtcagggcctggtctggtgaagtatgcagaagttggggggccctcgggacaagctttgggacatgaggaaaagaatgcagagagggtgcaagcagaatacataccctaagtccataattgtgtttctgcttctttctgctctggtttgcattcaatcagcccaagttgggtcacatagatgggtttcctttgggtacccctcaggctcctaatattcttgcccaggatccttggaacttaagaatgcagccaagcaattgttaatatctcctgctccttcaaagccacctctgctaaaaatagacccattgtgtgtttcttctcactagcagcaatcaacaagccctttctgccgttaataagaaggagaatagctgaaggagagagatattttattaatttcctgtttccttcagaatcttggcaattgaagtttagaaggtttggtctacaacacagtgatcgaaaatgcatgtaaatgcccatccttcccttcattcacgtgtgaagttgttcattttatattgtgcccagcaaagaaactttcacccagttcaggtttccccaaaactcctgtggtggttttaaaggtggtttaaataaataaggatgtgctggtccccctactctgtgtgtgctgaataaatggcttgtaaagaagtttttccaagctgtaacccatgctgttattatagttgctgcaaaatgttcttcctgatattgattttatttgttaactgaaggtctccatatgtttgtttatattgctaatttatgagaaaatgtaataattgcaatgaatgtgaattatacagacaggcaaacattttgtaatcataattcacatatacacaaaagcctggctgaaatctttagactatttgtaccctctctacccacactgtttgtgatttatcatctgtctctttagtgtcagttaaattatgaactaacttgaaaataaaagttgtttgactgaaagtgattgttgaatgaacaacaaagttgaaagccatggcttgatcttgtaaatatataaatgtaaatgatattaaatctgtgattccttttccctccaaaggcttttgtgtacatggcgctgcatttggctattttctttggaaataaataatgtgatgtttctcttcctcttttg

SEQ ID NO: 66166 - DNA, 1155 bp, Artificial Sequence
  derived and/or modified sequence
atgccccccttctgcagaaacgccaagctgggcctgctgagcttcctgatctgcgccggcagaagcctgctgcccctgggcaagaacgccttctggctggagagaatcgagaacaacaacaccctgtgggagaaggcccagagccagaagatgagatacaagaccagcctggtgatgagaaagagactgagactgtacagaaacaccctgaaggagagcagcagcagcagcggccaccacggcccccagctgaccgccgccagcagccccagcgtgttccccggcctgcacgaggagcccccccaggccagccccagcagacccctgaacggcctgctgagactgggcctgcccggcgacatgtacgccagacccgagcccttcccccccggccccgccgccagaagcgacgccctggccgccgccgccgccctgcacggctacggcggcatgaacctgaccgtgaacctggccgccccccacggccccggcgccttcttcagatacatgagacagcccatcaagcaggagctgatctgcaagtggctggccgccgacggcaccgccacccccagcctgtgcagcaagaccttcagcaccatgcacgagctggtgacccacgtgaccgtggagcacgtgggcggccccgagcaggccaaccacatctgcttctgggaggagtgccccagacagggcaagcccttcaaggccaagtacaagctggtgaaccacatcagagtgcacaccggcgagaagcccttcccctgccccttccccggctgcggcaaggtgttcgccagaagcgagaacctgaagatccacaagagaacccacaccggcgagaagcccttcagatgcgagttcgagggctgcgagagaagattcgccaacagcagcgacagaaagaagcacagccacgtgcacaccagcgacaagccctacacctgcaaggtgagaggctgcgacaagtgctacacccaccccagcagcctgagaaagcacatgaaggtgcacggcagaagccccccccccagcagcggctacgacagcgccacccccagcgccctggtgagccccagcagcgactgcggccacaagagccaggtggccagcagcgccgccgtggccgccagaaccgccgacctgagcgagtag

SEQ ID NO: 66167 - DNA, 1155 bp, Artificial Sequence
  derived and/or modified sequence
atgccacctttttgcagaaacgctaaattagggctgttgagcttcctaatctgcgcaggccggtctcttcttcctttaggcaaaaacgcattctggttggaacggatcgaaaataacaataccctatgggagaaagcccaaagccagaagatgcggtataaaacatccctcgtgatgaggaagcgactgcgcctgtacaggaacaccttgaaggaatccagtagcagcagcggtcaccacgggccgcagctcactgccgcatcatctccgagtgtctttccaggactgcatgaggagccacctcaggcctccccttcccgacctctaaatgggctgttaagacttggcctcccaggcgatatgtacgcccggcctgagcctttcccaccgggccccgccgcccggtcagacgcactggctgctgcggcagccctgcacggctacggagggatgaacctgactgtgaacctagcagctcctcatggtcccggggcctttttccggtatatgcggcagcccattaaacaggagctcatctgcaaatggcttgcagcggacgggacagccacgccctcactgtgttcaaagacattctccaccatgcacgagctggtgacacatgtaacagtggaacacgttggaggcccagaacaagccaatcacatttgcttctgggaagagtgcccccgtcaggggaagccattcaaggcaaagtataaactggtaaatcacataagagtgcacactggagagaagcccttcccatgccctttccctggctgcgggaaggtgttcgccaggtcagagaacttgaaaatacataaacgcacccacaccggtgagaagccattcagatgcgagtttgagggctgtgaacgtaggtttgcgaattcaagcgatcggaaaaaacatagccacgtccacacgagtgacaaaccttatacttgcaaagtcagggggtgcgataagtgttatacacacccgtcctccctgcgcaagcatatgaaagttcacggccgtagtccaccaccctcaagtgggtacgattctgccacaccctctgccttggtctccccgtcttcagattgtggacacaagagccaggtggccagcagcgcagctgtagctgcaagaactgcagacctgtccgaatag

SEQ ID NO: 66168 - DNA, 1155 bp, Artificial Sequence
  derived and/or modified sequence
atgccacccttctgcagaaatgccaagctgggcctgctgtccttcctgatctgtgccggccgcagcctgctgcccctgggcaagaatgccttctggctggagagaattgagaacaacaacaccctgtgggagaaggcccagagccagaagatgagatacaagaccagcctggtgatgaggaagaggctgcggctgtacagaaacaccctgaaggagagcagcagcagcagcggccaccacggcccccagctgacagctgccagcagccccagcgtcttccctggcctgcacgaggagcccccccaggccagccccagccggcccctgaatggcctgctgcggctgggcctgcccggggacatgtatgcccggcctgagcccttccccccaggccctgctgcccggagtgatgccctggccgctgctgctgccctgcacggctacggcggcatgaacctgactgtgaacctggccgcccctcatggccctggggccttcttccgctacatgaggcagcccatcaagcaggagctgatctgcaagtggctggccgcagatggaacagccacccccagcctgtgcagcaagaccttcagcaccatgcatgagctggtgacccacgtgacagtggagcacgtgggcggccctgagcaggccaaccacatctgcttctgggaggagtgcccccggcagggcaagcccttcaaggccaagtacaagctggtgaaccacatccgggtgcacactggagagaagcccttcccctgccccttccctggctgcggcaaggtgtttgcccggtctgagaacctgaagatccacaagaggacccacactggagagaagcccttccgctgtgaatttgagggctgtgaaagaagatttgccaacagcagtgacaggaagaagcacagccacgtgcacaccagtgacaagccctacacctgcaaggtgcggggctgtgacaagtgctacacccaccccagcagcctgaggaagcacatgaaggtgcacggccgcagccccccacccagcagcggctatgacagcgccacccccagcgccctggtgagccccagcagtgactgtggccacaagagccaggtggccagcagcgctgctgtggccgccaggacagctgacctgtctgagtag

SEQ ID NO: 66169 - DNA, 1155 bp, Artificial Sequence
  derived and/or modified sequence
atgccccccttctgccggaacgccaagctgggcctgctgagcttcctgatttgcgctggtcggagccttctgccccttgggaaaaatgctttctggttggagcggattgagaataacaatactctgtgggaaaaagcccaatcccagaagatgcgctacaaaacgtcactcgtgatgagaaagaggctcaggctctatagaaatacgctcaaggaaagttctagcagcagtggccaccacgggcctcagctgacggctgcaagcagccccagtgtgtttcctggcctacacgaagaaccaccacaggccagcccctctcggcctctgaatgggttgctgcggctgggcttgcccggagacatgtatgcccggcctgaacctttcccccctgggcccgccgcccgcagcgacgctcttgcagctgctgctgcccttcacggctacggcggtatgaacctgactgttaacctcgcggctccccatggccctggggctttttttcggtacatgcgccagcctattaaacaggagctgatttgcaagtggttggctgccgacggtaccgctaccccgtctctgtgctcgaaaacgtttagcaccatgcacgagctggtgacacacgtcactgtagagcatgtgggaggaccagagcaagctaatcatatttgcttctgggaagagtgtccacgacaagggaagccctttaaagccaaatacaagctggtaaatcacattcgggttcatactggcgaaaagccatttccttgtccattcccggggtgtgggaaggttttcgcacgaagcgaaaatctcaaaattcacaagaggacccataccggcgaaaagccctttcggtgtgagtttgaaggttgtgagcgacgttttgccaattcgtccgacagaaaaaagcactctcacgtccatacctctgacaagccttatacctgcaaggtgcgtggctgcgacaaatgctacacacacccatcctccctgcggaagcacatgaaggtccacggccgaagccctcccccttcgagcggatacgacagtgctacaccgtctgctctcgtgtccccatcaagcgattgtggccataaatcacaggttgcaagctctgccgctgtggccgcaaggacagcagacctatccgagtag

SEQ ID NO: 66170 - DNA, 1155 bp, Artificial Sequence
  derived and/or modified sequence
atgcccccattctgcagaaatgccaagctgggtttgctgtcctttctgatttgcgccggtcggagcctactgcctttgggcaagaacgctttctggttggaaagaatcgaaaacaataatacgctctgggaaaaagctcagtcccagaagatgagatacaaaacaagcctggtgatgcgaaaaaggctacgtctgtatcgcaacaccctgaaagaatcatccagtagcagtggacaccacgggccacagctgacagctgcctcttctcctagcgtgttccctgggctgcacgaagaaccacctcaagcatcacctagtaggccactgaatggcttactgagactaggcttacccggtgacatgtacgccagacctgagccatttccgccaggccctgccgcacgctcagacgccctcgccgcagccgctgcactccatggctatggagggatgaatttgacagtgaatctggccgctcctcacggccctggagcgtttttcagatacatgaggcaacctattaagcaggagttgatttgtaagtggctggctgccgacggcactgctaccccgtcgctatgctccaagacatttagcactatgcacgagcttgtgacccacgtgactgtggagcacgtgggtgggcctgagcaggctaatcacatctgtttctgggaagaatgccctcgtcagggcaaacccttcaaagccaagtataagctggtaaaccacatcagagtgcacaccggcgagaaaccctttccctgtcccttcccaggttgtgggaaagtgttcgcacgctcagagaatttgaaaatccataaacgaacacacacaggtgaaaaacccttcagatgtgaattcgagggatgcgagcgacggtttgcaaatagttctgatcgcaaaaagcatagtcacgtgcatacatcagataagccctacacttgtaaggtgcgtggctgcgacaagtgctacacacacccctcttccctccgtaagcatatgaaagtgcacgggagatccccccctccttcctccggctatgatagtgccacgccaagcgccctggtgtctccaagttctgattgtggccataagtctcaagtcgcctcgtctgccgctgtggccgcacgcacagccgatctgtccgagtag

SEQ ID NO: 66171 - DNA, 4331 bp, Artificial Sequence
  derived and/or modified sequence
acacaacaagggaggggacctaaggggggaagggtagctgttgggagggggagagggaaaataattcttcaaaaaagaaaagtcagtcttctcctctccagtccgtggaaaatccaacggggacgttgacaagagggtatttttaggaaacacatccaaatatacagggtaagagtgaatgtgagaaaaaaaaaagttgtgggttgtagaagttatcaagtgggatttgcggcgctctctgcaggaaacgcgaacggctccagttcaaagccacatgcaccaacgtgacatataagccattaaaatatcatcctgacggctcatttctgcttcatcatacattccctaactgcttcctgaaagctggaaaaggagaagtgaaggatgaccgcctcgctggaaccacaaaagagaggcttggaggggtttgtggtcccctctcagccaccccgaaatgatgtgcagaaatgaggcgatcctggcaacaggtggagtggggctcaaagtcagaaaatgagatacaagacatccttggtgatgaggaaacgattacggctttaccgaaacactcttaaagagtcaagtagcagctctggacaccatggcccccagctcaccgccgcctccagcccctcggtgttcccgggcctccacgaggagcctccccaggcctcccccagccgtcctttgaatggactcctgcgtctggggctccctggagacatgtacgcgcggccggagcccttcccgccagggcctgcggcccgcagcgacgccctggcagctgccgcagccctgcatggctacgggggcatgaacctgacggtgaacctcgctgcgccccacggtcctggcgctttcttccgctacatgcgccagcccatcaaacaggagctcatctgcaagtggctggcggccgacggcaccgcgaccccgagcctctgctccaaaactttcagcaccatgcacgagctggtcacgcacgtcaccgtggagcacgtcggcggcccggaacaggccaaccacatttgcttctgggaggagtgtccgcgccagggaaagcccttcaaagccaaatacaaacttgtaaatcacatccgcgtgcacacgggcgagaagcccttcccttgtcctttcccggggtgtgggaaggtctttgctagatcagaaaatctcaaaatacacaaacgaactcacacaggcgagaagcccttcagatgcgagttcgagggctgcgagcggcgcttcgccaacagcagcgaccgtaagaagcattcgcacgtgcacactagcgacaagccatacacgtgcaaggtgcggggctgcgacaagtgctacacgcaccccagctcgctgcgtaagcacatgaaggtgcacgggcgctcgccgccgcccagctctggctacgattcggctacaccgtctgccctcgtgtcgccctcgtcggactgcggccacaagtcccaggtggcctcctcggcggcggtggcggcgcgtaccgccgacttgagcgaatgatgtccaccgcgttgctcgcaaggtaatctcgctccgcgcagctgagcgccccgcatctcgcgcctgctacatcaaagggcccgcgcacaaagcagtgtttcttcgccacggtgcatcttcatggtaagttaggatttctatggcaatgtgcaagtcgcactgaaatcctgaaaggccaagcctggagcccgtccaggcttttcattaaggacataatatttacgtctaacagaccttttttcttgtgtatacaagtatatatttttgtttgacgcggactaaatcattttcatttaatttccggtaaacaaaacccacgcgaatgggcacttgtacccgatcataataaaaatggataataatgtgaaggaagaaaagagccgcttgaatcgccgctcagccccctttgtttctgctttctgcggtgatcagagggcgcgtttgggtttgatggcgagtttctaaaggcgaggaaatggtttgtaagaggggaaagaaaaggagaaaggtctaatcaagctcgggttgttcaaagagtcgggttttggggttgaaagtgtgagtttgacggtgcatcagcatgccgcgttaggctcgccatggaaatacgcgcggggagcggccgcttcaaaggcggcacacttcactacagacactctattaagatacatttgcgctgacctttgctttcacgccatttaatactgtcactgcgctctccagtatatacttcctttctagaacccgacttgcccacgtttaggggttcactctgcaccctgatgtgggaggctttggcgcaggggacactttcaggaaagggaggagcacaaggactctgtgcatcttgactgcaccccaaagaggctccaggatcaggagtgaaagattttaaagcagcctccgaagcttaacaaatgagcattccaagctcagttttgtgcaaatcgcctttctgactcttgagtaggatggaggcttaaatttaatggcgacttggggggaagggagccaccctgggggagtctgaggagttcagactgtgcccttgggaatttccactctggctttccgtgccactcttcttcctttccatcccaaaagtctcttgcggcccctgaaacttgtttctttctaaggcagggtgtgtggtacccttaggcctggactagtcctagatgcaaactcaagagcccaaggccaaggggatgtggggaagatggcaggaaagttagaagtccatgttcccttaattgtcttgttgtttattttatccaagtaccccagtgaataggggaaaaataaacacagtgaaaaaaaaaatcaaacagtggagtcttctttagtgccagtccttgtggttgaataaaaaggatggtccgctttctattgagctgagaaatctttgaagtgggagttattatctgagacattcctgcttgtcgtcctaacaacgctgatgaaacgtaaaaggttctttgtcagcgatttgttctcctctctgtcaaactccctctgccccgttagtttcaaaccgtttctaaagagataaaaatcaaacttcttttaaaacaatatccacacactgcatcaatacataactttaggtctaagtcttgctaagggataaacaaaagcaatgcctagacatcagggtcagggcctggtctggtgaagtatgcagaagttggggggccctcgggacaagctttgggacatgaggaaaagaatgcagagagggtgcaagcagaatacataccctaagtccataattgtgtttctgcttctttctgctctggtttgcattcaatcagcccaagttgggtcacatagatgggtttcctttgggtacccctcaggctcctaatattcttgcccaggatccttggaacttaagaatgcagccaagcaattgttaatatctcctgctccttcaaagccacctctgctaaaaatagacccattgtgtgtttcttctcactagcagcaatcaacaagccctttctgccgttaataagaaggagaatagctgaaggagagagatattttattaatttcctgtttccttcagaatcttggcaattgaagtttagaaggtttggtctacaacacagtgatcgaaaatgcatgtaaatgcccatccttcccttcattcacgtgtgaagttgttcattttatattgtgcccagcaaagaaactttcacccagttcaggtttccccaaaactcctgtggtggttttaaaggtggtttaaataaataaggatgtgctggtccccctactctgtgtgtgctgaataaatggcttgtaaagaagtttttccaagctgtaacccatgctgttattatagttgctgcaaaatgttcttcctgatattgattttatttgttaactgaaggtctccatatgtttgtttatattgctaatttatgagaaaatgtaataattgcaatgaatgtgaattatacagacaggcaaacattttgtaatcataattcacatatacacaaaagcctggctgaaatctttagactatttgtaccctctctacccacactgtttgtgatttatcatctgtctctttagtgtcagttaaattatgaactaacttgaaaataaaagttgtttgactgaaagtgattgttgaatgaacaacaaagttgaaagccatggcttgatcttgtaaatatataaatgtaaatgatattaaatctgtgattccttttccctccaaaggcttttgtgtacatggcgctgcatttggctattttctttggaaataaataatgtgatgtttctcttcctcttttgaa

SEQ ID NO: 66172 - DNA, 929 bp, Artificial Sequence
  derived and/or modified sequence
gcagaggatgagtccatcccttcttcccaggaggagggaaaaggggtacaaatggggctcccactggcacaggaaccaggagcagtttgttgcctgcctgccttcccttctctccttgtgaattgcctgggtgccccaccgtgggcacaagaatggaagtcgtggcccagagcttccctcgcgaaaaatgagcaaggcgggtgccgggagggggcctttacaggaggctcaaagtcagaaaatgagatacaagacatccttggtgatgaggaaacgattacggctttaccgaaacactcttaaagagtcaagtagcagctctggacaccatggcccccagctcaccgccgcctccagcccctcggtgttcccgggcctccacgaggagcctccccaggcctcccccagccgtcctttgaatggactcctgcgtctggggctccctggagacatgtacgcgcggccggagcccttcccgccagggcctgcggcccgcagcgacgccctggcagctgccgcagccctgcatggctacgggggcatgaacctgacggtgaacctcgctgcgccccacggtcctggcgctttcttccgctacatgcgccagcccatcaaacaggagctcatctgcaagtggctggcggccgacggcaccgcgaccccgagcctctgctccaaaactttcagcaccatgcacgagctggtcacgcacgtcaccgtggagcacgtcggcggcccggaacaggccaaccacatttgcttctgggaggagtgtccgcgccagggaaagcccttcaaagccaaatacaaacttgtaaatcacatccgcgtgcacacgggcgagaagcccttcccttgtcctttcccggggtgtgggaaggtctttgctagatcagaaaatctcaaaatacacaaacgaactcacacag

SEQ ID NO: 66173 - DNA, 1774 bp, Artificial Sequence
  derived and/or modified sequence
gagaagtgatccagacctcttagaagttgggttggggctgccttatgggtggacagggatctctagggaacctcacacccatttcccccagaagcaaaagagtaaattctattattgccaaccaaccaggacttttccatgccagacatcctgccatgaggaaatttcagagcgaggacgcccagcatgccgcccttctgtaggaatgcaaagttaggcctcctttctttcctgatttgtgctggaaggagcttattacctttggggaagaatgccttttggttagaaagaattgaaaataataataccctctgggaaaaggctcaaagtcagaaaatgagatacaagacatccttggtgatgaggaaacgattacggctttaccgaaacactcttaaagagtcaagtagcagctctggacaccatggcccccagctcaccgccgcctccagcccctcggtgttcccgggcctccacgaggagcctccccaggcctcccccagccgtcctttgaatggactcctgcgtctggggctccctggagacatgtacgcgcggccggagcccttcccgccagggcctgcggcccgcagcgacgccctggcagctgccgcagccctgcatggctacgggggcatgaacctgacggtgaacctcgctgcgccccacggtcctggcgctttcttccgctacatgcgccagcccatcaaacaggagctcatctgcaagtggctggcggccgacggcaccgcgaccccgagcctctgctccaaaactttcagcaccatgcacgagctggtcacgcacgtcaccgtggagcacgtcggcggcccggaacaggccaaccacatttgcttctgggaggagtgtccgcgccagggaaagcccttcaaagccaaatacaaacttgtaaatcacatccgcgtgcacacgggcgagaagcccttcccttgtcctttcccggggtgtgggaaggtctttgctagatcagaaaatctcaaaatacacaaacgaactcacacaggcgagaagcccttcagatgcgagttcgagggctgcgagcggcgcttcgccaacagcagcgaccgtaagaagcattcgcacgtgcacactagcgacaagccatacacgtgcaaggtgcggggctgcgacaagtgctacacgcaccccagctcgctgcgtaagcacatgaaggtgcacgggcgctcgccgccgcccagctctggctacgattcggctacaccgtctgccctcgtgtcgccctcgtcggactgcggccacaagtcccaggtggcctcctcggcggcggtggcggcgcgtaccgccgacttgagcgaatgatgtccaccgcgttgctcgcaaggtaatctcgctccgcgcagctgagcgccccgcatctcgcgcctgctacatcaaagggcccgcgcacaaagcagtgtttcttcgccacggtgcatcttcatggtaagttaggatttctatggcaatgtgcaagtcgcactgaaatcctgaaaggccaagcctggagcccgtccaggcttttcattaaggacataatatttacgtctaacagaccttttttcttgtgtatacaagtatatatttttgtttgacgcggactaaatcattttcatttaatttccggtaaacaaaacccacgcgaatgggcacttgtacccgatcataataaaaatggataataatgtgaaggaagaaaagagccgcttgaatcgccgctcagccccctttgtttctgctttctgcggtgatcaga

SEQ ID NO: 66174 - DNA, 4152 bp, Artificial Sequence
  derived and/or modified sequence
gagaagtgatccagacctcttagaagttgggttggggctgccttatgggtggacagggatctctagggaacctcacacccatttcccccagaagcaaaagagtaaattctattattgccaaccaaccaggacttttccatgccagacatcctgccatgaggaaatttcagagcgaggacgcccagcatgccgcccttctgtaggaatgcaaagttaggcctcctttctttcctgatttgtgctggaaggagcttattacctttggggaagaatgccttttggttagaaagaattgaaaataataataccctctgggaaaaggctcaaagtcagaaaatgagatacaagacatccttggtgatgaggaaacgattacggctttaccgaaacactcttaaagagtcaagtagcagctctggacaccatggcccccagctcaccgccgcctccagcccctcggtgttcccgggcctccacgaggagcctccccaggcctcccccagccgtcctttgaatggactcctgcgtctggggctccctggagacatgtacgcgcggccggagcccttcccgccagggcctgcggcccgcagcgacgccctggcagctgccgcagccctgcatggctacgggggcatgaacctgacggtgaacctcgctgcgccccacggtcctggcgctttcttccgctacatgcgccagcccatcaaacaggagctcatctgcaagtggctggcggccgacggcaccgcgaccccgagcctctgctccaaaactttcagcaccatgcacgagctggtcacgcacgtcaccgtggagcacgtcggcggcccggaacaggccaaccacatttgcttctgggaggagtgtccgcgccagggaaagcccttcaaagccaaatacaaacttgtaaatcacatccgcgtgcacacgggcgagaagcccttcccttgtcctttcccggggtgtgggaaggtctttgctagatcagaaaatctcaaaatacacaaacgaactcacacaggcgagaagcccttcagatgcgagttcgagggctgcgagcggcgcttcgccaacagcagcgaccgtaagaagcattcgcacgtgcacactagcgacaagccatacacgtgcaaggtgcggggctgcgacaagtgctacacgcaccccagctcgctgcgtaagcacatgaaggtgcacgggcgctcgccgccgcccagctctggctacgattcggctacaccgtctgccctcgtgtcgccctcgtcggactgcggccacaagtcccaggtggcctcctcggcggcggtggcggcgcgtaccgccgacttgagcgaatgatgtccaccgcgttgctcgcaaggtaatctcgctccgcgcagctgagcgccccgcatctcgcgcctgctacatcaaagggcccgcgcacaaagcagtgtttcttcgccacggtgcatcttcatggtaagttaggatttctatggcaatgtgcaagtcgcactgaaatcctgaaaggccaagcctggagcccgtccaggcttttcattaaggacataatatttacgtctaacagaccttttttcttgtgtatacaagtatatatttttgtttgacgcggactaaatcattttcatttaatttccggtaaacaaaacccacgcgaatgggcacttgtacccgatcataataaaaatggataataatgtgaaggaagaaaagagccgcttgaatcgccgctcagccccctttgtttctgctttctgcggtgatcagagggcgcgtttgggtttgatggcgagtttctaaaggcgaggaaatggtttgtaagaggggaaagaaaaggagaaaggtctaatcaagctcgggttgttcaaagagtcgggttttggggttgaaagtgtgagtttgacggtgcatcagcatgccgcgttaggctcgccatggaaatacgcgcggggagcggccgcttcaaaggcggcacacttcactacagacactctattaagatacatttgcgctgacctttgctttcacgccatttaatactgtcactgcgctctccagtatatacttcctttctagaacccgacttgcccacgtttaggggttcactctgcaccctgatgtgggaggctttggcgcaggggacactttcaggaaagggaggagcacaaggactctgtgcatcttgactgcaccccaaagaggctccaggatcaggagtgaaagattttaaagcagcctccgaagcttaacaaatgagcattccaagctcagttttgtgcaaatcgcctttctgactcttgagtaggatggaggcttaaatttaatggcgacttggggggaagggagccaccctgggggagtctgaggagttcagactgtgcccttgggaatttccactctggctttccgtgccactcttcttcctttccatcccaaaagtctcttgcggcccctgaaacttgtttctttctaaggcagggtgtgtggtacccttaggcctggactagtcctagatgcaaactcaagagcccaaggccaaggggatgtggggaagatggcaggaaagttagaagtccatgttcccttaattgtcttgttgtttattttatccaagtaccccagtgaataggggaaaaataaacacagtgaaaaaaaaaatcaaacagtggagtcttctttagtgccagtccttgtggttgaataaaaaggatggtccgctttctattgagctgagaaatctttgaagtgggagttattatctgagacattcctgcttgtcgtcctaacaacgctgatgaaacgtaaaaggttctttgtcagcgatttgttctcctctctgtcaaactccctctgccccgttagtttcaaaccgtttctaaagagataaaaatcaaacttcttttaaaacaatatccacacactgcatcaatacataactttaggtctaagtcttgctaagggataaacaaaagcaatgcctagacatcagggtcagggcctggtctggtgaagtatgcagaagttggggggccctcgggacaagctttgggacatgaggaaaagaatgcagagagggtgcaagcagaatacataccctaagtccataattgtgtttctgcttctttctgctctggtttgcattcaatcagcccaagttgggtcacatagatgggtttcctttgggtacccctcaggctcctaatattcttgcccaggatccttggaacttaagaatgcagccaagcaattgttaatatctcctgctccttcaaagccacctctgctaaaaatagacccattgtgtgtttcttctcactagcagcaatcaacaagccctttctgccgttaataagaaggagaatagctgaaggagagagatattttattaatttcctgtttccttcagaatcttggcaattgaagtttagaaggtttggtctacaacacagtgatcgaaaatgcatgtaaatgcccatccttcccttcattcacgtgtgaagttgttcattttatattgtgcccagcaaagaaactttcacccagttcaggtttccccaaaactcctgtggtggttttaaaggtggtttaaataaataaggatgtgctggtccccctactctgtgtgtgctgaataaatggcttgtaaagaagtttttccaagctgtaacccatgctgttattatagttgctgcaaaatgttcttcctgatattgattttatttgttaactgaaggtctccatatgtttgtttatattgctaatttatgagaaaatgtaataattgcaatgaatgtgaattatacagacaggcaaacattttgtaatcataattcacatatacacaaaagcctggctgaaatctttagactatttgtaccctctctacccacactgtttgtgatttatcatctgtctctttagtgtcagttaaattatgaactaacttgaaaataaaagttgtttgactgaaagtgattgttgaatgaacaacaaagttgaaagccatggcttgatcttgtaaatatataaatgtaaatgatattaaatctgtgattccttttccctccaaaggcttttgtgtacatggcgctgcatttggctattttctttggaaataaataatgtgatgtttctcttcctcttttg

SEQ ID NO: 66175 - protein, 334 aa, Artificial Sequence
  derived and/or modified sequence
MRYKTSLVMRKRLRLYRNTLKESSSSSGHHGPQLTAASSPSVFPGLHEEPPQASPSRPLNGLLRLGLPGDMYARPEPFPPGPAARSDALAAAAALHGYGGMNLTVNLAAPHGPGAFFRYMRQPIKQELICKWLAADGTATPSLCSKTFSTMHELVTHVTVEHVGGPEQANHICFWEECPRQGKPFKAKYKLVNHIRVHTGEKPFPCPFPGCGKVFARSENLKIHKRTHTGEKPFRCEFEGCERRFANSSDRKKHSHVHTSDKPYTCKVRGCDKCYTHPSSLRKHMKVHGRSPPPSSGYDSATPSALVSPSSDCGHKSQVASSAAVAARTADLSE

SEQ ID NO: 66176 - protein, 372 aa, Artificial Sequence
  derived and/or modified sequence
MNGPCQSLRKAEGLLEGCTSAVTVFRKLPLDSKAQSQKMRYKTSLVMRKRLRLYRNTLKESSSSSGHHGPQLTAASSPSVFPGLHEEPPQASPSRPLNGLLRLGLPGDMYARPEPFPPGPAARSDALAAAAALHGYGGMNLTVNLAAPHGPGAFFRYMRQPIKQELICKWLAADGTATPSLCSKTFSTMHELVTHVTVEHVGGPEQANHICFWEECPRQGKPFKAKYKLVNHIRVHTGEKPFPCPFPGCGKVFARSENLKIHKRTHTGEKPFRCEFEGCERRFANSSDRKKHSHVHTSDKPYTCKVRGCDKCYTHPSSLRKHMKVHGRSPPPSSGYDSATPSALVSPSSDCGHKSQVASSAAVAARTADLSE

SEQ ID NO: 66177 - protein, 229 aa, Artificial Sequence
  derived and/or modified sequence
MRYKTSLVMRKRLRLYRNTLKESSSSSGHHGPQLTAASSPSVFPGLHEEPPQASPSRPLNGLLRLGLPGDMYARPEPFPPGPAARSDALAAAAALHGYGGMNLTVNLAAPHGPGAFFRYMRQPIKQELICKWLAADGTATPSLCSKTFSTMHELVTHVTVEHVGGPEQANHICFWEECPRQGKPFKAKYKLVNHIRVHTGEKPFPCPFPGCGKVFARSENLKIHKRTHT

SEQ ID NO: 66178 - protein, 68 aa, Artificial Sequence
  derived and/or modified sequence
MRYKTSLVMRKRLRLYRNTLKESSSSSGHHGPQLTAASSPSVFPGLHEEPPQASPSRPLNGLLRLGLP

SEQ ID NO: 66179 - protein, 77 aa, Artificial Sequence
  derived and/or modified sequence
MRYKTSLVMRKRLRLYRNTLKESSSSSGHHGPQLTAASSPSVFPGLHEEPPQASPSRPLNGLLRLGLPGDMYARPEP

SEQ ID NO: 66180 - DNA, 1119 bp, Artificial Sequence
  derived and/or modified sequence
atgaacggcccctgccagagcctgagaaaggccgagggcctgctggagggctgcaccagcgccgtgaccgtgttcagaaagctgcccctggacagcaaggcccagagccagaagatgagatacaagaccagcctggtgatgagaaagagactgagactgtacagaaacaccctgaaggagagcagcagcagcagcggccaccacggcccccagctgaccgccgccagcagccccagcgtgttccccggcctgcacgaggagcccccccaggccagccccagcagacccctgaacggcctgctgagactgggcctgcccggcgacatgtacgccagacccgagcccttcccccccggccccgccgccagaagcgacgccctggccgccgccgccgccctgcacggctacggcggcatgaacctgaccgtgaacctggccgccccccacggccccggcgccttcttcagatacatgagacagcccatcaagcaggagctgatctgcaagtggctggccgccgacggcaccgccacccccagcctgtgcagcaagaccttcagcaccatgcacgagctggtgacccacgtgaccgtggagcacgtgggcggccccgagcaggccaaccacatctgcttctgggaggagtgccccagacagggcaagcccttcaaggccaagtacaagctggtgaaccacatcagagtgcacaccggcgagaagcccttcccctgccccttccccggctgcggcaaggtgttcgccagaagcgagaacctgaagatccacaagagaacccacaccggcgagaagcccttcagatgcgagttcgagggctgcgagagaagattcgccaacagcagcgacagaaagaagcacagccacgtgcacaccagcgacaagccctacacctgcaaggtgagaggctgcgacaagtgctacacccaccccagcagcctgagaaagcacatgaaggtgcacggcagaagccccccccccagcagcggctacgacagcgccacccccagcgccctggtgagccccagcagcgactgcggccacaagagccaggtggccagcagcgccgccgtggccgccagaaccgccgacctgagcgagtag

SEQ ID NO: 66181 - DNA, 1119 bp, Artificial Sequence
  derived and/or modified sequence
atgaacggtccctgtcagtctctgagaaaggcagaggggctgttggaaggttgcacttcagcagtaaccgtgtttaggaagctacctctggattcaaaagcgcagtcacagaagatgcggtataagacatccctggtcatgaggaaaaggctgcggctgtatcggaacacgctgaaagaaagtagttcatcttccgggcatcatggtccccagttgaccgcggccagcagcccaagcgtgttcccaggcctacatgaggagccaccgcaagcaagtcctagtagacctctcaatgggttgctgaggttgggcctccccggagacatgtacgcccggcccgagccatttcctcctggaccagccgcacgtagcgatgctttagcggccgccgctgcacttcacggctatggaggcatgaatctgacagttaatctggccgcgcctcatggaccaggtgctttctttcgatatatgcgccagcccatcaagcaggaactcatatgcaagtggctggctgccgatggcaccgcaacgccttcattgtgttccaagacatttagcaccatgcatgaacttgtaactcacgttactgtggagcacgtgggcggccccgagcaggcgaaccacatctgtttctgggaagagtgtccccggcagggtaaaccattcaaagccaagtataaacttgttaaccacatcagggtgcatacaggagagaagccgttcccttgtccctttcccgggtgcggaaaagtcttcgcaaggtctgagaatttaaagatccacaaaaggacccacactggggagaagcctttcaggtgtgagtttgagggctgcgagcgcagatttgccaattccagcgacagaaagaaacacagccacgttcacacgtccgataagccatacacatgcaaggttagagggtgcgacaagtgttacacccaccccagctccctgcggaaacacatgaaggtccacggacgttctccccccccatcctctggctatgattcagcaaccccaagcgccctagtaagtcccagtagtgactgcggacataagagccaggtggcgtcaagtgctgctgtcgccgcacggactgccgatttaagtgaatag

SEQ ID NO: 66182 - DNA, 1119 bp, Artificial Sequence
  derived and/or modified sequence
atgaatggcccctgccagagcctgaggaaggccgagggcctgctggagggctgcaccagcgctgtgacagtgttcaggaagctgcccctggacagcaaggcccagagccagaagatgagatacaagaccagcctggtgatgaggaagaggctgcggctgtacagaaacaccctgaaggagagcagcagcagcagcggccaccacggcccccagctgacagctgccagcagccccagcgtcttccctggcctgcacgaggagcccccccaggccagccccagccggcccctgaatggcctgctgcggctgggcctgcccggggacatgtatgcccggcctgagcccttccccccaggccctgctgcccggagtgatgccctggccgctgctgctgccctgcacggctacggcggcatgaacctgactgtgaacctggccgcccctcatggccctggggccttcttccgctacatgaggcagcccatcaagcaggagctgatctgcaagtggctggccgcagatggaacagccacccccagcctgtgcagcaagaccttcagcaccatgcatgagctggtgacccacgtgacagtggagcacgtgggcggccctgagcaggccaaccacatctgcttctgggaggagtgcccccggcagggcaagcccttcaaggccaagtacaagctggtgaaccacatccgggtgcacactggagagaagcccttcccctgccccttccctggctgcggcaaggtgtttgcccggtctgagaacctgaagatccacaagaggacccacactggagagaagcccttccgctgtgaatttgagggctgtgaaagaagatttgccaacagcagtgacaggaagaagcacagccacgtgcacaccagtgacaagccctacacctgcaaggtgcggggctgtgacaagtgctacacccaccccagcagcctgaggaagcacatgaaggtgcacggccgcagccccccacccagcagcggctatgacagcgccacccccagcgccctggtgagccccagcagtgactgtggccacaagagccaggtggccagcagcgctgctgtggccgccaggacagctgacctgtctgagtag

SEQ ID NO: 66183 - DNA, 1119 bp, Artificial Sequence
  derived and/or modified sequence
atgaacggcccctgccagagcctgcggaaggccgagggcctgctggagggctgcacatcggctgtcacagtctttaggaagttgccgctggattccaaggcccaatcccaaaagatgcgctataaaacaagcctggttatgaggaagagattgcgcctctataggaatacccttaaggagagttctagctcttccggccaccacgggccccagttaacggccgcatcaagcccctccgtctttcccggtctgcacgaagaacctccacaagctagcccaagccgccctctcaatgggctgctgaggctgggtctgccaggagacatgtatgcacggcccgagccttttcccccagggcctgctgctcgcagtgatgcactcgctgctgcagctgccttacacggctatggcgggatgaatctgaccgttaatttggccgctcctcacgggcccggcgcctttttcaggtatatgcgccagccaatcaagcaggagctgatctgtaagtggctggctgcagacgggacggccacaccaagcctgtgcagcaaaacattttcaaccatgcacgaactagtcacccacgttacagtggagcacgtggggggaccagaacaggcaaaccacatctgcttttgggaagagtgccctaggcaaggaaaacctttcaaagctaagtataagctcgtaaaccacattcgggttcacaccggggaaaagccgtttccctgtccgtttcccggttgtggaaaagtctttgcgaggagcgaaaacctcaagatacacaaacgcacccacacaggagaaaagcctttccggtgcgagtttgaaggatgcgagcggagattcgccaacagctcggatagaaaaaaacatagccacgtccatacatccgacaagccatatacttgcaaggtgcgtggctgcgacaagtgctacactcatccatcaagtttgcgcaagcatatgaaagttcatgggcggagcccgccgccatcttccggctatgactccgctactccctccgccctggtctctcctagctccgactgtggccataagtcacaggtcgccagtagtgccgctgtggccgcccggacagctgacctatccgagtag

SEQ ID NO: 66184 - DNA, 1119 bp, Artificial Sequence
  derived and/or modified sequence
atgaacgggccttgtcagtccctgaggaaggctgagggactcttggaaggttgcacatccgcagtcacagtgtttcgcaagctgcctcttgactctaaagcgcaaagccagaaaatgcgatataaaaccagcttggtgatgaggaagaggctacgactgtatagaaacactttaaaagaatctagctcctcctcaggccaccacgggcctcagctgacggctgcgtcaagtccttccgtttttcccggacttcacgaggagcctccacaggcttccccctcaagacccttaaacggcttgctaagattgggcctccctggtgatatgtacgctagacccgagcctttcccccctggacctgctgcacgcagcgacgcgcttgcagcagcagctgcgctccacggctatgggggaatgaacttgaccgtcaatttagcagcccctcacggaccaggagcttttttccggtatatgcggcagccaattaagcaagaactgatttgcaaatggcttgcggctgacgggactgccacaccatccctctgctccaagactttctccaccatgcatgaactcgttacgcacgtgaccgtggagcatgtgggcggacccgaacaggctaatcacatctgtttctgggaggagtgtccgagacaagggaaacctttcaaggccaagtacaaactcgtgaatcacatccgggttcacactggggagaagccatttccctgtccctttcctggctgcgggaaagtcttcgctaggtctgaaaacctgaaaatccataagaggactcacaccggggaaaaacccttccggtgtgagttcgaggggtgtgagaggaggtttgccaactcaagtgacaggaagaaacattcccacgtacacacaagcgataaaccatacacttgtaaagtgagggggtgtgataagtgctacacccaccctagttccctccggaagcacatgaaggtacatggcagatcaccccctccttctagtggctatgattcagccactccgtccgccttggtgtctcccagctcagattgtggacacaagtctcaggtcgcatcgagcgctgcagttgcagccagaactgccgatctgagcgagtag

SEQ ID NO: 66185 - DNA, 3979 bp, Artificial Sequence
  derived and/or modified sequence
gaaagaaagctaggactggctcaaaggttggatctgaaagttggggttgatgaatggcccatgtcaaagtcttaggaaagcggaggggcttttggagggttgcacttcggccgtcaccgtcttcaggaaactccctttggattccaaggctcaaagtcagaaaatgagatacaagacatccttggtgatgaggaaacgattacggctttaccgaaacactcttaaagagtcaagtagcagctctggacaccatggcccccagctcaccgccgcctccagcccctcggtgttcccgggcctccacgaggagcctccccaggcctcccccagccgtcctttgaatggactcctgcgtctggggctccctggagacatgtacgcgcggccggagcccttcccgccagggcctgcggcccgcagcgacgccctggcagctgccgcagccctgcatggctacgggggcatgaacctgacggtgaacctcgctgcgccccacggtcctggcgctttcttccgctacatgcgccagcccatcaaacaggagctcatctgcaagtggctggcggccgacggcaccgcgaccccgagcctctgctccaaaactttcagcaccatgcacgagctggtcacgcacgtcaccgtggagcacgtcggcggcccggaacaggccaaccacatttgcttctgggaggagtgtccgcgccagggaaagcccttcaaagccaaatacaaacttgtaaatcacatccgcgtgcacacgggcgagaagcccttcccttgtcctttcccggggtgtgggaaggtctttgctagatcagaaaatctcaaaatacacaaacgaactcacacaggcgagaagcccttcagatgcgagttcgagggctgcgagcggcgcttcgccaacagcagcgaccgtaagaagcattcgcacgtgcacactagcgacaagccatacacgtgcaaggtgcggggctgcgacaagtgctacacgcaccccagctcgctgcgtaagcacatgaaggtgcacgggcgctcgccgccgcccagctctggctacgattcggctacaccgtctgccctcgtgtcgccctcgtcggactgcggccacaagtcccaggtggcctcctcggcggcggtggcggcgcgtaccgccgacttgagcgaatgatgtccaccgcgttgctcgcaaggtaatctcgctccgcgcagctgagcgccccgcatctcgcgcctgctacatcaaagggcccgcgcacaaagcagtgtttcttcgccacggtgcatcttcatggtaagttaggatttctatggcaatgtgcaagtcgcactgaaatcctgaaaggccaagcctggagcccgtccaggcttttcattaaggacataatatttacgtctaacagaccttttttcttgtgtatacaagtatatatttttgtttgacgcggactaaatcattttcatttaatttccggtaaacaaaacccacgcgaatgggcacttgtacccgatcataataaaaatggataataatgtgaaggaagaaaagagccgcttgaatcgccgctcagccccctttgtttctgctttctgcggtgatcagagggcgcgtttgggtttgatggcgagtttctaaaggcgaggaaatggtttgtaagaggggaaagaaaaggagaaaggtctaatcaagctcgggttgttcaaagagtcgggttttggggttgaaagtgtgagtttgacggtgcatcagcatgccgcgttaggctcgccatggaaatacgcgcggggagcggccgcttcaaaggcggcacacttcactacagacactctattaagatacatttgcgctgacctttgctttcacgccatttaatactgtcactgcgctctccagtatatacttcctttctagaacccgacttgcccacgtttaggggttcactctgcaccctgatgtgggaggctttggcgcaggggacactttcaggaaagggaggagcacaaggactctgtgcatcttgactgcaccccaaagaggctccaggatcaggagtgaaagattttaaagcagcctccgaagcttaacaaatgagcattccaagctcagttttgtgcaaatcgcctttctgactcttgagtaggatggaggcttaaatttaatggcgacttggggggaagggagccaccctgggggagtctgaggagttcagactgtgcccttgggaatttccactctggctttccgtgccactcttcttcctttccatcccaaaagtctcttgcggcccctgaaacttgtttctttctaaggcagggtgtgtggtacccttaggcctggactagtcctagatgcaaactcaagagcccaaggccaaggggatgtggggaagatggcaggaaagttagaagtccatgttcccttaattgtcttgttgtttattttatccaagtaccccagtgaataggggaaaaataaacacagtgaaaaaaaaaatcaaacagtggagtcttctttagtgccagtccttgtggttgaataaaaaggatggtccgctttctattgagctgagaaatctttgaagtgggagttattatctgagacattcctgcttgtcgtcctaacaacgctgatgaaacgtaaaaggttctttgtcagcgatttgttctcctctctgtcaaactccctctgccccgttagtttcaaaccgtttctaaagagataaaaatcaaacttcttttaaaacaatatccacacactgcatcaatacataactttaggtctaagtcttgctaagggataaacaaaagcaatgcctagacatcagggtcagggcctggtctggtgaagtatgcagaagttggggggccctcgggacaagctttgggacatgaggaaaagaatgcagagagggtgcaagcagaatacataccctaagtccataattgtgtttctgcttctttctgctctggtttgcattcaatcagcccaagttgggtcacatagatgggtttcctttgggtacccctcaggctcctaatattcttgcccaggatccttggaacttaagaatgcagccaagcaattgttaatatctcctgctccttcaaagccacctctgctaaaaatagacccattgtgtgtttcttctcactagcagcaatcaacaagccctttctgccgttaataagaaggagaatagctgaaggagagagatattttattaatttcctgtttccttcagaatcttggcaattgaagtttagaaggtttggtctacaacacagtgatcgaaaatgcatgtaaatgcccatccttcccttcattcacgtgtgaagttgttcattttatattgtgcccagcaaagaaactttcacccagttcaggtttccccaaaactcctgtggtggttttaaaggtggtttaaataaataaggatgtgctggtccccctactctgtgtgtgctgaataaatggcttgtaaagaagtttttccaagctgtaacccatgctgttattatagttgctgcaaaatgttcttcctgatattgattttatttgttaactgaaggtctccatatgtttgtttatattgctaatttatgagaaaatgtaataattgcaatgaatgtgaattatacagacaggcaaacattttgtaatcataattcacatatacacaaaagcctggctgaaatctttagactatttgtaccctctctacccacactgtttgtgatttatcatctgtctctttagtgtcagttaaattatgaactaacttgaaaataaaagttgtttgactgaaagtgattgttgaatgaacaacaaagttgaaagccatggcttgatcttgtaaatatataaatgtaaatgatattaaatctgtgattccttttccctccaaaggcttttgtgtacatggcgctgcatttggctattttctttggaaataaataatgtgatgtttctcttcctcttttg

SEQ ID NO: 66186 - DNA, 565 bp, Artificial Sequence
  derived and/or modified sequence
gcttcatcatacattccctaactgcttcctgaaagctggaaaaggagaagtgaaggatgaccgcctcgctggaaccacaaaagagaggcttggaggggtttgtggtcccctctcagccaccccgaaatgatgtgcagaaatgaggcgatcctggcaacaggtggagtgggggtcaaagcgccaagttagcccagatggcagcaagacgatggaacttctccgccccaacctgacggcagatgccgcctgagtccacctcagggcggctccttgccctccctcaccctggtcctgcctcaggaagctgactgctgggatctgctctctgcgcgcggccagcagtgggctcaaagtcagaaaatgagatacaagacatccttggtgatgaggaaacgattacggctttaccgaaacactcttaaagagtcaagtagcagctctggacaccatggcccccagctcaccgccgcctccagcccctcggtgttcccgggcctccacgaggagcctccccaggcctcccccagccgtcctttgaatggactcctgcgtctggggctccctg

SEQ ID NO: 66187 - DNA, 1481 bp, Artificial Sequence
  derived and/or modified sequence
gaaagaaagctaggactggctcaaaggttggatctgaaagttggggttgatgaatggcccatgtcaaagtcttaggaaagcggaggggcttttggagggttgcacttcggccgtcaccgtcttcaggaaactccctttggattccaaggctcaaagtcagaaaatgagatacaagacatccttggtgatgaggaaacgattacggctttaccgaaacactcttaaagagtcaagtagcagctctggacaccatggcccccagctcaccgccgcctccagcccctcggtgttcccgggcctccacgaggagcctccccaggcctcccccagccgtcctttgaatggactcctgcgtctggggctccctggagacatgtacgcgcggccggagcccttcccgccagggcctgcggcccgcagcgacgccctggcagctgccgcagccctgcatggctacgggggcatgaacctgacggtgaacctcgctgcgccccacggtcctggcgctttcttccgctacatgcgccagcccatcaaacaggagctcatctgcaagtggctggcggccgacggcaccgcgaccccgagcctctgctccaaaactttcagcaccatgcacgagctggtcacgcacgtcaccgtggagcacgtcggcggcccggaacaggccaaccacatttgcttctgggaggagtgtccgcgccagggaaagcccttcaaagccaaatacaaacttgtaaatcacatccgcgtgcacacgggcgagaagcccttcccttgtcctttcccggggtgtgggaaggtctttgctagatcagaaaatctcaaaatacacaaacgaactcacacaggcgagaagcccttcagatgcgagttcgagggctgcgagcggcgcttcgccaacagcagcgaccgtaagaagcattcgcacgtgcacactagcgacaagccatacacgtgcaaggtgcggggctgcgacaagtgctacacgcaccccagctcgctgcgtaagcacatgaaggtgcacgggcgctcgccgccgcccagctctggctacgattcggctacaccgtctgccctcgtgtcgccctcgtcggactgcggccacaagtcccaggtggcctcctcggcggcggtggcggcgcgtaccgccgacttgagcgaatgatgtccaccgcgttgctcgcaaggtaatctcgctccgcgcagctgagcgccccgcatctcgcgcctgctacatcaaagggcccgcgcacaaagcagtgtttcttcgccacggtgcatcttcatggtaagttaggatttctatggcaatgtgcaagtcgcactgaaatcctgaaaggccaagcctggagcccgtccaggcttttcattaaggacataatatttacgtctaacagaccttttttcttgtgtatacaagtatatatttttgtttgacgcggactaaatcattttcatttaatttccggtaaacaaaa

SEQ ID NO: 66188 - DNA, 500 bp, Artificial Sequence
  derived and/or modified sequence
ccacttggatttggcctgtggttcaacaagttaaacaactgcttgttctgtgggcagacatccccattgacagaggacttgctgtgtttgtccagcctgagaccttttcaatgactgtttttctttctaggccaaattgagggtgggggccggatagatgcttctgtctggctgctcaactgcctcagccttgcctgacagatgcagaggtcctcaggatggctttaagtatttaaggcggccaatggcttggctcaaagtcagaaaatgagatacaagacatccttggtgatgaggaaacgattacggctttaccgaaacactcttaaagagtcaagtagcagctctggacaccatggcccccagctcaccgccgcctccagcccctcggtgttcccgggcctccacgaggagcctccccaggcctcccccagccgtcctttgaatggactcctgcgtctggggctccctggagacatgtacgcgcggccggagccctt

SEQ ID NO: 66189 - DNA, 813 bp, Artificial Sequence
  derived and/or modified sequence
atggcggaccatatgatggcaatgaatcacggtcgattccccgatggcacgaatgggctgcaccaccatcctgcccataggatgggcatgggccagtttccttccccacatcaccaccagcagcagcaacctcaacacgctttcaatgcgctcatgggagaacacatacattacggggctggaaacatgaacgcaacatctgggatacggcatgctatgggcccaggcaccgtcaatggggggcatcccccatcagcattggctcccgccgctaggttcaacaatagccagttcatgggccccccggttgcaagtcaaggagggtccctcccggcttcgatgcagctgcagaagctcaacaatcaatattttaatcaccacccatatcctcacaatcactatatgccagatctgcatccagccgctggtcaccaaatgaatggaacaaaccagcatttcagagattgcaatccaaagcactcaggaggaagctccacaccaggcggctctggtggatcttctactccaggcggctccggcagttcgagcggaggcggcgccggctcctcgaacagcgggggaggtagcggatcgggcaatatgccagcttcagttgcacatgtgcccgccgcgatgttaccccctaatgttatcgacacggatttcattgatgaagaggtccttatgagcctcgtaatagaaatgggtttggatagaataaaggagttgcccgaattgtggctgggccagaatgagttcgactttatgactgacttcgtttgtaaacagcagccaagtcgtgtgagttgctag

SEQ ID NO: 66190 - DNA, 645 bp, Artificial Sequence
  derived and/or modified sequence
atggccgatcatatgatggctatgaatcacggccgtttccctgatggcactaatgggctccatcaccacccggcacacagaatggggatggggcagttcccgagcccccaccatcaccagcaacagcagcctcaacatgcattcaatgcactcatgggcgaacacatccattacggcgccgggaacatgaacgccacctccggtatcagacacgctatgggtcccgggactgtgaacgggggccatcctccttctgctttggcccccgctgcgcgtttcaataatagtcagtttatgggccctcccgtggcctcccagggagggtctctgcctgcttcaatgcagctgcaaaaattgaataatcagtattttaaccatcacccctaccctcacaaccactatatgcctgacttacaccccgccgccgggcaccagatgaacggcaccaatcaacattttagagattgcaacccaccaaatgtaatcgacactgacttcattgatgaagaggtgcttatgagtttggttatcgagatgggactggataggatcaaggaattgcccgagttgtggctcggacagaacgagtttgacttcatgaccgacttcgtttgtaagcagcagccaagtcgagtttcttgctag

SEQ ID NO: 66191 - DNA, 813 bp, Artificial Sequence
  derived and/or modified sequence
atggccgaccatatgatggccatgaatcacggccgatttcccgacggaaccaatgggctgcatcatcatcccgcccatcggatgggaatggggcagttcccatcccctcaccaccaccaacagcagcagccacagcatgcctttaacgccctgatgggggaacatattcattacggtgctggtaatatgaacgctacaagtggcatccgccatgccatgggccctggcaccgtgaatggaggacatccgccctctgccctggctcctgcagcccggttcaacaattcacagtttatggggccacccgttgccagccaagggggcagcctcccagcctcaatgcaattgcagaaacttaataatcagtacttcaatcatcacccataccctcacaaccattacatgcctgatttacaccccgcagctggacatcaaatgaatggaactaaccaacatttccgcgattgcaacccaaaacacagcggagggtcaagtacaccgggggggtccgggggatcttcaactcctgggggcagcggaagttccagcggaggaggggctggatcttctaatagcggaggcggatccgggtcaggtaacatgccagcatcagtggcccacgttcccgcagccatgctcccgcccaatgtgattgacaccgattttatcgacgaggaagtgctgatgagtctcgttatcgagatgggcctggataggataaaggagttgcctgagctgtggttggggcagaacgagtttgattttatgaccgacttcgtgtgcaagcagcaaccgtctcgagtcagttgttag

SEQ ID NO: 66192 - DNA, 813 bp, Artificial Sequence
  derived and/or modified sequence
atggcagatcacatgatggcaatgaaccacggcaggttccccgacggaacgaacggactacatcatcatccggctcaccgtatgggcatgggacagttcccaagcccccatcatcaccagcaacagcagccccagcacgcgtttaacgccctcatgggggaacacattcactatggagcaggcaacatgaacgctacttctgggatccgccatgctatgggtccgggtaccgtgaatggcggacacccacctagcgccctggccccggctgctcggttcaacaattctcagtttatggggcccccggtggccagtcaggggggatctttgcccgctagcatgcagctgcagaagctgaataaccagtatttcaaccaccatccctacccacacaaccattatatgcctgatctgcaccccgcagctggacaccagatgaacggtaccaaccagcactttagggattgcaatcctaagcactctgggggctcaagtaccccaggcggatcgggcggcagtagtacccctggcggctccgggtcgagctctggaggcggagccggtagctccaactctggcggaggctcaggctctgggaatatgcccgcaagcgtggcccacgtgcctgctgccatgttacctccgaatgttatagacacagactttatagacgaagaggtactgatgtccctcgtgattgagatgggactcgaccgcatcaaggagttacccgagctttggctgggccagaatgagtttgattttatgacagactttgtttgcaaacagcaaccttctagagtgtcttgctag

SEQ ID NO: 66193 - DNA, 813 bp, Artificial Sequence
  derived and/or modified sequence
atggctgaccacatgatggccatgaaccacggccgcttcccagatggcaccaacggcctgcaccaccacccagcccacaggatgggcatgggccagttccccagcccccaccaccaccagcagcagcagccccagcacgccttcaatgccctgatgggagagcacatccactacggggccggcaacatgaatgccaccagcggcatcagacatgccatgggccctggcaccgtgaatggaggccaccccccatctgccctggccccagctgcccgcttcaacaacagccagttcatgggcccccctgtggccagccagggcggcagcctgcctgcctccatgcagctgcagaagctgaacaaccagtacttcaaccaccacccctacccccacaaccactacatgccagacctgcaccctgctgctggccaccagatgaatggcaccaaccagcacttccgggactgcaaccccaagcacagcggcggcagcagcaccccaggcggcagcggcggcagcagcacccctgggggcagcggcagcagcagcggcggcggggccggcagcagcaacagcggcggcggcagcggcagcggcaacatgcctgcctctgtggcccacgtgcctgctgccatgctgccccccaacgtcatcgacacagacttcattgatgaggaggtgctgatgagcctggtgattgagatgggcctggaccgcatcaaggagctgcctgagctgtggctgggccagaatgaatttgacttcatgacagactttgtgtgcaagcagcagcccagccgggtgtcctgctag

SEQ ID NO: 66194 - DNA, 645 bp, Artificial Sequence
  derived and/or modified sequence
atggctgaccacatgatggccatgaaccacggccgcttcccagatggcaccaacggcctgcaccaccacccagcccacaggatgggcatgggccagttccccagcccccaccaccaccagcagcagcagccccagcacgccttcaatgccctgatgggagagcacatccactacggggccggcaacatgaatgccaccagcggcatcagacatgccatgggccctggcaccgtgaatggaggccaccccccatctgccctggccccagctgcccgcttcaacaacagccagttcatgggcccccctgtggccagccagggcggcagcctgcctgcctccatgcagctgcagaagctgaacaaccagtacttcaaccaccacccctacccccacaaccactacatgccagacctgcaccctgctgctggccaccagatgaatggcaccaaccagcacttccgggactgcaacccccccaacgtcatcgacacagacttcattgatgaggaggtgctgatgagcctggtgattgagatgggcctggaccgcatcaaggagctgcctgagctgtggctgggccagaatgaatttgacttcatgacagactttgtgtgcaagcagcagcccagccgggtgtcctgctag

SEQ ID NO: 66195 - DNA, 813 bp, Artificial Sequence
  derived and/or modified sequence
atggccgaccacatgatggccatgaaccacggccggttccccgacgggacaaatgggcttcatcaccatccagcgcaccggatgggcatgggtcagtttccctcgccgcaccaccaccagcaacagcagcctcagcatgctttcaacgcactgatgggcgagcatattcattatggcgctggtaacatgaacgcgacatcaggtataagacatgcaatgggacctggcacagttaacggcgggcaccctccttccgctctggcccccgctgcacgctttaataattcccagtttatgggacccccagtagcctcccaggggggcagtctccctgcctctatgcaactgcagaaactcaataaccagtacttcaaccaccatccctatcctcataatcattacatgcctgatctgcacccagctgcaggtcaccagatgaacggtaccaatcaacactttcgcgactgtaatcctaaacacagtggagggagcagcacccccggcggatccggcgggagcagcacacctggaggtagcggttcaagctcaggcgggggagccgggtctagcaatagcggaggcggaagtggaagcgggaatatgcccgcgtccgtcgcccacgtgcccgctgcaatgctccctcctaatgtcatcgacaccgacttcatagatgaagaggtccttatgagcctagtgattgagatgggactggatcgaataaaggaacttcccgagctgtggttgggacagaatgaattcgactttatgaccgacttcgtatgtaaacagcaaccctcgagagtctcttgctag

SEQ ID NO: 66196 - DNA, 645 bp, Artificial Sequence
  derived and/or modified sequence
atggccgaccacatgatggccatgaaccacggccggttccccgacggaactaatggcttgcatcaccacccagcgcacaggatggggatgggccagttcccaagcccgcatcatcaccagcagcaacaaccccagcatgccttcaacgccctcatgggggagcatattcactatggagcaggcaacatgaacgcgaccagcgggattagacacgcaatggggccaggcaccgtcaacggcggacacccgccatcagctctggccccagcagcccggtttaacaacagccaattcatgggtccacccgtggcatcccaaggtgggtctttaccagcctctatgcagctgcaaaaactcaacaaccagtacttcaatcaccacccctacccacacaatcactacatgcccgatcttcatccggcagcgggtcatcagatgaatggcactaaccaacatttcagggattgtaatcctccaaacgtgattgatacagactttattgacgaggaggttctgatgagcctggtcatcgaaatgggcctggatcggattaaagagctgcctgaactgtggctaggacaaaatgaattcgactttatgactgattttgtttgcaaacagcaaccatcaagagtgtcatgttag

SEQ ID NO: 66197 - DNA, 813 bp, Artificial Sequence
  derived and/or modified sequence
atggccgaccacatgatggccatgaaccacggccggttccccgacggtactaacgggttacatcaccacccggcccaccggatgggtatggggcagttccccagcccacaccatcatcaacagcagcagcctcagcacgctttcaacgctctcatgggagaacacattcactatggtgctggaaacatgaacgccaccagtggtatcagacatgctatgggccccggtaccgtcaatggaggccatcccccatccgctctggccccagcggccaggttcaacaatagccagtttatggggcctccggttgctagccagggcggctccctgcccgcttctatgcagctgcagaaattgaacaaccagtactttaaccaccacccgtaccctcacaaccattatatgcccgacctccatcccgctgctggccatcagatgaacggcaccaatcagcacttcagggactgcaacccgaagcactctggcggatcctcaacccccggcggctccggcgggagcagcaccccaggcgggtctggaagctcgtccggggggggagccggatcctcgaacagcggcggtggatcgggtagcggaaacatgcctgctagcgtggcccacgtgccagctgctatgttaccccctaatgtaatcgacacagacttcatcgatgaggaggtccttatgtctctcgtcattgaaatgggtttggatagaattaaagaactacccgagctctggctaggccagaacgagtttgatttcatgaccgattttgtgtgcaagcagcagccatctagggtctcatgctag

SEQ ID NO: 66198 - DNA, 813 bp, Artificial Sequence
  derived and/or modified sequence
atggccgaccacatgatggccatgaaccacggccggttccccgacgggacgaatgggctgcaccatcacccagcccaccgaatgggaatgggtcagtttccctcacctcaccaccatcagcagcagcagccacagcatgccttcaacgccctgatgggagagcatattcactacggagccggaaacatgaacgcaacaagtgggattagacacgccatgggccccgggactgtgaacggaggccatccccctagcgcactggctccagctgcccggtttaacaactcccaattcatgggcccacccgtagcctcacaaggagggagtctgccggcatccatgcagttgcagaaactcaataaccaatactttaatcaccatccctatccacataaccattatatgcccgacttgcaccccgcagccggacatcagatgaacggtaccaatcagcacttccgggactgcaaccctaagcatagcggaggctcatctaccccaggtgggtcaggaggctccagcacccccggtggcagcggatcatctagcggcggcggcgccggttcttctaactcaggcggcggtagtggctccggcaatatgcccgccagcgtggctcacgtgcccgctgccatgctgccccccaatgtaattgacaccgactttatagacgaagaggtactcatgagcctggtaatagaaatgggtctggatcgcataaaggagctgcctgagctctggcttgggcaaaatgaattcgactttatgacagacttcgtttgcaaacagcagccgtctagagtctcttgctag

SEQ ID NO: 66199 - DNA, 813 bp, Artificial Sequence
  derived and/or modified sequence
atggctgaccacatgatggcaatgaatcacggtcgttttcccgacgggactaacgggctgcatcatcatcccgctcataggatgggaatgggacaattcccaagtccacatcaccaccagcagcagcagccacagcacgccttcaacgctcttatgggcgagcacatacactatggtgccggaaatatgaatgctacctctggcattaggcatgccatggggcctggtacggtgaatgggggtcatcctcctagcgcgttggctcctgctgcaagattcaacaacagccagtttatgggccctccggtagcctcccaagggggatcactccccgcttccatgcaactgcagaagctcaataatcagtactttaaccaccacccctatccacataaccattatatgccagatctacatcccgcagccggtcaccagatgaacgggaccaatcagcactttagggactgtaatccgaagcactcgggaggtagtagtactccagggggatcagggggaagctctacccctggcggttcgggtagttctagcggaggtggagcagggtcctccaattccggcggagggtctggctctgggaacatgcccgctagcgtggctcatgttcctgccgctatgctcccgccaaacgtgatcgacactgatttcattgacgaagaggtccttatgagcctggtgatagaaatggggctggaccgaattaaggaacttccggaactctggttggggcaaaatgagtttgacttcatgaccgatttcgtatgtaagcagcagccctcccgggtgtcttgttag

SEQ ID NO: 66200 - DNA, 645 bp, Artificial Sequence
  derived and/or modified sequence
atggcggaccatatgatggcgatgaaccacggccgattcccagatggtactaacggcctgcatcatcacccagcccacaggatgggtatgggacaattcccgtctccacaccaccaccagcaacagcaacctcagcacgctttcaatgccctcatgggggaacatatacactatggcgcaggtaatatgaatgccacttctggaatcaggcacgcgatgggacctggcactgtgaacgggggacatccaccttccgctctggctcccgctgcccgtttcaacaattcccaatttatgggccctccggtcgcttcgcagggcggatcgcttcctgcaagcatgcaattacagaagctgaataaccaatattttaatcaccacccttacccccataaccactatatgccggatctgcacccggctgcaggtcatcagatgaatggtactaaccaacatttccgagactgtaaccctccaaacgtcatcgacacggatttcattgatgaagaggtgcttatgtctcttgtgatagaaatgggcctagacagaataaaagagctgccagaactgtggttaggccagaacgagtttgacttcatgactgatttcgtatgcaaacagcagccaagtagagttagttgctag

SEQ ID NO: 66201 - DNA, 813 bp, Artificial Sequence
  derived and/or modified sequence
atggctgaccacatgatggccatgaaccacgggagatttccagacggaactaatgggctgcaccatcacccagcccatcgcatggggatggggcaattccccagtccgcatcatcaccagcaacagcagcctcagcacgcattcaacgcactaatgggcgagcacattcattacggtgccggtaatatgaacgctacctctggcatacgccatgctatgggacctggtacggtcaatggaggacatcctccttctgccttagcccctgcagccagattcaataatagccagttcatgggccctcccgtggcctcccagggaggctctctgcctgcgtccatgcagctgcagaaactcaacaaccagtatttcaaccaccacccctaccctcataaccattacatgcccgatctgcaccctgcagccggtcaccagatgaacggcacaaatcagcacttccgggactgtaatccaaagcatagtgggggatcttccaccccgggtggatctggaggctcttcaactcctgggggatctgggagttcatcaggaggaggagctgggtcttccaactcgggaggtggcagcgggagcggtaatatgcccgcatcagtagcccatgtgccggcagcgatgctccctccaaatgtgatcgataccgattttatcgatgaagaagtgctcatgtccttagtgatcgagatgggcttggataggatcaaggaattgccggagctgtggctgggccaaaacgaatttgattttatgaccgacttcgtttgcaaacaacagcctagccgggtgagctgttag

SEQ ID NO: 66202 - DNA, 813 bp, Artificial Sequence
  derived and/or modified sequence
atggccgaccatatgatggctatgaaccacggccgattcccggacggcaccaacggcctgcaccatcaccctgcccaccgcatggggatggggcaattcccgtctccccaccaccaccagcagcagcagccccagcacgcatttaatgcactgatgggcgagcacatccattatggcgcaggaaacatgaacgctacttccggcatccgccatgcaatgggcccaggcacagtgaacggtggacaccccccatccgctctagcacccgctgccaggttcaataattcacagttcatggggccacctgtggcaagccagggagggtcccttcctgcaagtatgcagcttcagaagctgaataatcagtacttcaaccaccatccgtacccacataatcactacatgccggacttacaccctgccgctggccaccaaatgaatgggactaaccagcattttagggactgcaaccccaaacacagtggagggtctagcacccccggaggttccggtggcagctcgactcccggagggtctggctcatccagtggcggaggtgccggatcctctaatagtgggggtggctcgggctccggtaacatgcctgcgagcgtagcccatgtgccagccgctatgctgcccccaaacgtaattgataccgattttattgatgaagaagtgctgatgtcccttgttatcgaaatggggctggacagaataaaggaattaccagagttatggctcgggcagaacgaattcgactttatgactgactttgtgtgcaagcaacagccaagcagagtgtcttgctag

SEQ ID NO: 66203 - DNA, 645 bp, Artificial Sequence
  derived and/or modified sequence
atggcagaccatatgatggccatgaaccacgggcgcttccccgacggcaccaatgggctgcaccatcaccctgcccaccgcatgggcatggggcagttcccgagcccccatcaccaccagcagcagcagccccagcacgccttcaacgccctaatgggcgagcacatacactacggcgcgggcaacatgaatgccacgagcggcatcaggcatgcgatggggccggggactgtgaacggagggcaccccccgagcgcgctggcccccgcggccaggtttaacaactcccagttcatgggtcccccggtggccagccagggaggctccctgccggccagcatgcagctgcagaagctcaacaaccagtatttcaaccatcacccctacccccacaaccactacatgccggatttgcaccctgctgcaggccaccagatgaacgggacaaaccagcacttccgagattgcaacccccccaatgtcatagacactgatttcatcgacgaggaagttcttatgtccttggtgatagaaatgggtttggaccgcatcaaggagctgcccgaactctggctggggcaaaacgagtttgattttatgacggacttcgtgtgcaaacagcagcccagcagagtgagctgttga

SEQ ID NO: 66204 - DNA, 813 bp, Artificial Sequence
  derived and/or modified sequence
atggccgaccacatgatggccatgaaccacggcagattccccgacggcaccaacggcctgcaccaccaccccgcccacagaatgggcatgggccagttccccagcccccaccaccaccagcagcagcagccccagcacgccttcaacgccctgatgggcgagcacatccactacggcgccggcaacatgaacgccaccagcggcatcagacacgccatgggccccggcaccgtgaacggcggccacccccccagcgccctggcccccgccgccagattcaacaacagccagttcatgggcccccccgtggccagccagggcggcagcctgcccgccagcatgcagctgcagaagctgaacaaccagtacttcaaccaccacccctacccccacaaccactacatgcccgacctgcaccccgccgccggccaccagatgaacggcaccaaccagcacttcagagactgcaaccccaagcacagcggcggcagcagcacccccggcggcagcggcggcagcagcacccccggcggcagcggcagcagcagcggcggcggcgccggcagcagcaacagcggcggcggcagcggcagcggcaacatgcccgccagcgtggcccacgtgcccgccgccatgctgccccccaacgtgatcgacaccgacttcatcgacgaggaggtgctgatgagcctggtgatcgagatgggcctggacagaatcaaggagctgcccgagctgtggctgggccagaacgagttcgacttcatgaccgacttcgtgtgcaagcagcagcccagcagagtgagctgctag

SEQ ID NO: 66205 - DNA, 645 bp, Artificial Sequence
  derived and/or modified sequence
atggccgaccacatgatggccatgaaccacggcagattccccgacggcaccaacggcctgcaccaccaccccgcccacagaatgggcatgggccagttccccagcccccaccaccaccagcagcagcagccccagcacgccttcaacgccctgatgggcgagcacatccactacggcgccggcaacatgaacgccaccagcggcatcagacacgccatgggccccggcaccgtgaacggcggccacccccccagcgccctggcccccgccgccagattcaacaacagccagttcatgggcccccccgtggccagccagggcggcagcctgcccgccagcatgcagctgcagaagctgaacaaccagtacttcaaccaccacccctacccccacaaccactacatgcccgacctgcaccccgccgccggccaccagatgaacggcaccaaccagcacttcagagactgcaacccccccaacgtgatcgacaccgacttcatcgacgaggaggtgctgatgagcctggtgatcgagatgggcctggacagaatcaaggagctgcccgagctgtggctgggccagaacgagttcgacttcatgaccgacttcgtgtgcaagcagcagcccagcagagtgagctgctag

SEQ ID NO: 66206 - protein, 270 aa, Artificial Sequence
  derived and/or modified sequence
MADHMMAMNHGRFPDGTNGLHHHPAHRMGMGQFPSPHHHQQQQPQHAFNALMGEHIHYGAGNMNATSGIRHAMGPGTVNGGHPPSALAPAARFNNSQFMGPPVASQGGSLPASMQLQKLNNQYFNHHPYPHNHYMPDLHPAAGHQMNGTNQHFRDCNPKHSGGSSTPGGSGGSSTPGGSGSSSGGGAGSSNSGGGSGSGNMPASVAHVPAAMLPPNVIDTDFIDEEVLMSLVIEMGLDRIKELPELWLGQNEFDFMTDFVCKQQPSRVSC

SEQ ID NO: 66207 - protein, 214 aa, Artificial Sequence
  derived and/or modified sequence
MADHMMAMNHGRFPDGTNGLHHHPAHRMGMGQFPSPHHHQQQQPQHAFNALMGEHIHYGAGNMNATSGIRHAMGPGTVNGGHPPSALAPAARFNNSQFMGPPVASQGGSLPASMQLQKLNNQYFNHHPYPHNHYMPDLHPAAGHQMNGTNQHFRDCNPPNVIDTDFIDEEVLMSLVIEMGLDRIKELPELWLGQNEFDFMTDFVCKQQPSRVSC

SEQ ID NO: 66208 - DNA, 1905 bp, Artificial Sequence
  derived and/or modified sequence
gtcctgccgagctgtgagggcaacggaggggaaataaaagggaacggctccgaatctgccccagcggccgctgcgagacctcggcgccgacatcgcgacagcgaagcgctttgcacgccaggaaggtcccctctatgtgctgctgagccggtcctggacgcgacgagcccgccctcggtcttcggagcagaaatcgcaaaaacggaaggactggaaatggcagaccatatgatggccatgaaccacgggcgcttccccgacggcaccaatgggctgcaccatcaccctgcccaccgcatgggcatggggcagttcccgagcccccatcaccaccagcagcagcagccccagcacgccttcaacgccctaatgggcgagcacatacactacggcgcgggcaacatgaatgccacgagcggcatcaggcatgcgatggggccggggactgtgaacggagggcaccccccgagcgcgctggcccccgcggccaggtttaacaactcccagttcatgggtcccccggtggccagccagggaggctccctgccggccagcatgcagctgcagaagctcaacaaccagtatttcaaccatcacccctacccccacaaccactacatgccggatttgcaccctgctgcaggccaccagatgaacgggacaaaccagcacttccgagattgcaaccccaagcacagcggcggcagcagcacccccggcggctcgggcggcagcagcacccccggcggctctggcagcagctcgggcggcggcgcgggcagcagcaacagcggcggcggcagcggcagcggcaacatgcccgcctccgtggcccacgtccccgctgcaatgctgccgcccaatgtcatagacactgatttcatcgacgaggaagttcttatgtccttggtgatagaaatgggtttggaccgcatcaaggagctgcccgaactctggctggggcaaaacgagtttgattttatgacggacttcgtgtgcaaacagcagcccagcagagtgagctgttgactcgatcgaaaccccggcgaaagaaatcaaacccccaacttcttcggcgtgaattaaaagaaacattcccttagacacagtatctcacttttcagatcttgaaaggtttgagaacttggaaacaaagtaaactataaacttgtacaaattggttttaaaaaaaattgctgccacttttttttcctgtttttgtttcgtttttgtagccttgacattcacccacctcccttatgtagttgaaatatctagctaacttggtctttttcgttgtttgtttttactcctttccctcactttctccagtgctcaactgttagatattaatcttggcaaactgcttaatcttgtggattttgtagatggtttcaaatgactgaactgcattcagatttacgagtgaaaggaaaaattgcattagttggttgcatgaacttcgaagggcagatattactgcacaaactgccatctcgcttcatttttttaactatgcatttgagtacagactaatttttaaaatatgctaaactggaagattaaacagatgtgggccaaactgttctggatcaggaaagtcatactgttcactttcaagttggctgtcccccccgccgccccccccacccccatatgtacagatgataatagggtgtggaatgtcgtcagtggcaaacatttcacagatttttattttgtttctgtcttcaacatttttgacactgtgctaatagttatattcagtacatgaaaagatactactgtgttgaaagctttttaggaaattttgacagtatttttgtacaaaacatttttttgaaaaaatacttgttaatttattctattttaatttgccaatgtcaataaaaagttaagaaataa

SEQ ID NO: 66209 - DNA, 1793 bp, Artificial Sequence
  derived and/or modified sequence
gagggcagggtttgcccggaggaagagcgtgaggcgaagctggggaataacaacaggatgtgcaacaacaggatgaggagggctgatttaatgcctgaagactggaaatggcagaccatatgatggccatgaaccacgggcgcttccccgacggcaccaatgggctgcaccatcaccctgcccaccgcatgggcatggggcagttcccgagcccccatcaccaccagcagcagcagccccagcacgccttcaacgccctaatgggcgagcacatacactacggcgcgggcaacatgaatgccacgagcggcatcaggcatgcgatggggccggggactgtgaacggagggcaccccccgagcgcgctggcccccgcggccaggtttaacaactcccagttcatgggtcccccggtggccagccagggaggctccctgccggccagcatgcagctgcagaagctcaacaaccagtatttcaaccatcacccctacccccacaaccactacatgccggatttgcaccctgctgcaggccaccagatgaacgggacaaaccagcacttccgagattgcaaccccaagcacagcggcggcagcagcacccccggcggctcgggcggcagcagcacccccggcggctctggcagcagctcgggcggcggcgcgggcagcagcaacagcggcggcggcagcggcagcggcaacatgcccgcctccgtggcccacgtccccgctgcaatgctgccgcccaatgtcatagacactgatttcatcgacgaggaagttcttatgtccttggtgatagaaatgggtttggaccgcatcaaggagctgcccgaactctggctggggcaaaacgagtttgattttatgacggacttcgtgtgcaaacagcagcccagcagagtgagctgttgactcgatcgaaaccccggcgaaagaaatcaaacccccaacttcttcggcgtgaattaaaagaaacattcccttagacacagtatctcacttttcagatcttgaaaggtttgagaacttggaaacaaagtaaactataaacttgtacaaattggttttaaaaaaaattgctgccacttttttttcctgtttttgtttcgtttttgtagccttgacattcacccacctcccttatgtagttgaaatatctagctaacttggtctttttcgttgtttgtttttactcctttccctcactttctccagtgctcaactgttagatattaatcttggcaaactgcttaatcttgtggattttgtagatggtttcaaatgactgaactgcattcagatttacgagtgaaaggaaaaattgcattagttggttgcatgaacttcgaagggcagatattactgcacaaactgccatctcgcttcatttttttaactatgcatttgagtacagactaatttttaaaatatgctaaactggaagattaaacagatgtgggccaaactgttctggatcaggaaagtcatactgttcactttcaagttggctgtcccccccgccgccccccccacccccatatgtacagatgataatagggtgtggaatgtcgtcagtggcaaacatttcacagatttttattttgtttctgtcttcaacatttttgacactgtgctaatagttatattcagtacatgaaaagatactactgtgttgaaagctttttaggaaattttgacagtatttttgtacaaaacatttttttgaaaaaatacttgttaatttattctattttaatttgccaatgtcaataaaaagttaagaaa

SEQ ID NO: 66210 - DNA, 1776 bp, Artificial Sequence
  derived and/or modified sequence
caaagggggtgtgggctcgggtccccccgcccgatcgcaggggaaggggctgtttgtgcagcgtccggctgtgttatgagtggactggaaatggcagaccatatgatggccatgaaccacgggcgcttccccgacggcaccaatgggctgcaccatcaccctgcccaccgcatgggcatggggcagttcccgagcccccatcaccaccagcagcagcagccccagcacgccttcaacgccctaatgggcgagcacatacactacggcgcgggcaacatgaatgccacgagcggcatcaggcatgcgatggggccggggactgtgaacggagggcaccccccgagcgcgctggcccccgcggccaggtttaacaactcccagttcatgggtcccccggtggccagccagggaggctccctgccggccagcatgcagctgcagaagctcaacaaccagtatttcaaccatcacccctacccccacaaccactacatgccggatttgcaccctgctgcaggccaccagatgaacgggacaaaccagcacttccgagattgcaaccccaagcacagcggcggcagcagcacccccggcggctcgggcggcagcagcacccccggcggctctggcagcagctcgggcggcggcgcgggcagcagcaacagcggcggcggcagcggcagcggcaacatgcccgcctccgtggcccacgtccccgctgcaatgctgccgcccaatgtcatagacactgatttcatcgacgaggaagttcttatgtccttggtgatagaaatgggtttggaccgcatcaaggagctgcccgaactctggctggggcaaaacgagtttgattttatgacggacttcgtgtgcaaacagcagcccagcagagtgagctgttgactcgatcgaaaccccggcgaaagaaatcaaacccccaacttcttcggcgtgaattaaaagaaacattcccttagacacagtatctcacttttcagatcttgaaaggtttgagaacttggaaacaaagtaaactataaacttgtacaaattggttttaaaaaaaattgctgccacttttttttcctgtttttgtttcgtttttgtagccttgacattcacccacctcccttatgtagttgaaatatctagctaacttggtctttttcgttgtttgtttttactcctttccctcactttctccagtgctcaactgttagatattaatcttggcaaactgcttaatcttgtggattttgtagatggtttcaaatgactgaactgcattcagatttacgagtgaaaggaaaaattgcattagttggttgcatgaacttcgaagggcagatattactgcacaaactgccatctcgcttcatttttttaactatgcatttgagtacagactaatttttaaaatatgctaaactggaagattaaacagatgtgggccaaactgttctggatcaggaaagtcatactgttcactttcaagttggctgtcccccccgccgccccccccacccccatatgtacagatgataatagggtgtggaatgtcgtcagtggcaaacatttcacagatttttattttgtttctgtcttcaacatttttgacactgtgctaatagttatattcagtacatgaaaagatactactgtgttgaaagctttttaggaaattttgacagtatttttgtacaaaacatttttttgaaaaaatacttgttaatttattctattttaatttgccaatgtcaataaaaagttaagaaa

SEQ ID NO: 66211 - protein, 417 aa, Artificial Sequence
  derived and/or modified sequence
MPQPSVSGMDPPFGDAFRSHTFSEQTLMSTDLLANSSDPDFMYELDREMNYQQNPRDNFLSLEDCKDIENLESFTDVLDNEGALTSNWEQWDTYCEDLTKYTKLTSCDIWGTKEVDYLGLDDFSSPYQDEEVISKTPTLAQLNSEDSQSVSDSLYYPDSLFSVKQNPLPSSFPGKKITSRAAAPVCSSKTLQAEVPLSDCVQKASKPTSSTQIMVKTNMYHNEKVNFHVECKDYVKKAKVKINPVQQSRPLLSQIHTDAAKENTCYCGAVAKRQEKKGMEPLQGHATPALPFKETQELLLSPLPQEGPGSLAAGESSSLSASTSVSDSSQKKEEHNYSLFVSDNLGEQPTKCSPEEDEEDEEDVDDEDHDEGFGSEHELSENEEEEEEEEDYEDDKDDDISDTFSEPGIIMLASLPD

SEQ ID NO: 66212 - protein, 26 aa, Artificial Sequence
  derived and/or modified sequence
MPQPSVSGMDPPFGDAFRSHTFSEQT

SEQ ID NO: 66213 - DNA, 1660 bp, Artificial Sequence
  derived and/or modified sequence
gggaacccgtcaggaaggacataaacaaaacaaacccgaggcagcatggagaggggccgtggcccctgcagcggaaccggacccagtccctgagccgcccctacacccacagacagcatcgcacagaattattttaaaaaaaagcagtgatccaagcaattgaattggaagcactctggggaaacctgctgtttattgtggaaatcatcttcgatcttggaattgaaagtaaagctggaaaggaatttacaaacaagaaaaaaaagaagtttggaatcggattcacaggatctgggcttggaaatgcctcagcctagtgtaagcggaatggatccgcctttcggggatgcctttcgaagccacaccttttcggaacaaactctgatgagcacagatctcttagcaaacagttcggatccagatttcatgtatgaactggatagagagatgaactaccaacagaatcctagagacaactttctttctttggaggactgcaaagacattgaaaatctggagtctttcacagatgtcctggataatgagggtgctttaacctcaaactgggaacagtgggatacatactgtgaagacctaacgaaatataccaaactaaccagctgtgacatctggggaacaaaagaagtggattacttgggtcttgatgacttttctagtccttaccaagatgaagaggttataagtaaaactccaactttagctcaacttaatagtgaggactcacagtctgtttctgattccctttattaccccgattcacttttcagtgtcaaacaaaatcccttaccctcttcattccctggtaaaaagatcacaagcagagcagctgctcctgtgtgttcttctaagactctgcaggctgaggtccctttgtcagactgtgtccaaaaagcaagtaaacccacttcaagcacacaaatcatggtgaagaccaacatgtatcataatgaaaaggtgaactttcatgttgaatgtaaagactatgtaaaaaaggcaaaggtaaagatcaacccagtgcaacagagccggcccttgttgagccagattcacacagatgcagcaaaggagaacacctgctactgtggtgcagtggcaaagagacaagagaaaaaagggatggagcctcttcaaggtcatgccactcccgctttgccttttaaagaaacccaggaactattactaagtcccctgccccaggaaggtcctgggtcacttgcagcaggagagagcagcagtctttctgccagtacatcagtctcagattcatcccagaaaaaagaagagcacaattattctctttttgtctccgacaacttgggtgaacagccaactaaatgcagtcctgaagaagatgaggaggacgaggaggatgttgatgatgaggaccatgatgaaggattcggcagtgagcatgaactgtctgaaaatgaggaggaggaagaagaggaagaggattatgaagatgacaaggatgatgatattagtgatactttctctgaaccaggtattataatgcttgcaagcttaccagactgacctttgtattactattttgaaatagaaaggtttttgtttctgttttgtttggataatttctttattttagtttgggaattaaatgacttaaaccttggattgg

SEQ ID NO: 66214 - DNA, 2466 bp, Artificial Sequence
  derived and/or modified sequence
gagtcacgcgatttccgggaacccgtcaggaaggacataaacaaaacaaacccgaggcagcatggagaggggccgtggcccctgcagcggaaccggacccagtccctgagccgcccctacacccacagcatcgcacagaattattttaaaaaaaagcagtgatccaagcaattgaattggaagcactctggggaaacctgctgtttattgtggaaatcatcttcgatcttggaattgaaagtaaagctggaaaggaatttacaaacaagaaaaaaaagaagtttggaatcggattcacaggatctgggcttggaaatgcctcagcctagtgtaagcggaatggatccgcctttcggggatgcctttcgaagccacaccttttcggaacaaactctgatgagcacagatctcttagcaaacagttcggatccagatttcatgtatgaactggatagagagatgaactaccaacagaatcctagagacaactttctttctttggaggactgcaaagacattgaaaatctggagtctttcacagatgtcctggataatgagggtgctttaacctcaaactgggaacagtgggatacatactgtgaagacctaacgaaatataccaaactaaccagctgtgacatctggggaacaaaagaagtggattacttgggtcttgatgacttttctagtccttaccaagatgaagaggttataagtaaaactccaactttagctcaacttaatagtgaggactcacagtctgtttctgattccctttattaccccgattcacttttcagtgtcaaacaaaatcccttaccctcttcattccctggtaaaaagatcacaagcagagcagctgctcctgtgtgttcttctaagactctgcaggctgaggtccctttgtcagactgtgtccaaaaagcaagtaaacccacttcaagcacacaaatcatggtgaagaccaacatgtatcataatgaaaaggtgaactttcatgttgaatgtaaagactatgtaaaaaaggcaaaggtaaagatcaacccagtgcaacagagccggcccttgttgagccagattcacacagatgcagcaaaggagaacacctgctactgtggtgcagtggcaaagagacaagagaaaaaagggatggagcctcttcaaggtcatgccactcccgctttgccttttaaagaaacccaggaactattactaagtcccctgccccaggaaggtcctgggtcacttgcagcaggagagagcagcagtctttctgccagtacatcagtctcagattcatcccagaaaaaagaagagcacaattattctctttttgtctccgacaacttgggtgaacagccaactaaatgcagtcctgaagaagatgaggaggacgaggaggatgttgatgatgaggaccatgatgaaggattcggcagtgagcatgaactgtctgaaaatgaggaggaggaagaagaggaagaggattatgaagatgacaaggatgatgatattagtgatactttctctgaaccaggtattataatgcttgcaagcttaccagactgacctttgtattactattttgaaatagaaaggtttttgtttctgttttgtttggataatttctttattttagtttgggaattaaatgacttaaaccttggattggatatgtaattggtttttctattcaaatagctctaaaatgatcacttttgctcacatagggattcataagctgattccttgagggcttattttttattattttatttcttatttttaaaattaaaatagagatgagagcttgccactgtgcccagctgaggacttattcttaatgtatcttatgttaagtgacctgttttgtcactctcttgagcatttatgcaaagacaccaataatttattggtttaaaaaatattcctgtttagggccaggcgcagtggctcacgttagtaatcccagcactttgggaggccgaggtgggcggatcacctgaggtcaggagttaaagaccagcccggccaacacagcgaaaccctgtctctactaaaaatacaaaaatcagatgtggtggcacgcatctgtaatcccagctactccagaggttgaggcgggagaatcacttgaacccaggaggctgaggttgcggttagctgacatcgcaccattgcactccagcctgggcaacaggagtgaaagtctgtctcaataacaacaaaaaataataaataaaaatattactgtttatgcatgtgtctctctattatagttgagataagttaggagtatatagaatgttgaaccaagtgatgatggtttatattactcattccaatacccaacaaagtctatttatgaataatgtaaaagcattttctttgtgtctgctaacattttaatttacatcgtattttcctatttaagaaaaatacatgctgtaatttggtgagcatgaa

SEQ ID NO: 66215 - DNA, 559 bp, Artificial Sequence
  derived and/or modified sequence
gaaggcgagtccgatcggaccaggaagtagctcaggggagcctgacctcgacccgcctttctcctcacacgagctgaggaggcagggaagtaccgagggcagtcaagcctcccctgggggtggttcctgggactagatggagctcagtctctggattctccctctttctcggccctatgcttcctgacagacctggccgccaaaccctgtaatcgccctcctttaacccaagaaagcaagtctttctgccgtttctgagctggcttgagccttaagactaccttaaggagacagcatcgcacagaattattttaaaaaaaagcagtgatccaagcaattgaattggaagcactctggggaaacctgctgtttattgtggaaatcatcttcgatcttggaattgaaagtaaagctggaaaggaatttacaaacaagaaaaaaaagaagtttggaatcggattcacaggatctgggcttggaaatgcctcagcctagtgtaagcggaatggatccgcctttcggggatgcctttcgaagccacaccttttcggaacaaact

SEQ ID NO: 66216 - DNA, 1254 bp, Artificial Sequence
  derived and/or modified sequence
atgccccagcccagcgtgagcggcatggacccccccttcggcgacgccttcagaagccacaccttcagcgagcagaccctgatgagcaccgacctgctggccaacagcagcgaccccgacttcatgtacgagctggacagagagatgaactaccagcagaaccccagagacaacttcctgagcctggaggactgcaaggacatcgagaacctggagagcttcaccgacgtgctggacaacgagggcgccctgaccagcaactgggagcagtgggacacctactgcgaggacctgaccaagtacaccaagctgaccagctgcgacatctggggcaccaaggaggtggactacctgggcctggacgacttcagcagcccctaccaggacgaggaggtgatcagcaagacccccaccctggcccagctgaacagcgaggacagccagagcgtgagcgacagcctgtactaccccgacagcctgttcagcgtgaagcagaaccccctgcccagcagcttccccggcaagaagatcaccagcagagccgccgcccccgtgtgcagcagcaagaccctgcaggccgaggtgcccctgagcgactgcgtgcagaaggccagcaagcccaccagcagcacccagatcatggtgaagaccaacatgtaccacaacgagaaggtgaacttccacgtggagtgcaaggactacgtgaagaaggccaaggtgaagatcaaccccgtgcagcagagcagacccctgctgagccagatccacaccgacgccgccaaggagaacacctgctactgcggcgccgtggccaagagacaggagaagaagggcatggagcccctgcagggccacgccacccccgccctgcccttcaaggagacccaggagctgctgctgagccccctgccccaggagggccccggcagcctggccgccggcgagagcagcagcctgagcgccagcaccagcgtgagcgacagcagccagaagaaggaggagcacaactacagcctgttcgtgagcgacaacctgggcgagcagcccaccaagtgcagccccgaggaggacgaggaggacgaggaggacgtggacgacgaggaccacgacgagggcttcggcagcgagcacgagctgagcgagaacgaggaggaggaggaggaggaggaggactacgaggacgacaaggacgacgacatcagcgacaccttcagcgagcccggcatcatcatgctggccagcctgcccgactag

SEQ ID NO: 66217 - DNA, 1254 bp, Artificial Sequence
  derived and/or modified sequence
atgccccaaccctcagtgtccggcatggaccctccatttggggatgccttcagatctcatacgttctctgagcagacgctgatgtctaccgacttgctcgccaactccagcgacccagacttcatgtatgagctcgatcgagagatgaactatcagcagaacccacgcgataattttctgagcttggaagattgtaaagatatcgagaacttggagtcctttacagatgtgctagataatgaaggcgcacttacctcaaattgggagcagtgggacacgtactgtgaggacctgaccaaatataccaagctgacttcttgtgacatttggggaactaaggaggtcgactatctcggtcttgacgatttctcctccccatatcaggacgaagaagtaatatctaaaactcctacacttgcacaattgaatagtgaggattcccagtccgtgagcgattctctttactatcccgattcccttttcagcgtgaaacagaaccccttgccctcttctttccccgggaaaaaaatcactagtagagcagcagcccccgtctgtagcagcaagacactgcaggctgaggtccctctgtccgactgcgtgcaaaaggcttcaaaacccaccagctcgacccagatcatggttaagacgaatatgtatcataatgagaaagttaacttccacgtagagtgtaaggactatgtgaagaaagccaaggtgaaaattaacccagtgcaacagagtcgcccactcctgagccagattcacacagacgccgcgaaagagaacacctgttattgtggagctgtcgcaaagcgccaagaaaaaaagggcatggagcctttgcagggccacgctactccagccctcccttttaaagagactcaggaactcctgctcagtccactgcctcaggagggcccaggatccttagccgccggcgagagttcctcactgtccgcatcaactagcgtgagcgattcatcacaaaaaaaggaagaacacaactacagcctattcgtgtctgacaacctgggtgagcagccaactaagtgcagcccagaagaggatgaagaggacgaggaggacgttgacgatgaggatcacgacgaaggatttggctctgaacatgagctcagcgagaacgaagaagaggaggaagaggaagaggattatgaagatgataaagatgatgacataagcgatacctttagcgaacccgggatcattatgctcgcaagcctccctgactag

SEQ ID NO: 66218 - DNA, 1254 bp, Artificial Sequence
  derived and/or modified sequence
atgccccagccctcagtgtctgggatggatcctccctttggagacgcctttcgctcccacaccttctccgaacagacactgatgagcactgatctactcgcgaacagctccgacccagattttatgtatgagctggaccgggaaatgaactaccagcaaaacccaagagataactttctttcccttgaggattgcaaagatatcgagaacctcgagagctttacggatgtgctggataacgagggagctcttacctcaaattgggagcaatgggacacatactgcgaggacctaactaaatatacaaagctgacatcatgcgacatctggggaacaaaagaggtggattacctgggactggatgacttctccagtccttaccaggacgaggaagtgatctcgaaaacccctacccttgctcagttgaacagtgaggactcccagtccgtttctgactctctgtactatcctgactctctcttttcagtgaaacagaaccctttgccttcatctttccccggaaaaaagataacaagccgagccgcggctcccgtctgctctagcaaaactttacaggctgaggtacccctctcagactgcgtgcagaaagcgtccaagccaacatcctcaactcaaataatggtgaaaactaacatgtatcacaacgagaaggttaacttccacgtggagtgcaaagactatgtgaagaaagcaaaggtgaaaataaatccggtccagcagtcccggccactgctctctcagatacacaccgatgctgctaaagagaacacatgctactgcggggccgtcgccaagcgccaagagaaaaagggtatggagcccctgcaaggacacgctacccccgctctaccgttcaaagagacccaggagcttctactctcccctctcccccaggaggggccaggatccctggccgccggcgaatcctcatctctgtctgctagtacctcagtgagcgacagtagccagaagaaggaggaacacaactactcgctctttgtcagtgataatctaggagaacagcctacgaagtgttcaccagaggaggacgaagaagacgaggaggatgtcgatgatgaggaccacgatgaggggttcggatctgaacacgagctgtctgagaatgaggaggaggaggaggaggaggaagactacgaggacgataaggacgacgatatatcagacacgtttagcgagccggggatcattatgctggcttccctacccgattag

SEQ ID NO: 66219 - DNA, 1254 bp, Artificial Sequence
  derived and/or modified sequence
atgccccagcccagcgtgtctggcatggaccccccatttggagatgccttccgcagccacaccttcagcgagcagaccctgatgagcacagacctgctggccaacagcagtgaccctgacttcatgtatgagctggaccgggagatgaactaccagcagaacccccgggacaacttcctgagcctggaggactgcaaggacatcgagaacctggagagcttcacagatgtgctggacaatgaaggagccctgaccagcaactgggagcagtgggacacctactgtgaggacctgaccaagtacaccaagctgaccagctgtgacatctggggcaccaaggaggtggactacctgggcctggatgacttcagcagcccctaccaggatgaggaggtgatcagcaagacccccaccctggcccagctgaacagcgaggacagccagagcgtgtctgacagcctgtactacccagacagcctcttctctgtgaagcagaaccccctgcccagcagcttccctgggaagaagatcaccagcagagctgctgcccctgtgtgcagcagcaagaccctgcaggccgaggtgcccctgagtgactgtgtgcagaaggccagcaagcccaccagcagcacccagatcatggtgaagaccaacatgtaccacaatgagaaggtgaacttccacgtggagtgcaaggactatgtgaagaaggccaaggtgaagatcaaccctgtgcagcagagccggcccctgctgagccagatccacacagatgctgccaaggagaacacctgctactgtggggctgtggccaagaggcaggagaagaagggcatggagcccctgcagggccacgccaccccagccctgcccttcaaggagacccaggagctgctgctgagccccctgccccaggagggccctggcagcctggccgccggggagagcagcagcctgagcgccagcacctctgtgtctgacagcagccagaagaaggaggagcacaactacagcctgtttgtgtctgacaacctgggggagcagcccaccaagtgcagccctgaggaggatgaagaagatgaggaggatgtggatgatgaagatcatgatgagggctttggaagtgaacatgagctgtctgaaaatgaggaggaggaggaggaggaggaggactatgaagatgacaaggatgatgacatcagtgacaccttcagcgagcccggcatcatcatgctggccagcctgcctgactag

SEQ ID NO: 66220 - DNA, 1254 bp, Artificial Sequence
  derived and/or modified sequence
atgccccagcccagcgtgagcggcatggacccccccttcggcgacgctttccgtagtcacacattttcagagcagacactcatgtcaacggacctgctggctaacagcagtgacccagattttatgtacgagttagatagagagatgaattatcaacagaatcctagagataattttctatcccttgaggattgtaaggacattgaaaatctggagagtttcacagacgtcttggataacgagggcgctcttacctctaattgggagcaatgggatacttactgcgaggacctgacaaagtacacaaagctgaccagctgcgacatctggggcaccaaggaggttgactacctgggattggatgatttctcaagtccgtatcaggacgaagaggttatctctaagactcccactctggcacagctgaactccgaggattctcagtcagtctctgactcgttatactatcccgattccctgttttccgtcaagcagaatcccttgccctcttcttttcctgggaaaaagataacctccagggccgcagcacccgtctgttcgagcaaaacgttgcaggctgaggtacctctaagcgactgtgtccagaaggcctcaaaacccacttcaagtactcagatcatggtaaaaactaacatgtatcacaacgagaaagtgaactttcacgttgagtgcaaggattacgtgaagaaagccaaggttaaaattaacccggtacaacagtcaaggccactcctgtcccaaatccacacagacgccgcgaaggagaacacctgttactgcggggccgtcgctaagaggcaagaaaagaaaggtatggaaccccttcagggtcatgccacacccgccctgccgttcaaggaaacccaggaactgttgctttctccccttcctcaagagggacctggcagcctggctgccggcgaaagctcttccctatctgcttccacctcggtgtccgattcatcacaaaaaaaggaagagcataattattcattattcgtcagcgataatcttggagagcagcccaccaagtgttcgcccgaggaagatgaagaagacgaagaggacgttgacgatgaagaccacgatgaggggtttggctctgaacacgagttgagcgagaacgaggaggaagaggaagaggaggaggattacgaggatgataaggacgacgatattagtgacaccttctcagagccaggcataattatgttggctagtcttcccgattag

SEQ ID NO: 66221 - DNA, 1254 bp, Artificial Sequence
  derived and/or modified sequence
atgccccagcccagcgtgagcggcatggacccccccttcggcgacgctttcagatcgcacacattttccgagcagactctcatgtccacggacctactagcaaactcatcagacccagattttatgtacgaacttgacagagaaatgaactatcagcagaatccgcgagataatttccttagtcttgaggactgcaaagacattgaaaatttggagtctttcactgatgttctggataacgagggggctctgacatcaaactgggagcagtgggacacttactgtgaggaccttaccaaatatacaaagctgacatcttgcgatatctgggggactaaggaggtggactatctaggcttagacgacttcagttctccttaccaggatgaggaggtgatctctaaaactccgactctggcccagctcaactctgaggactcccagtccgtctctgacagcttgtattaccccgattctcttttttctgtcaagcagaacccgctgccatctagcttccccggcaaaaaaatcacatcccgcgccgccgctcctgtgtgttccagtaagactctgcaggccgaggtgccgctgtcagattgcgtgcagaaggcttccaagccaaccagcagcactcagatcatggtcaagactaacatgtatcacaacgaaaaggtgaattttcatgtcgaatgcaaggattatgtcaagaaagccaaggtgaagattaatcccgtgcagcagtcacggcctctgctgagccagatacacacagacgctgccaaggagaatacctgttattgcggcgccgtggctaaacggcaagaaaagaaggggatggagccactgcagggacacgccacacctgcactcccgtttaaggagactcaggagttactgctgagtcctctgccccaggaaggccccggtagtctggctgctggagagtcttcttcattgtccgccagtacgagcgtgtctgattcctcacagaagaaagaagaacacaactattctctcttcgtgtccgataatctcggcgagcagcccaccaaatgtagtcccgaagaagacgaagaagacgaggaggatgtggacgacgaggaccatgatgaaggatttggatcagagcatgaactgtccgagaatgaagaggaagaagaggaggaggaggattacgaggatgacaaggatgatgacatctcagacacatttagtgagccaggcattatcatgctggcgagtcttcctgattag

SEQ ID NO: 66222 - DNA, 1254 bp, Artificial Sequence
  derived and/or modified sequence
atgccgcaaccgtcagttagcggtatggatcccccattcggtgatgcctttcgcagtcacacctttagtgagcagacactcatgtcaaccgatctcctagctaattctagcgatccggatttcatgtacgaattagatcgagaaatgaactaccagcaaaatccccgtgataattttctgagcctagaggactgtaaggatatagaaaatctcgagagcttcacagacgtattggacaacgagggggcattgactagcaattgggaacagtgggatacatactgcgaagatctgaccaagtatacaaagctgacctcttgcgatatatggggtacaaaggaagttgactatttgggcctcgatgatttcagcagtccttaccaggacgaggaagtaatatccaagaccccaaccctggcacagctgaactccgaagattctcagtctgtcagcgatagcctctactatcctgactctttgttcagtgtaaagcagaacccactaccaagcagcttccctgggaaaaagatcacgtctagagccgcagcgccagtttgtagtagcaagactcttcaagctgaagtgcctctctccgattgtgtacagaaggcctctaaacctacttcgtctacccagataatggtgaagacgaacatgtatcacaatgaaaaggttaatttccatgtcgagtgtaaagattacgtcaagaaggccaaggttaaaataaatcctgtccagcaaagtcggccactgctaagccagatacacaccgatgctgctaaggaaaacacatgctattgtggcgctgtggccaagagacaggaaaagaaggggatggagccactacagggacacgccacccccgctctgccctttaaagagacacaagagttgctcctttcaccactgccgcaggaagggccagggtccctcgcagctggagaaagctctagcctgagcgcctcaacatccgtgagcgattcctcacagaagaaggaagaacacaactacagtctctttgtgtcggacaacctgggggaacagcccaccaagtgctccccggaagaagacgaggaagatgaggaggacgttgacgatgaagaccacgatgagggcttcgggtccgaacatgaattgtccgagaacgaggaggaggaggaagaggaagaggactatgaggacgacaaagatgatgacatttcagataccttctctgaacccggtatcatcatgctagcaagtctgcctgattag

SEQ ID NO: 66223 - DNA, 1254 bp, Artificial Sequence
  derived and/or modified sequence
atgcctcaacccagcgtctcagggatggatccaccatttggcgacgccttccgttctcacaccttctccgagcagacactgatgtccaccgatttgctggccaactcctctgaccctgattttatgtacgaactggaccgggagatgaattaccagcagaatcctcgtgataactttctgtctctggaggattgcaaagacattgaaaatctggagtctttcaccgacgtgctggacaatgagggggcattgacaagtaactgggaacagtgggatacctactgcgaggaccttaccaaatatacgaagctgacaagctgtgacatttgggggaccaaagaggtggattatctaggcctggatgattttagctccccatatcaagacgaagaggttatctcgaagacgcccaccctggcccagctaaatagcgaggacagtcagtcagtgagcgattcactctactacccagacagtcttttcagcgttaagcaaaaccctctccctagttccttcccagggaaaaagatcactagtcgtgccgctgctccagtttgcagttctaaaaccctccaggcggaggtgcccctgagtgattgtgttcagaaggcttctaagccaacatcctccacccaaatcatggttaaaaccaatatgtatcacaacgaaaaagtgaacttccatgttgagtgcaaagattatgttaaaaaggccaaagtgaaaatcaaccctgtgcagcagagccgaccgctcctgtcacagattcatactgatgccgctaaggaaaatacatgctactgcggtgcggtcgcgaagcggcaggagaagaaaggtatggaacccctccagggccacgccacccccgctctgccttttaaagaaacacaagaacttcttctgtcaccccttccccaggaggggccaggcagcctcgccgcaggggaatccagctctctttccgctagtactagtgtgtcggattcaagtcaaaagaaggaagagcacaactattctctcttcgtgagcgataatttgggggagcagcctaccaagtgcagccccgaggaggatgaagaggacgaagaagacgtggatgatgaggatcacgatgaaggattcggaagtgaacacgagctatcggaaaatgaagaggaggaagaagaggaggaagattatgaggacgataaagatgacgacatttcggacaccttcagcgagcctggaataataatgctcgcatctcttcctgactag

SEQ ID NO: 66224 - protein, 189 aa, Artificial Sequence
  derived and/or modified sequence
MTLMAAVYTIALRYTRTSDKELYFSTTAVCITEVIKLLLSVGILAKETGSLGRFKASLRENVLGSPKELLKLSVPSLVYAVQNNMAFLALSNLDAAVYQVTYQLKIPCTALCTVLMLNRTLSKLQWVSVFMLCAGVTLVQWKPAQATKVVEYILKKFKEFRYFSLGEKHSNVSIRDYCDISWRLLVRWS

SEQ ID NO: 66225 - protein, 278 aa, Artificial Sequence
  derived and/or modified sequence
MAAPRDNVTLLFKLYCLAVMTLMAAVYTIALRYTRTSDKELYFSTTAVCITEVIKLLLSVGILAKETGSLGRFKASLRENVLGSPKELLKLSVPSLVYAVQNNMAFLALSNLDAAVYQVTYQLKIPCTALCTVLMLNRTLSKLQWVSVFMLCAGVTLVQWKPAQATKVVVEQNPLLGFGAIAIAVLCSGFAVLASVGGLYTSVVVKYTDNIMKGFSAAAAIVLSTIASVMLFGLQITLTFALGTLLVCVSIYLYGLPRQDTTSIQQGETASKERVIGV

SEQ ID NO: 66226 - protein, 189 aa, Artificial Sequence
  derived and/or modified sequence
MAAPRDNVTLLFKLYCLAVMTLMAAVYTIALRYTRTSDKELYFSTTAVCITEVIKLLLSVGILAKETGSLGRFKASLRENVLGSPKELLKLSVPSLVYAVQNNMAFLALSNLDAAVYQVTYQLKIPCTALCTVLMLNRTLSKLQWVSVFMLCAGVTLVQWKPAQATKVVFLQVLVASTLLLWLSTQTTS

SEQ ID NO: 66227 - DNA, 570 bp, Artificial Sequence
  derived and/or modified sequence
atgaccctcatggctgcggtgtacactatcgccctgagatacacgcgcacaagtgacaaggagctgtatttctcgactacagctgtgtgcataacagaggtgatcaagcttctcctgtccgtcggaattctggccaaggagactggctccctgggccgcttcaaggctagtcttcgcgaaaatgtgctgggatcacctaaagaactgctgaaactgagcgtgccatcactcgtgtatgccgttcagaacaatatggccttcctggctctctccaatctcgatgccgcagtctaccaggtcacctatcagctcaaaattccatgtacagccctgtgtaccgtgctgatgcttaacagaactctttctaaactacagtgggtgtcagtattcatgctctgtgccggagtgactttggtgcagtggaaacctgctcaggccactaaggttgttgaatatatcctcaagaagtttaaagagttccggtatttttccctcggcgaaaagcattctaacgtctcaatcagggactattgtgacatcagctggaggcttcttgtgagatggtcctag

SEQ ID NO: 66228 - DNA, 837 bp, Artificial Sequence
  derived and/or modified sequence
atggccgccccacgggacaacgtgacgttgctctttaaactctattgccttgctgtgatgactctcatggcagccgtgtatactattgccttgaggtacactcgcacatcagataaagagctgtatttctccaccacagcggtgtgcatcactgaggtcataaagctcctgttgtcggtaggaatcctcgctaaagagacaggctcacttgggagattcaaggcttccctgagggaaaacgtgttggggtcgcctaaagaacttcttaagctgtctgtccccagcctggtctacgccgtgcagaacaatatggcattcttggctctctctaaccttgacgccgcggtctaccaggtgacttaccagctgaagattccgtgtactgccctgtgcaccgtgctgatgctgaacagaacactgagcaagcttcagtgggtgagtgttttcatgctgtgtgccggagtgacactggtgcagtggaaacccgctcaagccacaaaggtggtggtggaacagaaccccctgctgggttttggcgcaatagccatcgcagtgctgtgtagcggattcgcagtgctagccagtgtcggtggcctttacacgagtgttgtggtcaaatacacggacaatataatgaaaggtttttcagcggctgctgcaattgtgctgtctactattgcaagcgtgatgctgtttggtctccagataacacttacttttgcgcttggcaccttgctggtgtgtgtgtccatatatctatatgggttacccagacaagacacaacctccatccagcagggagaaaccgcaagcaaggagagggttatcggcgtttag

SEQ ID NO: 66229 - DNA, 570 bp, Artificial Sequence
  derived and/or modified sequence
atggccgcgcctagagataatgtcacactgctgttcaagctgtattgcctggccgtgatgaccctaatggcggctgtctacaccatcgcccttagatatactaggacatctgataaagagctgtacttctccactactgctgtttgtataacagaggtcataaaactcttgctttctgtagggattctcgcgaaagagaccggttctctcgggcgatttaaggctagtctacgagaaaatgtgttggggtcccctaaagagttgcttaaacttagcgttccatcactggtgtacgccgtacaaaacaacatggccttcctggcattgagcaaccttgacgccgccgtctaccaagttacctaccaacttaaaattccctgtaccgcactgtgtaccgtgctcatgctgaaccgcactctgtctaagttacagtgggtctcagttttcatgttatgtgccggcgtaacacttgttcaatggaagcctgcacaagccacaaaggtcgtctttctgcaggttttagtggccagcaccctgcttctttggctgtctacccagactacttcttag

SEQ ID NO: 66230 - DNA, 537 bp, Artificial Sequence
  derived and/or modified sequence
atggctgcccctagagacaacgtcacactgctgttcaagctgtactgtttggcggtgatgacccttatggccgccgtgtatacaatcgcgcttcgctacaccaggacctctgacaaagagctgtacttctcgaccaccgccgtgtgtattaccgaggtgattaagctgctgctgtctgtgggcatcctggcaaaggagacagggagcctcggtcgattcaaggcctccctgagggagaacgtgttggggtctccaaaagaattgctgaagctttccgtcccttctctagtgtatgcagtgcagaacaacatggcctttttggccctctccaatcttgacgccgcagtctaccaggtgacctatcagcttaagattccctgcactgccttgtgtaccgttctgatgctgaaccggactctgagcaaactccagaagaaagatttctcaatggttactcacataatgtctggactctctagcgttagcattcaggagctcaaggtcctgtctagatcctttattttcttcctgtcatag

SEQ ID NO: 66231 - DNA, 570 bp, Artificial Sequence
  derived and/or modified sequence
atgaccctgatggctgctgtgtacaccatcgccctgcgctacaccaggaccagtgacaaggagctgtacttcagcaccacagctgtgtgcatcacagaggtgatcaagctgctgctgtctgtgggcatcctggccaaggagaccggcagcctgggccgcttcaaggccagcctgcgggagaatgtgctgggcagccccaaggagctgctgaagctgtctgtgcccagcctggtgtatgctgtgcagaacaacatggccttcctggccctgagcaacctggatgctgctgtgtaccaggtgacctaccagctgaagatcccctgcacagccctgtgcaccgtgctgatgctgaacagaaccctgagcaagctgcagtgggtgtctgtgttcatgctgtgtgccggcgtgaccctggtgcagtggaagccagcccaggccaccaaggtggtggagtacatcctgaagaagttcaaggagttccgctacttcagcctgggggagaagcacagcaatgtgtccatccgggactactgtgacatctcctggaggctgctggtgcgctggagctag

SEQ ID NO: 66232 - DNA, 837 bp, Artificial Sequence
  derived and/or modified sequence
atggccgccccccgggacaacgtgaccctgctcttcaagctgtactgcctggccgtgatgaccctgatggctgctgtgtacaccatcgccctgcgctacaccaggaccagtgacaaggagctgtacttcagcaccacagctgtgtgcatcacagaggtgatcaagctgctgctgtctgtgggcatcctggccaaggagaccggcagcctgggccgcttcaaggccagcctgagagaaaatgtgctgggcagccccaaggagctgctgaagctgtctgtgcccagcctggtgtatgctgtgcagaacaacatggccttcctggccctgagcaacctggatgctgctgtgtaccaggtgacctaccagctgaagatcccctgcacagccctgtgcaccgtgctgatgctgaacagaaccctgagcaagctgcagtgggtgtctgtgttcatgctgtgtgccggcgtgaccctggtgcagtggaagccagcccaggccaccaaggtggtggtggagcagaaccccctgctgggctttggagccatcgccatcgctgtgctgtgcagcggctttgctgtgctggcctctgtgggcggcctgtacacctctgtggtggtgaagtacacagacaacatcatgaagggcttctctgctgctgctgccatcgtgctgagcaccatcgcctctgtgatgctgtttggcctgcagatcaccctgacctttgccctgggcaccctgctggtgtgtgtgtccatctacctgtatggcctgccccggcaggacaccaccagcatccagcagggcgagacagccagcaaggagagggtcatcggcgtgtag

SEQ ID NO: 66233 - DNA, 570 bp, Artificial Sequence
  derived and/or modified sequence
atggccgccccccgggacaacgtgaccctgctcttcaagctgtactgcctggccgtgatgaccctgatggctgctgtgtacaccatcgccctgcgctacaccaggaccagtgacaaggagctgtacttcagcaccacagctgtgtgcatcacagaggtgatcaagctgctgctgtctgtgggcatcctggccaaggagaccggcagcctgggccgcttcaaggccagcctgagagaaaatgtgctgggcagccccaaggagctgctgaagctgtctgtgcccagcctggtgtatgctgtgcagaacaacatggccttcctggccctgagcaacctggatgctgctgtgtaccaggtgacctaccagctgaagatcccctgcacagccctgtgcaccgtgctgatgctgaacagaaccctgagcaagctgcagtgggtgtctgtgttcatgctgtgtgccggcgtgaccctggtgcagtggaagccagcccaggccaccaaggtggtgttcctgcaggtgctggtggccagcaccctgctgctgtggctgagcacccagaccaccagctag

SEQ ID NO: 66234 - DNA, 537 bp, Artificial Sequence
  derived and/or modified sequence
atggccgccccccgggacaacgtgaccctgctcttcaagctgtactgcctggccgtgatgaccctgatggctgctgtgtacaccatcgccctgcgctacaccaggaccagtgacaaggagctgtacttcagcaccacagctgtgtgcatcacagaggtgatcaagctgctgctgtctgtgggcatcctggccaaggagaccggcagcctgggccgcttcaaggccagcctgagagaaaatgtgctgggcagccccaaggagctgctgaagctgtctgtgcccagcctggtgtatgctgtgcagaacaacatggccttcctggccctgagcaacctggatgctgctgtgtaccaggtgacctaccagctgaagatcccctgcacagccctgtgcaccgtgctgatgctgaacagaaccctgagcaagctgcagaagaaggacttctccatggtgacccacatcatgagcggcctgagctctgtgtccatccaggagctgaaggtgctgagccgctccttcatcttcttcctgtcctag

SEQ ID NO: 66235 - DNA, 570 bp, Artificial Sequence
  derived and/or modified sequence
atgaccctgatggccgccgtgtacaccatcgccctgcggtacacccgaactagcgacaaagaactgtacttcagcaccaccgctgtttgcatcaccgaggtaattaagttgctattgagtgtgggcatcctcgctaaggaaacaggcagtctcggtcgcttcaaggctagtctgcgagagaatgtgctggggtcgcccaaggagcttttgaaactctctgtgcctagtctcgtttatgccgtgcagaataatatggcatttcttgctttgagcaacttggacgccgcggtctatcaagtaacctatcagctgaagatcccctgtactgctctttgcaccgtgctgatgctgaataggacgctctctaaattgcagtgggtgtccgtgtttatgttgtgcgctggcgttactctggtacagtggaagcccgctcaggctacaaaagttgttgaatacatactgaaaaagttcaaggaatttcgctatttttccctgggagaaaagcatagcaatgtctcaataagagattattgcgatatatcatggcggcttctggtcagatggagttag

SEQ ID NO: 66236 - DNA, 837 bp, Artificial Sequence
  derived and/or modified sequence
atggccgccccccgggacaacgtgaccctgctgttcaagctgtactgcctggctgtgatgaccttaatggccgctgtgtatacaattgcccttcgttatacccgcaccagcgacaaggagctctatttctccacaacagcagtgtgcataaccgaagttatcaagctcctgttgtccgtcgggatattggccaaggagaccggcagtctcggaagattcaaagcttctctccgagaaaacgtgctcgggtcacctaaggagcttctcaaactaagcgtgccctccttagtttatgccgtgcagaacaatatggcgttcctggctctaagtaatctggatgccgctgtataccaggttacctatcagctgaaaatcccttgcacagccttatgtacagtgctcatgctcaatcggacattgagcaagctgcaatgggtcagtgtcttcatgctgtgcgccggggtcaccctcgttcagtggaaaccagcccaggcgactaaagtagtggtggagcagaatcccctactgggcttcggggccattgccatcgccgtactgtgttctggctttgccgtactcgcctcagtcggggggctgtatacatccgtcgttgttaaatacaccgataacattatgaagggtttcagcgcagcagccgccattgtcctttccactatcgcttcagtcatgttattcggattgcagatcaccttaacatttgctctaggaacgctcctggtgtgcgtgtctatttacctgtatggcttgcctaggcaggacaccacctcaatacagcaaggtgagacggcttccaaggaacgagtcataggggtttag

SEQ ID NO: 66237 - DNA, 570 bp, Artificial Sequence
  derived and/or modified sequence
atggccgccccccgggacaacgtgaccctgctgttcaagctgtactgcttagctgttatgactctgatggctgcggtgtacacgatcgcactccgctacacaagaaccagcgataaggagttatactttagtaccaccgcggtgtgcataacggaggtgattaaattgctcttaagcgtagggatactagcgaaggagacggggtctcttggaaggttcaaggcttccctgcgcgagaatgtgctgggtagtccaaaggagctcctgaaactcagcgtgccctctctggtctatgccgtccagaacaacatggcttttctggccctgagcaatctagatgcagccgtctatcaggtcacatatcaacttaaaattccatgcacagcactttgtacagtactgatgctgaatagaactctctccaagcttcagtgggtttctgtgtttatgctgtgcgctggcgtgacgttagtgcagtggaaacctgcacaagcgactaaagtggtgtttttgcaagtattggtggcgtcgacccttctcctgtggctgagtacgcagaccacctcttag

SEQ ID NO: 66238 - DNA, 537 bp, Artificial Sequence
  derived and/or modified sequence
atggccgccccccgggacaacgtgaccctgctgttcaagctgtactgcctggccgtaatgacactcatggctgctgtttatactattgcactgaggtacacacggacatcagataaagagctatacttctccacaacagccgtgtgcatcacggaagttatcaagctgctcttgagcgtcggcatattagctaaagaaacagggtctctggggcggttcaaagcatcccttcgagagaatgtcttaggatcccccaaggaactgctgaaactgagtgtccccagcttggtatacgccgtgcagaacaacatggcttttctggcgcttagcaatctcgatgccgcagtctaccaggtgacctaccagctcaagatcccatgtacagctttgtgtacagtcttaatgttaaacaggaccctgtcaaagctccagaagaaggattttagcatggtaacacatattatgagcggcctgagttccgtgtcgatccaggaactgaaggtgctgtcccgttcattcatcttttttctgtcttag

SEQ ID NO: 66239 - DNA, 570 bp, Artificial Sequence
  derived and/or modified sequence
atgaccctaatggcagcggtctataccattgctctaagatacacccgaacatctgacaaagagctgtatttcagtacaaccgcggtgtgtattaccgaggttatcaagttgctgctctctgtcggtatcttggctaaagagaccggctccttaggcagattcaaggccagcttaagagaaaacgttctaggatcaccaaaggaactgctcaagctatctgttccttccctggtgtatgccgtgcaaaataacatggcctttctcgccctttctaatctggacgccgctgtttaccaagtgacatatcagctaaagattccctgtactgcactttgcaccgtccttatgcttaatcgaacgttgtccaaacttcagtgggtgtcagtttttatgttatgcgccggtgtaacactggtgcaatggaagcccgctcaggccaccaaggtcgtcgagtatatcctgaaaaagtttaaggagttcaggtattttagtctgggagagaagcactcgaacgttagcatcagggactattgtgacatcagctggaggctactcgtacgatggtcctag

SEQ ID NO: 66240 - DNA, 837 bp, Artificial Sequence
  derived and/or modified sequence
atggctgcccctagggacaacgttactctactattcaagctgtactgtctggccgttatgaccctaatggccgcagtgtatacaatagcccttagatacaccaggacatccgacaaggagctttacttctctaccacagcggtgtgcattactgaggtcattaagctgctgttgtcggtgggtatcctggccaaggaaacaggctcactggggcgtttcaaagcaagcctgagagaaaacgttcttggaagtcctaaggaactgttgaagttgtctgtgccttccctcgtctatgctgtgcagaacaacatggcattccttgcactgtcaaatctggatgccgcagtctaccaggtgacctaccaactaaagataccttgtactgcactgtgtactgtgctgatgttgaatagaactctgagcaaactgcaatgggtcagtgtattcatgctctgcgccggagttacattggtgcaatggaaacccgcacaggccactaaggtcgtcgtggagcagaatcccttgctgggcttcggtgccatcgcaatagctgttttgtgctcaggatttgctgtgctggccagtgtgggaggcctttacacctctgtcgtagtcaagtacacggacaacatcatgaaaggattctccgctgctgctgctatcgtcctaagcacgatcgcctctgtgatgctgtttggactgcagattaccctcactttcgcactcggtactttgctggtgtgtgtcagtatctatttgtatgggctcccaagacaggatacgacatccatccagcagggcgaaaccgccagcaaagagagggtgatcggggtgtag

SEQ ID NO: 66241 - DNA, 570 bp, Artificial Sequence
  derived and/or modified sequence
atggccgcaccaagggacaacgtcaccttgctgttcaaactgtactgtctggcagtgatgacattgatggctgctgtatataccatcgcgctccggtatacacggacctcagataaagaactgtacttttctacgacagctgtttgtataaccgaggttataaagctgttgcttagtgtaggcattctcgccaaagaaacggggtcgctgggcaggttcaaggcaagcctgcgagagaatgtgctggggtcccctaaagagctgctgaaactttctgttccaagtcttgtgtacgccgttcagaacaacatggccttcctggctctttctaacctcgatgccgctgtgtaccaagtcacatatcagctgaaaatcccctgcaccgccttgtgcaccgtgctcatgctgaatagaacactgagcaagctgcaatgggtcagtgtgtttatgctgtgtgctggcgtcacactagtccaatggaaacccgctcaagccactaaggttgtctttctgcaggttcttgtcgcgtcaaccttactcctctggctatctacacagacaacatcctag

SEQ ID NO: 66242 - DNA, 537 bp, Artificial Sequence
  derived and/or modified sequence
atggcggctcctagggacaacgtgactttgctattcaagctgtattgcctggcggtgatgaccttgatggccgctgtgtacacaatagcattacgctacaccaggaccagcgataaggagctgtacttctcaaccaccgcagtgtgtattacagaagtcatcaaactattgctttccgtgggcatcctagccaaggaaactggcagtctggggcgattcaaggccagcctgcgagagaacgtcctgggcagtcctaaggaacttctgaaactgtccgtaccatcccttgtttatgctgtgcagaataatatggcatttctggcactgtctaacctggatgcggcagtttaccaggtgacctaccagctcaaaattccttgcaccgcactgtgtacagtgttaatgctgaaccgcaccctcagcaagttacagaagaaagacttctccatggttacgcacatcatgtcaggacttagctcggtcagcatccaggagctgaaggtgctgtctcgatcatttatttttttcctgtcgtag

SEQ ID NO: 66243 - DNA, 1720 bp, Artificial Sequence
  derived and/or modified sequence
acaaggggcggtccccggtgtcctgcgcgggggcgcggagggggcgggcgtcagttccgcggggggctgtcggggaaccatggctgccccgagagacaatgtcactttattattcaagttatactgcttggcagtgatgaccctgatggctgcagtctataccatagctttaagatacacaaggacatcagacaaagaactctacttttcaaccacagccgtgtgtatcacagaagttataaagttattgctaagtgtgggaattttagctaaagaaactggtagtctgggtagattcaaagcatctttaagagaaaatgtcttggggagccccaaggaactgttgaagttaagtgtgccatcgttagtgtatgctgttcagaacaacatggctttcctagctcttagcaatctggatgcagcagtgtaccaggtgacctaccagttgaagattccgtgtactgctttatgcactgttttaatgttaaaccggacactcagcaaattacagtgggtttcagtttttatgctgtgtgctggagttacgcttgtacagtggaaaccagcccaagctacaaaagtggtggtggaacaaaatccattattagggtttggcgctatagctattgctgtattgtgctcaggatttgcagttcttgcaagtgttggtggcctctacacttctgttgtggttaagtacacagacaacatcatgaaaggcttttctgcagcagcggccattgtcctttccaccattgcttcagtaatgctgtttggattacagataacactcacctttgccctgggtactcttcttgtatgtgtttccatatatctctatggattacccagacaagacactacatccatccaacaaggagaaacagcttcaaaggagagagttattggtgtgtgattttagcctcacgtgagactccttttaagactaaaccatttgcattaaactagagccttaagtcaatctcagaaggtagcataaacaaataaaaattaactgtatggcatgatcagtgcggttatgtggaaacaacaacaaacaaacgaagctatctgagtgaactgctaatacagaaacttaatgtagacctgtttggggtctactattgttttagaatgaaggaattgtattattgtgtgtatatataatttgtaaataaaaagtatggagatgatacggtgttaaaaaaaatcatggtaaggctacaatactcaagtaacaaggtttgggacaatgtctaagggttaaagtgccaaagccatttctgtactaactgttctcttgttccggtaccggggagaaggatgacccctccttattctccaattcatgtacagtattttgtcctagcagcataaagacctagctcttttcttacaagaggcagaaacaagacaggctagttcataaacaaactgtgtaacttctcaaaatgaatctatttcataactcggacaatttctgggtggtgactgagtacccctttagtgagtacccctttagtgctatatttgtgccattcattatctggttcatatttcttttctgttagatgatacacatttcttcaaaaaaatttctaatgtcacttttgtacttttttaaataaagtatgtttaactgttgggctctcaataatttgtgaaatttcagtgttttctataatgttaatggggaaattcagcaataaactttatttgt

SEQ ID NO: 66244 - DNA, 770 bp, Artificial Sequence
  derived and/or modified sequence
atggctgccccgagagacaatgtcactttattattcaagttatactgcttggcagtgatgaccctgatggctgcagtctataccatagctttaagatacacaaggacatcagacaaagaactctacttttcaaccacagccgtgtgtatcacagaagttataaagttattgctaagtgtgggaattttagctaaagaaactggtagtctgggtagattcaaagcatctttaagagaaaatgtcttggggagccccaaggaactgttgaagttaagtgtgccatcgttagtgtatgctgttcagaacaacatggctttcctagctcttagcaatctggatgcagcagtgtaccaggtgacctaccagttgaagattccgtgtactgctttatgcactgttttaatgttaaaccggacactcagcaaattacagtgggtttcagtttttatgctgtgtgctggagttacgcttgtacagtggaaaccagcccaagctacaaaagtggtgttcttgcaagtgttggtggcctctacacttctgttgtggttaagtacacagacaacatcatgaaaggcttttctgcagcagcggccattgtcctttccaccattgcttcagtaatgctgtttggattacagataacactcacctttgccctgggtactcttcttgtatgtgtttccatatatctctatggattacccagacaagacactacatccatccaacaaggagaaacagcttcaaaggagagagttattggtgtgtga

SEQ ID NO: 66245 - DNA, 924 bp, Artificial Sequence
  derived and/or modified sequence
agttccgcggggggctgtcggggaaccatggctgccccgagagacaatgtcactttattattcaagttatactgcttggcagtgatgaccctgatggctgcagtctataccatagctttaagatacacaaggacatcagacaaagaactctacttttcaaccacagccgtgtgtatcacagaagttataaagttattgctaagtgtgggaattttagctaaagaaactggtagtctgggtagattcaaagcatctttaagagaaaatgtcttggggagccccaaggaactgttgaagttaagtgtgccatcgttagtgtatgctgttcagaacaacatggctttcctagctcttagcaatctggatgcagcagtgtaccaggtgacctaccagttgaagattccgtgtactgctttatgcactgttttaatgttaaaccggacactcagcaaattacagaaaaaggatttttctatggttacacatattatgtctggtttgtcatctgtaagtatccaggaattaaaggttcttagtagatcctttattttttttttaagttagatgtccattttaagctgttataacattttgaaattaatcctttgatactgtaaataccagtttgaatataattttcattttgttgacttagttttgattgtgaaggcaaaattgctttgggatagcaatgccccaaaatatctaacattagcaaaaaatgtgtaaaatttaatagaccacatagccctctgggcattgttttggaaaaacagtgttatataggaactaccaattttagtacaaactctcagatggctccttctaaggaaaacagtattttccttttcctaggtaaagtatggcatctctggggatgaaaattgcctcaccattatgtaatgtttcatttatttgagtgat

SEQ ID NO: 66246 - DNA, 570 bp, Artificial Sequence
  derived and/or modified sequence
atgaccctgatggccgccgtgtacaccatcgccctgagatacaccagaaccagcgacaaggagctgtacttcagcaccaccgccgtgtgcatcaccgaggtgatcaagctgctgctgagcgtgggcatcctggccaaggagaccggcagcctgggcagattcaaggccagcctgagagagaacgtgctgggcagccccaaggagctgctgaagctgagcgtgcccagcctggtgtacgccgtgcagaacaacatggccttcctggccctgagcaacctggacgccgccgtgtaccaggtgacctaccagctgaagatcccctgcaccgccctgtgcaccgtgctgatgctgaacagaaccctgagcaagctgcagtgggtgagcgtgttcatgctgtgcgccggcgtgaccctggtgcagtggaagcccgcccaggccaccaaggtggtggagtacatcctgaagaagttcaaggagttcagatacttcagcctgggcgagaagcacagcaacgtgagcatcagagactactgcgacatcagctggagactgctggtgagatggagctag

SEQ ID NO: 66247 - DNA, 837 bp, Artificial Sequence
  derived and/or modified sequence
atggccgcccccagagacaacgtgaccctgctgttcaagctgtactgcctggccgtgatgaccctgatggccgccgtgtacaccatcgccctgagatacaccagaaccagcgacaaggagctgtacttcagcaccaccgccgtgtgcatcaccgaggtgatcaagctgctgctgagcgtgggcatcctggccaaggagaccggcagcctgggcagattcaaggccagcctgagagagaacgtgctgggcagccccaaggagctgctgaagctgagcgtgcccagcctggtgtacgccgtgcagaacaacatggccttcctggccctgagcaacctggacgccgccgtgtaccaggtgacctaccagctgaagatcccctgcaccgccctgtgcaccgtgctgatgctgaacagaaccctgagcaagctgcagtgggtgagcgtgttcatgctgtgcgccggcgtgaccctggtgcagtggaagcccgcccaggccaccaaggtggtggtggagcagaaccccctgctgggcttcggcgccatcgccatcgccgtgctgtgcagcggcttcgccgtgctggccagcgtgggcggcctgtacaccagcgtggtggtgaagtacaccgacaacatcatgaagggcttcagcgccgccgccgccatcgtgctgagcaccatcgccagcgtgatgctgttcggcctgcagatcaccctgaccttcgccctgggcaccctgctggtgtgcgtgagcatctacctgtacggcctgcccagacaggacaccaccagcatccagcagggcgagaccgccagcaaggagagagtgatcggcgtgtag

SEQ ID NO: 66248 - DNA, 570 bp, Artificial Sequence
  derived and/or modified sequence
atggccgcccccagagacaacgtgaccctgctgttcaagctgtactgcctggccgtgatgaccctgatggccgccgtgtacaccatcgccctgagatacaccagaaccagcgacaaggagctgtacttcagcaccaccgccgtgtgcatcaccgaggtgatcaagctgctgctgagcgtgggcatcctggccaaggagaccggcagcctgggcagattcaaggccagcctgagagagaacgtgctgggcagccccaaggagctgctgaagctgagcgtgcccagcctggtgtacgccgtgcagaacaacatggccttcctggccctgagcaacctggacgccgccgtgtaccaggtgacctaccagctgaagatcccctgcaccgccctgtgcaccgtgctgatgctgaacagaaccctgagcaagctgcagtgggtgagcgtgttcatgctgtgcgccggcgtgaccctggtgcagtggaagcccgcccaggccaccaaggtggtgttcctgcaggtgctggtggccagcaccctgctgctgtggctgagcacccagaccaccagctag

SEQ ID NO: 66249 - DNA, 537 bp, Artificial Sequence
  derived and/or modified sequence
atggccgcccccagagacaacgtgaccctgctgttcaagctgtactgcctggccgtgatgaccctgatggccgccgtgtacaccatcgccctgagatacaccagaaccagcgacaaggagctgtacttcagcaccaccgccgtgtgcatcaccgaggtgatcaagctgctgctgagcgtgggcatcctggccaaggagaccggcagcctgggcagattcaaggccagcctgagagagaacgtgctgggcagccccaaggagctgctgaagctgagcgtgcccagcctggtgtacgccgtgcagaacaacatggccttcctggccctgagcaacctggacgccgccgtgtaccaggtgacctaccagctgaagatcccctgcaccgccctgtgcaccgtgctgatgctgaacagaaccctgagcaagctgcagaagaaggacttcagcatggtgacccacatcatgagcggcctgagcagcgtgagcatccaggagctgaaggtgctgagcagaagcttcatcttcttcctgagctag

SEQ ID NO: 66250 - protein, 160 aa, Artificial Sequence
  derived and/or modified sequence
MQKMVVCGAKCCGDAPHVENREEETARIGPGVMESKEERALNNLIVENVNQENDEKDEKEQVANKGEPLALPLNVSEYCVPRGNRRRFRVRQPILQYRWDIMHRLGEPQARMREENMERIGEEVRQLMEKLREKQLSHSLRAVSTDPPHHDHHDEFCLMP

SEQ ID NO: 66251 - DNA, 483 bp, Artificial Sequence
  derived and/or modified sequence
atgcagaagatggtcgtctgtggggctaagtgctgtggcgatgctccccacgtggaaaatagggaggaggagaccgctaggatagggccaggagtaatggagagtaaggaggaaagagccttaaacaacctgatagttgagaatgtgaatcaggaaaacgatgagaaagatgaaaaagaacaggtggcaaacaaaggggaaccccttgctctgcctctgaatgtgagtgaatattgcgtaccccggggcaacaggaggcgctttagagtcaggcagccgatcctacagtataggtgggacattatgcaccgccttggtgagccacaggccagaatgcgagaagagaatatggaacggatcggggaagaagtgagacagcttatggaaaaattacgcgagaagcagctatctcacagcctgcgggcagtcagtaccgaccctcctcaccatgaccaccacgatgagttctgcttaatgccctag

SEQ ID NO: 66252 - DNA, 483 bp, Artificial Sequence
  derived and/or modified sequence
atgcagaagatggtggtgtgtggggccaagtgctgcggagatgcccctcatgtggagaaccgggaggaggagacagcccgcatcggccctggggtgatggagagcaaggaggagcgggccctgaacaacctgattgtggagaatgtgaaccaggagaatgatgagaaggatgagaaggagcaggtggccaacaagggggagcccctggccctgcccctgaatgtgtctgagtactgtgtgccccggggcaacagaagacgcttccgggtgcggcagcccatcctgcagtaccgctgggacatcatgcaccggctgggggagccccaggccaggatgagggaggagaacatggagcgcatcggggaggaggtgcggcagctgatggagaagctgcgggagaagcagctgagccacagcctgcgggctgtgtccacagatcctccccaccacgaccaccatgatgagttctgcctgatgccctag

SEQ ID NO: 66253 - DNA, 483 bp, Artificial Sequence
  derived and/or modified sequence
atgcagaagatggtggtgtgcggcgccaagtgctgcggcgacgccccccatgtcgagaatagggaggaagagaccgcacggatcggtcccggagttatggagtcaaaggaggagcgcgcactgaacaacctgatcgtcgagaacgtgaatcaggagaacgatgaaaaggacgaaaaggagcaggtggctaataaaggggagcccctcgcattgccacttaacgtgagtgagtattgtgtaccacgggggaaccgccggagattccgcgttcgccagccaatcctccagtaccgatgggatattatgcaccggttgggcgagccccaggccaggatgcgcgaagagaatatggagaggattggggaagaggttagacagttaatggagaaactgcgagagaagcagctctcccactcactaagagccgtctctaccgacccacctcaccatgaccatcatgacgagttctgccttatgccttag

SEQ ID NO: 66254 - DNA, 483 bp, Artificial Sequence
  derived and/or modified sequence
atgcagaaaatggttgtgtgcggagcaaagtgctgcggagacgctcctcatgttgaaaatcgggaggaggaaaccgctagaattggacctggggtgatggaatccaaggaagagagagccttgaacaacttaatagtcgagaacgttaaccaggagaacgacgaaaaggatgagaaagagcaggtcgccaacaagggcgaacccctggcactcccactgaacgtcagcgaatattgtgtgcctcgcggtaaccgaaggagatttagggtcaggcagccaatattgcagtaccgctgggacatcatgcacagattaggagaaccccaagccaggatgagggaggagaatatggagcgcatcggtgaggaagtgaggcagcttatggagaagctgcgtgaaaagcagctttctcacagcctccgggcagtttcaactgacccaccacatcatgaccaccatgacgaattttgtttaatgccttag

SEQ ID NO: 66255 - DNA, 1077 bp, Artificial Sequence
  derived and/or modified sequence
gctcgctcccttctcggcagtggtacctgttcccggtgtccctgaggacgtgcgggccaggtacggccccgaaagtaggaagcggagggggagcaggtaagggacccggagggggtccctggggttggtgtgggggagcagccccggcctgcggatgccccatccccgggcagcagcgcggagacgcagccggtccacgatgcagccccggggccccgccgcgggaccgcgagccttgtgtgagcggaggggtgcccggccccgcgggagccggcgatcctgaggctacgacctttcggaagcacctgcctccgtcaccagcgcaagcttttccaacacccctgctccgcccttcttgatgcagaaaatggtggtttgcggggccaagtgttgcggcgacgcacctcacgtcgagaatcgggaggaggagactgcaaggataggcccaggagtaatggagtccaaagaggaacgagcgttaaacaatctcatcgtggaaaatgtcaaccaggaaaatgatgaaaaagatgaaaaggagcaagttgctaataaaggggagcccttggccctacctttgaatgttagtgaatactgtgtgcctagaggaaaccgtaggcggttccgcgttaggcagcccatcctgcagtatagatgggacataatgcataggcttggagagccacaggcaaggatgagagaggagaatatggaaaggattggggaggaggtgagacagctgatggaaaagctgagggaaaagcagttgagtcatagtttgcgggcagtcagcactgatccccctcaccatgaccatcacgatgagttttgccttatgccctgaatcctgatggtttccctgaagttaatagggagacccctgcttcctaaacttacacatttgtggtgtacctttgtcgtaaacgttttgatgttacctatttcttgtgggtctcctattaccagcttctaaatgaatgttgtttttgacccagtttgtaagtttctgtcagcaggagagttttacctattgcatggaaagatgctcattatatattgtgaagttaataaaacagtttt

SEQ ID NO: 66256 - DNA, 483 bp, Artificial Sequence
  derived and/or modified sequence
atgcagaagatggtggtgtgcggcgccaagtgctgcggcgacgccccccacgtggagaacagagaggaggagaccgccagaatcggccccggcgtgatggagagcaaggaggagagagccctgaacaacctgatcgtggagaacgtgaaccaggagaacgacgagaaggacgagaaggagcaggtggccaacaagggcgagcccctggccctgcccctgaacgtgagcgagtactgcgtgcccagaggcaacagaagaagattcagagtgagacagcccatcctgcagtacagatgggacatcatgcacagactgggcgagccccaggccagaatgagagaggagaacatggagagaatcggcgaggaggtgagacagctgatggagaagctgagagagaagcagctgagccacagcctgagagccgtgagcaccgaccccccccaccacgaccaccacgacgagttctgcctgatgccctag

SEQ ID NO: 66257 - protein, 128 aa, Artificial Sequence
  derived and/or modified sequence
MESKEERALNNLIVENVNQENDEKDEKEQVANKGEPLALPLNVSEYCVPRGNRRRFRVRQPILQYRWDIMHRLGEPQARMREENMERIGEEVRQLMEKLREKQLSHSLRAVSTDPPHHDHHDEFCLMP

SEQ ID NO: 66258 - DNA, 668 bp, Artificial Sequence
  derived and/or modified sequence
cgtgatcggccaacactgagtcttacctcgttgtggcgtcagaaccgccgtcgctcgctcccttctcggcagtggtacctgttcccggtgtccctgaggacgtgcgggccaggtttgcggggccaagtgttgcggcgacgcacctcacgtcgagaatcgggaggaggagactgcaaggataggcccaggagtaatggagtccaaagaggaacgagcgttaaacaatctcatcgtggaaaatgtcaaccaggaaaatgatgaaaaagatgaaaaggagcaagttgctaataaaggggagcccttggccctacctttgaatgttagtgaatactgtgtgcctagaggaaaccgtaggcggttccgcgttaggcagcccatcctgcagtatagatgggacataatgcataggcttggagagccacaggcaaggatgagagaggagaatatggaaaggattggggaggaggtgagacagctgatggaaaagctgagggaaaagcagttgagtcatagtttgcgggcagtcagcactgatccccctcaccatgaccatcacgatgagttttgccttatgccctgaatcctgatggtttccctgaagttaatagggagacccctgcttcctaaacttacacatttgtggtgtacctttgtcgtaaacgttttga

SEQ ID NO: 66259 - DNA, 899 bp, Artificial Sequence
  derived and/or modified sequence
gggacgggggcggagcctctggcgatgacaacagccacacgtgatcggccaacactgagtcttacctcgttgtggcgtcagaaccgccgtcgctcgctcccttctcggcagtggtacctgttcccggtgtccctgaggacgtgcgggccaggtacggccccgaaagtaggaagcggagggggagcaggtttgcggggccaagtgttgcggcgacgcacctcacgtcgagaatcgggaggaggagactgcaaggataggcccaggagtaatggagtccaaagaggaacgagcgttaaacaatctcatcgtggaaaatgtcaaccaggaaaatgatgaaaaagatgaaaaggagcaagttgctaataaaggggagcccttggccctacctttgaatgttagtgaatactgtgtgcctagaggaaaccgtaggcggttccgcgttaggcagcccatcctgcagtatagatgggacataatgcataggcttggagagccacaggcaaggatgagagaggagaatatggaaaggattggggaggaggtgagacagctgatggaaaagctgagggaaaagcagttgagtcatagtttgcgggcagtcagcactgatccccctcaccatgaccatcacgatgagttttgccttatgccctgaatcctgatggtttccctgaagttaatagggagacccctgcttcctaaacttacacatttgtggtgtacctttgtcgtaaacgttttgatgttacctatttcttgtgggtctcctattaccagcttctaaatgaatgttgtttttgacccagtttgtaagtttctgtcagcaggagagttttacctattgcatggaaagatgctcattatatattgtgaagttaataaaacagttttaaaaagca

SEQ ID NO: 66260 - DNA, 736 bp, Artificial Sequence
  derived and/or modified sequence
tggtacctgttcccggtgtccctgaggacgtgcgggccaggtacggccccgaaagtaggaagcggagggggagcaggtaagggacccggagggggtccctggggttggtgtgggggagcagccccggcctgcggatgccccatccccgggcagcagcgcggagacgcagccggtccacgatgcagccccggggccccgccgcgggaccgcgagccttgtgtgagcggaggggtgcccggccccgcgggagccggcgatcctgaggctacgacctttcggaagcacctgcctccgtcaccagcgcaagcttttccaacacccctgctccgcccttcttgatgcagaaaatggtttgcggggccaagtgttgcggcgacgcacctcacgtcgagaatcgggaggaggagactgcaaggataggcccaggagtaatggagtccaaagaggaacgagcgttaaacaatctcatcgtggaaaatgtcaaccaggaaaatgatgaaaaagatgaaaaggagcaagttgctaataaaggggagcccttggccctacctttgaatgttagtgaatactgtgtgcctagaggaaaccgtaggcggttccgcgttaggcagcccatcctgcagtatagatgggacataatgcataggcttggagagccacaggcaaggatgagagaggagaatatggaaaggattggggaggaggtgagacagctgatggaaaagctgagggaaaa

SEQ ID NO: 66261 - DNA, 864 bp, Artificial Sequence
  derived and/or modified sequence
cttggcggtgacgcacggccctcacgtgaccgggagctgcagagctacgcagccttcggtgcagtcgtcactcgtgtctcgctaccagctccccgctgccctgcgctcggcgggctggcatccggcccgggggaaagcggaccagcccttctgcaggtctgcggggccaagtgtcccggcggcgcacctcgtggcgagaatcgggagaaggaggagactacaaggataggcccaggagtaatggagtccaaagagaaacgagcagtaaacagtctcagcatggaaaatgccaaccaagaaaatgaagaaaaggagcaagttgctaataaaggggagcccttggccctccctttggatgctggtgaatactgtgtgcctagaggaaatcgtaggcggttccgcgttaggcagcccatcctgcagtatagatgggatatgatgcataggcttggagaaccacaggcaaggatgagagaagagaatatggaaaggattggggaggaggtgagacagctgatggaaaagctgagggaaaagcagttgagtcatagtctgcgggcagtcagcactgacccccctcaccatgaccatcatgatgagttttgccttatgccctgaatcctgatggtttccctaaagttattacggaaacagacccctgctttcgaatttacatgttcatgatgtgcccttgttgtaaacctttacctgtcacttgtttacgtgggtctcctattaccagcttctaattgaatattgtgtttttgaaccagtctgtaagatttttgttagcagaagaattttacctattgcatggaaagatgctcattatagtgaagttaataaagcacctttaaaaagcaa

SEQ ID NO: 66262 - protein, 101 aa, Artificial Sequence
  derived and/or modified sequence
MESKEERALNNLIVENVNQENDEKDEKEQVANKGEPLALPLNVSEYCVPRGNRRRFRVRQPILQYRWDIMHRLGEPQARMREENMERIGEEVRQLMEKLRE

SEQ ID NO: 66263 - DNA, 387 bp, Artificial Sequence
  derived and/or modified sequence
atggaatctaaggaggagagggccctcaacaacctaatcgtggagaatgtgaaccaggagaatgacgagaaagacgaaaaggagcaggtcgccaataagggagagcctctggccctgccactcaacgtgagcgagtattgtgtcccccgagggaaccgaaggcgctttagggtgcgacagccgatcctccagtataggtgggacattatgcataggcttggagaaccccaggcacgtatgcgagaagaaaacatggagagaattggcgaggaggtgcggcagcttatggaaaagttacgggagaagcagttgtctcatagcctccgcgcggtctcgacggacccaccacaccatgatcaccacgacgagttctgtctgatgccctag

SEQ ID NO: 66264 - DNA, 387 bp, Artificial Sequence
  derived and/or modified sequence
atggaatcaaaggaggagagagctctgaacaatctgattgttgaaaacgtcaatcaggaaaatgatgaaaaagacgagaaagagcaagtcgctaacaaaggcgagccgctagctttgcccctgaatgtgtcagagtactgcgtcccccgcggaaaccgacgacgctttcgggtgagacagcctattttgcagtaccgctgggatattatgcataggctaggagaaccgcaggctcgcatgcgtgaggaaaacatggagcgcataggagaggaggtccgccagcttatggaaaagctccgtgaaaaacagctgtcacattctctgagagccgtgtcaactgacccaccacaccacgaccaccacgatgagttctgtctaatgccttag

SEQ ID NO: 66265 - DNA, 306 bp, Artificial Sequence
  derived and/or modified sequence
atggagtccaaggaggaaagagctctgaacaacctgattgttgagaacgtgaatcaagaaaatgatgaaaaggacgaaaaggagcaggtagccaacaaaggggagcctcttgctctgcctctgaatgtcagcgaatattgcgtaccacggggcaaccggcgcaggttccgggttaggcagccgattctacaatacagatgggacattatgcaccgcctcggagagccccaggctcggatgcgggaggagaacatggagaggatcggggaggaggtgcgccaattaatggaaaaattaagagagtag

SEQ ID NO: 66266 - DNA, 387 bp, Artificial Sequence
  derived and/or modified sequence
atggagagcaaggaggagcgggccctgaacaacctgattgtggagaatgtgaaccaggagaatgatgagaaggatgagaaggagcaggtggccaacaagggggagcccctggccctgcccctgaatgtgtctgagtactgtgtgccccggggcaacagaagacgcttccgggtgcggcagcccatcctgcagtaccgctgggacatcatgcaccggctgggggagccccaggccaggatgagggaggagaacatggagcgcatcggggaggaggtgcggcagctgatggagaagctgcgggagaagcagctgagccacagcctgcgggctgtgtccacagatcctccccaccacgaccaccatgatgagttctgcctgatgccctag

SEQ ID NO: 66267 - DNA, 306 bp, Artificial Sequence
  derived and/or modified sequence
atggagagcaaggaggagcgggccctgaacaacctgattgtggagaatgtgaaccaggagaatgatgagaaggatgagaaggagcaggtggccaacaagggggagcccctggccctgcccctgaatgtgtctgagtactgtgtgccccggggcaacagaagacgcttccgggtgcggcagcccatcctgcagtaccgctgggacatcatgcaccggctgggggagccccaggccaggatgagggaggagaacatggagcgcatcggggaggaggtgcggcagctgatggagaagctgcgggagtag

SEQ ID NO: 66268 - DNA, 387 bp, Artificial Sequence
  derived and/or modified sequence
atggagagcaaggaggagcgggccctgaacaacctgatcgtggagaacgtgaatcaggagaacgacgagaaagacgagaaagaacaggtagctaataaaggagagcccctggccctgccccttaacgtttctgaatactgcgtcccacgcggcaaccgtcgccgattccgggtaaggcaaccaatcctccagtaccgttgggatataatgcaccggctgggcgaaccccaagcgaggatgagagaggagaacatggagcgaatcggcgaggaggttagacaactcatggaaaagctccgggaaaaacaattgtcccactcgcttagagccgtatccacggacccaccacaccatgaccatcacgatgagttttgcctgatgccatag

SEQ ID NO: 66269 - DNA, 387 bp, Artificial Sequence
  derived and/or modified sequence
atggagagcaaggaggagcgggccctgaacaacctgatcgtggagaacgtgaaccaggaaaatgatgagaaggacgagaaagaacaagtggccaataaaggcgaacctctcgccttgcctttgaatgtgtccgaatattgcgtaccccggggcaatcgaaggcgcttccgggtgaggcagcctatcctgcagtatcgatgggacataatgcatcgcctaggggaaccacaagctcggatgcgcgaggaaaacatggagcggatcggcgaagaggtgcggcaactgatggaaaagttacgcgaaaagcaattgagccacagcttaagggcagtgtcaactgatccacctcatcacgaccatcatgacgagttttgtctgatgccctag

SEQ ID NO: 66270 - DNA, 306 bp, Artificial Sequence
  derived and/or modified sequence
atggagagcaaggaggagcgggccctgaacaacctgatcgtggagaatgtgaaccaagaaaacgacgagaaggacgaaaaggagcaggtagctaataagggcgagcctcttgctctacctcttaacgtgtctgaatactgtgtccctagggggaacaggcgcaggttccgagtgaggcagcccatacttcagtatcgctgggacattatgcataggttgggcgagccccaggctcgcatgcgcgaagagaacatggagcgtatcggggaagaggtccggcagctgatggagaaactgcgcgagtag

SEQ ID NO: 66271 - DNA, 387 bp, Artificial Sequence
  derived and/or modified sequence
atggagtctaaggaggaacgcgcactgaataatctcatcgtggagaatgtaaatcaagagaatgatgagaaagatgagaaagagcaagttgccaataagggagagcctcttgcccttcctcttaacgtctcagagtactgcgtgccaagaggcaacaggagaagatttcgggtgcggcagcccatcctccagtaccgttgggacataatgcatcgtttgggcgagcctcaggcccgtatgcgagaggagaacatggagagaatcggtgaggaagtacgtcaactgatggaaaagttgcgggaaaagcagctcagccactcactgagggccgtgtccactgatcccccacatcacgaccatcatgacgagttttgcttgatgccatag

SEQ ID NO: 66272 - DNA, 387 bp, Artificial Sequence
  derived and/or modified sequence
atggaaagcaaggaggagagggcattgaacaatctcatcgtcgaaaatgtaaaccaggaaaacgatgaaaaagacgagaaggagcaagtcgcaaacaagggggaaccactcgccctcccgctgaatgtgtctgagtattgtgtgccaagaggcaatagacgccgttttcgagtccggcaaccgatcctgcaataccggtgggacattatgcaccgtctgggtgagcctcaggctcgtatgcgggaagaaaacatggagcgcatcggagaagaagtgaggcaactcatggagaaactgcgcgaaaagcagctgagtcatagcctgagggccgtgtccaccgacccccctcaccatgaccaccatgatgaattctgtctgatgccttag

SEQ ID NO: 66273 - DNA, 306 bp, Artificial Sequence
  derived and/or modified sequence
atggaatccaaagaggagagagccctgaataatcttatcgtcgagaacgtgaaccaggagaacgatgagaaggatgagaaggaacaggtcgccaataagggggaaccactcgccctccctctaaatgtaagcgagtactgtgtgcccagggggaatcgccgaagattcagggtaagacagcccattttgcagtaccgttgggatataatgcaccgactcggcgaaccccaggcacggatgagggaggagaacatggagcggatcggggaagaagttagacaactcatggaaaagctgcgtgaatag

SEQ ID NO: 66274 - DNA, 387 bp, Artificial Sequence
  derived and/or modified sequence
atggagagcaaggaggagagagccctgaacaacctgatcgtggagaacgtgaaccaggagaacgacgagaaggacgagaaggagcaggtggccaacaagggcgagcccctggccctgcccctgaacgtgagcgagtactgcgtgcccagaggcaacagaagaagattcagagtgagacagcccatcctgcagtacagatgggacatcatgcacagactgggcgagccccaggccagaatgagagaggagaacatggagagaatcggcgaggaggtgagacagctgatggagaagctgagagagaagcagctgagccacagcctgagagccgtgagcaccgaccccccccaccacgaccaccacgacgagttctgcctgatgccctag

SEQ ID NO: 66275 - DNA, 306 bp, Artificial Sequence
  derived and/or modified sequence
atggagagcaaggaggagagagccctgaacaacctgatcgtggagaacgtgaaccaggagaacgacgagaaggacgagaaggagcaggtggccaacaagggcgagcccctggccctgcccctgaacgtgagcgagtactgcgtgcccagaggcaacagaagaagattcagagtgagacagcccatcctgcagtacagatgggacatcatgcacagactgggcgagccccaggccagaatgagagaggagaacatggagagaatcggcgaggaggtgagacagctgatggagaagctgagagagtag

SEQ ID NO: 66276 - protein, 1012 aa, Artificial Sequence
  derived and/or modified sequence
MCAPGIHVSSEGWEEVRSVDSEEGTIEARRAVAGDLDYYWLDPATWHSRETSPISSHPVTWQPSKEGDRLIGRVILNKRTTMPKDSGALLGLKVVGGKMTDLGRLGAFITKVKKGSLADVVGHLRAGDEVLEWNGKPLPGATNEEVYNIILESKSEPQVEIIVSRPIGDIPRIPESSHPPLESSSSSFESQKMERPSISVISPTSPGALKDAPQVLPGQLSVKLWYDKVGHQLIVNVLQATDLPARVDGRPRNPYVKMYFLPDRSDKSKRRTKTVKKILEPKWNQTFVYSHVHRRDFRERMLEITVWDQPRVQEEESEFLGEILIELETALLDDEPHWYKLQTHDESSLPLPQPSPFMPRRHIHGESSSKKLQRSQRISDSDISDYEVDDGIGVVPPGYRSSARESKSTTLTVPEQQRTTHHRSRSVSPHRGNDQGKPRSRLPNVPLQRSLDEIHPTRRSRSPTRHHDASRSPVDHRTRDVDSQYLSEQDSELLMLPRAKRGRSAECLHTTSELQPFLDRARSASTNCLRPDTSLHSPERERHSRKSERSSIQKQTRKGTASDAERMHRQRSPTQSPPADTSFSSRRGRQLPQVPVRSGSIEQASLVVEERTRQMKMKVHRFKQTTGSGSSQELDREQYSKYNIHKDQYRSCDNVSAKSSDSDVSDVSAISRTSSASRLSSTSFMSEQSERPRGRISSFTPKMQGRRMGTSGRSIMKSTSVSGEMYTLEHNDGSQSDTAVGTVGAGGKKRRSSLSAKVVAIVSRRSRSTSQLSQTESGHKKLKSTIQRSTETGMAAEMRKMVRQPSRESTDGSINSYSSEGNLIFPGVRLGADSQFSDFLDGLGPAQLVGRQTLATPAMGDIQIGMEDKKGQLEVEVIRARSLTQKPGSKSTPAPYVKVYLLENGACIAKKKTRIARKTLDPLYQQSLVFDESPQGKVLQVIVWGDYGRMDHKCFMGVAQILLEELDLSSMVIGWYKLFPPSSLVDPTLTPLTRRASQSSLESSTGPPCIRS

SEQ ID NO: 66277 - DNA, 3039 bp, Artificial Sequence
  derived and/or modified sequence
atgtgcgccccaggcatccatgttagcagtgaaggttgggaggaggtacggtcagtcgatagtgaggagggcactatcgaggcgcggcgagccgtagcgggcgatctcgactactactggctcgatccagcaacatggcacagtcgggaaactagtccaattagctcacatcctgttacatggcaaccgtctaaggaaggcgacaggctgattggtcgggttattctcaacaagcggacgaccatgcctaaagattcaggcgctctgcttggccttaaggtcgtgggggggaagatgaccgatcttgggcggctgggggcctttataacaaaggtgaaaaaggggtcactggcagatgtggtgggccacttgcgcgcgggcgacgaagttcttgaatggaacggaaagcctttaccaggcgctaccaacgaggaggtgtataatatcattctggaatctaaaagcgagccgcaggtggagatcatcgttagcagacctattggagacattcctcgaatccccgagtcaagccaccctccattggagtccagttcttctagcttcgagtctcagaaaatggaaagaccttccatttcagtgatctcacctacctcgccaggtgccttgaaagacgccccccaggtactacccggccagctaagtgtcaagctgtggtacgacaaagtgggacaccagttgatcgtaaatgtcctgcaggcgactgacttgcctgcacgggtggacggaagaccgagaaatccatacgtcaagatgtatttcctcccagaccggtctgataagtctaagcgccgaaccaagaccgtaaaaaaaatactcgagccaaaatggaatcaaacttttgtctattcacacgtgcaccgccgagattttcgcgagcgcatgctcgaaatcacagtttgggatcaaccaagagtgcaggaggaagagagtgagttcctgggagagatcctgatagagctggagactgctctgttggacgacgagcctcattggtacaagctacagacgcacgatgagtcaagcctgccattacctcagccttctcctttcatgccccgtaggcacatccacggggaatcgtcctctaagaagctacagaggtcgcagagaatcagtgacagtgatattagcgactatgaggtggatgatggaattggcgtggtgcccccaggatatcgatcatctgcaagagaatccaagtccacaaccctaactgttcctgaacagcaacgcacgacacaccaccggagccgctccgtgtcgccacaccggggaaatgaccaaggcaaaccccggagccggctcccaaacgtgccacttcaacggtcactggacgagatacacccgacacgccggagtagatcccctaccagacaccacgatgcctccagatctcctgtggatcatcgtacacgagatgtggattcccagtacctgtccgagcaagatagcgaattactgatgttgcctcgtgctaagcgcggaagatcagctgaatgtctgcacacgaccagtgagctacaaccctttctggatcgcgcccgtagtgccagcacaaactgccttcgtccagacacatccctccactcacctgagcgcgaacggcatagccgcaaatccgagcgcagcagcatccaaaaacagacgcggaaaggcacagccagtgacgctgagaggatgcatagacagcgctctccaacccaatccccacccgccgacacctccttcagctcaaggcgaggtcgccagcttccccaggtgcctgtaagatctgggagtatcgaacaggcaagccttgtggtggaagaacggacccgacagatgaagatgaaggtgcacagattcaagcagaccacagggagtggaagcagccaagaacttgaccgcgaacagtactccaagtacaacatccataaagaccagtaccgcagctgcgacaatgtctccgcaaagtcttctgattctgatgtgagcgatgtgtctgccatatcaaggacttcctcagcatcaagattgagcagtacctctttcatgtcagagcagtccgaaaggcctcggggtaggatcagctcatttaccccaaaaatgcaaggccgtaggatgggaacttcagggaggagtataatgaagtccacctccgtgagtggcgaaatgtatacgctggaacataacgacgggtcacaaagcgacactgccgtggggacggtcggcgctggcggcaagaagaggagaagtagcctgagcgccaaagtggttgcgattgtctcacgcagatcccgctctaccagccagctctcccagacagagagtggccataagaaactgaagtctactatccagcggtctacagagactgggatggccgcagagatgagaaagatggtgcgtcagccaagtcgtgagagtaccgatggctctatcaatagttattctagtgaaggaaatctgatcttcccaggagtcagactgggggccgactctcaattttctgacttcttggatgggctgggtccagcccagctcgtgggcagacagacacttgctacccctgctatgggggacattcagatcggaatggaggataaaaaaggacagctggaagtggaggtcatcagggcgagaagcctcactcagaagccaggctctaagtccacccctgcgccttacgtgaaagtgtacttgttggagaatggggcttgcatcgccaagaaaaagactcgcatcgcgcgaaaaaccctcgatccactgtatcagcagtctcttgtttttgacgagagtccacagggtaaggttctgcaggtcatcgtatggggcgactacggtagaatggaccataagtgcttcatgggcgtggcccaaattctcttggaggaattagatctgtcttctatggtgattggatggtacaaactgttcccacctagctcactcgtggatccaactctgactccgctcactcggcgggcctctcagagtagcttggagagtagcaccggaccgccttgtatccgttcatag

SEQ ID NO: 66278 - DNA, 3039 bp, Artificial Sequence
  derived and/or modified sequence
atgtgtgcccctggcatccacgtgagcagcgagggctgggaggaggtgcgctctgtggacagcgaggagggcaccatcgaggccaggagagctgtggccggggacctggactactactggctggaccctgccacctggcacagccgggagaccagccccatcagcagccaccctgtgacctggcagcccagcaaggagggggaccggctgattggccgggtcatcctgaacaagaggaccaccatgcccaaggacagcggggccctgctgggcctgaaggtggtgggcggcaagatgacagacctgggccgcctgggcgccttcatcaccaaggtgaagaagggcagcctggctgatgtggtgggccacctgcgggctggagatgaggtgctggagtggaatggcaagcccctgcccggggccaccaatgaggaggtgtacaacatcatcctggagagcaagtctgagccccaggtggagatcatcgtgtcccggcccatcggggacatcccccgcatccctgagagcagccacccccccctggagagcagcagcagcagctttgagagccagaagatggagcggcccagcatcagcgtcatcagccccaccagccctggggccctgaaggatgccccccaggtgctgcccggccagctgtctgtgaagctgtggtatgacaaggtgggccaccagctgattgtgaatgtgctgcaggccacagacctgcctgcccgggtggatggccggcccaggaacccctacgtgaagatgtacttcctgcctgacagaagtgacaagagcaagaggaggaccaagacagtgaagaagatcctggagcccaagtggaaccagacctttgtgtacagccacgtgcaccggcgggacttccgggagaggatgctggagatcaccgtgtgggaccagccccgggtgcaggaggaggagagcgagttcctgggggagatcctgattgagctggagacagccctgctggatgatgagccccactggtacaagctgcagacccatgatgagagcagcctgcccctgccccagcccagccccttcatgccccggcggcacatccacggggagagcagcagcaagaagctgcagaggagccagaggatcagtgacagcgacatcagtgactatgaggtggatgatggcatcggcgtggtgcccccaggctaccgcagcagcgcccgggagagcaagagcaccaccctgactgtgcctgagcagcagaggaccacccaccacaggagccgctctgtgagcccccacagaggaaatgaccagggcaagcccaggagccggctgcccaacgtgcccctgcagaggagcctggatgagatccaccccacccggcgcagccgcagccccaccaggcaccatgatgccagccgcagccctgtggaccacaggaccagagatgtggacagccagtacctgtctgagcaggacagcgagctgctgatgctgccccgggccaagaggggccgctctgctgagtgcctgcacaccaccagcgagctgcagcccttcctggaccgggcccggagcgccagcaccaactgcctgcggccagacaccagcctgcacagccctgagcgggagcggcacagcaggaagtctgagaggagcagcatccagaagcagaccaggaagggcacagccagtgatgctgagaggatgcaccggcagaggagccccacccagagccccccagctgacaccagcttcagcagccggcggggccggcagctgccccaggtgcctgtgcgcagcggcagcattgagcaggccagcctggtggtggaggagaggacccggcagatgaagatgaaggtgcaccgcttcaagcagaccaccggcagcggcagcagccaggagctggaccgggagcagtacagcaagtacaacatccacaaggaccagtaccgcagctgtgacaacgtgtctgccaagagcagtgacagtgatgtgtctgatgtgtctgccatcagcaggaccagcagcgccagccggctgagcagcaccagcttcatgtctgagcagagcgagcggccccggggccgcatcagcagcttcacccccaagatgcagggccgcaggatgggcaccagcggccgcagcatcatgaagagcacctctgtgtctggagagatgtacaccctggagcacaatgatggcagccagagcgacacagctgtgggcaccgtgggcgccggcggcaagaagaggaggagcagcctgagcgccaaggtggtggccatcgtgagccgccgcagccgcagcaccagccagctgagccagacagaaagtggccacaagaagctgaagagcaccatccagaggagcacagagaccggcatggctgctgagatgaggaagatggtgcggcagcccagccgggagagcacagatggcagcatcaacagctacagcagcgagggcaacctgatcttccctggggtgcggctgggcgctgacagccagttcagtgacttcctggatggcctgggccctgcccagctggtgggccggcagaccctggccaccccagccatgggagacatccagatcggcatggaggacaagaagggccagctggaggtggaggtgatccgggcccggagcctgacccagaagccaggcagcaagagcaccccagccccctacgtgaaggtgtacctgctggagaatggagcctgcatcgccaagaagaagaccagaattgccaggaagaccctggaccccctgtaccagcagagcctggtgtttgatgagagcccccagggcaaggtgctgcaggtgattgtgtggggagactatggccgcatggaccacaagtgcttcatgggcgtggcccagatcctgctggaggagctggacctgagctccatggtgattggctggtacaagctgttcccccccagcagcctggtggaccccaccctgacccccctgacccggcgggccagccagagcagcctggagagcagcactggaccaccctgcatccgctcctag

SEQ ID NO: 66279 - DNA, 3039 bp, Artificial Sequence
  derived and/or modified sequence
atgtgcgcccccggcatccacgtgagcagcgagggctgggaggaggtccgctctgttgatagtgaagaagggactattgaagcacggcgtgccgtggcgggcgatctcgattactactggttggaccccgcaacctggcatagtcgagagacatcccctatttctagccaccctgtgacctggcagccctctaaagagggggaccgcttaatcggccgtgtcatactcaataagcggactaccatgccaaaggattccggggccttattaggccttaaggtagtcggcggaaaaatgactgatttgggcaggctcggcgcttttataacgaaagtcaagaaagggtcacttgccgacgtggtagggcacctaagagccggtgacgaagttctcgaatggaacgggaagccgcttcctggagcaacgaacgaggaagtttacaatattatcctggaaagcaaatctgaaccccaagttgagattattgtaagtcgccccatcggtgacatacctcggatccccgaatcctcccatcctccgttggagagttctagctctagctttgaatcacagaagatggaacgcccaagcatctcagtgataagccctacatcacctggcgcactgaaggatgctcctcaggttctgcccgggcagttgagtgtgaaattgtggtatgacaaggtgggccaccaactgattgtgaacgtacttcaggctacagacctgcctgccagggtggacgggagaccacggaatccatacgtgaaaatgtacttcctgcccgacagaagtgataaatccaagcgtaggaccaagacagtcaagaagattttggagccaaaatggaatcaaacattcgtgtatagccacgtccaccgtcgcgatttcagggagcggatgctggaaatcacagtctgggatcagccgcgggtacaggaggaagaatccgaattcctgggtgaaatactcattgaacttgaaacggccctgctggatgacgagccacactggtacaagctccagacacacgatgaatcctccctgccgctcccgcaaccgagcccattcatgcctcgaagacatatacacggcgaatctagctctaagaagttacagagatcgcagcgcatttctgactctgatatatcggactacgaagtggatgatggcattggcgtagtgccgcctggatatcgtagtagcgcaagggagagcaagagcacaacattaaccgttccagagcaacagaggaccacccaccatagaagtaggtctgttagcccacaccgcggaaacgatcagggtaagccaagatcgaggctgcccaacgtgccgctacagcgctctctcgacgaaatccaccctacgcgcagatctaggtcacccactcggcaccacgacgcgagtcgctcccccgtcgaccatagaacccgggacgtggactcccaatacttgtccgaacaggacagcgagctgctaatgctcccacgggctaagcgcggacgatctgcagagtgcctgcacacaacaagtgagctgcaaccattcctggaccgcgctcgaagcgcctctactaattgtctgagacccgacacttcccttcattccccagagagagaaaggcacagcagaaagtccgaaagatcatcaatccagaaacagacccgaaagggcactgcttccgatgcggagcggatgcatcgtcaaaggagtccaacccagtcccccccggccgatacctcgttttcctcaaggcgcggcaggcaactgccacaggtgcccgtcaggtctggatcaattgaacaggcctctctggtggtagaagagagaaccagacagatgaagatgaaagtacaccgctttaaacaaaccacaggttctgggtcaagccaagaattggatcgggaacagtactcaaaatacaacattcataaagaccagtacaggtcttgcgacaacgtgagtgctaagagcagtgatagcgacgtgagcgacgtgagcgctatcagcaggacaagtagtgccagccgcctgtccagcaccagcttcatgtctgaacagagtgagcgccccagagggcgcatcagctcatttactcccaagatgcaggggcgccgtatggggacctcagggaggagcatcatgaagtccacctccgttagtggagagatgtacacgttggaacataacgatggttcgcagagcgacaccgcggtgggcacagtcggcgccggcggaaagaagagacgaagttcactgagcgccaaggtggtggcgatcgtaagtaggcgttccagaagtacgtcacaactgagccagactgagtccggccacaagaaactgaaatcaactattcagagaagcacagaaacaggcatggccgccgagatgcgtaagatggtgcgccagccgtcaagggaatcaactgacgggtcaatcaactcatattccagcgagggaaacctgatttttcccggggttcgacttggggccgattcacaattctctgatttcctcgacggtctgggccccgcccagttggttggcaggcagactctggcaacacccgcaatgggagacatccagatcgggatggaggataagaaaggacagctggaggtcgaagtcattcgggcaaggagtctgacccagaagccaggttctaagtctacgccggccccatatgttaaggtatatttgttggagaacggtgcctgtattgccaaaaaaaaaaccagaattgctaggaaaaccctggatccgctttatcagcagagcctggtcttcgatgagtcaccccagggcaaagttctgcaggttatcgtgtggggtgattatggccgcatggaccacaagtgcttcatgggtgtggctcagattctgcttgaggagctggatttatcttccatggtgatcggctggtacaaactttttccacctagcagcctggtggatcccaccctgaccccacttacccggcgcgctagccagagctccctcgagagtagtacaggcccgccttgcatcagaagctag

SEQ ID NO: 66280 - DNA, 3039 bp, Artificial Sequence
  derived and/or modified sequence
atgtgtgcaccaggtatacacgtctcctcagagggctgggaagaagtgcgctctgtcgacagcgaggagggaaccatcgaggccagacgagccgtagccggtgacctggattactattggttggatccagccacatggcatagccgagagacatcacctatttcgtctcatccagtaacctggcaaccaagcaaagaaggggaccgtctaattggacgcgtgattcttaacaagaggactaccatgcctaaggactccggcgcactattggggttgaaagtcgtgggcggaaagatgacagatctgggtagattaggggcttttatcactaaggtgaaaaaaggctccctggctgacgtcgtcggacaccttcgagcgggagatgaggtccttgagtggaacggtaagcctcttccaggcgcaactaatgaagaagtatataacattattctcgaatccaaatctgagcctcaagtcgagatcatcgtgtccagaccgatcggtgatatccctaggataccggagtcaagccatcctcctctcgagtcgagctctagctcctttgaatctcagaagatggaaaggcctagcatcagcgtaatcagtcctacctctcctggcgcacttaaggacgcccctcaggtacttcccggtcagctttcagtgaaactctggtatgacaaggtgggacatcagctcattgtgaatgtactgcaggctacggatctgcctgctcgcgttgatggcagacccagaaacccatacgtaaaaatgtactttttgccagacagatccgataaaagcaagagaagaaccaaaaccgtaaaaaagatcttggaacctaaatggaatcagacctttgtctacagtcacgtgcacagacgggactttcgggagcgtatgctagagataacagtttgggaccagcctcgcgtgcaggaagaggaatccgagttcctaggggagatactcatagagctggaaaccgccctgttggatgatgagccccactggtacaagttacagacgcacgatgagtcaagcctccccctgcctcagccgtcgcccttcatgccccgaaggcacatccatggagaaagctcctctaagaagctgcagagaagtcaacgcatctctgatagcgatatttccgactatgaagtggatgatggaattggagtggtcccccctggctatcgctccagtgcaagagaatcaaagtctactaccctaacagtgcctgagcagcagaggacgacacaccaccgcagccgcagtgtttctccacatagaggaaatgatcagggcaagccgaggagtaggctcccaaatgttccactccagcggtccctagacgagatccaccccacgcggcgttctagatccccgacccgccaccatgatgcgtcaaggtccccagtggaccaccgcacacgcgatgtcgactcacagtacttgagtgagcaggattcagagctcctcatgttgcccagagcaaagcgaggccgaagtgcagagtgtctgcatacaacttcagaactgcagccttttctggatagggccaggtccgcctctactaattgtctgcggcctgacacttcattacactcccccgagagggaacggcatagtcgtaagtccgagcggagctcgatacagaaacagactcggaaaggaacagccagtgacgccgaacggatgcacagacaaagatctccgacccagagtccacctgcagacacgagctttagcagcagacggggaagacaactgccccaggtccctgtacgctccggaagtattgaacaagccagtctggtggtagaggagagaaccagacagatgaagatgaaagtgcatcggttcaagcagactacggggagcgggagttctcaagagctcgacagagaacagtacagtaagtacaacatacacaaggatcagtacagaagttgcgacaatgtttctgctaaaagctccgattcggatgtgtccgatgtgagcgccatctcccggacatctagcgccagccgccttagcagcacctcttttatgtcggaacagagtgagaggccacgtggccgaatttccagctttacccccaaaatgcagggacggcgaatgggcacaagcggccgttccattatgaagtccacaagcgtgtccggtgaaatgtacacactggaacacaatgacgggagccagagcgacacagcggttggcacagtgggagccggaggaaaaaagagacggtcctccctgtctgctaaggtggttgcaattgtgtcacggaggtctaggtctaccagtcagctgtcccaaaccgagtcaggtcacaagaagttgaagtctaccatccagcgatcaaccgaaacgggtatggccgcagaaatgcggaagatggtgaggcagccctcccgggagagtaccgatggctccatcaatagctactcctccgaggggaaccttatattccctggggtacgtctcggggcagactcacagttctcggacttccttgatgggctgggtcccgcacagttggtgggcagacagaccttagcaacacctgcgatgggggatattcagataggaatggaagataagaagggacaactcgaggtggaagttatccgcgctcgctctctcacacagaagcccggttcaaagagcacaccggcaccttacgttaaggtatatcttttggagaacggcgcttgtatcgcaaagaaaaagactcgcatcgcacgtaagaccctagatccgttgtatcagcaaagcctcgtcttcgacgaaagcccacaaggtaaagtactgcaagtcatcgtctggggggactacggccgaatggatcataagtgtttcatgggcgttgcccagatcctgctggaagagctggacctgtcgagtatggtcatcgggtggtacaagctttttccaccatcaagtttggtggatccaacgctgacacctctgacccggagagccagtcaaagttcactggaaagcagcacgggacctccttgcatcaggtcttag

SEQ ID NO: 66281 - DNA, 3542 bp, Artificial Sequence
  derived and/or modified sequence
agtaaatgctaccagtccccacaccaccaggcccaccgaagcttgtctacagtattttatccaagcagtcctttgggtaactgcacagtgcctgcagtgacctgagtcagtcatgcaaggagactttcttgttctcacaccaatgttttatttcagtttccattttctgctggtcctgttgttcaatgatataagcagagtgatgaaggaggcgcttcacactcttcttagataagatcttgagcagcagagagtggtttaaacagcaaggcttaaatctctcaagctggatttatttccaagtttgctgtcatgtgtgcacctgggattcatgtctcttcagaagggtgggaagaagtgaggtctgttgattccgaagagggaacaattgaagctcgacgagcagttgctggtgatttggattattactggttggatcctgccacgtggcacagccgggagacatcacctattagttcgcatcctgtaacgtggcaaccatctaaagagggggaccgattaattggacgtgttattcttaacaagagaacaaccatgcccaaagactcaggtgcattgctgggtctgaaagttgttggaggaaaaatgactgacttaggacgacttggtgctttcatcaccaaagtaaagaagggtagcctagcagatgtagttggacacctaagagcaggggatgaagttctagaatggaatggtaaacccctgccgggagctacaaatgaagaagtttacaacattattttagaatcaaaatcagaacctcaagttgaaattattgtttcaaggcctattggtgacattccccggattcctgagagctcccaccctccactggagtccagttcaagttcctttgaatctcagaagatggaaaggccttccatttctgttatttctccaacaagtcctggagctctaaaagatgccccacaagtcttaccagggcaactttctgtgaagttgtggtatgataaagtgggacaccagctgattgtaaatgttctgcaagcaacagatctacctgctagagtagatggacgtcctcgaaatccctatgtaaaaatgtattttcttccagatagaagtgataaaagtaaaaggaggaccaaaacagtaaagaaaatactagaaccaaaatggaatcaaacttttgtctattcacatgtacatcgtagagattttagagaacgaatgttagaaataactgtgtgggaccaaccaagagtgcaagaagaagaaagtgaatttcttggagagatcctcatagaattggagacagcgcttttagatgatgaaccgcattggtataaacttcagacacatgatgagtcttcactacctctgcctcagccatcacctttcatgccaaggcgacatattcatggagaaagctctagcaaaaagctacaaagatctcagcgaatcagtgatagtgacatctcagattatgaggttgatgatggtattggcgtagttcctccaggctataggtctagtgctagagaaagtaaatctacaacattaactgtgccagaacagcaaagaacaactcatcaccgctcacgttcagtatctcctcatcgcggcaatgatcagggaaagccgcgttcacgtttaccaaatgtgccattacagaggagtttagatgaaattcatccaacaagaaggtcacgttctccaaccagacaccatgatgcctcccgaagtccagttgatcatagaaccagagatgtggatagtcagtatttatcagaacaagacagtgagcttcttatgctgcccagagcaaaacgaggacgaagtgcagaatgcctacatactaccagtgaactgcagccctttcttgacagggctaggagtgctagtaccaactgcttgagaccagatactagtttgcattcaccagaacgagaaaggcactccagaaagtctgaaagatctagcatccaaaaacagactaggaaaggcactgcctctgatgcagaaagaatgcaccgacagagaagtccaacacaatctcctccagcagacacatcgttcagcagtcgcaggggaagacagctcccacaagtgccagtgagaagcggcagtatagaacaagcaagcttagtagtggaggagcgaacaagacagatgaaaatgaaagtgcatcgatttaagcagacaacagggtctggttctagtcaagaacttgatcgcgagcaatattccaagtataacatacataaagatcagtacagaagctgtgataacgtctctgccaaatcatcagatagtgatgtcagtgatgtttccgccatttcccgaaccagcagtgcctcacgcctcagcagcacaagctttatgtcagagcaatctgagcgccccaggggtagaatcagttcatttacccccaaaatgcaaggcagacggatggggacttcaggaagatccatcatgaagagcaccagtgtcagtggagagatgtacacactggagcataatgacggcagccagtcagacacagctgtgggtacagttggagcaggtggaaagaaacggagatccagccttagtgccaaagtggttgccatagtgtctcgaaggagtagaagcacatcccagcttagtcaaacagagtcgggccacaaaaagttaaaaagtaccatccagagaagcacagaaacaggcatggcagctgaaatgagaaagatggtaaggcagccgagccgagagtctactgatggcagcatcaacagttacagctctgagggcaatttaatatttcctggagtgcgactgggagctgacagtcaattcagtgattttcttgatggattgggaccagcccagcttgttggccgccaaacccttgccacccctgcaatgggtgatatacaaataggaatggaggacaaaaagggccaattagaagtggaagtcattagagcacgaagcctcacacaaaagcctggttccaaatctacacctgctccatatgtcaaagtatatcttttggaaaatggggcctgtatagccaagaagaagacaagaattgcacgaaaaacccttgatcctttgtatcagcagtctctggtttttgatgaaagtccacagggtaaagttcttcaggtgattgtctggggagactatggcagaatggaccacaaatgctttatgggtgtggctcagatcttgttggaagaactcgacctgtccagcatggtgatcggatggtacaaattgttcccaccgtcctcactggtggatcccacactcactcccctcacccggcgggcttcccagtcatctctggaaagttcaactgggcctccctgtattcgatcatagtgaactcataccagagtcattccaataaaactctacttttcaggataataatctgaaccagatatttcatgatcgaaagcattgttggagacagacaatcaacttgtgttttgcctgtagtagtttttcaataatatgtcccaattgttatttaaaacatggcttcatatgacagaacaaggcaatctatc

SEQ ID NO: 66282 - DNA, 3039 bp, Artificial Sequence
  derived and/or modified sequence
atgtgcgcccccggcatccacgtgagcagcgagggctgggaggaggtgagaagcgtggacagcgaggagggcaccatcgaggccagaagagccgtggccggcgacctggactactactggctggaccccgccacctggcacagcagagagaccagccccatcagcagccaccccgtgacctggcagcccagcaaggagggcgacagactgatcggcagagtgatcctgaacaagagaaccaccatgcccaaggacagcggcgccctgctgggcctgaaggtggtgggcggcaagatgaccgacctgggcagactgggcgccttcatcaccaaggtgaagaagggcagcctggccgacgtggtgggccacctgagagccggcgacgaggtgctggagtggaacggcaagcccctgcccggcgccaccaacgaggaggtgtacaacatcatcctggagagcaagagcgagccccaggtggagatcatcgtgagcagacccatcggcgacatccccagaatccccgagagcagccacccccccctggagagcagcagcagcagcttcgagagccagaagatggagagacccagcatcagcgtgatcagccccaccagccccggcgccctgaaggacgccccccaggtgctgcccggccagctgagcgtgaagctgtggtacgacaaggtgggccaccagctgatcgtgaacgtgctgcaggccaccgacctgcccgccagagtggacggcagacccagaaacccctacgtgaagatgtacttcctgcccgacagaagcgacaagagcaagagaagaaccaagaccgtgaagaagatcctggagcccaagtggaaccagaccttcgtgtacagccacgtgcacagaagagacttcagagagagaatgctggagatcaccgtgtgggaccagcccagagtgcaggaggaggagagcgagttcctgggcgagatcctgatcgagctggagaccgccctgctggacgacgagccccactggtacaagctgcagacccacgacgagagcagcctgcccctgccccagcccagccccttcatgcccagaagacacatccacggcgagagcagcagcaagaagctgcagagaagccagagaatcagcgacagcgacatcagcgactacgaggtggacgacggcatcggcgtggtgccccccggctacagaagcagcgccagagagagcaagagcaccaccctgaccgtgcccgagcagcagagaaccacccaccacagaagcagaagcgtgagcccccacagaggcaacgaccagggcaagcccagaagcagactgcccaacgtgcccctgcagagaagcctggacgagatccaccccaccagaagaagcagaagccccaccagacaccacgacgccagcagaagccccgtggaccacagaaccagagacgtggacagccagtacctgagcgagcaggacagcgagctgctgatgctgcccagagccaagagaggcagaagcgccgagtgcctgcacaccaccagcgagctgcagcccttcctggacagagccagaagcgccagcaccaactgcctgagacccgacaccagcctgcacagccccgagagagagagacacagcagaaagagcgagagaagcagcatccagaagcagaccagaaagggcaccgccagcgacgccgagagaatgcacagacagagaagccccacccagagcccccccgccgacaccagcttcagcagcagaagaggcagacagctgccccaggtgcccgtgagaagcggcagcatcgagcaggccagcctggtggtggaggagagaaccagacagatgaagatgaaggtgcacagattcaagcagaccaccggcagcggcagcagccaggagctggacagagagcagtacagcaagtacaacatccacaaggaccagtacagaagctgcgacaacgtgagcgccaagagcagcgacagcgacgtgagcgacgtgagcgccatcagcagaaccagcagcgccagcagactgagcagcaccagcttcatgagcgagcagagcgagagacccagaggcagaatcagcagcttcacccccaagatgcagggcagaagaatgggcaccagcggcagaagcatcatgaagagcaccagcgtgagcggcgagatgtacaccctggagcacaacgacggcagccagagcgacaccgccgtgggcaccgtgggcgccggcggcaagaagagaagaagcagcctgagcgccaaggtggtggccatcgtgagcagaagaagcagaagcaccagccagctgagccagaccgagagcggccacaagaagctgaagagcaccatccagagaagcaccgagaccggcatggccgccgagatgagaaagatggtgagacagcccagcagagagagcaccgacggcagcatcaacagctacagcagcgagggcaacctgatcttccccggcgtgagactgggcgccgacagccagttcagcgacttcctggacggcctgggccccgcccagctggtgggcagacagaccctggccacccccgccatgggcgacatccagatcggcatggaggacaagaagggccagctggaggtggaggtgatcagagccagaagcctgacccagaagcccggcagcaagagcacccccgccccctacgtgaaggtgtacctgctggagaacggcgcctgcatcgccaagaagaagaccagaatcgccagaaagaccctggaccccctgtaccagcagagcctggtgttcgacgagagcccccagggcaaggtgctgcaggtgatcgtgtggggcgactacggcagaatggaccacaagtgcttcatgggcgtggcccagatcctgctggaggagctggacctgagcagcatggtgatcggctggtacaagctgttcccccccagcagcctggtggaccccaccctgacccccctgaccagaagagccagccagagcagcctggagagcagcaccggccccccctgcatcagaagctag

SEQ ID NO: 66283 - protein, 817 aa, Artificial Sequence
  derived and/or modified sequence
MCAPGIHVSSEGWEEVRSVDSEEGTIEARRAVAGDLDYYWLDPATWHSRETSPISSHPVTWQPSKEGDRLIGRVILNKRTTMPKDSGALLGLKVVGGKMTDLGRLGAFITKVKKGSLADVVGHLRAGDEVLEWNGKPLPGATNEEVYNIILESKSEPQVEIIVSRPIGDIPRIPESSHPPLESSSSSFESQKMERPSISVISPTSPGALKDAPQVLPGQLSVKLWYDKVGHQLIVNVLQATDLPARVDGRPRNPYVKMYFLPDRSDKSKRRTKTVKKILEPKWNQTFVYSHVHRRDFRERMLEITVWDQPRVQEEESEFLGEILIELETALLDDEPHWYKLQTHDESSLPLPQPSPFMPRRHIHGESSSKKLQRSQRISDSDISDYEVDDGIGVVPPVGYRSSARESKSTTLTVPEQQRTTHHRSRSVSPHRGNDQGKPRSRLPNVPLQRSLDEIHPTRRSRSPTRHHDASRSPVDHRTRDVDSQYLSEQDSELLMLPRAKRGRSAECLHTTSELQPFLDRARSASTNCLRPDTSLHSPERERMHRQRSPTQSPPADTSFSSRRGRQLPQVPVRSGSIEQESGHKKLKSTIQRSTETGMAAEMRKMVRQPSRESTDGSINSYSSEGNLIFPGVRLGADSQFSDFLDGLGPAQLVGRQTLATPAMGDIQIGMEDKKGQLEVEVIRARSLTQKPGSKSTPAPYVKVYLLENGACIAKKKTRIARKTLDPLYQQSLVFDESPQGKVLQVIVWGDYGRMDHKCFMGVAQILLEELDLSSMVIGWYKLFPPSSLVDPTLTPLTRRASQSSLESSTGPPCIRS

SEQ ID NO: 66284 - DNA, 2454 bp, Artificial Sequence
  derived and/or modified sequence
atgtgcgctccaggtatacatgtgtccagtgaaggatgggaggaagtgcggtcagtcgattcggaggaaggtactatcgaggcgcgcagggctgtagccggagacctggactactattggctcgatcccgcaacttggcactcccgggaaacgtcccccatcagcagtcatccagttacttggcagccatccaaggaaggtgatcgcttgattggaagggttatactgaataaaagaaccaccatgcccaaagacagcggggctctcctgggactgaaagtggtcgggggaaagatgactgatctggggcggctcggtgctttcataaccaaggtaaagaaaggatcccttgccgatgtggtgggccatctcagagctggggacgaagtcttggagtggaacgggaagcctttgcccggggctacgaatgaggaggtatataatatcatcctggaatcaaaaagcgagccgcaagtcgaaatcatcgtgtcaaggcccatcggagatatacccagaatcccggaatcatcgcacccgccgctggagtcaagtagttcaagttttgagagccaaaaaatggaacggcccagcattagtgtgatctccccgacctcccctggggctctgaaggacgcaccccaagttcttcctggacaactttcagtaaaactctggtatgataaagttggacaccaattaattgtcaacgtcctgcaagccaccgatttgcccgctcgagtggacggaaggcccagaaatccttacgtgaagatgtactttctgcctgataggagcgataagagcaaacgccgtacgaaaactgtcaaaaagattttagaaccaaaatggaaccagactttcgtgtatagccatgtacataggcgggattttagggagcgcatgttggagattactgtatgggaccagcctcgcgtgcaggaggaagagtctgagttcctgggagagatcctcatcgaacttgagaccgccctcctggatgatgaacctcactggtataagctgcagactcatgatgaaagctcactgccactgccgcagccatccccgttcatgccgaggagacatatccacggagaatccagtagtaagaaattgcagcgcagtcagcgaatttctgactcagacattagcgactacgaggttgacgacgggattggcgtggtgccgccagttggctacagatcaagcgccagggagtctaagtctaccaccctcacggtgcccgagcagcagcgtactactcatcaccgctcaagatccgtctcaccgcatcggggtaacgaccagggcaagccaaggtctcgtttaccgaacgtgcctctacagcggtcgctagatgagatccaccctacgcggaggtccagatcccccacacgacaccacgacgctagtcgatccccagtagatcaccgcacaagagatgtcgatagtcagtatttgtcagaacaggatagcgaactgctgatgcttccccgcgctaagaggggacgctccgcagagtgtcttcataccacctctgaattacaacctttcctggaccgcgcaaggagcgccagtaccaactgtctacggcccgatactagcctgcacagcccagagagagagcgcatgcaccgccagaggtcccccactcaatcgcctccagcagatacctccttttctagtcggaggggacggcagcttcctcaagtgcctgtccggtctgggtctatcgagcaagaatcaggccacaaaaagttaaaaagcacaatccagcgcagtaccgagacaggtatggctgccgaaatgcgcaagatggtccgacagccaagccgcgagtctacagacggtagcattaatagttactcctccgagggtaatcttattttccccggggtgcggcttggtgctgactcacagttctccgactttctggatggactggggcccgcccagttggtcggccgccagacactggccacaccagcaatgggggacattcagataggtatggaagataagaaaggccagttggaggtggaggtgatccgagccagatccttaacacagaaaccggggagtaagagtacaccagccccttatgtcaaagtgtacctgctcgagaacggagcatgcatcgccaagaagaaaacccggatcgctcggaaaactctggatcccctgtaccagcaatccttagtctttgacgaatcgccgcaggggaaggtcctgcaggtgatcgtctggggagactatggacgcatggatcacaaatgcttcatgggcgtggcgcagatattactggaagaacttgacctcagtagtatggtgattggatggtataaactattcccacctagtagtctcgtcgatcctaccctgactcctctgactagacgagcgtctcagagtagccttgaatcatctacaggccccccctgcattagatcctag

SEQ ID NO: 66285 - DNA, 2454 bp, Artificial Sequence
  derived and/or modified sequence
atgtgtgcccctggcatccacgtgagcagcgagggctgggaggaggtgcgctctgtggacagcgaggagggcaccatcgaggccaggagagctgtggccggggacctggactactactggctggaccctgccacctggcacagccgggagaccagccccatcagcagccaccctgtgacctggcagcccagcaaggagggggaccggctgattggccgggtcatcctgaacaagaggaccaccatgcccaaggacagcggggccctgctgggcctgaaggtggtgggcggcaagatgacagacctgggccgcctgggcgccttcatcaccaaggtgaagaagggcagcctggctgatgtggtgggccacctgcgggctggagatgaggtgctggagtggaatggcaagcccctgcccggggccaccaatgaggaggtgtacaacatcatcctggagagcaagtctgagccccaggtggagatcatcgtgtcccggcccatcggggacatcccccgcatccctgagagcagccacccccccctggagagcagcagcagcagctttgagagccagaagatggagcggcccagcatcagcgtcatcagccccaccagccctggggccctgaaggatgccccccaggtgctgcccggccagctgtctgtgaagctgtggtatgacaaggtgggccaccagctgattgtgaatgtgctgcaggccacagacctgcctgcccgggtggatggccggcccaggaacccctacgtgaagatgtacttcctgcctgacagaagtgacaagagcaagaggaggaccaagacagtgaagaagatcctggagcccaagtggaaccagacctttgtgtacagccacgtgcaccggcgggacttccgggagaggatgctggagatcaccgtgtgggaccagccccgggtgcaggaggaggagagcgagttcctgggggagatcctgattgagctggagacagccctgctggatgatgagccccactggtacaagctgcagacccatgatgagagcagcctgcccctgccccagcccagccccttcatgccccggcggcacatccacggggagagcagcagcaagaagctgcagaggagccagaggatcagtgacagcgacatcagtgactatgaggtggatgatggcatcggcgtggtgccccctgtgggctaccgcagcagcgcccgggagagcaagagcaccaccctgactgtgcctgagcagcagaggaccacccaccacaggagccgctctgtgagcccccacagaggaaatgaccagggcaagcccaggagccggctgcccaacgtgcccctgcagaggagcctggatgagatccaccccaccaggaggagccgcagccccaccaggcaccatgatgccagccgcagccctgtggaccacaggaccagagatgtggacagccagtacctgtctgagcaggacagcgagctgctgatgctgccccgggccaagaggggccgctctgcagaatgtctgcacaccaccagcgagctgcagcccttcctggaccgggcccggagcgccagcaccaactgcctgcggccagacaccagcctgcacagccctgagcgggagaggatgcaccggcagaggagccccacccagagccccccagctgacaccagcttcagcagcagaagaggccggcagctgccccaggtgcctgtgcgcagcggcagcattgagcaggagagcggccacaagaagctgaagagcaccatccagaggagcacagaaacaggcatggctgctgagatgaggaagatggtgcggcagcccagccgggagagcacagatggcagcatcaacagctacagcagcgagggcaacctgatcttccctggggtgcggctgggcgctgacagccagttcagtgacttcctggatggcctgggccctgcccagctggtgggccggcagaccctggccaccccagccatgggagacatccagatcggcatggaggacaagaagggccagctggaggtggaggtgatccgggcccggagcctgacccagaagccaggcagcaagagcaccccagccccctacgtgaaggtgtacctgctggagaatggagcctgcatcgccaagaagaagacccgcatcgccaggaagaccctggaccccctgtaccagcagagcctggtgtttgatgagagcccccagggcaaggtgctgcaggtgattgtgtggggagactatggccgcatggaccacaagtgcttcatgggcgtggcccagatcctgctggaggagctggacctgagctccatggtgattggctggtacaagctgtttcctcccagcagcctggtggaccccaccctgacccccctgacccggcgggccagccagagcagcctggagagcagcacaggccccccctgcatccgctcctag

SEQ ID NO: 66286 - DNA, 2454 bp, Artificial Sequence
  derived and/or modified sequence
atgtgcgcccccggcatccacgtgagcagcgagggctgggaggaggtacgttcagtggactctgaagaggggacaattgaagcgaggagagcagtggcaggagaccttgactattactggctggatcccgcaacctggcatagccgagagacaagccccatctcaagtcaccccgtcacatggcagccttctaaggagggagacagactcatcggcagagtgattctaaacaagaggacaacaatgcccaaagattccggagctctgctgggtctaaaggtggtgggcggcaagatgacggacctaggtaggctgggagctttcatcaccaaagtcaagaagggctccctggccgacgtggtgggtcacttaagggcaggagatgaggtccttgaatggaacggcaagcccttgccaggcgcaacaaacgaggaagtgtacaatattattctggagagcaagtctgagcctcaggtcgaaataatcgtatctaggccaatcggtgacattcccagaattccggaatcatcccacccacctctcgaaagctcatcgtcgtccttcgaaagtcagaagatggaacggccttcaatatccgttatcagccctacttctccaggagccctgaaggatgccccccaagtgcttcctggccagctgagtgtcaaactttggtacgataaagttggccaccagttgatcgtaaatgtgctacaggctaccgacctgcccgctagggtagacggccgtcctaggaacccctacgttaaaatgtatttcttaccagaccgatccgataaaagcaagaggagaacaaaaactgtgaaaaaaatcctcgagcccaagtggaaccagacatttgtttattctcacgtgcaccgtagggactttcgggagagaatgctggagataaccgtgtgggaccagcccagggtgcaggaggaagagtctgaattcctgggtgagattctgatcgagttagaaacggcgctgctcgacgacgagccacattggtataaattgcaaacccacgacgaatcatcacttccacttccacagcccagccccttcatgccccgacgtcacatccatggagagagcagctccaaaaagttgcagaggtctcagagaattagcgatagcgacatctctgactacgaggttgatgacggcatcggcgtggtcccaccggtgggataccggtcctcagcacgtgagtccaaatcaactacccttacagttccggaacagcagcgtacgactcatcacaggagccgttcagtatctccacatcggggaaacgatcagggaaagccaaggagcaggctgcctaacgtgccccttcagcgctctctggacgaaatacatcccactcggagaagccggtcccctacacggcatcatgacgcctcacgcagcccagtcgaccatcggacacgcgatgtcgactctcaatacctatctgaacaggattctgaattgctgatgctgccccgggctaagcgcgggagatccgcagagtgtttacacactacctcagagcttcagccattccttgaccgtgcgcgaagtgcgagcacaaactgtttacgccccgatacttcactacattctcccgaaagggaacgtatgcatcgtcagcgctcgccaacacagtccccaccagcagacacttccttcagcagcaggagggggcgtcaactccctcaggtgcctgtgcgctctggctcaatagagcaggagtccgggcataaaaagttgaaaagtactattcagaggtctacggagaccgggatggccgccgagatgagaaagatggttaggcaaccctcaagggaaagtactgatggctctatcaacagttattccagcgaagggaatctcatcttcccaggagtgcggctaggcgcggattcccagttttcagacttcctggatggactgggaccagctcagttggttggtagacagactcttgcaacgcctgcaatgggagacattcagatcggaatggaggataagaaaggccaactcgaggtggaagttattagggctagaagcctgactcaaaagcctggatcaaaatctacacccgctccctatgtgaaggtctatcttttggaaaatggagcctgcatagccaagaaaaagaccaggatagcacgtaaaactttagaccccttgtatcaacagtccctggtgttcgatgagagcccccaggggaaagttctgcaggtgatcgtgtggggggattatgggagaatggaccacaaatgcttcatgggcgtggctcagattctgctggaggaactggatttgtcttcgatggtaattgggtggtacaaattatttcccccctcctcactggtggatcctaccctgacccccctcaccagacgagcctcccagagctcactggagtcttccaccgggccaccatgcatccggagctag

SEQ ID NO: 66287 - DNA, 2454 bp, Artificial Sequence
  derived and/or modified sequence
atgtgcgctcccggaatccacgtcagttccgaaggttgggaagaagtgagatccgtggactctgaggaaggcacaatcgaggctaggcgagccgtcgcaggagatctggattattactggctggatccggctacgtggcatagccgtgagacttcacctataagctctcacccggtgacctggcagccatccaaagagggagaccgccttattggccgagttatacttaacaaacgcacaaccatgcctaaggacagcggagctttgctaggcctgaaggtggtgggtggcaaaatgaccgacctaggccgtttgggagcctttatcacaaaggtgaagaagggaagcctggcagatgtggtcgggcacctgcgggctggagatgaagtcttagaatggaatgggaagccccttcccggagcgaccaacgaggaagtttacaacatcatcctggagtccaagagcgagccacaagtggagatcatcgtctcacgcccaattggtgacataccacggatcccggaaagttctcatccgccactagagtcgagctcctcgagcttcgagagccaaaaaatggaacggccaagcattagtgtgattagtccaactagccctggcgcactcaaggatgcaccacaggttttgcccggacagctctctgttaaactctggtacgacaaggttggtcatcaattgatcgtcaacgtgcttcaagccacggatctccccgcaagggtggacggacggccacgaaatccatacgtgaaaatgtatttcctgcctgatcgcagtgataagtcgaaaaggagaaccaagaccgtcaagaagatactggaacctaaatggaatcaaacttttgtgtactcacacgtgcaccgccgagactttagagagcgcatgctggaaatcaccgtttgggatcaaccaagagtccaggaggaagaatccgaatttctgggcgagattctgattgaactggagaccgcgttattagacgatgaacctcactggtacaaattgcagacccacgacgaaagcagtctgcctctccctcagccatccccttttatgccacgcaggcacatacatggggagtccagttcaaaaaagttgcaacggtcacagcggattagtgactcagacatctccgactacgaggtggatgacggcataggtgtggtgccacctgtgggttatcgcagcagcgcccgagaatctaagagcaccactttgaccgtgcctgaacaacagcgcaccacacatcaccgttctcgttcagtgagtccacatcggggaaacgatcagggtaagccccgttccagattgcctaacgtccctcttcagcggtctcttgatgaaattcatcccaccaggcgatccagatctcccactcggcaccatgatgcttcacgcagccctgttgaccatagaacacgggatgtggattcccagtacctttccgaacaggattcagagctcttgatgttaccacgcgctaagaggggaaggagcgccgaatgtctgcacaccacctcggaactgcagccgttcctcgatagggccaggtctgcatcaacaaattgtcttaggcctgataccagcctccactcccctgagagagagaggatgcatcgacagaggagcccaacccagtcacctcccgcagacactagtttctcgtcaaggcgcggtcgccagttacctcaagtacccgttaggtctggcagtattgagcaggaatccggacacaaaaagctgaagtctaccatacaacgatctacagaaacaggtatggctgccgagatgagaaaaatggtgagacagccttctagggagtcaaccgacgggagcatcaattcttatagcagtgaaggcaacctgatatttccgggagttcgcctcggcgcagactcgcagtttagcgactttctggacggacttggccctgcccagctggtgggtaggcaaacactggccacgcctgccatgggggacatccagatcggaatggaagacaagaaagggcagctggaggtcgaagtgatcagagcccgttctctaactcaaaagccagggtccaaatctacccccgcaccatatgtgaaggtgtatctcctggaaaatggcgcatgtatagccaaaaagaaaacccggatcgcacggaaaacacttgacccactgtaccagcaatctttagtgttcgatgaatctccgcagggtaaagtgctgcaagtcatcgtctggggggattacggcaggatggatcacaaatgttttatgggggtcgctcagattctgttggaagaactggatctgtcttcgatggtgattggttggtacaagctgtttccgccatctagtctagttgaccctactttaacccccctgacaagaagggcgtctcaatcgtccctcgagtcttccactgggcctccatgcatcagatcctag

SEQ ID NO: 66288 - DNA, 3097 bp, Artificial Sequence
  derived and/or modified sequence
gcacagtgcctgcagtgacctgagtcagtcatgcaaggagactttcttgttctcacaccaatgttttatttcagtttccattttctgctggtcctgttgttcaatgatataagcagagtgatgaaggaggcgcttcacactcttcttagataagatcttgagcagcagagagtggtttaaacagcaaggcttaaatctctcaagctggatttatttccaagtttgctgtcatgtgtgcacctgggattcatgtctcttcagaagggtgggaagaagtgaggtctgttgattccgaagagggaacaattgaagctcgacgagcagttgctggtgatttggattattactggttggatcctgccacgtggcacagccgggagacatcacctattagttcgcatcctgtaacgtggcaaccatctaaagagggggaccgattaattggacgtgttattcttaacaagagaacaaccatgcccaaagactcaggtgcattgctgggtctgaaagttgttggaggaaaaatgactgacttaggacgacttggtgctttcatcaccaaagtaaagaagggtagcctagcagatgtagttggacacctaagagcaggggatgaagttctagaatggaatggtaaacccctgccgggagctacaaatgaagaagtttacaacattattttagaatcaaaatcagaacctcaagttgaaattattgtttcaaggcctattggtgacattccccggattcctgagagctcccaccctccactggagtccagttcaagttcctttgaatctcagaagatggaaaggccttccatttctgttatttctccaacaagtcctggagctctaaaagatgccccacaagtcttaccagggcaactttctgtgaagttgtggtatgataaagtgggacaccagctgattgtaaatgttctgcaagcaacagatctacctgctagagtagatggacgtcctcgaaatccctatgtaaaaatgtattttcttccagatagaagtgataaaagtaaaaggaggaccaaaacagtaaagaaaatactagaaccaaaatggaatcaaacttttgtctattcacatgtacatcgtagagattttagagaacgaatgttagaaataactgtgtgggaccaaccaagagtgcaagaagaagaaagtgaatttcttggagagatcctcatagaattggagacagcgcttttagatgatgaaccgcattggtataaacttcagacacatgatgagtcttcactacctctgcctcagccatcacctttcatgccaaggcgacatattcatggagaaagctctagcaaaaagctacaaagatctcagcgaatcagtgatagtgacatctcagattatgaggttgatgatggtattggcgtagttcctccagtaggctataggtctagtgctagagaaagtaaatctacaacattaactgtgccagaacagcaaagaacaactcatcaccgctcacgttcagtatctcctcatcgcggcaatgatcagggaaagccgcgttcacgtttaccaaatgtgccattacagaggagtttagatgaaattcatccaacaagaaggtcacgttctccaaccagacaccatgatgcctcccgaagtccagttgatcatagaaccagagatgtggatagtcagtatttatcagaacaagacagtgagcttcttatgctgcccagagcaaaacgaggacgaagtgcagaatgcctacatactaccagtgaactgcagccctttcttgacagggctaggagtgctagtaccaactgcttgagaccagatactagtttgcattcaccagaacgagaaagaatgcaccgacagagaagtccaacacaatctcctccagcagacacatcgttcagcagtcgcaggggaagacagctcccacaagtgccagtgagaagcggcagtatagaacaagagtcgggccacaaaaagttaaaaagtaccatccagagaagcacagaaacaggcatggcagctgaaatgagaaagatggtaaggcagccgagccgagagtctactgatggcagcatcaacagttacagctctgagggcaatttaatatttcctggagtgcgactgggagctgacagtcaattcagtgattttcttgatggattgggaccagcccagcttgttggccgccaaacccttgccacccctgcaatgggtgatatacaaataggaatggaggacaaaaagggccaattagaagtggaagtcattagagcacgaagcctcacacaaaagcctggttccaaatctacacctgctccatatgtcaaagtatatcttttggaaaatggggcctgtatagccaagaagaagacaagaattgcacgaaaaacccttgatcctttgtatcagcagtctctggtttttgatgaaagtccacagggtaaagttcttcaggtgattgtctggggagactatggcagaatggaccacaaatgctttatgggtgtggctcagatcttgttggaagaactcgacctgtccagcatggtgatcggatggtacaaattgttcccaccgtcctcactggtggatcccacactcactcccctcacccggcgggcttcccagtcatctctggaaagttcaactgggcctccctgtattcgatcatagtgaactcataccagagtcattccaataaaactctacttttcaggataataatctgaaccagatatttcatgatcgaaagcattgttggagacagacaatcaacttgtgttttgcctgtagtagtttttcaataatatgtcccaattgttatttaaaacatggcttcatatgacagaacaaggcaatctatcaaatttacaggaagaatcaacatgctggtgagagtcactgatgcttctaacaaatagaaaaagaggaaactttaaatccacgcatacacgtacacacacacatgcacacacacacacaccaaattgaacaaactggaaactctcactctgtgaaaagttgtattctacacatttctgcacagaccacaagcagtgttatttccctgatgtttgagttgtttt

SEQ ID NO: 66289 - DNA, 2454 bp, Artificial Sequence
  derived and/or modified sequence
atgtgcgcccccggcatccacgtgagcagcgagggctgggaggaggtgagaagcgtggacagcgaggagggcaccatcgaggccagaagagccgtggccggcgacctggactactactggctggaccccgccacctggcacagcagagagaccagccccatcagcagccaccccgtgacctggcagcccagcaaggagggcgacagactgatcggcagagtgatcctgaacaagagaaccaccatgcccaaggacagcggcgccctgctgggcctgaaggtggtgggcggcaagatgaccgacctgggcagactgggcgccttcatcaccaaggtgaagaagggcagcctggccgacgtggtgggccacctgagagccggcgacgaggtgctggagtggaacggcaagcccctgcccggcgccaccaacgaggaggtgtacaacatcatcctggagagcaagagcgagccccaggtggagatcatcgtgagcagacccatcggcgacatccccagaatccccgagagcagccacccccccctggagagcagcagcagcagcttcgagagccagaagatggagagacccagcatcagcgtgatcagccccaccagccccggcgccctgaaggacgccccccaggtgctgcccggccagctgagcgtgaagctgtggtacgacaaggtgggccaccagctgatcgtgaacgtgctgcaggccaccgacctgcccgccagagtggacggcagacccagaaacccctacgtgaagatgtacttcctgcccgacagaagcgacaagagcaagagaagaaccaagaccgtgaagaagatcctggagcccaagtggaaccagaccttcgtgtacagccacgtgcacagaagagacttcagagagagaatgctggagatcaccgtgtgggaccagcccagagtgcaggaggaggagagcgagttcctgggcgagatcctgatcgagctggagaccgccctgctggacgacgagccccactggtacaagctgcagacccacgacgagagcagcctgcccctgccccagcccagccccttcatgcccagaagacacatccacggcgagagcagcagcaagaagctgcagagaagccagagaatcagcgacagcgacatcagcgactacgaggtggacgacggcatcggcgtggtgccccccgtgggctacagaagcagcgccagagagagcaagagcaccaccctgaccgtgcccgagcagcagagaaccacccaccacagaagcagaagcgtgagcccccacagaggcaacgaccagggcaagcccagaagcagactgcccaacgtgcccctgcagagaagcctggacgagatccaccccaccagaagaagcagaagccccaccagacaccacgacgccagcagaagccccgtggaccacagaaccagagacgtggacagccagtacctgagcgagcaggacagcgagctgctgatgctgcccagagccaagagaggcagaagcgccgagtgcctgcacaccaccagcgagctgcagcccttcctggacagagccagaagcgccagcaccaactgcctgagacccgacaccagcctgcacagccccgagagagagagaatgcacagacagagaagccccacccagagcccccccgccgacaccagcttcagcagcagaagaggcagacagctgccccaggtgcccgtgagaagcggcagcatcgagcaggagagcggccacaagaagctgaagagcaccatccagagaagcaccgagaccggcatggccgccgagatgagaaagatggtgagacagcccagcagagagagcaccgacggcagcatcaacagctacagcagcgagggcaacctgatcttccccggcgtgagactgggcgccgacagccagttcagcgacttcctggacggcctgggccccgcccagctggtgggcagacagaccctggccacccccgccatgggcgacatccagatcggcatggaggacaagaagggccagctggaggtggaggtgatcagagccagaagcctgacccagaagcccggcagcaagagcacccccgccccctacgtgaaggtgtacctgctggagaacggcgcctgcatcgccaagaagaagaccagaatcgccagaaagaccctggaccccctgtaccagcagagcctggtgttcgacgagagcccccagggcaaggtgctgcaggtgatcgtgtggggcgactacggcagaatggaccacaagtgcttcatgggcgtggcccagatcctgctggaggagctggacctgagcagcatggtgatcggctggtacaagctgttcccccccagcagcctggtggaccccaccctgacccccctgaccagaagagccagccagagcagcctggagagcagcaccggccccccctgcatcagaagctag

SEQ ID NO: 66290 - protein, 760 aa, Artificial Sequence
  derived and/or modified sequence
MPKDSGALLGLKVVGGKMTDLGRLGAFITKVKKGSLADVVGHLRAGDEVLEWNGKPLPGATNEEVYNIILESKSEPQVEIIVSRPIGDIPRIPESSHPPLESSSSSFESQKMERPSISVISPTSPGALKDAPQVLPGQLSVKLWYDKVGHQLIVNVLQATDLPARVDGRPRNPYVKMYFLPDRSDKSKRRTKTVKKILEPKWNQTFVYSHVHRRDFRERMLEITVWDQPRVQEEESEFLGEILIELETALLDDEPHWYKLQTHDESSLPLPQPSPFMPRRHIHGESSSKKLQRSQRISDSDISDYEVDDGIGVVPPVGYRSSARESKSTTLTVPEQQRTTHHRSRSVSPHRGNDQGKPRSRLPNVPLQRSLDEIHPTRRSRSPTRHHDASRSPVDHRTRDVDSQYLSEQDSELLMLPRAKRGRSAECLHTTSELQPFLDRARSASTNCLRPDTSLHSPERERHSRKSERSSIQKQTRKGTASDAERMHRQRSPTQSPPADTSFSSRRGRQLPQVPVRSGSIEQESGHKKLKSTIQRSTETGMAAEMRKMVRQPSRESTDGSINSYSSEGNLIFPGVRLGADSQFSDFLDGLGPAQLVGRQTLATPAMGDIQIGMEDKKGQLEVEVIRARSLTQKPGSKSTPAPYVKVYLLENGACIAKKKTRIARKTLDPLYQQSLVFDESPQGKVLQVIVWGDYGRMDHKCFMGVAQILLEELDLSSMVIGWYKLFPPSSLVDPTLTPLTRRASQSSLESSTGPPCIRS

SEQ ID NO: 66291 - protein, 826 aa, Artificial Sequence
  derived and/or modified sequence
MFAGFLQFLLLHTLHSGTGDLDYYWLDPATWHSRETSPISSHPVTWQPSKEGDRLIGRVILNKRTTMPKDSGALLGLKVVGGKMTDLGRLGAFITKVKKGSLADVVGHLRAGDEVLEWNGKPLPGATNEEVYNIILESKSEPQVEIIVSRPIGDIPRIPESSHPPLESSSSSFESQKMERPSISVISPTSPGALKDAPQVLPGQLSVKLWYDKVGHQLIVNVLQATDLPARVDGRPRNPYVKMYFLPDRSDKSKRRTKTVKKILEPKWNQTFVYSHVHRRDFRERMLEITVWDQPRVQEEESEFLGEILIELETALLDDEPHWYKLQTHDESSLPLPQPSPFMPRRHIHGESSSKKLQRSQRISDSDISDYEVDDGIGVVPPVGYRSSARESKSTTLTVPEQQRTTHHRSRSVSPHRGNDQGKPRSRLPNVPLQRSLDEIHPTRRSRSPTRHHDASRSPVDHRTRDVDSQYLSEQDSELLMLPRAKRGRSAECLHTTSELQPFLDRARSASTNCLRPDTSLHSPERERHSRKSERSSIQKQTRKGTASDAERMHRQRSPTQSPPADTSFSSRRGRQLPQVPVRSGSIEQESGHKKLKSTIQRSTETGMAAEMRKMVRQPSRESTDGSINSYSSEGNLIFPGVRLGADSQFSDFLDGLGPAQLVGRQTLATPAMGDIQIGMEDKKGQLEVEVIRARSLTQKPGSKSTPAPYVKVYLLENGACIAKKKTRIARKTLDPLYQQSLVFDESPQGKVLQVIVWGDYGRMDHKCFMGVAQILLEELDLSSMVIGWYKLFPPSSLVDPTLTPLTRRASQSSLESSTGPPCIRS

SEQ ID NO: 66292 - DNA, 2481 bp, Artificial Sequence
  derived and/or modified sequence
atgttcgccggattcttgcagtttctgctgctccacacactacattcaggtactggcgatctcgactactattggcttgaccccgcaacttggcattccagggaaacgtctcctatctcatcgcaccctgtcacatggcaaccgtcaaaagagggtgacaggctgatcggtcgcgtgatcctcaataaaaggaccactatgcccaaagactctggagccttgcttggcttgaaggtagtgggaggaaaaatgaccgacttggggcgtctgggcgcgttcattactaaagtgaaaaagggaagtctagctgacgtggtgggccatctgagagctggtgacgaggtccttgagtggaacggcaaacctctccccggagctacaaacgaggaggtgtataacatcattctggagtcaaaatctgaacctcaggtggaaattatcgtgtcaagacccattggcgatattccgcggataccagagagctcccatccaccattggaatcatcctcatcatccttcgaaagccaaaaaatggaaagaccgtctatcagcgtgattagccccacctcccccggtgccctgaaggacgccccccaagtgctccccgggcagctgtccgtaaagttgtggtatgataaggttggtcaccagctgattgtgaatgtgcttcaggcaaccgatctccccgctcgggtcgacggaagaccaaggaatccctatgtgaaaatgtacttcttaccagaccggtccgataagtccaagcggagaaccaaaaccgtgaagaagattctggagcctaagtggaatcaaacattcgtctactcccacgtgcaccggagggactttcgcgagcgaatgcttgaaattacggtgtgggaccagcccagggtccaggaagaggagagcgaattcttgggggagatcttaattgagttagagactgcccttttggacgatgagccacactggtataaactgcagacccacgatgaatcaagcctccctcttccccagccgagtccttttatgccacgccggcatattcatggggagtcttccagcaaaaaactgcagcgctcccagcgtatttctgatagcgacatttcagattacgaagtggacgacgggataggcgttgttccccccgtggggtatagatcctcggctcgtgaatctaagagcacaactctgaccgtgcctgaacaacagcgcactacgcatcaccgctctaggtcggtctctccccatcgtggcaacgaccagggcaaaccacgctcgagattgcccaatgttccattgcaacgttctcttgacgaaattcatccgacacgtcgcagccggtcacctacacgccaccatgatgccagccggtctccagtggaccacaggactagagatgtcgacagccagtacctctccgagcaggattccgagctgcttatgttgcctagagctaagagaggcaggagtgccgaatgtttgcataccacctccgaactgcagcctttcctcgatagagcaaggagcgcttcgaccaattgtcttcgtccggacactagcctgcattcacctgagcgagaacggcactcccggaagagcgagaggagctctattcagaaacagaccagaaaaggcaccgcgagcgacgcagaacgcatgcaccgccaacgaagccctacgcaaagtccacctgccgatacgagtttcagcagtagaaggggccgtcagctgcctcaggtgccggtcaggtccggaagtatcgaacaagagagcggtcataaaaagctgaagtctacaatacagcgcagcacagagaccggaatggccgcagaaatgcggaaaatggtgcgccagccttcccgcgagtccaccgacggttcaataaactcctacagcagcgagggcaatcttatttttcctggggtgcgtctcggagcggactcccagttttccgactttctcgatgggctcggtcccgctcaactcgtaggacgccagactctggcgaccccggcaatgggggacatacagatcggcatggaagataaaaagggacagcttgaagtcgaggttatcagagcacgaagccttacgcagaaaccaggcagcaagagtaccccagcaccttacgttaaagtttatctcctggaaaatggagcttgtatagccaaaaagaagacccgcattgcgcggaagactctcgaccctctgtatcagcagagtctcgtgtttgatgagagtcctcagggtaaggtgctgcaagttatcgtgtggggagattatggcagaatggaccataagtgtttcatgggcgtcgcacagatccttctcgaggaactggatctgagctctatggtcattggctggtataaattgttccctccctcatcactggtcgacccgaccctgaccccactgacccgccgcgcttcacagagcagcttggaatcgagcaccgggcctccctgtattcggtcgtag

SEQ ID NO: 66293 - DNA, 2481 bp, Artificial Sequence
  derived and/or modified sequence
atgtttgctggcttcctgcagttcctgctgctgcacaccctgcacagcggcaccggggacctggactactactggctggaccctgccacctggcacagccgggagaccagccccatcagcagccaccctgtgacctggcagcccagcaaggagggggacaggctcatcggccgggtcatcctgaacaagaggaccaccatgcccaaggacagcggggccctgctgggcctgaaggtggtgggcggcaagatgacagacctgggccgcctgggcgccttcatcaccaaggtgaagaagggcagcctggctgatgtggtgggccacctgcgggctggagatgaggtgctggagtggaatggcaagcccctgcccggggccaccaatgaggaggtgtacaacatcatcctggagagcaagtctgagccccaggtggagatcatcgtgtcccggcccatcggggacatcccccgcatccctgagagcagccacccccccctggagagcagcagcagcagctttgagagccagaagatggagcggcccagcatcagcgtcatcagccccaccagccctggggccctgaaggatgccccccaggtgctgcccggccagctgtctgtgaagctgtggtatgacaaggtgggccaccagctgattgtgaatgtgctgcaggccacagacctgcctgcccgggtggatggccggcccaggaacccctacgtgaagatgtacttcctgcctgacagaagtgacaagagcaagaggaggaccaagacagtgaagaagatcctggagcccaagtggaaccagacctttgtgtacagccacgtgcacagaagagacttccgggagaggatgctggagatcaccgtgtgggaccagccccgggtgcaggaggaggagagcgagttcctgggggagatcctgattgagctggagacagccctgctggatgatgagccccactggtacaagctgcagacccatgatgagagcagcctgcccctgccccagcccagccccttcatgcccaggaggcacatccatggagagagcagcagcaagaagctgcagaggagccagaggatcagtgacagcgacatcagtgactatgaggtggatgatggcattggagtggtgccccctgtgggctaccgcagcagcgcccgggagagcaagagcaccaccctgactgtgcctgagcagcagaggaccacccaccacaggagccgctctgtgagcccccacagaggaaatgaccagggcaagcccaggagccggctgcccaacgtgcccctgcagaggagcctggatgagatccaccccacccggcgcagccgcagccccaccaggcaccatgatgccagccgcagccctgtggaccacaggaccagagatgtggacagccagtacctgtctgagcaggacagcgagctgctgatgctgccccgggccaagaggggccgctctgctgagtgcctgcacaccaccagcgagctgcagcccttcctggaccgggcccggagcgccagcaccaactgcctgcggccagacaccagcctgcacagccctgagcgggagcggcacagcaggaagtctgagaggagcagcatccagaagcagaccaggaagggcacagccagtgatgctgagaggatgcaccggcagaggagccccacccagagccccccagctgacaccagcttcagcagccggcggggccggcagctgccccaggtgcctgtgcgcagcggcagcattgagcaggagagcggccacaagaagctgaagagcaccatccagaggagcacagagaccggcatggctgctgagatgaggaagatggtgcggcagcccagccgggagagcacagatggcagcatcaacagctacagcagcgagggcaacctgatcttccctggggtgcggctgggcgctgacagccagttcagtgacttcctggatggcctgggccctgcccagctggtgggccggcagaccctggccaccccagccatgggagacatccagatcggcatggaggacaagaagggccagctggaggtggaggtgatccgggcccggagcctgacccagaagccaggcagcaagagcaccccagccccctacgtgaaggtgtacctgctggagaatggagcctgcatcgccaagaagaagaccagaattgccaggaagaccctggaccccctgtaccagcagagcctggtgtttgatgagagcccccagggcaaggtgctgcaggtgattgtgtggggagactatggccgcatggaccacaagtgcttcatgggcgtggcccagatcctgctggaggagctggacctgagctccatggtgattggctggtacaagctgttcccccccagcagcctggtggaccccaccctgacccccctgacccggcgggccagccagagcagcctggagagcagcactggaccaccctgcatccgctcctag

SEQ ID NO: 66294 - DNA, 2481 bp, Artificial Sequence
  derived and/or modified sequence
atgttcgccggcttcctgcagttcctgctgctgcacaccctgcactcagggactggcgacctcgactactattggcttgacccggctacgtggcattctcgggaaacctccccaatatcttctcaccctgttacctggcaacccagcaaggaaggagaccgactgattgggagagtcattcttaacaaaaggacgactatgcccaaagatagcggagccctgctgggtctgaaagtcgtgggcgggaaaatgaccgacctggggcggctgggcgcatttatcaccaaagtgaagaagggcagcttggcagacgtggtcgggcacctcagagctggggacgaggtcctagaatggaatggcaagccactgccaggagcgactaatgaagaggtgtataacataattctggagtccaagagcgaaccccaggttgaaattattgtttcgcgccccattggagacattcctagaatccccgagagcagccacccacccctggagtcaagctcatctagttttgagtctcaaaagatggaacggccttccatttccgtgatctccccaacctcaccaggggcccttaaagacgctccacaagtgttgcccggtcaactgtcggtcaagttatggtacgataaagtggggcatcagctaatcgttaacgttctgcaggccactgatctaccagctcgggttgacggccggccaaggaatccttatgtgaaaatgtactttctgcccgaccggtcagacaagagcaagcgaagaactaagactgtgaagaagattctggaacctaagtggaaccagacgttcgtttacagtcatgttcaccgcagggactttcgcgagcgaatgctcgaaattacagtgtgggaccaacctcgagttcaggaggaggagtccgaattcctgggggagattctcatcgaactagagacagcacttctggacgacgagccacactggtacaagctgcaaacccatgacgagagcagcctgccactgcctcagccgtcaccattcatgcctaggagacacatccatggggaaagctcctcaaaaaagctccaaaggtcccagcgcattagcgacagcgacatttcagattacgaagtggacgacggcatcggggtggtcccgccggtcgggtatcgatcctctgcacgagaaagcaaatctacaacactcacggtgcccgagcagcagagaactactcaccaccgatccaggagtgtgtccccgcaccgcggtaacgatcaggggaaaccacgtagtaggctgcccaatgttccactgcagcgcagcttggacgagatccacccaacccggagatcaaggagccctactaggcatcacgacgccagcagatcccccgtggatcaccgcaccagagatgtggactcgcaatacctgtctgagcaggattccgagctgctaatgcttccgcgggccaaaaggggccggtccgccgagtgcttgcataccaccagtgagcttcagccatttctggatagagcaaggtccgcctccacgaactgcttgagacccgacaccagcttacactcgcctgaaagggagagacactcaaggaagtcggagagatcttctattcagaagcagacccggaaaggtacagcttcagatgccgagaggatgcataggcagcggtcgccaacacagtcgcctccagccgacacaagcttcagctcaaggcgggggaggcagctgccccaggtgcctgttcgatctggctcaattgagcaggagtccggtcacaaaaaactgaaaagcaccatccagcgctctaccgagacgggcatggccgccgaaatgcgcaaaatggttcgacagccttcccgagaatccactgatggatcaattaattcttactcaagcgaaggcaacctcatcttcccaggggtgaggctgggcgccgattcccagtttagcgatttcctcgatggcctaggccccgctcagctggtgggccgccagaccctagctaccccagcaatgggcgacattcagattggcatggaagataagaagggccagttagaagttgaggtcatccgtgccagaagcctcacacagaaacccggcagtaagtccactcccgcgccgtatgtgaaagtgtaccttctagaaaacggtgcatgtatagctaagaaaaaaaccaggatagcgcgcaaaactttggatcctctgtaccagcaaagcctggttttcgatgagtccccacagggcaaggtgctacaggtgattgtttggggagactacggcagaatggatcataagtgcttcatgggagtcgcgcagatcttacttgaggagctcgatctcagctcaatggtgataggatggtataaacttttccccccgagcagtctggtcgaccctacactgacgccacttacccggcgcgcatcccaaagcagcctcgagtcatccaccggtccgccatgtatccggagctag

SEQ ID NO: 66295 - DNA, 2481 bp, Artificial Sequence
  derived and/or modified sequence
atgttcgccggtttccttcagttcctgctgctacacactctgcattccggtaccggagatctcgactattattggttggaccctgctacgtggcattccagggagacttcacccatatcaagccaccccgtcacctggcagcccagcaaggagggagaccgccttattggaagggtcattttgaataagagaaccaccatgccgaaggactctggtgccctgctgggtttgaaagtggtaggtggtaaaatgacggacctcggtcgactcggagcgttcattacaaaggtaaaaaagggctcactggcagatgtggtgggtcatcttcgagctggggacgaggtccttgaatggaatggaaagcctttgcccggtgctaccaatgaggaggtatacaatatcatcttggaatcaaagagtgaacctcaagtggaaattattgtctctcgacccatcggcgacattcctagaatccctgaatcatctcatccccctctcgagtccagctctagctcgttcgagagccagaaaatggagcgcccttctattagcgtgatcagtcctacttcaccaggcgcacttaaagatgcgccacaggtattacccggtcagctcagcgtgaaactgtggtacgataaagttggtcaccaactgatcgtgaatgtgctccaggccacagatttacctgccagggttgacggcagaccccgaaacccctacgtgaaaatgtatttcctgcctgacaggtcagacaagtctaagcggagaaccaagacggtcaaaaagattctggagccaaagtggaatcagacatttgtctattcccatgttcacaggcgggattttcgggagaggatgttagagattactgtctgggatcagccccgtgttcaagaagaagagtcagaattcttgggcgagattctgattgaactggaaacagcactcctagatgatgaaccgcattggtataagctccagacccacgacgaatctagcttgcccctgccgcagccttctccatttatgccgcgacgccacattcacggtgagagtagctcgaaaaagctgcagaggtcccagaggatcagtgactcagatatctccgactatgaagtggatgacggaattggtgtggttccccctgtgggatatcgctcctctgccagggagagtaagtccacgactctgaccgtcccagagcagcaaaggacaactcaccaccgctcaaggtccgtgtccccccatcgcggaaatgaccaagggaagcctagaagtcggctgcctaacgtgcccctgcagagatccctagacgagatccacccgactcgaagaagccgatctcccacacgtcatcatgacgccagcaggtcccctgttgaccatcggacacgcgatgtggactcccagtatctcagtgaacaggacagtgagttgctcatgcttcctcgcgcaaagcgcggacgctccgccgaatgccttcatactaccagtgagttgcagccatttcttgaccgcgctaggagtgcctcaacaaactgcctccgcccagatacctccctccattcaccagaaagagagcgccactcacgcaaatcggagagaagttcaattcaaaagcagacacgcaaagggacagcttctgacgccgagcggatgcacaggcaacgctctccaacccagtccccacccgctgatacatccttctccagtcggcgaggacgccagctacctcaagtgcccgtcaggagtggatccattgaacaggagtcaggacataaaaagctaaaatcaaccattcagcgaagtactgagaccggaatggcagccgagatgcgaaagatggtgcgccagccaagcagagagtccacagacggttctatcaattcatactctagcgagggaaacttaatatttcctggagtccgcttgggagctgatagtcaattcagcgattttcttgacggccttggccctgctcagctggtgggtcggcaaacactggctacccctgccatgggcgacatccaaattgggatggaagacaagaagggtcagctggaggtggaagtcattagggcaagatctcttactcagaaaccgggttcaaaatcaactcccgcaccgtacgtaaaagtttacttgctggagaatggggcatgtattgcaaagaaaaagacgagaattgccagaaagaccttggatcccctataccagcagtcactggttttcgacgagagtccccaggggaaagttctgcaagtcatcgtctggggcgactacggccgaatggatcataagtgcttcatgggggtcgcccagatcctcttggaggaactcgatctgagctccatggttatcgggtggtacaagctgtttccccctagcagtctggtggaccccactctgacaccgctcacccggcgagcatcacagtccagcctcgaatcgtcaactggccctccctgcattcgctcatag

SEQ ID NO: 66296 - DNA, 2799 bp, Artificial Sequence
  derived and/or modified sequence
agaaaagcctgaagaagcacttttgcctgtgttcccaacaatcaattgtgtatactcttggtttatgctttctggtgccagttgtcattgagctgagtaagattcctcagttagggaaactgcagaggaaatgatctgttacacagggcttggcaggaccattgccagtgattgataatgggaccaaatcatttcaggtgatttggattattactggttggatcctgccacgtggcacagccgggagacatcacctattagttcgcatcctgtaacgtggcaaccatctaaagagggggaccgattaattggacgtgttattcttaacaagagaacaaccatgcccaaagactcaggtgcattgctgggtctgaaagttgttggaggaaaaatgactgacttaggacgacttggtgctttcatcaccaaagtaaagaagggtagcctagcagatgtagttggacacctaagagcaggggatgaagttctagaatggaatggtaaacccctgccgggagctacaaatgaagaagtttacaacattattttagaatcaaaatcagaacctcaagttgaaattattgtttcaaggcctattggtgacattccccggattcctgagagctcccaccctccactggagtccagttcaagttcctttgaatctcagaagatggaaaggccttccatttctgttatttctccaacaagtcctggagctctaaaagatgccccacaagtcttaccagggcaactttctgtgaagttgtggtatgataaagtgggacaccagctgattgtaaatgttctgcaagcaacagatctacctgctagagtagatggacgtcctcgaaatccctatgtaaaaatgtattttcttccagatagaagtgataaaagtaaaaggaggaccaaaacagtaaagaaaatactagaaccaaaatggaatcaaacttttgtctattcacatgtacatcgtagagattttagagaacgaatgttagaaataactgtgtgggaccaaccaagagtgcaagaagaagaaagtgaatttcttggagagatcctcatagaattggagacagcgcttttagatgatgaaccgcattggtataaacttcagacacatgatgagtcttcactacctctgcctcagccatcacctttcatgccaaggcgacatattcatggagaaagctctagcaaaaagctacaaagatctcagcgaatcagtgatagtgacatctcagattatgaggttgatgatggtattggcgtagttcctccagtaggctataggtctagtgctagagaaagtaaatctacaacattaactgtgccagaacagcaaagaacaactcatcaccgctcacgttcagtatctcctcatcgcggcaatgatcagggaaagccgcgttcacgtttaccaaatgtgccattacagaggagtttagatgaaattcatccaacaagaaggtcacgttctccaaccagacaccatgatgcctcccgaagtccagttgatcatagaaccagagatgtggatagtcagtatttatcagaacaagacagtgagcttcttatgctgcccagagcaaaacgaggacgaagtgcagaatgcctacatactaccagtgaactgcagccctttcttgacagggctaggagtgctagtaccaactgcttgagaccagatactagtttgcattcaccagaacgagaaaggcactccagaaagtctgaaagatctagcatccaaaaacagactaggaaaggcactgcctctgatgcagaaagaatgcaccgacagagaagtccaacacaatctcctccagcagacacatcgttcagcagtcgcaggggaagacagctcccacaagtgccagtgagaagcggcagtatagaacaagagtcgggccacaaaaagttaaaaagtaccatccagagaagcacagaaacaggcatggcagctgaaatgagaaagatggtaaggcagccgagccgagagtctactgatggcagcatcaacagttacagctctgagggcaatttaatatttcctggagtgcgactgggagctgacagtcaattcagtgattttcttgatggattgggaccagcccagcttgttggccgccaaacccttgccacccctgcaatgggtgatatacaaataggaatggaggacaaaaagggccaattagaagtggaagtcattagagcacgaagcctcacacaaaagcctggttccaaatctacacctgctccatatgtcaaagtatatcttttggaaaatggggcctgtatagccaagaagaagacaagaattgcacgaaaaacccttgatcctttgtatcagcagtctctggtttttgatgaaagtccacagggtaaagttcttcaggtgattgtctggggagactatggcagaatggaccacaaatgctttatgggtgtggctcagatcttgttggaagaactcgacctgtccagcatggtgatcggatggtacaaattgttcccaccgtcctcactggtggatcccacactcactcccctcacccggcgggcttcccagtcatctctggaaagttcaactgggcctccctgtattcgatcatagtgaactcataccagagtcattccaataaaactctacttttcaggataataatctgaaccagatatttcatgatcgaaagcattgttggagacagacaatcaacttgtgttttgcctgtagtagtttttcaataatatgtcccaattgttatttaaaacatggcttcatatgacaga

SEQ ID NO: 66297 - DNA, 3065 bp, Artificial Sequence
  derived and/or modified sequence
gtgttagctttaaggaccacaacgtttcatctctctggcttcaggaaggtagcagcttctgtgcattgttttaggaaatggttaattgaggagctaaaagagctttagtgtatgctacactgggagccactttagtacagcacagagcactatagattaatgctgtaatcaatgagaatctgttcactgcagagatctgttttgatgacagcagcacttatggccttgtttagtgtcactgttgtataatgttggacactgcaggcttttttggctttgatttagaatgcaaggaccacagggaattttatttaaaatgttgtattttggtggattttttaattgtgttgtgcatttgctgccattgctagctgaaatttaatgatttgatgccagtggcatttagttaaccactccgatgctgctgttatgtttgctgggtttctgcagtttctactacttcatacattgcactcaggaacaggtgatttggattattactggttggatcctgccacgtggcacagccgggagacatcacctattagttcgcatcctgtaacgtggcaaccatctaaagagggggaccgattaattggacgtgttattcttaacaagagaacaaccatgcccaaagactcaggtgcattgctgggtctgaaagttgttggaggaaaaatgactgacttaggacgacttggtgctttcatcaccaaagtaaagaagggtagcctagcagatgtagttggacacctaagagcaggggatgaagttctagaatggaatggtaaacccctgccgggagctacaaatgaagaagtttacaacattattttagaatcaaaatcagaacctcaagttgaaattattgtttcaaggcctattggtgacattccccggattcctgagagctcccaccctccactggagtccagttcaagttcctttgaatctcagaagatggaaaggccttccatttctgttatttctccaacaagtcctggagctctaaaagatgccccacaagtcttaccagggcaactttctgtgaagttgtggtatgataaagtgggacaccagctgattgtaaatgttctgcaagcaacagatctacctgctagagtagatggacgtcctcgaaatccctatgtaaaaatgtattttcttccagatagaagtgataaaagtaaaaggaggaccaaaacagtaaagaaaatactagaaccaaaatggaatcaaacttttgtctattcacatgtacatcgtagagattttagagaacgaatgttagaaataactgtgtgggaccaaccaagagtgcaagaagaagaaagtgaatttcttggagagatcctcatagaattggagacagcgcttttagatgatgaaccgcattggtataaacttcagacacatgatgagtcttcactacctctgcctcagccatcacctttcatgccaaggcgacatattcatggagaaagctctagcaaaaagctacaaagatctcagcgaatcagtgatagtgacatctcagattatgaggttgatgatggtattggcgtagttcctccagtaggctataggtctagtgctagagaaagtaaatctacaacattaactgtgccagaacagcaaagaacaactcatcaccgctcacgttcagtatctcctcatcgcggcaatgatcagggaaagccgcgttcacgtttaccaaatgtgccattacagaggagtttagatgaaattcatccaacaagaaggtcacgttctccaaccagacaccatgatgcctcccgaagtccagttgatcatagaaccagagatgtggatagtcagtatttatcagaacaagacagtgagcttcttatgctgcccagagcaaaacgaggacgaagtgcagaatgcctacatactaccagtgaactgcagccctttcttgacagggctaggagtgctagtaccaactgcttgagaccagatactagtttgcattcaccagaacgagaaaggcactccagaaagtctgaaagatctagcatccaaaaacagactaggaaaggcactgcctctgatgcagaaagaatgcaccgacagagaagtccaacacaatctcctccagcagacacatcgttcagcagtcgcaggggaagacagctcccacaagtgccagtgagaagcggcagtatagaacaagagtcgggccacaaaaagttaaaaagtaccatccagagaagcacagaaacaggcatggcagctgaaatgagaaagatggtaaggcagccgagccgagagtctactgatggcagcatcaacagttacagctctgagggcaatttaatatttcctggagtgcgactgggagctgacagtcaattcagtgattttcttgatggattgggaccagcccagcttgttggccgccaaacccttgccacccctgcaatgggtgatatacaaataggaatggaggacaaaaagggccaattagaagtggaagtcattagagcacgaagcctcacacaaaagcctggttccaaatctacacctgctccatatgtcaaagtatatcttttggaaaatggggcctgtatagccaagaagaagacaagaattgcacgaaaaacccttgatcctttgtatcagcagtctctggtttttgatgaaagtccacagggtaaagttcttcaggtgattgtctggggagactatggcagaatggaccacaaatgctttatgggtgtggctcagatcttgttggaagaactcgacctgtccagcatggtgatcggatggtacaaattgttcccaccgtcctcactggtggatcccacactcactcccctcacccggcgggcttcccagtcatctctggaaagttcaactgggcctccctgtattcgatcatagtgaactcataccagagtcattccaataaaactctacttttcaggataataatctgaaccagatatttcatgatcgaaagcattgttggagacagacaatcaacttgtgttttgcctgtagtagtttttcaataatatgtcccaattgttatttaa

SEQ ID NO: 66298 - DNA, 2481 bp, Artificial Sequence
  derived and/or modified sequence
atgttcgccggcttcctgcagttcctgctgctgcacaccctgcacagcggcaccggcgacctggactactactggctggaccccgccacctggcacagcagagagaccagccccatcagcagccaccccgtgacctggcagcccagcaaggagggcgacagactgatcggcagagtgatcctgaacaagagaaccaccatgcccaaggacagcggcgccctgctgggcctgaaggtggtgggcggcaagatgaccgacctgggcagactgggcgccttcatcaccaaggtgaagaagggcagcctggccgacgtggtgggccacctgagagccggcgacgaggtgctggagtggaacggcaagcccctgcccggcgccaccaacgaggaggtgtacaacatcatcctggagagcaagagcgagccccaggtggagatcatcgtgagcagacccatcggcgacatccccagaatccccgagagcagccacccccccctggagagcagcagcagcagcttcgagagccagaagatggagagacccagcatcagcgtgatcagccccaccagccccggcgccctgaaggacgccccccaggtgctgcccggccagctgagcgtgaagctgtggtacgacaaggtgggccaccagctgatcgtgaacgtgctgcaggccaccgacctgcccgccagagtggacggcagacccagaaacccctacgtgaagatgtacttcctgcccgacagaagcgacaagagcaagagaagaaccaagaccgtgaagaagatcctggagcccaagtggaaccagaccttcgtgtacagccacgtgcacagaagagacttcagagagagaatgctggagatcaccgtgtgggaccagcccagagtgcaggaggaggagagcgagttcctgggcgagatcctgatcgagctggagaccgccctgctggacgacgagccccactggtacaagctgcagacccacgacgagagcagcctgcccctgccccagcccagccccttcatgcccagaagacacatccacggcgagagcagcagcaagaagctgcagagaagccagagaatcagcgacagcgacatcagcgactacgaggtggacgacggcatcggcgtggtgccccccgtgggctacagaagcagcgccagagagagcaagagcaccaccctgaccgtgcccgagcagcagagaaccacccaccacagaagcagaagcgtgagcccccacagaggcaacgaccagggcaagcccagaagcagactgcccaacgtgcccctgcagagaagcctggacgagatccaccccaccagaagaagcagaagccccaccagacaccacgacgccagcagaagccccgtggaccacagaaccagagacgtggacagccagtacctgagcgagcaggacagcgagctgctgatgctgcccagagccaagagaggcagaagcgccgagtgcctgcacaccaccagcgagctgcagcccttcctggacagagccagaagcgccagcaccaactgcctgagacccgacaccagcctgcacagccccgagagagagagacacagcagaaagagcgagagaagcagcatccagaagcagaccagaaagggcaccgccagcgacgccgagagaatgcacagacagagaagccccacccagagcccccccgccgacaccagcttcagcagcagaagaggcagacagctgccccaggtgcccgtgagaagcggcagcatcgagcaggagagcggccacaagaagctgaagagcaccatccagagaagcaccgagaccggcatggccgccgagatgagaaagatggtgagacagcccagcagagagagcaccgacggcagcatcaacagctacagcagcgagggcaacctgatcttccccggcgtgagactgggcgccgacagccagttcagcgacttcctggacggcctgggccccgcccagctggtgggcagacagaccctggccacccccgccatgggcgacatccagatcggcatggaggacaagaagggccagctggaggtggaggtgatcagagccagaagcctgacccagaagcccggcagcaagagcacccccgccccctacgtgaaggtgtacctgctggagaacggcgcctgcatcgccaagaagaagaccagaatcgccagaaagaccctggaccccctgtaccagcagagcctggtgttcgacgagagcccccagggcaaggtgctgcaggtgatcgtgtggggcgactacggcagaatggaccacaagtgcttcatgggcgtggcccagatcctgctggaggagctggacctgagcagcatggtgatcggctggtacaagctgttcccccccagcagcctggtggaccccaccctgacccccctgaccagaagagccagccagagcagcctggagagcagcaccggccccccctgcatcagaagctag

SEQ ID NO: 66299 - DNA, 660 bp, Artificial Sequence
  derived and/or modified sequence
atggccgctgaaatgagaaaaatggtgcgacagccatcccgcgaatctaccgacgggtctattaattcttattcctccgaaggcaacctgatctttccaggggttcgtcttggagcagatagccagttctctgactttctcgacggccttggccctgcacagctagttgggagacaaactctggcaacaccagctatgggtgacattcagatcggcatggaggacaagaaaggccagcttgaagtagaggtgatcagggccaggtccttgactcagaagcctggctcaaagtcaacccctgcgccttatgtgaaagtgtatctgctcgagaatggggcttgcatagcgaagaaaaagaccagaatagctcggaaaacactcgaccctctgtatcagcagagcctggtgtttgacgagtctccccaggggaaggtgttgcaggttatcgtctggggagattacggccgcatggaccacaagtgtttcatgggggtggcccagatcttactcgaggaactggatctctcttccatggttattgggtggtataaactgttcccaccatcaagcttggtggatcctacgttgactccactgacccgacgagcctctcagtcatccctcgagagttccacgggtcctccgtgcatcaggtcctag

SEQ ID NO: 66300 - DNA, 660 bp, Artificial Sequence
  derived and/or modified sequence
atggctgctgagatgaggaagatggtgcggcagcccagccgggagagcacagatggcagcatcaacagctacagcagcgagggcaacctgatcttccctggggtgcggctgggcgctgacagccagttcagtgacttcctggatggcctgggccctgcccagctggtgggccggcagaccctggccaccccagccatgggagacatccagatcggcatggaggacaagaagggccagctggaggtggaggtgatccgggcccggagcctgacccagaagccaggcagcaagagcaccccagccccctacgtgaaggtgtacctgctggagaatggagcctgcatcgccaagaagaagacccgcatcgccaggaagaccctggaccccctgtaccagcagagcctggtgtttgatgagagcccccagggcaaggtgctgcaggtgattgtgtggggagactatggccgcatggaccacaagtgcttcatgggcgtggcccagatcctgctggaggagctggacctgagctccatggtgattggctggtacaagctgtttcctcccagcagcctggtggaccccaccctgacccccctgacccggcgggccagccagagcagcctggagagcagcacaggccccccctgcatccgctcctag

SEQ ID NO: 66301 - DNA, 660 bp, Artificial Sequence
  derived and/or modified sequence
atggccgccgagatgcggaagatggtgcggcagcccagccgggagtcaaccgacggctcgatcaactcttattcctctgagggcaatctcatatttcctggtgtccgtctcggggcagactcccagttttccgatttcttagacgggttggggcctgcgcagcttgtcgggaggcaaactttggccactcccgctatgggtgacatacagatcggcatggaggataaaaaaggacagctggaggtcgaggttattcgagctcgcagcctgactcagaagcccggaagtaagtcgacaccggctccttatgttaaggtctacttgctggagaatggggcctgcattgctaagaagaagactcgaatcgccaggaagaccctcgatcctctataccagcaatccctggtctttgacgagtctccacagggaaaggttcttcaggtaattgtttggggcgattacggtcgcatggaccacaagtgctttatgggagtggctcaaattctgctggaagaattggaccttagctcgatggtgatcggttggtacaagctttttcctccgtcttcactggtggacccaactttgacccctctgactcggcgtgccagccagtcctccctggagtccagtactggccccccctgcatcagatcctag

SEQ ID NO: 66302 - DNA, 660 bp, Artificial Sequence
  derived and/or modified sequence
atggctgccgagatgagaaagatggtgaggcagccctcgcgtgaaagtactgatggttccatcaattcgtatagcagcgaaggaaaccttatctttcctggcgtgaggcttggagcagattctcagttctctgacttcttggacgggctggggcctgcacagcttgtgggcagacagaccttggcaacgcccgctatgggagatatccagatcggcatggaagacaagaaaggtcaactcgaagtcgaggtgattcgggcacgcagcctgacccagaagccgggaagtaagagtactcccgctccatatgtgaaggtctatcttctcgagaacggcgcatgtatcgccaagaaaaaaacacggatcgcccgaaagactttagatcccctctaccagcagtcacttgtttttgatgaatcgccgcagggtaaggtgctccaggtcattgtctggggtgattatggacggatggatcataaatgctttatgggcgtggcgcaaattcttctggaggaactggacctgtcctccatggtaatagggtggtacaagcttttccctcctagcagtctggtggatccaaccctcacgccgttgactcgtagagccagccagtcttccctggaatcttccaccggtccaccctgtatccggtcttag

SEQ ID NO: 66303 - DNA, 660 bp, Artificial Sequence
  derived and/or modified sequence
atggccgccgagatgagaaagatggtgagacagcccagcagagagagcaccgacggcagcatcaacagctacagcagcgagggcaacctgatcttccccggcgtgagactgggcgccgacagccagttcagcgacttcctggacggcctgggccccgcccagctggtgggcagacagaccctggccacccccgccatgggcgacatccagatcggcatggaggacaagaagggccagctggaggtggaggtgatcagagccagaagcctgacccagaagcccggcagcaagagcacccccgccccctacgtgaaggtgtacctgctggagaacggcgcctgcatcgccaagaagaagaccagaatcgccagaaagaccctggaccccctgtaccagcagagcctggtgttcgacgagagcccccagggcaaggtgctgcaggtgatcgtgtggggcgactacggcagaatggaccacaagtgcttcatgggcgtggcccagatcctgctggaggagctggacctgagcagcatggtgatcggctggtacaagctgttcccccccagcagcctggtggaccccaccctgacccccctgaccagaagagccagccagagcagcctggagagcagcaccggccccccctgcatcagaagctag

SEQ ID NO: 66304 - DNA, 1131 bp, Artificial Sequence
  derived and/or modified sequence
atgagcgagagccaggacgaggtgcccgacgaggtggagaaccagttcatcctgagactgcccctggagcacgcctgcaccgtgagaaacctggccagaagccagagcgtgaagatgaaggacaagctgaagatcgacctgctgcccgacggcagacacgccgtggtggaggtggaggacgtgcccctggccgccaagctggtggacctgccctgcgtgatcgagagcctgagaaccctggacaagaagaccttctacaagaccgccgacatcagccagatgctggtgtgcaccgccgacggcgacatccacctgagccccgaggagcccgccgccagcaccgaccccaacatcgtgagaaagaaggagagaggcagagaggagaagtgcgtgtggaagcacggcatcaccccccccctgaagaacgtgagaaagaagagattcagaaagacccagaagaaggtgcccgacgtgaaggagatggagaagagcagcttcaccgagtacatcgagagccccgacgtggagaacgaggtgaagagactgctgagaagcgacgccgaggccgtgagcaccagatgggaggtgatcgccgaggacggcaccaaggagatcgagagccagggcagcatccccggcttcctgatcagcagcggcatgagcagccacaagcagggccacaccagcagcgagtacgacatgctgagagagatgttcagcgacagcagaagcaacaacgacgacgacgaggacgaggacgacgaggacgaggacgaggacgaggacgaggacgaggacgaggacaaggaggaggaggaggaggactgcagcgaggagtacctggagagacagctgcaggccgagttcatcgagagcggccagtacagagccaacgagggcaccagcagcatcgtgatggagatccagaagcagatcgagaagaaggagaagaagctgcacaagatccagaacaaggcccagagacagaaggacctgatcatgaaggtggagaacctgaccctgaagaaccacttccagagcgtgctggagcagctggagctgcaggagaagcagaagaacgagaagctgatcagcctgcaggagcagctgcagagattcctgaagaagtag

SEQ ID NO: 66305 - DNA, 1131 bp, Artificial Sequence
  derived and/or modified sequence
atgagcgaatctcaggacgaggtgcccgatgaggtcgagaaccaattcattctgcgtcttcctctggagcacgcgtgcaccgtgagaaacttagcgagaagtcagtcagtgaaaatgaaagataagctgaaaatcgacttgttgcccgacggacgtcatgctgtggtggaggtggaggatgtgcctcttgcggccaaattggtcgaccttccatgcgtcattgagtctctgaggactcttgataagaagacgttttacaagactgctgatatctcgcaaatgctggtatgtacagccgatggggacatccacttgtctcccgaagagccagccgctagcacggacccaaacatagtgcgcaagaaggaacggggcagagaagagaagtgcgtctggaagcacggcataaccccacctctgaagaatgttcggaagaaacgtttccggaagacgcaaaaaaaggtaccggatgtgaaagagatggagaagtcttcctttacagagtatattgaatctccagacgtggagaacgaggtaaagcgtcttctgcgctccgatgccgaagcagtttccacccgctgggaggttattgcagaggatgggactaaggaaatagagtcccagggaagtatccctggttttctgatctctagtggcatgtcaagccacaaacagggacacaccagtagcgagtatgacatgttgagagagatgttttctgactcgcggtccaacaatgatgatgacgaggacgaggatgacgaggacgaagatgaagatgaggacgaagatgaggatgaggataaggaggaggaggaggaagattgtagcgaggaatatttggagcgccaacttcaggccgagtttatcgagagcgggcaatatcgcgctaacgagggcaccagcagcattgtgatggagatccaaaaacaaatcgaaaagaaggaaaagaagctccacaagattcaaaataaggctcagcgtcaaaaggacctaattatgaaggtggaaaaccttaccctgaaaaaccatttccagtctgtgctagagcagctggaacttcaggagaaacagaagaatgagaaactcatcagcctacaggaacagctacagcggttcctgaaaaagtag

SEQ ID NO: 66306 - DNA, 1131 bp, Artificial Sequence
  derived and/or modified sequence
atgtctgagagccaggatgaggtgcctgatgaggtggagaaccagttcatcctgcggctgcccctggagcacgcctgcaccgtgaggaacctggcccggagccagagcgtgaagatgaaggacaagctgaagattgacctgctgcctgatggaagacatgctgtggtggaggtggaggatgtgcccctggccgccaagctggtggacctgccctgcgtcatcgagagcctgcggaccctggacaagaagaccttctacaagacagctgacatcagccagatgctggtgtgcacagcagatggagacatccacctgagccctgaggagcctgctgccagcacagaccccaacatcgtgaggaagaaggagcggggccgggaggagaagtgtgtgtggaagcacggcatcaccccacccctgaagaatgtgaggaagaagcgcttcaggaagacccagaagaaggtgcctgatgtgaaggagatggagaagagcagcttcacagagtacatcgagagcccagatgtggagaatgaggtgaagaggctgctgcggagtgatgctgaggccgtgtccacccgctgggaggtgattgctgaagatggcaccaaggagattgagagccagggcagcatccctggcttcctgatcagcagcggcatgagcagccacaagcagggccacaccagcagtgaatatgacatgctgcgggagatgttcagtgacagccgcagcaacaatgatgatgatgaagatgaagatgatgaagatgaagatgaagatgaagatgaagatgaagatgaggacaaggaggaggaggaggaggactgcagcgaggagtacctggagcggcagctgcaggccgagttcatcgagagcggccagtaccgggccaatgaaggcaccagcagcatcgtgatggagatccagaagcagatcgagaagaaggagaagaagctgcacaagatccagaacaaggcccagaggcagaaggacctgatcatgaaggtggagaacctgaccctgaagaaccacttccagagcgtgctggagcagctggagctgcaggagaagcagaagaatgagaagctgatcagcctgcaggagcagctgcagcgcttcctgaagaagtag

SEQ ID NO: 66307 - DNA, 1131 bp, Artificial Sequence
  derived and/or modified sequence
atgagcgagagccaggacgaggtgcccgacgaggtggagaaccagttcattcttcgcctcccactcgagcatgcctgcactgtccgaaatctagcgcggtcacagtccgtgaagatgaaggataaattgaaaattgacctactcccagatggaaggcatgctgtcgttgaagttgaggacgttcctttagcagctaagctcgttgatctcccatgtgttattgagtctttgcgtacactggataagaagactttctataaaaccgccgatataagccagatgctggtgtgtactgccgatggcgacatacatcttagtcccgaggagcccgccgctagtactgatcctaatattgtccggaagaaggaaaggggtagggaagaaaagtgtgtctggaaacacggtatcacaccgcccttaaaaaacgtcaggaagaaacggttcaggaaaacacagaaaaaggtaccagacgtgaaggagatggagaagagcagctttaccgagtatatagagtcccccgacgtcgagaatgaagtgaaaagacttcttcgttcagatgctgaagcagtctccactcgttgggaagtgattgccgaagacggaaccaaggagattgaaagtcaagggagcatcccagggtttctgatctcaagcggaatgtcaagtcacaagcagggacacactagttcggaatatgacatgttgcgagaaatgtttagcgattcacggagcaataatgacgatgatgaggatgaagacgatgaggatgaggacgaggacgaagacgaagatgaagacgaagacaaagaagaagaagaagaagattgctcagaagagtatctggagaggcagctacaggcagagtttattgagtctggccagtaccgggcaaacgaggggacatcttctatcgtaatggaaattcagaagcagatcgagaaaaaagagaagaagctgcacaaaatccagaacaaagcccaacggcagaaggacctgatcatgaaggttgaaaatctgaccctcaaaaaccacttccagtccgtactcgagcagcttgaacttcaggagaaacagaaaaacgaaaagctcattagcctgcaagagcaattgcagcgatttctcaaaaagtag

SEQ ID NO: 66308 - DNA, 1131 bp, Artificial Sequence
  derived and/or modified sequence
atgtctgagtctcaagacgaggtccccgatgaagtagagaatcagtttattctgcgtctccctctggagcatgcttgcacagtccgcaacttggcgcgatctcagagcgtgaagatgaaggacaaacttaagatcgatctactcccggacggaagacatgccgtcgttgaagtggaagatgtgcccctggccgctaaactagtagatctcccctgtgttattgaaagcttgcgcactctcgataaaaaaacattctataaaaccgctgacatctcccaaatgctggtctgcaccgctgacggagatattcacttgagccctgaagaaccagcagcaagtacagaccctaacatcgttcgcaaaaaggagagagggagggaggaaaaatgtgtgtggaagcatgggatcacaccgccactgaagaatgttaggaagaagcgttttagaaaaacccaaaagaaggttcctgacgtgaaggagatggagaagagcagctttaccgagtatattgagtctccagacgtggagaatgaggtaaaacgcttattgaggagcgatgctgaagccgtctctactaggtgggaggtgattgctgaagacggaaccaaggaaatcgaatcacagggatcaatccccggattcctgatctcctcggggatgtccagccataagcagggccacacatcatctgaatacgacatgctgagagagatgtttagcgattcaaggtcaaacaacgacgatgatgaggacgaggatgacgaggacgaggatgaagacgaagacgaggacgaggacgaagataaggaggaggaggaggaagactgcagcgaggagtacctggaacgacagctgcaggccgaattcatcgaaagcgggcagtatagggccaacgaaggcacgtctagcatagttatggaaattcagaagcagattgaaaagaaagagaaaaaactgcacaagatccagaacaaagcccagcgacagaaggacttgatcatgaaggtcgagaacctgacgttaaagaaccacttccagtctgtactcgagcaactggaattacaggagaaacagaagaatgagaagctgattagcctgcaggaacagctgcagcggttcctcaaaaaatag

SEQ ID NO: 66309 - protein, 391 aa, Artificial Sequence
  derived and/or modified sequence
MAALTTLFKYIDENQDRYIKKLAKWVAIQSVSAWPEKRGEIRRMMEVAAADVKQLGGSVELVDIGKQKEIPVNVRFCLEGMEESGSEGLDELIFARKDTFFKDVDYVCISDNYWLGKKKPCITYGLRGICYFFIEVECSNKDLHSGVYGGSVHEAMTDLILLMGSLVDKRGNILIPGINEAVAAVTEEEHKLYDDIDFDIEEFAKDVGAQILLHSHKKDILMHRWRYPSLSLHGIEGAFSGSGAKTVIPRKVVGKFSIRLVPNMTPEVVGEQVTSYLTKKFAELRSPNEFKVYMGHGGKPWVSDFSHPHYLAGRRAMKTVFGVEPDLTREGGSIPVTLTFQEATGKNVMLLPVGSADDGAHSQNEKLNRYNYIEGTKMLAAYLYEVSQLKD

SEQ ID NO: 66310 - DNA, 1176 bp, Artificial Sequence
  derived and/or modified sequence
atggctgctctgaccacactgttcaaatacattgacgaaaaccaagatcggtacattaagaagttggctaaatgggtggccattcagagcgtgagcgcgtggccagaaaaacgtggcgaaatcaggcgaatgatggaggttgcagccgctgacgtcaaacagctaggcgggagcgtagagctggtagacattggtaagcagaaagagattcctgtgaacgtacggttttgccttgagggcatggaagagagtggtagtgaaggactcgacgaactgatctttgcccggaaagatactttttttaaagatgtagactatgtttgtataagcgataattactggctgggaaagaaaaaaccgtgtattacatacgggttgcgggggatctgctacttttttatagaagtagagtgcagcaataaagacctacactccggggtgtacggcggcagcgtccacgaagccatgaccgatctcattctgcttatggggtcactagtagacaaaagagggaatattctcatacccggcattaatgaagctgttgccgccgtgacagaggaagaacacaaattgtatgatgatatcgatttcgatatcgaagaatttgcaaaggacgtgggcgcccagatactgctccatagccacaagaaggacatactgatgcaccggtggagatatccatccctgagtcttcatgggattgagggggccttctctggcagcggagcgaaaacagtgataccgcggaaggtggtgggaaaatttagtatccgattggtccccaatatgactcccgaggtggtaggggagcaggtgaccagctacctcacgaaaaagttcgcggagctgcggtcccctaatgaattcaaggtgtatatggggcatggtggcaagccctgggtttcagatttttcccatcctcactatctggccggccggcgggctatgaaaaccgttttcggcgtcgaaccagacctgacgagggagggaggctcaatccccgtaaccctcaccttccaagaagccactggcaagaatgtgatgctacttccagtgggcagtgcggacgatggcgcccacagccaaaatgaaaaattgaatcggtataattacatcgaggggacaaagatgctggctgcctatttgtatgaggtgagccagctgaaagactag

SEQ ID NO: 66311 - DNA, 1176 bp, Artificial Sequence
  derived and/or modified sequence
atggccgccctgaccaccctcttcaagtacattgatgagaaccaggaccgctacatcaagaagctggccaagtgggtggccatccagagcgtgtctgcctggccagagaagagaggagagatccggaggatgatggaggtggccgctgctgatgtgaagcagctgggcggctctgtggagctggtggacatcggcaagcagaaggagatccctgtgaatgtgcgcttctgcctggagggcatggaggagagcggcagcgagggcctggatgagctgatctttgccaggaaggacaccttcttcaaggatgtggactatgtgtgcatcagtgacaactactggctgggcaagaagaagccctgcatcacctacggcctgcggggcatctgctacttcttcatcgaggtggagtgcagcaacaaggacctgcacagcggcgtgtatggaggctctgtgcatgaggccatgacagacctgatcctgctgatgggcagcctggtggacaagaggggcaacatcctgatccctggcatcaatgaagctgtggccgctgtgacagaggaggagcacaagctgtatgatgacatcgactttgacatcgaggagtttgccaaggatgtgggcgcccagatcctgctgcacagccacaagaaggacatcctgatgcaccgctggagataccccagcctgagcctgcatggaattgaaggagccttcagcggcagcggggccaagacagtcatccccaggaaggtggtgggcaagttcagcatccggctggtgcccaacatgaccccagaggtggtgggggagcaggtgaccagctacctgaccaagaagtttgctgagctgcggagccccaatgagttcaaggtgtacatgggccacggcggcaagccctgggtgtctgacttcagccacccccactacctggccggccggcgggccatgaagacagtgtttggagtggagccagacctgacccgggagggcggcagcatccctgtgaccctgaccttccaggaggccaccgggaagaatgtgatgctgctgcctgtgggcagcgcagatgatggagcccacagccagaatgagaagctgaaccgctacaactacatcgagggcaccaagatgctggccgcctacctgtatgaggtgtcccagctgaaggactag

SEQ ID NO: 66312 - DNA, 1176 bp, Artificial Sequence
  derived and/or modified sequence
atggccgccctgaccaccctgttcaagtacatcgacgagaaccaggataggtacattaaaaagctggccaagtgggttgccatccagtctgtcagtgcctggcccgagaaacggggcgaaattcgcaggatgatggaagttgccgccgctgacgtgaagcagctcggaggatccgtggagctggttgacatcgggaagcagaaggaaataccagtgaacgtccgattctgcctcgaggggatggaagaatctgggtcagaagggttagacgagttgatattcgctagaaaggatacattcttcaaagacgtggactatgtctgtatttccgataattactggctaggcaaaaagaagccctgcatcacttatggactgcgaggcatctgttacttcttcattgaggtcgagtgctcaaataaagacctccacagtggcgtctacggtggcagcgttcatgaggctatgaccgacttaatcttgttgatgggaagcctggtggataagcgcggcaatatactgatcccaggcattaacgaggcagttgcggctgttaccgaagaagaacataaactctatgacgatattgactttgacatagaagagttcgccaaggatgtgggggcacagattctccttcactctcacaagaaggacatcctgatgcataggtggcgctacccatcgctgagcctgcacggcatcgaaggagctttttcagggtcaggcgcgaagacggtaatcccaagaaaggtggtcggtaaattttccataagactggttcccaacatgactccagaggttgtgggcgaacaggtgacgagttatttaaccaagaaatttgccgaactcagaagcccaaacgaattcaaagtttatatgggacatgggggtaaaccatgggtgtccgatttctcgcacccccattacttggccggccgcagagccatgaagaccgtgtttggcgtggaacccgacctcacgcgtgaagggggctctataccagtgactctgacttttcaggaagccacgggtaagaacgtaatgctgctcccagttggctcagccgacgatggggcccatagccagaatgaaaaactgaatcgatacaactacatcgaaggcacaaaaatgctggccgcctacttgtacgaagtgtcccagcttaaggattag

SEQ ID NO: 66313 - DNA, 1176 bp, Artificial Sequence
  derived and/or modified sequence
atggccgctctaacaacgctctttaagtatattgacgaaaatcaggatcgctacattaagaagctggccaagtgggtcgcaatccagtccgtgtctgcttggcccgagaagagaggggaaattcggagaatgatggaagtcgccgctgctgacgtgaagcagctgggtggctccgtggagttagtcgatattggtaagcagaaggagattccagtgaacgtgaggttttgtctagaaggaatggaagaatctgggtcagaggggctcgacgagttgatcttcgccaggaaggataccttttttaaggacgtggattacgtgtgcatttctgataactactggttaggcaagaagaagccctgcatcacatacgggctcagaggcatctgctacttcttcatcgaggtagaatgtagtaacaaagacctgcattctggggtatacggcggaagtgtacatgaggccatgaccgacctgatccttctcatgggctcgctggtggacaaaaggggaaacattctgattccaggaatcaacgaggcagtggctgcagtcacagaagaagagcacaagttgtatgatgacattgacttcgatatcgaagaattcgctaaagacgttggcgctcaaattctgctgcactcacacaagaaagatatactcatgcacaggtggcgatatcccagcctgtctttgcatggcattgagggggctttttccgggagtggtgccaaaaccgtcatccccagaaaggtcgtcggtaaattcagcatcaggctggtacccaatatgacccctgaagtcgttggggaacaggtgacctcctatttgacaaagaagtttgccgaactcaggtctcccaacgaatttaaagtctatatgggacatggtggcaagccgtgggtgagcgacttctctcacccccactatctggccggacggcgagccatgaaaaccgtatttggggttgaacctgacttgacccgtgaagggggtagcattcctgttactctaacattccaggaggccacgggtaaaaacgtcatgctgctcccagtcggaagtgcagacgatggtgcgcattctcagaacgagaagctgaatagatataattacattgaaggaactaaaatgctggctgcctatctgtatgaagtgtcacaactgaaggactag

SEQ ID NO: 66314 - DNA, 4946 bp, Artificial Sequence
  derived and/or modified sequence
gtaaaaatttttattaaagtaccagtaaaactaaaagtgcctacttttagttttcactgtattttcttcaactcaggccctccctctgttgttacctgccatctgacacggaattttgtgtaattttccttccaagtaaagaagggaagtttagccccagcctctaactggttcccaaagtttttgtctctgaagccgcagtcacttcctggagcgtctctggctgggtgttgcagtgctggctgggagggtggggcaacaatttacaattctgaacacgtgctttctgggcaggtcgcccctcagtctccactagagacaggactgaccagttgctcttccttccaagaaccttcgagatctgcggtctggggtctggttgaaagatggcggccctcactaccctgtttaagtacatagatgaaaatcaggatcgctacattaagaaactcgcaaaatgggtggctatccagagtgtgtctgcgtggccggagaagagaggcgaaatcaggaggatgatggaagttgctgctgcagatgttaagcagttggggggctctgtggaactggtggatatcggaaaacaaaaggagattcctgtcaacgtccgattctgcctcgaaggcatggaggagtcaggctctgagggcctagacgagctgatttttgcccggaaagacacattctttaaggatgtggactatgtctgcatttctgacaattactggctgggaaagaagaagccctgcatcacctacggcctcaggggcatttgctactttttcatcgaggtggagtgcagcaacaaagacctccattctggggtgtacgggggctcggtgcatgaggccatgactgatctcattttgctgatgggctctttggtggacaagagggggaacatcctgatccccggcattaacgaggccgtggccgccgtcacggaagaggagcacaagctgtacgacgacatcgactttgacatagaggagtttgccaaggatgtgggggcgcagatcctcctgcacagccacaagaaagacatcctcatgcaccgatggcggtacccgtctctgtccctccatggcatcgaaggcgccttctctgggtctggggccaagaccgtgattcccaggaaggtggttggcaagttctccatcaggctcgtgccgaacatgactcctgaagtcgtcggcgagcaggtcacaagctacctaactaagaagtttgctgaactacgcagccccaatgagttcaaggtgtacatgggccacggtgggaagccctgggtctccgacttcagtcaccctcattacctggctgggagaagagccatgaagacagtttttggtgttgagccagacttgaccagggaaggcggcagtattcccgtgaccttgacctttcaggaggccacgggcaagaacgtcatgctgctgcctgtggggtcagcggatgacggagcccactcccagaatgaaaagctcaacaggtataactacatagagggaaccaagatgctggccgcgtacctgtatgaggtctcccagctgaaggactaggccaagccctctgtgtgccatctccaatgagaaggaatcctgccctcacctcacccttttccaacttgcccagggaagtggaggttccctctttcctttccctcttgtcaggtcatccatgactttagagaacagacacaagtgtatccagctgtccacgggtggagctacccgttgggcttatgagtgacctggagtgacagctgagtcaccctgggtaagttctcagagtggtcaggatggcttgacctgcagaagatacccaaggtccaaaagcacaaggtctgcggaaagttctggttgtcggccgggcaccacggctcacacctataatcgagcactttgggaggccaagacaggaggatcacttgaggccaggagtctgagacaagcctaggcaacaaaacaagactctgtctctacaaaaagtttaagaaatgagccagacatggtggtgtatgcctgtagtcccagccactcagaaggctgaggcaggaggatcgcttgagaccaagagtttgagcctgcggtgagctgtgaatgcaccacggcactcaagcctgggcaatgtagcaagatcctgtctctacaagaaattttttaaaaatgagccaagtgtggtggtgcatgcctgtagttccagctactcaggacactgacgtaggagggttgcttgagactgagagttggaggctgcgatgagccatgaatgccccactgcactccagcctgggcgacagaacgagaccccatctcaaaaaaaataagttctggttgtcattgaattgggataaacagagagcttgatgctttctgccttctgtctcaggtgatgcattgcacatttgggatatttggaaaggaaatgaggaaagaaattagggcctcctctgatctctcgctatctgcgggtcctgtccttttctcaagaccttcaccattactggcattttcctgtcttctctttagtatgatccctcaaaacctcactaactggaaggatgattttgtctcagtttgtactcctaaataaaaagtaaacatgacacctctaaaagaatcgctccatctcagttgctcgtcgcgtgcacaccatgcttattgagtggtgtctggttggtggtgtcagctcagggcaggggacagcaggcaggacccggaaaacagaacccaggtcttcccaggcgagcactccctccctcgtccacacaagtggaggctcactcgtggccccctgcatgttccgagaagtgtccctgtctctgctccttaacggctgtggggccacaggaagtccagctggcttaaacaaagaattgattggcccacttgacataaaagaacagagtaaactcaatgaaaggaaaaggctccttgaagtggttggttccagggctgggcagggaagatgcaagatgagtctggaccctctcacatcggaacgtaaggatgcgctcctgagggcgtggggctgcgtccaaggacacaggagccagcctggaagagtttgcaggggcccaggggagcaattggagtgagaaaatagcagtagtgttggatttttaccatggaataaacaacaatccatgagtccatactaatataaataaagtgacaaagtgggtgagaaggaccagtgcccctggatgaagaatctctgctcatgtgggaggaaggtgggagatcaaagctggagcacttgctgctgcaggtgagacccctgacacactctcaaattggtaggcaaaggtttaaagaacgggatatttgcttagcttaaaagcacctcccaaggggaaaacagtaacttcacagtggagagacctggcaggcaccaccctcagatcaaaatgaacctcagcagtaatgacacgtccacatcagcacccccaacaccactccctgaggaggacatgccagttctgggaacatcacactcatcgtgacaaaacatcagacaaacccaaacggatgaaatgtgaggaaaatctgtagttggttttacgtggatgttaatctcttagttttgatcattgtgctgtagctgcataagaggttagctgggtgaagtgtatctggggaccctctatggcttttgcatcttttctctaagtctcctgtcatttcaaagtaaaaacaaaaaaagaagacaagggtagcggcttcaggtacagctggacccagcactcagtgctatctgggcttgtggctccaactcaactcctccatcagaactgtgagaaatgcattctttcagcttctaatcctgcaaaaagaactgcatggtcttcccccagaaatcctaagagtagctgctggtgtctcatgcatgcgagctgcatatgggcccccgttagtcaggaacccatgctgagaggtgctatgctttgaatgtttggctcctcccaaactcgtgttgaaacttaatagccattgtaacagtattaagaggcagggccttcaagagctggtcaggccatgagggccctgtcctcctgactgagtgaatgctgttattgtaggagtgggcttgtttggcctcctcttgctctctctacccctctctgagcccttgtgttgtgggatgacacagccagaaggcccttgccaggttccggtccctccaccttggacctcccagcctcccgaacgttgagccaatacatctctgctcattgtaaattacctagtcttgggcattgtgttacagcagcaaaaagcagcctacggcagtcaccgtgctaacacctgcagcagcctgcggcggtcaccgtgctaacacgtgcagcagcctgtgtggctcaggccagtcagcttcccctggaagcaagtgtgaggtcgtcgcctctggaagtgctagcggagggtgatctcccggaggaaatcagagtggtgttctactagaaggccgatgactcctgggtaaagtgccaatgctcacctccatctctgcaagctcagtccctcgtggaatttccaggagcacaagggcaatctcgacagctccacgttcccagtgcccgacccaagcctggcccatgatcagataaatgcctaagtggggtggcatggacatttgcacacgtccagactgctttatgttagaagctgagctggcatgccactagctggttttgatgtaaacaacaattttgtaaaaccctggactgaatgggtctgactaacggctggttctgtgaacttgagcctcagcgtcctgtgtcagaagagcacaaaccactttcccagagaggttatgaagacagaaatgaccctgtgacccctttgcaaagtatgaagaacggttcccactcatgcatggagctggatcttctcaagtgggaaacaggcgtggtaaataaatactgttgtttcagctggtgt

SEQ ID NO: 66315 - DNA, 1176 bp, Artificial Sequence
  derived and/or modified sequence
atggccgccctgaccaccctgttcaagtacatcgacgagaaccaggacagatacatcaagaagctggccaagtgggtggccatccagagcgtgagcgcctggcccgagaagagaggcgagatcagaagaatgatggaggtggccgccgccgacgtgaagcagctgggcggcagcgtggagctggtggacatcggcaagcagaaggagatccccgtgaacgtgagattctgcctggagggcatggaggagagcggcagcgagggcctggacgagctgatcttcgccagaaaggacaccttcttcaaggacgtggactacgtgtgcatcagcgacaactactggctgggcaagaagaagccctgcatcacctacggcctgagaggcatctgctacttcttcatcgaggtggagtgcagcaacaaggacctgcacagcggcgtgtacggcggcagcgtgcacgaggccatgaccgacctgatcctgctgatgggcagcctggtggacaagagaggcaacatcctgatccccggcatcaacgaggccgtggccgccgtgaccgaggaggagcacaagctgtacgacgacatcgacttcgacatcgaggagttcgccaaggacgtgggcgcccagatcctgctgcacagccacaagaaggacatcctgatgcacagatggagataccccagcctgagcctgcacggcatcgagggcgccttcagcggcagcggcgccaagaccgtgatccccagaaaggtggtgggcaagttcagcatcagactggtgcccaacatgacccccgaggtggtgggcgagcaggtgaccagctacctgaccaagaagttcgccgagctgagaagccccaacgagttcaaggtgtacatgggccacggcggcaagccctgggtgagcgacttcagccacccccactacctggccggcagaagagccatgaagaccgtgttcggcgtggagcccgacctgaccagagagggcggcagcatccccgtgaccctgaccttccaggaggccaccggcaagaacgtgatgctgctgcccgtgggcagcgccgacgacggcgcccacagccagaacgagaagctgaacagatacaactacatcgagggcaccaagatgctggccgcctacctgtacgaggtgagccagctgaaggactag

SEQ ID NO: 66316 - protein, 342 aa, Artificial Sequence
  derived and/or modified sequence
MVQASGHRRSTRGSKMVSWSVIAKIQEILQRKMVREFLAEFMSTYVMMVFGLGSVAHMVLNKKYGSYLGVNLGFGFGVTMGVHVAGRISGAHMNAAVTFANCALGRVPWRKFPVYVLGQFLGSFLAAATIYSLFYTAILHFSGGQLMVTGPVATAGIFATYLPDHMTLWRGFLNEAWLTGMLQLCLFAITDQENNPALPGTEALVIGILVVIIGVSLGMNTGYAINPSRDLPPRIFTFIAGWGKQVFSNGENWWWVPVVAPLLGAYLGGIIYLVFIGSTIPREPLKLEDSVAYEDHGITVLPKMGSHEPTISPLTPVSVSPANRSSVHPAPPLHESMALEHF

SEQ ID NO: 66317 - protein, 341 aa, Artificial Sequence
  derived and/or modified sequence
MGSGHCLRSTRGSKMVSWSVIAKIQEILQRKMVREFLAEFMSTYVMMVFGLGSVAHMVLNKKYGSYLGVNLGFGFGVTMGVHVAGRISGAHMNAAVTFANCALGRVPWRKFPVYVLGQFLGSFLAAATIYSLFYTAILHFSGGQLMVTGPVATAGIFATYLPDHMTLWRGFLNEAWLTGMLQLCLFAITDQENNPALPGTEALVIGILVVIIGVSLGMNTGYAINPSRDLPPRIFTFIAGWGKQVFSNGENWWWVPVVAPLLGAYLGGIIYLVFIGSTIPREPLKLEDSVAYEDHGITVLPKMGSHEPTISPLTPVSVSPANRSSVHPAPPLHESMALEHF

SEQ ID NO: 66318 - protein, 170 aa, Artificial Sequence
  derived and/or modified sequence
MNAAVTFANCALGRVPWRKFPVYVLGQFLGSFLAAATIYSLFYTAILHFSGGQLMVTGPVATAGIFATYLPDHMTLWRGFLNEAWLTGMLQLCLFAITDQENNPALPGTEALVIGILVVIIGVSLGMNTGYAINPSRDLPPRIFTFIAGWGKQVFSNGENWWWVPVVAPL

SEQ ID NO: 66319 - protein, 141 aa, Artificial Sequence
  derived and/or modified sequence
MNAAVTFANCALGRVPWRKFPVYVLGQFLGSFLAAATIYSLFYSVADRDAPAVSLRHHGPGEQPSTARNRGAGDRHPRGHHRGVPWHEHRICHQPVPGPAPPHLHLHCWLGQTGLQVLPLPRPIPLSFSVGPLCVEGWGVM

SEQ ID NO: 66320 - protein, 1004 aa, Artificial Sequence
  derived and/or modified sequence
MALIMEPVSKWSPSQVVDWMKGLDDCLQQYIKNFEREKISGDQLLRITHQELEDLGVSRIGHQELILEAVDLLCALNYGLETENLKTLSHKLNASAKNLQNFITGRRRSGHYDGRTSRKLPNDFLTSVVDLIGAAKSLLAWLDRSPFAAVTDYSVTRNNVIQLCLELTTIVQQDCTVYETENKILHVCKTLSGVCDHIISLSSDPLVSQSAHLEVIQLANIKPSEGLGMYIKSTYDGLHVITGTTENSPADRCKKIHAGDEVIQVNHQTVVGWQLKNLVNALREDPSGVILTLKKRPQSMLTSAPALLKNMRWKPLALQPLIPRSPTSSVATPSSTISTPTKRDSSALQDLYIPPPPAEPYIPRDEKGNLPCEDLRGHMVGKPVHKGSESPNSFLDQEYRKRFNIVEEDTVLYCYEYEKGRSSSQGRRESTPTYENSLLRYMSNEKIAQEEYMFQRNSKKDTGKKSKKKGDKSNSPTHYSLLPSLQMDALRQDIMGTPVPETTLYHTFQQSSLQHKSKKKNKGPIAGKSKRRISCKDLGRGDCEGWLWKKKDAKSYFSQKWKKYWFVLKDASLYWYINEEDEKAEGFISLPEFKIDRASECRKKYAFKACHPKIKSFYFAAEHLDDMNRWLNRINMLTAGYAERERIKQEQDYWSESDKEEADTPSTPKQDSPPPPYDTYPRPPSMSCASPYVEAKHSRLSSTETSQSQSSHEEFRQEVTGSSAVSPIRKTASQRRSWQDLIETPLTSSGLHYLQTLPLEDSVFSDSAAISPEHRRQSTLPTQKCHLQDHYGPYPLAESERMQVLNGNGGKPRSFTLPRDSGFNHCCLNAPVSACDPQDDVQPPEVEEEEEEEEEEGEAAGENIGEKSESREEKLGDSLQDLYRALEQASLSPLGEHRISTKMEYKLSFIKRCNDPVMNEKLHRLRILKSTLKAREGEVAIIDKVLDNPDLTSKEFQQWKQMYLDLFLDICQNTTSNDPLSISSEVDVITSSLAHTHSYIETHV

SEQ ID NO: 66321 - DNA, 3015 bp, Artificial Sequence
  derived and/or modified sequence
atggctttaattatggaacccgtttccaagtggtctccatcacaggtcgttgattggatgaaagggctcgacgattgcctgcagcagtacattaagaacttcgagcgggagaaaattagcggagaccagctcctccgcattacacaccaggaattggaagatctgggtgtgtcaaggattggccatcaggagctgatactggaagcagtggacctgctttgcgccctgaactatggactggaaaccgagaacctcaaaactctgtcacacaagcttaatgctagtgcaaagaatttgcagaatttcatcacagggcgccgccggtcaggccactatgatggacggacaagccgcaaattgccaaacgacttcttaacttccgtggttgatctcatcggtgctgccaagagcctattggcatggttagatcgctccccatttgccgccgtgactgattacagtgtgactcgcaataacgtaatccagctctgtctcgagctgactacgatcgtccagcaagactgcaccgtgtacgaaacagaaaataagatacttcacgtgtgcaaaacattgagcggcgtatgcgaccacataatatctctgtcttcagaccctctcgtttcccaaagtgcgcacctggaggttattcaattagcaaacattaagccgagtgagggccttgggatgtatattaagtccacatacgacggccttcacgtgattacaggcaccaccgagaatagccccgcagatcggtgtaaaaagatccacgcgggagatgaagtgatccaggtaaaccatcagactgtggttggctggcagctgaaaaaccttgtcaatgccctgagggaagatcctagcggcgtaatcctgactctgaagaagagacctcagagcatgctaacatcagctccagctttacttaagaatatgagatggaagccactcgctttgcagcccctgattcccagaagccccacctcttctgttgcaacccctagcagtactatttccactccaacaaagcgggatagctccgccctgcaggacctttacataccgcctcctcctgctgagccctacatcccaagagatgagaaaggaaacctcccgtgtgaggacttgcgagggcatatggtgggaaagccagtccacaaaggttcagaatcccccaacagcttccttgatcaagagtacaggaagagattcaatattgtagaagaagatacagtgctctactgctacgagtacgagaaagggcgttcttccagtcagggccgccgagaatccaccccgacttacgagaacagcctgctacgctatatgtctaacgaaaaaatcgcgcaggaggaatacatgtttcagcggaattctaagaaagacaccggcaaaaagtctaagaagaagggtgacaagtctaatagtcccacccactactccctgctgccttctttgcagatggatgccctcaggcaggatattatgggcacgcctgttcccgagactacactgtatcacacctttcagcagtcatctctgcagcacaaatccaaaaaaaagaacaagggtcccattgccgggaagagcaagcggcgaatctcatgtaaggacctgggtaggggcgactgtgaaggctggctctggaaaaaaaaagatgccaagtcctatttctcacagaaatggaaaaaatactggttcgtactgaaagacgctagtctgtactggtatattaacgaggaggacgagaaggcggaggggttcattagcctgcccgaattcaaaattgaccgtgcgtccgaatgccggaagaaatacgcatttaaagcttgccaccccaaaataaagagcttttattttgccgctgaacacttagatgacatgaatagatggctgaaccgaatcaacatgcttacagctgggtacgccgaacgggagcgaattaagcaggaacaagactactggagcgagtctgacaaagaggaggcagatacaccaagcacacctaagcaggactctccaccgccaccgtatgatacataccctagaccaccatctatgtcctgcgccagtccctacgtagaagctaaacacagtcgacttagttcgactgagactagccagagtcaaagttcccatgaggaatttcgacaggaggtgaccggcagttcagccgtctcacctatcaggaagactgcctcacagaggcggtcctggcaggacttgatagagacccctctgacctcaagcggcctccactaccttcaaacactgcccttggaagattctgtctttagcgactccgctgcaatctctcccgaacacagacgacagtccactctgccgacccagaagtgtcacctgcaggaccactatggcccatatcctctggccgagagcgaaaggatgcaagtgttaaatgggaacgggggcaagccgcgttccttcacgctaccaagagactctggcttcaatcactgctgcctcaatgccccagtgagcgcgtgtgacccccaggacgacgtgcagccgcccgaagtggaggaagaggaagaagaggaggaagaggaaggagaagccgccggagagaacataggcgagaagtcagaatcccgggaggagaaacttggcgactcacttcaggatctttatagagcgcttgagcaggcttcgctttctccactgggagagcacaggatcagcacaaagatggaatacaagttgtcttttatcaaaaggtgtaacgaccctgtcatgaacgaaaagctccacagactcagaattcttaagtccacactgaaagccagagaaggggaagtggctattattgacaaagtcttagataatccggacctcaccagtaaagagtttcagcagtggaagcaaatgtatttagacctgtttttggatatctgtcagaatacaacatcaaacgatcctttatccatcagctccgaagtcgacgtgatcacatcctccttggcacacacacattcttacattgagacgcacgtatag

SEQ ID NO: 66322 - DNA, 3015 bp, Artificial Sequence
  derived and/or modified sequence
atggccctgatcatggagcctgtgtccaagtggagccccagccaggtggtggactggatgaagggcctggatgactgcctgcagcagtacatcaagaactttgagcgggagaagatcagcggggaccagctgctgcgcatcacccaccaggagctggaggacctgggcgtgagccgcatcggccaccaggagctgatcctggaggccgtggacctgctgtgtgccctgaactacggcctggagacagagaacctgaagaccctgagccacaagctgaatgccagcgccaagaacctgcagaacttcatcaccggcagaagaagaagtggccactatgatggccgcaccagcaggaagctgcccaatgacttcctgacctctgtggtggacctgattggagctgccaagagcctgctggcctggctggacaggagcccctttgctgctgtgacagactacagcgtgaccagaaataatgtcatccagctgtgcctggagctgaccaccatcgtgcagcaggactgcaccgtgtatgaaacagagaacaagatcctgcacgtgtgcaagaccctgagcggcgtgtgtgaccacatcatcagcctgagcagtgaccccctggtgtcccagagcgcccacctggaggtgatccagctggccaacatcaagcccagcgagggcctgggcatgtacatcaagagcacctatgatggcctgcacgtgatcaccggcaccacagagaacagccctgctgaccgctgcaagaagatccacgccggagatgaggtgatccaggtgaaccaccagacagtggtgggctggcagctgaagaacctggtgaatgccctgcgggaggaccccagcggggtcatcctgaccctgaagaagaggccccagagcatgctgaccagcgccccagccctgctgaagaacatgcgctggaagcccctggccctgcagcccctcatccccaggagccccaccagctctgtggccacccccagcagcaccatcagcacccccaccaagagggacagcagcgccctgcaggacctgtacatccccccacctcctgctgagccctacatccccagagatgagaagggcaacctgccctgtgaggacctgcggggccacatggtgggcaagcctgtgcacaagggcagcgagagccccaacagcttcctggaccaggagtacaggaagcgcttcaacatcgtggaggaggacacagtgctgtactgctatgaatatgagaagggccgcagcagcagccagggcagaagagagagcacccccacctatgagaacagcctgctgcgctacatgagcaatgagaagatcgcccaggaggagtacatgttccagaggaacagcaagaaggacaccgggaagaagagcaagaagaagggggacaagagcaacagccccacccactacagcctgctgcccagcctgcagatggatgccctgcggcaggacatcatgggcacccctgtgcctgagaccaccctgtaccacaccttccagcagagcagcctgcagcacaagagcaagaagaagaacaagggccccatcgccggcaagagcaagaggcgcatcagctgcaaggacctgggccgcggggactgtgagggctggctgtggaagaagaaggatgccaagagctacttcagccagaagtggaagaagtactggtttgtgctgaaggatgccagcctgtactggtacatcaatgaggaggatgagaaggccgagggcttcatcagcctgcctgagttcaagattgaccgggccagcgagtgcaggaagaagtatgccttcaaggcctgccaccccaagatcaagagcttctactttgctgctgagcacctggatgacatgaaccgctggctgaaccgcatcaacatgctgacagctggctacgccgagcgggagcgcatcaagcaggagcaggactactggagcgagagtgacaaggaggaggccgacacccccagcacccccaagcaggacagccccccaccaccctatgacacctaccccaggcctccttccatgagctgtgccagcccctacgtggaggccaagcacagccggctgagcagcacagagaccagccagagccagagcagccatgaggagttccggcaggaggtgacaggcagcagcgctgtgagccccatcaggaagacagccagccagaggaggtcctggcaggacctgattgagacccccctgaccagcagcggcctgcactacctgcagaccctgcccctggaggacagcgtcttcagtgacagcgctgccatcagccctgagcaccggcggcagagcaccctgcccacccagaagtgccacctgcaggaccactacggcccctaccccctggccgagagcgagaggatgcaggtgctgaatggaaatggaggcaagcccaggagcttcaccctgccccgggacagcggcttcaaccactgctgcctgaatgcccctgtgtctgcctgtgacccccaggatgatgtgcagcccccagaggtggaggaggaggaggaggaggaggaggaggagggggaggccgccggggagaacatcggggagaagtctgagagccgggaggagaagctgggggacagcctgcaggacctgtaccgggccctggagcaggccagcctgagccccctgggggagcaccgcatcagcaccaagatggagtacaagctgtccttcatcaagcgctgcaatgaccctgtgatgaatgagaagctgcaccggctgcgcatcctgaagagcaccctgaaggcccgggagggggaggtggccatcatcgacaaggtgctggacaacccagacctgaccagcaaggagttccagcagtggaagcagatgtacctggacctcttcctggacatctgccagaacaccaccagcaatgaccccctgagcatcagcagcgaggtggatgtgatcaccagcagcctggcccacacccacagctacatcgagacccacgtgtag

SEQ ID NO: 66323 - DNA, 3015 bp, Artificial Sequence
  derived and/or modified sequence
atggccctgatcatggagcccgtgagcaagtggagccccagccaggtggttgattggatgaaggggttggacgattgtctgcagcagtatatcaaaaattttgaacgggaaaagatctcgggagaccaactgctcagaattacacaccaggagcttgaggacctgggcgtgtctcggatcggccatcaggaactgatactggaggctgtagatctgctctgcgcgttaaactacggactggagacagaaaaccttaaaacactctcgcataagctcaatgcttctgcgaaaaatttgcagaactttatcactggccggcgacgttccggccattacgacggacgcactagtcgcaagctgccgaacgatttcctcacatctgttgtggaccttatcggtgctgccaagtctttgcttgcctggctggacagatctcctttcgctgccgtcactgattactcggtcaccaggaacaatgttattcagctgtgcctggagcttaccacaatcgtccaacaagactgtactgtatatgagactgaaaacaagatccttcatgtttgcaaaaccctgtccggagtctgcgatcatataatatcactgtcttccgatcccctggtgtcacagagtgcccacttggaggttatccagcttgctaacattaaaccctccgaaggcctgggcatgtacattaaatcgacctatgacggacttcatgtgattactggaacaaccgaaaactctcctgccgaccgctgcaagaagattcatgcaggtgatgaagtgatccaggtaaaccaccagaccgtcgtagggtggcagcttaagaatctggtgaatgcccttagagaagatccctctggggtcatcctaacgttgaagaagcggccccagtcgatgctaacctcagcccccgccttactgaaaaatatgcggtggaaacccctggctctgcaaccactgatcccccggtctccaacctcatcagtggctacaccttcaagcacaattagcacccctactaagcgagacagctctgccctgcaggatttgtatattccgcctccaccagcggaaccctatatcccgagagacgagaaaggcaatctgccatgtgaagacctcaggggacacatggtaggaaaaccggtacataagggttctgaatcgccaaattccttcctggaccaggagtaccgtaagcgcttcaacatcgtcgaagaggatacagtgctttactgttacgagtatgaaaaggggcggtcgtcttcccagggacgcagagagagcacgcccacgtacgagaatagtctcctccgctacatgtcaaatgaaaaaatcgcccaggaggagtatatgttccagcgaaacagcaaaaaagatacagggaaaaaatcaaagaaaaaaggagacaaatctaactcgcccacgcactacagcctgctgccctcactgcaaatggacgccttacgccaggatatcatgggcacccccgtgcccgaaacgaccctttaccatacctttcaacagtcttcactccagcataagagtaagaagaaaaacaaggggcctatcgctggcaagtcgaagcgcagaatctcatgcaaggatctcggtcgcggtgattgtgaaggctggttgtggaagaagaaagacgcaaaaagttatttttcacagaaatggaagaaatattggttcgtgctgaaggacgcatccctgtactggtatattaatgaagaagatgaaaaggccgaaggctttatctcacttcccgagttcaagatcgacagagcttcggaatgccggaagaagtacgctttcaaagcatgccacccaaaaattaagtccttctattttgcagctgagcacctcgacgacatgaacagatggttgaataggattaatatgctgacagctggctacgctgagcgagagaggattaagcaggagcaggattattggagcgaaagcgacaaggaagaagctgacacacccagcacaccaaaacaggactctccaccccccccatatgatacctaccctcgcccacccagtatgagctgtgccagtccttatgtggaggctaagcactccaggctgtctagcacggagacctcccagagtcagtcgtcacatgaggaattccgccaggaggtcaccgggagcagcgcagtttctccaatcaggaagacggcgtcccaacggcgctcgtggcaagaccttattgaaaccccactgacttctagtggactccattatctgcaaacgctgccccttgaggatagcgtattctccgatagcgccgccatttctccagagcatcgacggcaatccacccttcctacgcaaaaatgccatctgcaggaccattatggcccctatcctctggcagagagcgaaagaatgcaggtgctcaatggcaacggtggcaagccacgcagcttcacccttcccagggactctggcttcaaccattgttgtcttaatgctcccgtttctgcttgcgacccacaggacgacgtgcaaccgccagaggttgaagaggaggaggaggaagaagaggaagagggcgaggccgcaggggagaacatcggcgagaaatctgagtctcgggaagagaaattgggggacagccttcaggatttgtatcgggcccttgaacaggcatctttgtcacctttaggtgagcacaggatatctactaagatggagtataagctctccttcatcaaaaggtgcaatgatcccgtaatgaatgagaaactgcacaggctccgcatcttgaagagtacacttaaagccagggaaggggaggtggccattatcgataaagtgcttgacaaccctgacctaaccagcaaagagttccagcagtggaaacagatgtatctcgacctgtttctggacatttgccagaataccacaagtaacgatccactctctatcagctcggaagtcgacgttatcacatctagcctggcccacacccacagttatatcgaaacgcatgtgtag

SEQ ID NO: 66324 - DNA, 3015 bp, Artificial Sequence
  derived and/or modified sequence
atggctcttattatggagccagtgagcaaatggtccccttctcaggtggtcgactggatgaaaggacttgacgactgcttgcaacagtacattaaaaattttgagagagagaagatttctggcgatcaattacttagaattactcatcaggaactcgaagatctcggggtgtctcgaattggtcatcaggagctgatacttgaggctgtggatctactgtgtgctctgaattacggcctggaaacagagaacctaaaaaccctgagccataaactcaatgcctcagcaaagaatctccagaactttattactggcagaaggaggagcggccactatgacggcagaacatcccgcaagctacctaatgactttctcaccagcgtggtggacctgatcggggctgctaagtcgctgctggcctggctggatcgaagccctttcgcagcagtgacagattatagcgtaacccggaacaatgtgattcagctatgcctagagctcacaaccattgtgcaacaggactgtactgtctatgaaactgagaacaaaatactgcacgtctgcaagaccctctccggtgtctgcgaccacattatcagcctgtcgagcgaccccctggtgtcacagtcagcccacctggaggtgatacagctcgcgaatataaaacccagcgagggcctcgggatgtatatcaaaagcacgtacgacggactgcatgtgattaccgggaccactgaaaactcgcccgctgatcggtgcaagaagattcatgctggcgacgaagtcatccaggtgaatcaccaaacggtggtgggctggcagcttaagaacctggtgaacgctctgcgcgaagacccctctggcgttatactcaccttgaagaagcgcccacagtctatgttgacttccgccccagctctactcaaaaacatgcgttggaagcctttggcattgcagccgctgattcccaggagcccaacctcctccgtagcgactccatcaagtaccattagtacacctaccaaaagagacagctcagccttacaggacctttatataccacctcctcctgccgagccctatatacccagggatgagaaagggaacctcccctgcgaagaccttcggggacacatggtggggaaacccgtacataagggatccgagtcacccaacagtttcctggaccaggaataccgcaagcgcttcaacatagtggaagaggatacagtgctgtactgttacgagtatgaaaagggcagatcttctagtcaaggaaggagggagtctactcctacatatgagaattctttgctcagatacatgagtaacgagaaaatcgctcaggaggagtacatgttccaaagaaatagtaaaaaggacaccggaaagaagagcaaaaagaaaggtgataagtccaacagcccaacccactatagcctgctgccctcattacaaatggacgcactcagacaggacataatgggaacacctgttcctgagacaaccctctaccacacctttcagcaaagcagcctccagcataagtcaaagaagaagaataaaggacctatcgctggtaagtctaagcgcagaattagctgcaaagatttgggcagaggggattgtgaaggttggctatggaagaagaaggatgctaaatcttacttctcacagaagtggaaaaagtattggtttgtgctgaaagatgcgtctttatactggtacattaatgaggaggatgagaaagccgagggctttattagcttgcccgagtttaagattgacagggccagcgagtgcaggaagaagtacgcgtttaaggcctgccatcccaagatcaaatctttttatttcgctgccgagcatctagatgatatgaaccgctggctgaaccggattaatatgctgaccgcaggctacgcggagcgggaacgaattaagcaggagcaggattattggagcgagtctgataaagaggaggccgatacgccctctacaccgaagcaggattctcctccacctccttacgacacgtatccacggcctccttccatgtcctgtgcaagcccctatgttgaagccaaacacagcagactttctagcaccgaaacctcgcagtcgcagtccagtcacgaagagtttcgacaggaggtgacgggcagttctgccgtgtccccaattcgaaagacagcatcacaaaggagaagctggcaggatctcatcgagacacctcttacctcaagcggacttcattacctacagaccctgccgctggaagacagtgtcttcagtgactcagcggctatttcacccgagcatcggcgtcagagtaccctgcctacacagaagtgccatttacaggaccactacggtccatacccgctagctgagtctgaacgtatgcaagtattgaatgggaatggtggtaaaccgagaagttttaccctgccccgtgacagtggcttcaatcactgttgtctgaacgcccctgtgtccgcctgtgatccacaggatgatgtccagcccccagaagttgaagaggaagaggaggaggaggaggaagagggcgaagcagctggagagaatattggggagaaaagcgagtcaagagaggagaagctgggggactctctgcaggatctttatcgggctctggaacaggcctctctgagtcctcttggagaacatcggatttcaacgaaaatggagtacaagttatcattcattaaacgttgcaacgatcccgttatgaacgaaaagctccatcggctgagaattctgaagtccacgttgaaagccagagagggagaagtggcaatcatcgacaaagtcctagacaaccctgacctgacaagtaaagagtttcagcagtggaaacagatgtacctcgacctgtttctggatatctgtcagaataccacaagcaacgatcccctctccatctcctcagaggtggatgtcataaccagctccctggctcacacacatagctacattgagacccatgtgtag

SEQ ID NO: 66325 - DNA, 5668 bp, Artificial Sequence
  derived and/or modified sequence
gtcatttccgccgggcagctagtcgtgctcggggcttcactcccgcgcgtgaggcgagcgggcaagttggctgagggcgtgcggcagaggctgcttccctcggcgacgcgacccctcagcaactcaagctatgaactgaagctccctagggacggagaccggagcggagcggcggaggcagcagcagcagcagcagcagcagcagcagcagcagccgccgccgccgccgccttagcgggaactgagcagacccggcgcggagccacgactcctgcacgtttacctccctgtcgccgttcctgccggcggttggctaaaagacgttacagccgcgagacccgacacacaaaagccgctttctccgcgccgcccgcccagggaggctgcggccagcaagggaccccacctgagagcagctcgggctgctgagttcgttttgtgtctgagctctgcgctctgcacggaaccgaccccgtacccatggctctgataatggaaccggtgagcaaatggtctccgagtcaagtagtggactggatgaaaggtcttgatgactgtttgcagcagtatattaagaactttgagagggagaagatcagtggggaccagctgctgcgcattacacatcaggagctagaagatctgggggtcagccgcattggccatcaggaactgatcttggaagcagttgaccttctgtgtgcattgaattatggcttggaaacagaaaatctaaaaaccctttctcacaagttgaatgcatctgccaaaaatctgcagaattttataacaggaaggagaaggagtggccattatgatgggaggaccagccgaaaattgccaaacgactttctgacctcagttgtggatctgattggagcagccaagagtctgcttgcctggttggacaggtcaccatttgctgctgtgacagactattcagttacaagaaataatgtcatacaactctgcctggagttaacaacaattgtgcaacaggattgtactgtatatgaaacagagaataaaattcttcacgtgtgtaaaactctttctggagtctgtgaccacatcatatccctgtcgtcagatcctctggtttcacagtctgctcacctggaagtgattcaactggcaaacattaaaccaagcgaagggctgggtatgtatattaaatctacatatgatggcctccatgtaattactggaaccacagaaaattcacctgcagatcggtgcaagaaaatccatgctggcgatgaagtgattcaagttaatcatcagactgtggtggggtggcagttgaaaaatttggtgaatgcactacgagaggacccgagtggtgttatcttaactttgaaaaagcgacctcagagcatgcttacctcagcaccagctttactgaaaaatatgagatggaagccccttgctctgcagcctcttatacctagaagtcccacaagcagcgttgccacgccttccagcaccatcagtacacccaccaaaagagacagttctgccctccaggatctctacattccccctcctcctgcagaaccatatattcccagggatgaaaaaggaaaccttccttgtgaagacctcagaggacatatggtgggcaagccagtgcataagggatctgaatcaccaaattcatttctggatcaggaatatcgaaagagatttaatattgtcgaagaagatactgtcttatattgctatgaatatgaaaaaggaagatcaagtagtcaaggaagacgagaaagcaccccaacttatgaaaactctctacttcggtatatgagcaatgaaaagattgctcaagaagaatacatgtttcagagaaacagcaaaaaggacacagggaagaagtcaaaaaagaagggtgataagagtaatagcccaactcactattcattgctacctagtttacaaatggatgcactgagacaagacatcatgggcactcctgtgccagagaccacactataccatacatttcagcagtcctcactgcagcacaaatcaaagaagaaaaacaaaggtcctatagcaggcaagagcaaaagacgaatttcttgcaaagatcttggccgtggtgactgtgagggctggctttggaaaaagaaagatgcgaagagttacttttcacagaaatggaaaaaatattggtttgtcctaaaggatgcatccctttattggtatattaatgaggaggatgaaaaagcagaaggattcattagcctgcctgaatttaaaattgatagagccagtgaatgccgcaaaaaatatgcattcaaagcctgtcatcctaaaatcaaaagcttttattttgctgctgaacatcttgatgatatgaacaggtggcttaacagaattaatatgctgactgcaggatatgcagaaagagagaggattaagcaggaacaagattactggagtgagagtgacaaggaagaagcagatactccatcaacaccaaaacaagatagccctccacccccatatgatacatacccacgacctccctcgatgagttgcgccagtccttatgtggaagcaaaacatagccgactttcctccacggagacttctcagtctcagtcttctcatgaggagtttcgccaggaagtaactgggagcagtgcagtgtctcccattcgcaagacagccagtcagcgccgctcctggcaggatttaattgagacgccactgacaagttcaggcttacactatcttcagactctgcccctggaggattctgtcttctctgactccgcggccatctccccagagcacaggcggcagtctaccctgccaactcagaaatgccacctgcaggatcactatgggccataccccttagctgagagtgagaggatgcaagtgctaaatggaaatgggggcaagcctcgaagttttactctgcctcgagatagcgggttcaaccattgctgtctgaatgctccagttagtgcctgtgacccacaggatgacgtgcaacccccagaggtggaggaagaggaggaggaggaggaggaggaaggggaggcagcaggggaaaacataggagaaaaaagtgaaagcagagaagaaaagttaggagactcattgcaagatttatacagggcactggagcaggccagtctgtcaccactaggagaacatcgtatttcaaccaagatggaatacaagctatcatttataaaaagatgtaatgatcctgtaatgaatgaaaaactacaccggctgagaattctcaaaagcactttaaaggccagagaaggggaagtagccattatcgataaagtcctagacaatccagacttgacatctaaagaattccaacaatggaagcagatgtacctcgaccttttcttggatatctgtcaaaataccacctcaaatgacccactgagtatttcttctgaagtagatgtaatcacttcctctctagcacacactcattcatacattgaaacgcatgtctaaatgtattctgccttcagaccatctagtacctgctggtactctgaacaagtatataaggtagtttttatatcaatgtgtggaacacttgacaagctatactttaatgttaccaaactatatgaaacaaaccatatatggtcacaataccactatctttaatgagcatttgtatattttatatgcaacagtgctcagcttatgtttaccatgtgcaaaatcaactgtctttaatgacttaaaattaacttttgcaaacaattctaaatacaggtggtcttcaagtagtaaaaccacaaaaggcagttttctatctatggtcatcttttctccctttaagttaattttatataaacaagacttcaaaagtaaatcacattttttcaggtgcagacatccttgtgggtgggaaagaatttaaaccttttttatatttattaaaatgttctaagaattttcttaaacattgcacaaagtttaatgctgtagttttatttttgtgaaatgtagatgcgcatacaagagctaagcaaaatagaagagcatcgacataagaaaagttcaggtatctaatattcgtcttaatagtctattaacttgtgaaagctaagttaatggaaatattattccaaatctatgagaacacttggtgtatcagggcaaagctttgtaagatgtttttgtaactaagaccaaaattgaagatagagctgctttattttcttggtttaaatcttcctttatttttgtagtgatgagatgctgattgtgtacagaagaatttgagaggggatttttaaaaactgacttaacacacccagaaaggcagctaacagctatatatatatataaatttcagcccaaactcatgtttttaaactccaactcttaaaagacaacaaggtataaactgaaatgaatcaactttccacttagtttccaattttcccctagtccactaattaaacttaggtaattatacttcaggtagggaagtacaatatgtttagtttcaggctgatgtgtgttataaaaaacaacactgaaaaataaaaatgtacttcccttctaaggagcaagcaggtgatggtcattcaaagagatgtcacattgaattatgagagaaacaatttagaggtttttttcctggcttcatgaattgttctatagagtggatgaagtctaaggaaaagtcctcttcatatatttccatttataagcgtcttgtttttgaaagtgatcacagcatgaaaatgactgtgctgctttttagtgtctggctgcataatgtacaagtcacaatttgctgtttttttcaggaggagaaagggaacctcctttactattctatatcctaaaatctacttctaatcagctttatactgttgcctgtacagctcagtgaatgtactttcatctttaagagttcagatatatgccagtgaatatttttgctgtagaggagaaagtaaaaactccacagcggggatctttttctttgcttttgaaaccaccattgaatcactatcgttttgcagactttgcacaactgtacaggagagtggcctttctacagcacattttcagtaatcctatatttagtcaaaatggatgagaaatcatgtattaatgtttgtatggaattttgggtccagtgtaatatttttatcatttaaaaagaactctatttgtaaaaacatttatttactgcatggatattgacgcacattaaatttgtgggattttgtatatgtaaaaaaaaaaaaaaaaaaaaaacaaaaaacctcttgtcctaaaatgaagtgtgcttgttaacaggtgtttagacttattgatgtttactagaccaaatgtgtatgttcacttaaaaatatatgtacctgatggatgtgtcatgtttacagtggccaggttgtggcctgtaaacagcaagcagttgacgggaagactagctctgttgctactaagcagcttttacttttgtaaagtcagctctgttgttttaaatggtaaaaattaaactaatgaatttgacaagactcgtggctagcctagcatgaaagagaccttttaacactatataatatctgtacattttattgcattcgtttcaaatctaggagagaggcagcactgtaaactgaagtcaaataaattcagctcttaatgaatcctt

SEQ ID NO: 66326 - DNA, 3015 bp, Artificial Sequence
  derived and/or modified sequence
atggccctgatcatggagcccgtgagcaagtggagccccagccaggtggtggactggatgaagggcctggacgactgcctgcagcagtacatcaagaacttcgagagagagaagatcagcggcgaccagctgctgagaatcacccaccaggagctggaggacctgggcgtgagcagaatcggccaccaggagctgatcctggaggccgtggacctgctgtgcgccctgaactacggcctggagaccgagaacctgaagaccctgagccacaagctgaacgccagcgccaagaacctgcagaacttcatcaccggcagaagaagaagcggccactacgacggcagaaccagcagaaagctgcccaacgacttcctgaccagcgtggtggacctgatcggcgccgccaagagcctgctggcctggctggacagaagccccttcgccgccgtgaccgactacagcgtgaccagaaacaacgtgatccagctgtgcctggagctgaccaccatcgtgcagcaggactgcaccgtgtacgagaccgagaacaagatcctgcacgtgtgcaagaccctgagcggcgtgtgcgaccacatcatcagcctgagcagcgaccccctggtgagccagagcgcccacctggaggtgatccagctggccaacatcaagcccagcgagggcctgggcatgtacatcaagagcacctacgacggcctgcacgtgatcaccggcaccaccgagaacagccccgccgacagatgcaagaagatccacgccggcgacgaggtgatccaggtgaaccaccagaccgtggtgggctggcagctgaagaacctggtgaacgccctgagagaggaccccagcggcgtgatcctgaccctgaagaagagaccccagagcatgctgaccagcgcccccgccctgctgaagaacatgagatggaagcccctggccctgcagcccctgatccccagaagccccaccagcagcgtggccacccccagcagcaccatcagcacccccaccaagagagacagcagcgccctgcaggacctgtacatcccccccccccccgccgagccctacatccccagagacgagaagggcaacctgccctgcgaggacctgagaggccacatggtgggcaagcccgtgcacaagggcagcgagagccccaacagcttcctggaccaggagtacagaaagagattcaacatcgtggaggaggacaccgtgctgtactgctacgagtacgagaagggcagaagcagcagccagggcagaagagagagcacccccacctacgagaacagcctgctgagatacatgagcaacgagaagatcgcccaggaggagtacatgttccagagaaacagcaagaaggacaccggcaagaagagcaagaagaagggcgacaagagcaacagccccacccactacagcctgctgcccagcctgcagatggacgccctgagacaggacatcatgggcacccccgtgcccgagaccaccctgtaccacaccttccagcagagcagcctgcagcacaagagcaagaagaagaacaagggccccatcgccggcaagagcaagagaagaatcagctgcaaggacctgggcagaggcgactgcgagggctggctgtggaagaagaaggacgccaagagctacttcagccagaagtggaagaagtactggttcgtgctgaaggacgccagcctgtactggtacatcaacgaggaggacgagaaggccgagggcttcatcagcctgcccgagttcaagatcgacagagccagcgagtgcagaaagaagtacgccttcaaggcctgccaccccaagatcaagagcttctacttcgccgccgagcacctggacgacatgaacagatggctgaacagaatcaacatgctgaccgccggctacgccgagagagagagaatcaagcaggagcaggactactggagcgagagcgacaaggaggaggccgacacccccagcacccccaagcaggacagccccccccccccctacgacacctaccccagaccccccagcatgagctgcgccagcccctacgtggaggccaagcacagcagactgagcagcaccgagaccagccagagccagagcagccacgaggagttcagacaggaggtgaccggcagcagcgccgtgagccccatcagaaagaccgccagccagagaagaagctggcaggacctgatcgagacccccctgaccagcagcggcctgcactacctgcagaccctgcccctggaggacagcgtgttcagcgacagcgccgccatcagccccgagcacagaagacagagcaccctgcccacccagaagtgccacctgcaggaccactacggcccctaccccctggccgagagcgagagaatgcaggtgctgaacggcaacggcggcaagcccagaagcttcaccctgcccagagacagcggcttcaaccactgctgcctgaacgcccccgtgagcgcctgcgacccccaggacgacgtgcagccccccgaggtggaggaggaggaggaggaggaggaggaggagggcgaggccgccggcgagaacatcggcgagaagagcgagagcagagaggagaagctgggcgacagcctgcaggacctgtacagagccctggagcaggccagcctgagccccctgggcgagcacagaatcagcaccaagatggagtacaagctgagcttcatcaagagatgcaacgaccccgtgatgaacgagaagctgcacagactgagaatcctgaagagcaccctgaaggccagagagggcgaggtggccatcatcgacaaggtgctggacaaccccgacctgaccagcaaggagttccagcagtggaagcagatgtacctggacctgttcctggacatctgccagaacaccaccagcaacgaccccctgagcatcagcagcgaggtggacgtgatcaccagcagcctggcccacacccacagctacatcgagacccacgtgtag

SEQ ID NO: 66327 - DNA, 2697 bp, Artificial Sequence
  derived and/or modified sequence
atggcactcatcatggagcctgtgtctaaatggagcccatcacaagtcgttgactggatgaaggggctggatgattgtctgcagcagtacataaagaactttgaaagagaaaaaatttctggcgaccagctgctgaggattacccaccaggaactagaagacttaggcgtgtccagaattggacaccaggaattgatcctcgaggccgtggacctcctgtgcgcccttaactacggcctcgaaacggaaaatttgaaaaccttgtcacacaagcttaacgcttcagccaagaatctccagaactttattacaggccgcagacgatcgggtcactatgacggtaggacctcaagaaagttacctaacgacttcttgacctcagtggtagacctcatcggagctgccaaatcattacttgcttggctggaccgctcaccttttgcggcggtaaccgattattcggtcacaagaaacaacgttatccagctgtgtttggaactcacaaccatcgtgcagcaggattgcactgtgtatgagaccgaaaataaaatcctgcatgtctgtaagaccctcagcggcgtctgcgaccatataatcagcctgagtagcgatccacttgtgtctcagtccgcccatttagaggtgatccagctggccaacatcaaacctagtgaagggttaggcatgtacattaagtctacctacgacgggttgcacgtgatcacgggtaccacggaaaacagcccggccgaccgctgcaagaagattcacgctggggacgaagtgatacaggtgaaccaccagacggttgtgggttggcaactcaaaaacctggtgaatgccctgagagaggatccctcgggtgtcatcttgacattaaagaaacgaccgcagtccatgctgacaagtgcacctgcacttttaaagaacatgaggtggaagccgttggcactccagcctctcatacccaggagtcctaccagtagcgtagccactcctagctccaccatcagcactcctaccaaacgcgacagtagcgccctgcaggatctgtatatccctcccccgcctgctgaaccctatatcccccgtgacgagaagggtaacctcccatgtgaggatttacgcggacatatggtaggtaaacctgtgcacaaaggcagcgaatctcctaactcttttctcgaccaggagtaccgaaagcggtttaacatagtggaggaggacaccgtgctctattgctacgaatacgagaagggccggtcatcaagtcagggccgcagagaatcaacaccaacttatggcaaactgcgccccatctctatgcctgtggaatataattgggtgggcgattacgaagatccgaataagatgaaacgtgacagccggcgcgagaacagccttctacgctacatgtctaacgaaaagatcgcacaagaagaatatatgttccagcggaattctaagaaagacactgggaagaaatctaaaaaaaagggagataagtctaattctccgacccactacagcctcctcccttccctgcaaatggacgccttgcgccaggatatcatggggactcctgtacctgaaaccacactgtaccacaccttccagcaaagttctctgcagcacaagagtaaaaaaaagaacaagggacccattgccggcaagtcaaagcgcaggatctcttgcaaagacctggggaggggcgattgtgagggttggctgtggaagaagaaggatgctaagtcatacttttcacagaaatggaagaagtactggtttgtcctcaaggatgctagcctgtattggtacatcaatgaagaagacgaaaaagcggaagggtttatttccttacctgagttcaagatagaccgcgcgagcgaatgtcgcaaaaaatatgcgttcaaagcctgtcaccctaaaattaaatcattctactttgcggccgaacatctggacgatatgaataggtggctaaacagaattaacatgcttacagccgggtacgcggagcgggaacgaataaaacaggagcaggactactggtccgagagcgacaaagaggaggccgatacgccttccacacccaagcaggattctccccccccaccatacgacacatacccgagacccccatctatgtcgtgtgcttccccgtatgtagaagccaaacattcacgactaagctctaccgagacctcacagtcacagagttcgcacgaggagttccggcaggaggtcaccggctctagcgcggtcagccctatcagaaagaccgctagtcagcgccgtagttggcaggacctgattgagactcccttaacaagtagtgggttgcactatctgcagacgctacccctcgaggatagcgtgtttagcgacagtgctgctatctctccagagcacaggaggcaatctaccttaccaacgcaaaagtgccacctgcaggatcattatggcccctatccccttgccgaatcagagcgcatgcaggttctgaacggtaacgggggcaaacctagatcttttaccctccctcgcgactccggcttcaaccattgttgtctgaatgctcctgtctctgcctgtgatccacaagacgatgtgcagccgccggaagtcgaagaggaggaggaggaagaggaggaggagggggaggccgcaggagaaaacattggagagaagagttag

SEQ ID NO: 66328 - DNA, 2697 bp, Artificial Sequence
  derived and/or modified sequence
atggccctgatcatggagcctgtgtccaagtggagccccagccaggtggtggactggatgaagggcctggatgactgcctgcagcagtacatcaagaactttgagcgggagaagatcagcggggaccagctgctgcgcatcacccaccaggagctggaggacctgggcgtgagccgcatcggccaccaggagctgatcctggaggccgtggacctgctgtgtgccctgaactacggcctggagacagagaacctgaagaccctgagccacaagctgaatgccagcgccaagaacctgcagaacttcatcaccggcagaagaagaagtggccactatgatggccgcaccagcaggaagctgcccaatgacttcctgacctctgtggtggacctgattggagctgccaagagcctgctggcctggctggacaggagcccctttgctgctgtgacagactacagcgtgaccagaaataatgtcatccagctgtgcctggagctgaccaccatcgtgcagcaggactgcaccgtgtatgaaacagagaacaagatcctgcacgtgtgcaagaccctgagcggcgtgtgtgaccacatcatcagcctgagcagtgaccccctggtgtcccagagcgcccacctggaggtgatccagctggccaacatcaagcccagcgagggcctgggcatgtacatcaagagcacctatgatggcctgcacgtgatcaccggcaccacagagaacagccctgctgaccgctgcaagaagatccacgccggagatgaggtgatccaggtgaaccaccagacagtggtgggctggcagctgaagaacctggtgaatgccctgcgggaggaccccagcggggtcatcctgaccctgaagaagaggccccagagcatgctgaccagcgccccagccctgctgaagaacatgcgctggaagcccctggccctgcagcccctcatccccaggagccccaccagctctgtggccacccccagcagcaccatcagcacccccaccaagagggacagcagcgccctgcaggacctgtacatccccccacctcctgctgagccctacatccccagagatgagaagggcaacctgccctgtgaggacctgcggggccacatggtgggcaagcctgtgcacaagggcagcgagagccccaacagcttcctggaccaggagtacaggaagcgcttcaacatcgtggaggaggacacagtgctgtactgctatgaatatgagaagggccgcagcagcagccagggcagaagagagagcacccccacctacggcaagctgcggcccatctccatgcctgtggagtacaactgggtgggggactatgaggaccccaacaagatgaagagggacagcagaagagagaacagcctgctgcgctacatgagcaatgagaagatcgcccaggaggagtacatgttccagaggaacagcaagaaggacaccgggaagaagagcaagaagaagggggacaagagcaacagccccacccactacagcctgctgcccagcctgcagatggatgccctgcggcaggacatcatgggcacccctgtgcctgagaccaccctgtaccacaccttccagcagagcagcctgcagcacaagagcaagaagaagaacaagggccccatcgccggcaagagcaagaggcgcatcagctgcaaggacctgggccgcggggactgtgagggctggctgtggaagaagaaggatgccaagagctacttcagccagaagtggaagaagtactggtttgtgctgaaggatgccagcctgtactggtacatcaatgaggaggatgagaaggccgagggcttcatcagcctgcctgagttcaagattgaccgggccagcgagtgcaggaagaagtatgccttcaaggcctgccaccccaagatcaagagcttctactttgctgctgagcacctggatgacatgaaccgctggctgaaccgcatcaacatgctgacagctggctacgccgagcgggagcgcatcaagcaggagcaggactactggagcgagagtgacaaggaggaggccgacacccccagcacccccaagcaggacagccccccaccaccctatgacacctaccccaggcctccttccatgagctgtgccagcccctacgtggaggccaagcacagccggctgagcagcacagagaccagccagagccagagcagccatgaggagttccggcaggaggtgacaggcagcagcgctgtgagccccatcaggaagacagccagccagaggaggtcctggcaggacctgattgagacccccctgaccagcagcggcctgcactacctgcagaccctgcccctggaggacagcgtcttcagtgacagcgctgccatcagccctgagcaccggcggcagagcaccctgcccacccagaagtgccacctgcaggaccactacggcccctaccccctggccgagagcgagaggatgcaggtgctgaatggaaatggaggcaagcccaggagcttcaccctgccccgggacagcggcttcaaccactgctgcctgaatgcccctgtgtctgcctgtgacccccaggatgatgtgcagcccccagaggtggaggaggaggaggaggaggaggaggaggagggggaggccgccggggagaacatcggggagaagagctag

SEQ ID NO: 66329 - DNA, 2697 bp, Artificial Sequence
  derived and/or modified sequence
atggccctgatcatggagcccgtgagcaagtggagccccagccaggtcgtggactggatgaaaggcttagacgactgcctacagcagtatattaagaacttcgaaagggaaaagattagtggtgaccagcttctgcgtataactcatcaggagcttgaagacctaggggtctctcgaattggacaccaggaactcatccttgaagctgtggacctactgtgcgccctgaattacggcttggaaacagagaacctgaagaccctgagtcacaagctcaatgctagtgccaagaatcttcagaattttattactggtcggagaaggtccggccactatgacgggcgtacttccaggaagcttccgaatgacttcttaaccagcgttgtggatttgatcggcgccgctaaatctcttctagcctggttagataggtccccttttgctgcagtaaccgattattccgtgaccagaaataatgtgatccagctctgcttggagctaacaacaatcgtccagcaagactgtaccgtttacgaaacagagaataaaatcctacacgtctgcaagactctcagtggcgtgtgcgatcatattatttccctgagtagcgatcctcttgtgagtcaatccgcacaccttgaggtaattcagctggctaacatcaaaccctcagaggggctgggaatgtatataaagtccacttacgatggcctccatgtcataactggaaccactgaaaacagtcccgcagaccgctgcaaaaagattcacgctggtgatgaggttatccaggtcaatcaccagacagtggttggctggcagttgaaaaacctcgtcaacgctctgcgggaggacccaagtggcgtgatcctcaccttgaaaaaaaggccgcagagtatgctgacgtctgcgccggcactcctcaaaaacatgcgttggaaacccctggccctacagcctctgattccaagaagtcccacctcatccgtcgctacaccatccagcaccatttctacacctactaagcgcgactctagcgctctgcaggatttgtacattcccccacctccagcagagccctacattccccgcgacgaaaagggaaatttgccatgcgaggacctgcgcggacacatggtgggcaagcccgtacacaaagggtctgaaagccccaatagctttctggaccaggaatataggaagcggttcaacattgtcgaagaggatacagtcctttattgttatgaatacgaaaaggggcggtcttcctcccagggcaggagagagagtacacctacttacggtaagctgcgccctatcagtatgcccgtggaatacaattgggtgggcgactatgaggatcctaataagatgaaacgagacagcagacgtgaaaatagcctcctcagatatatgtccaatgaaaagattgcacaggaggaatatatgttccagcgaaatagtaagaaagatacaggaaagaagagtaagaaaaaaggcgacaagtctaattcacccactcactacagcctgctgccctcattacagatggatgccctgcgccaggacattatgggcactccagtccccgagacaactctctatcatacttttcagcagtcctcactccaacataagtccaagaagaaaaacaaaggtccaatagccgggaagtcaaaacgccgcatctcctgtaaggacctgggccgaggggactgcgaaggctggttgtggaagaagaaggatgcaaagagctactttagtcagaagtggaaaaaatattggtttgtgttgaaggacgcttcactctactggtacatcaacgaagaggacgaaaaagcagagggattcatcagtcttcccgagtttaaaatcgacagggcgagcgaatgcagaaaaaagtacgccttcaaagcatgtcatccaaagattaagtctttttacttcgcagcggagcatctcgacgacatgaacagatggctcaaccggataaacatgctgaccgccgggtacgctgagcgcgaacggatcaagcaagaacaggattattggtcagagagcgacaaggaagaggcagatacaccttcaacacccaaacaggactcaccacccccaccctatgatacttatccgagacccccgagcatgtcatgtgcctccccatacgtagaagccaaacactccagactgtcatccactgagacgtcccaatcacagtccagccacgaggagtttcggcaggaggttaccggatccagcgctgtttctccgatcaggaagaccgcaagccagagaagatcctggcaggatctgattgagacacctctgacctcatccggactgcactatttacagacactgccccttgaggacagtgttttctcggattccgcagccatctctcccgagcaccgacgacagtctaccctacctacccagaagtgtcatctgcaggatcactacgggccatatcccctggcggagtccgaacggatgcaggtcctcaacggcaatgggggaaaaccaaggtcttttactctgcctcgtgatagcggattcaaccactgctgtctgaatgcccctgtctccgcctgtgatccacaagacgatgttcagcctccagaggtagaggaagaagaggaagaggaagaggaagagggggaagcagcgggggagaacataggcgaaaaaagctag

SEQ ID NO: 66330 - DNA, 2697 bp, Artificial Sequence
  derived and/or modified sequence
atggcgttaattatggagcctgtgagtaaatggtctccctctcaagtggtagactggatgaaaggcttggacgattgtttacaacagtacatcaagaactttgagcgggagaagatttccggggaccagctccttcgcatcacacatcaggagctggaagatcttggcgtgagcaggatcggccaccaagagttgattttggaagctgtggatcttctgtgtgccctaaactacggcctcgagactgagaatctgaagacgttgtcacacaagctcaacgcatcagcaaagaatttacagaatttcattacaggtcgccgaaggtctggacactatgatggaaggactagcagaaagctaccaaacgacttcttgacctctgtggtcgatctcatcggggcagctaaaagtcttctggcatggctggatcgttcaccattcgccgcagttacggattacagtgttacccgcaacaacgtcattcagctgtgcctcgagctgacaactatcgttcagcaggattgcacagtgtatgaaacagaaaataaaatattacatgtgtgcaaaaccctatccggcgtttgcgaccacatcatcagcttatcatcggacccactggtcagccaatctgcccacttggaggtgattcaattagccaatatcaagccaagcgaagggttggggatgtacatcaaatccacctatgatggactgcacgtcattacgggcacaacagagaatagcccagctgacaggtgcaagaaaattcatgccggtgacgaggtgatccaggtgaaccatcagaccgtagtgggctggcaactcaaaaacttggttaatgcactcagggaggatccttcaggggtaatccttacactcaaaaagaggccccaatcaatgttaacgtctgcccctgcgttgctcaagaatatgaggtggaagcctttagccctgcagcctctgatcccccgtagtccaacatcatcagtggcgacacccagtagtactatctcaacgcccacaaagagagactcctctgcccttcaggacctgtacataccgcctcccccagcagaaccatacattccacgcgacgaaaagggaaacctgccttgtgaggatctgagaggccacatggtcggaaagcccgttcataaaggtagcgaatctcctaactcctttcttgaccaggaatatcgaaaacggttcaacattgtcgaagaggatactgtgctctattgctacgagtatgaaaagggtcgctcgtcctcacaaggcaggcgcgagtctactccaacttacggtaagctccggcctatatccatgcccgttgaatacaattgggtgggcgactacgaagaccccaataaaatgaagcgcgattcacggagagagaactccctgcttcgttatatgagcaacgaaaagattgcccaagaggaatacatgtttcaaaggaactccaaaaaggatacgggtaaaaagtctaagaagaagggcgacaaatctaattctcctactcattacagcttgctgccatcgttgcagatggatgcccttaggcaagacattatgggcacacccgtaccagagaccaccctctaccacacttttcagcagagctccctccaacacaagtctaaaaagaagaataaggggcctatcgccggaaagtctaaaagaagaattagctgcaaagacctgggccgaggggactgtgaagggtggctatggaaaaaaaaggatgctaaatcctacttttctcagaaatggaagaagtactggtttgttttgaaagacgcctccctttattggtacatcaacgaggaggatgagaaagcggaaggctttatctccctccctgagttcaagatagaccgtgcctctgagtgcagaaaaaagtacgctttcaaggcctgtcaccctaaaatcaagtctttttacttcgcagctgagcacctcgacgatatgaaccggtggctcaacagaattaatatgctgacagccggatacgctgaacgggaaaggatcaagcaggaacaggattactggtcggaaagcgataaggaggaagcagatacgcctagcacccctaagcaggatagcccccctcctccatatgatacttatcctcgccctccatccatgtcatgtgcctctccctacgtggaggctaaacattcacgcctgtcctccacggagacatctcagagtcaatcctctcatgaggagtttcggcaggaggtgaccggctcctctgctgtctctcctatcaggaaaacagcatctcagagaaggtcctggcaggatctcatagaaactcctctgacctcttccggactgcattacctgcagacactgcctctggaggactctgtgttctcagacagtgcggcaatctcccccgaacacaggcgacagtcgacattaccgacacaaaaatgtcaccttcaggaccattacggcccttacccactggcggagagcgaaaggatgcaggttctcaatggaaacggtggaaagccaaggtcatttactctgccacgagacagcggtttcaatcattgttgtctcaatgcccctgtgagcgcctgtgatccgcaagacgacgtgcaaccaccggaagtcgaagaagaggaagaagaggaggaagaggagggcgaggcagctggggaaaacattggagaaaagtcatag

SEQ ID NO: 66331 - DNA, 4478 bp, Artificial Sequence
  derived and/or modified sequence
gtgctcggggcttcactcccgcgcgtgaggcgagcgggcaagttggctgagggcgtgcggcagaggctgcttccctcggcgacgcgacccctcagcaactcaagctatgaactgaagctccctagggacggagaccggagcggagcggcggaggcagcagcagcagcagcagcagcagcagcagcagcagccgccgccgccgccgccttagcgggaactgagcagacccggcgcggagccacgactcctgcacgtttacctccctgtcgccgttcctgccggcggttggctaaaagacgttacagccgcgagacccgacacacaaaagccgctttctccgcgccgcccgcccagggaggctgcggccagcaagggaccccacctgagagcagctcgggctgctgagttcgttttgtgtctgagctctgcgctctgcacggaaccgaccccgtacccatggctctgataatggaaccggtgagcaaatggtctccgagtcaagtagtggactggatgaaaggtcttgatgactgtttgcagcagtatattaagaactttgagagggagaagatcagtggggaccagctgctgcgcattacacatcaggagctagaagatctgggggtcagccgcattggccatcaggaactgatcttggaagcagttgaccttctgtgtgcattgaattatggcttggaaacagaaaatctaaaaaccctttctcacaagttgaatgcatctgccaaaaatctgcagaattttataacaggaaggagaaggagtggccattatgatgggaggaccagccgaaaattgccaaacgactttctgacctcagttgtggatctgattggagcagccaagagtctgcttgcctggttggacaggtcaccatttgctgctgtgacagactattcagttacaagaaataatgtcatacaactctgcctggagttaacaacaattgtgcaacaggattgtactgtatatgaaacagagaataaaattcttcacgtgtgtaaaactctttctggagtctgtgaccacatcatatccctgtcgtcagatcctctggtttcacagtctgctcacctggaagtgattcaactggcaaacattaaaccaagcgaagggctgggtatgtatattaaatctacatatgatggcctccatgtaattactggaaccacagaaaattcacctgcagatcggtgcaagaaaatccatgctggcgatgaagtgattcaagttaatcatcagactgtggtggggtggcagttgaaaaatttggtgaatgcactacgagaggacccgagtggtgttatcttaactttgaaaaagcgacctcagagcatgcttacctcagcaccagctttactgaaaaatatgagatggaagccccttgctctgcagcctcttatacctagaagtcccacaagcagcgttgccacgccttccagcaccatcagtacacccaccaaaagagacagttctgccctccaggatctctacattccccctcctcctgcagaaccatatattcccagggatgaaaaaggaaaccttccttgtgaagacctcagaggacatatggtgggcaagccagtgcataagggatctgaatcaccaaattcatttctggatcaggaatatcgaaagagatttaatattgtcgaagaagatactgtcttatattgctatgaatatgaaaaaggaagatcaagtagtcaaggaagacgagaaagcaccccaacttatggcaagctacgacctatatctatgccagtggaatataattgggtgggggactatgaagatccaaataagatgaagagagatagtagaagagaaaactctctacttcggtatatgagcaatgaaaagattgctcaagaagaatacatgtttcagagaaacagcaaaaaggacacagggaagaagtcaaaaaagaagggtgataagagtaatagcccaactcactattcattgctacctagtttacaaatggatgcactgagacaagacatcatgggcactcctgtgccagagaccacactataccatacatttcagcagtcctcactgcagcacaaatcaaagaagaaaaacaaaggtcctatagcaggcaagagcaaaagacgaatttcttgcaaagatcttggccgtggtgactgtgagggctggctttggaaaaagaaagatgcgaagagttacttttcacagaaatggaaaaaatattggtttgtcctaaaggatgcatccctttattggtatattaatgaggaggatgaaaaagcagaaggattcattagcctgcctgaatttaaaattgatagagccagtgaatgccgcaaaaaatatgcattcaaagcctgtcatcctaaaatcaaaagcttttattttgctgctgaacatcttgatgatatgaacaggtggcttaacagaattaatatgctgactgcaggatatgcagaaagagagaggattaagcaggaacaagattactggagtgagagtgacaaggaagaagcagatactccatcaacaccaaaacaagatagccctccacccccatatgatacatacccacgacctccctcgatgagttgcgccagtccttatgtggaagcaaaacatagccgactttcctccacggagacttctcagtctcagtcttctcatgaggagtttcgccaggaagtaactgggagcagtgcagtgtctcccattcgcaagacagccagtcagcgccgctcctggcaggatttaattgagacgccactgacaagttcaggcttacactatcttcagactctgcccctggaggattctgtcttctctgactccgcggccatctccccagagcacaggcggcagtctaccctgccaactcagaaatgccacctgcaggatcactatgggccataccccttagctgagagtgagaggatgcaagtgctaaatggaaatgggggcaagcctcgaagttttactctgcctcgagatagcgggttcaaccattgctgtctgaatgctccagttagtgcctgtgacccacaggatgacgtgcaacccccagaggtggaggaagaggaggaggaggaggaggaggaaggggaggcagcaggggaaaacataggagaaaaaagctaatacactgcgagagttggtagaacctctccatgccaaatcggatccacttctgttggcactcaacccattggactcacagattgataagctaatgtttagagaatttagatcggagagagtcggtacggcgcagactcaacatcaacctcttgcaagcaactaaaatggcctcgtccttgctgtttataacagaaaacagacttgtaaaaagcttagatcatcaagtgttttggattgggggcctcccaaagggatataagaggggcaggccactcttaagaagaatgcgagctttctacattgggactagcataagatcaaagccaatcaagatggagcacagtaacagaaaactgcggtttctgtgggagaacagaaggggaaagggtcttaactgggaaagggctctgtgtggtaacacctcagttgtgttctcctgacaccaggaaaagagagggatcagcttcaataactagaaaattctggctgtttaatggactctttggtggcctctttaaggcaaagcagagaaagcaaattatgtattaagtgtattttgcatttttaaaacttgacgtgctgtattgtactaaattaagtgtaatctattaaggcaaggtatacacaatttgctttgaaacttactatgtttattctattataaagtgtattcaggtgcaacacagagactgctttcggtgacattaatgaagaaaatttctcatgccaggctttattatagaatcttcagctaaaatcctaactttctccttatttcttggcacttgtatacaagtggtgttgcctcttagggcaggcatgagctattcttttctgtaaaatattttgaatctataggctgtgggtttcatttttgaaaagtattttgtctggatgtctttcaaactagcttcagatattatttaatactatgtaactgggtcccctatggctcaatcaatattgcttatttttcttctgtagtggatgtgaaatttcctttagttggataagatacactgtaataattttaatgctaattaatgatatttcatactgtgcaatgaacagataatttaacactgtattttgaaatgtttttttcttcctgtcaccgcagtgtgtggtattgcataatgtgaatacctgtaaaaatataaattacttaaaaataaaaatatgaccaattggtatcagatcttttcagatagctaaataatttgctaagtatgcctgatagtaaatatctttctaaaaagaagtaatcagtgcttctttctcacaaatggaatttgtgtctgtgaataaaatcacattgatctgcc

SEQ ID NO: 66332 - DNA, 2697 bp, Artificial Sequence
  derived and/or modified sequence
atggccctgatcatggagcccgtgagcaagtggagccccagccaggtggtggactggatgaagggcctggacgactgcctgcagcagtacatcaagaacttcgagagagagaagatcagcggcgaccagctgctgagaatcacccaccaggagctggaggacctgggcgtgagcagaatcggccaccaggagctgatcctggaggccgtggacctgctgtgcgccctgaactacggcctggagaccgagaacctgaagaccctgagccacaagctgaacgccagcgccaagaacctgcagaacttcatcaccggcagaagaagaagcggccactacgacggcagaaccagcagaaagctgcccaacgacttcctgaccagcgtggtggacctgatcggcgccgccaagagcctgctggcctggctggacagaagccccttcgccgccgtgaccgactacagcgtgaccagaaacaacgtgatccagctgtgcctggagctgaccaccatcgtgcagcaggactgcaccgtgtacgagaccgagaacaagatcctgcacgtgtgcaagaccctgagcggcgtgtgcgaccacatcatcagcctgagcagcgaccccctggtgagccagagcgcccacctggaggtgatccagctggccaacatcaagcccagcgagggcctgggcatgtacatcaagagcacctacgacggcctgcacgtgatcaccggcaccaccgagaacagccccgccgacagatgcaagaagatccacgccggcgacgaggtgatccaggtgaaccaccagaccgtggtgggctggcagctgaagaacctggtgaacgccctgagagaggaccccagcggcgtgatcctgaccctgaagaagagaccccagagcatgctgaccagcgcccccgccctgctgaagaacatgagatggaagcccctggccctgcagcccctgatccccagaagccccaccagcagcgtggccacccccagcagcaccatcagcacccccaccaagagagacagcagcgccctgcaggacctgtacatcccccccccccccgccgagccctacatccccagagacgagaagggcaacctgccctgcgaggacctgagaggccacatggtgggcaagcccgtgcacaagggcagcgagagccccaacagcttcctggaccaggagtacagaaagagattcaacatcgtggaggaggacaccgtgctgtactgctacgagtacgagaagggcagaagcagcagccagggcagaagagagagcacccccacctacggcaagctgagacccatcagcatgcccgtggagtacaactgggtgggcgactacgaggaccccaacaagatgaagagagacagcagaagagagaacagcctgctgagatacatgagcaacgagaagatcgcccaggaggagtacatgttccagagaaacagcaagaaggacaccggcaagaagagcaagaagaagggcgacaagagcaacagccccacccactacagcctgctgcccagcctgcagatggacgccctgagacaggacatcatgggcacccccgtgcccgagaccaccctgtaccacaccttccagcagagcagcctgcagcacaagagcaagaagaagaacaagggccccatcgccggcaagagcaagagaagaatcagctgcaaggacctgggcagaggcgactgcgagggctggctgtggaagaagaaggacgccaagagctacttcagccagaagtggaagaagtactggttcgtgctgaaggacgccagcctgtactggtacatcaacgaggaggacgagaaggccgagggcttcatcagcctgcccgagttcaagatcgacagagccagcgagtgcagaaagaagtacgccttcaaggcctgccaccccaagatcaagagcttctacttcgccgccgagcacctggacgacatgaacagatggctgaacagaatcaacatgctgaccgccggctacgccgagagagagagaatcaagcaggagcaggactactggagcgagagcgacaaggaggaggccgacacccccagcacccccaagcaggacagccccccccccccctacgacacctaccccagaccccccagcatgagctgcgccagcccctacgtggaggccaagcacagcagactgagcagcaccgagaccagccagagccagagcagccacgaggagttcagacaggaggtgaccggcagcagcgccgtgagccccatcagaaagaccgccagccagagaagaagctggcaggacctgatcgagacccccctgaccagcagcggcctgcactacctgcagaccctgcccctggaggacagcgtgttcagcgacagcgccgccatcagccccgagcacagaagacagagcaccctgcccacccagaagtgccacctgcaggaccactacggcccctaccccctggccgagagcgagagaatgcaggtgctgaacggcaacggcggcaagcccagaagcttcaccctgcccagagacagcggcttcaaccactgctgcctgaacgcccccgtgagcgcctgcgacccccaggacgacgtgcagccccccgaggtggaggaggaggaggaggaggaggaggaggagggcgaggccgccggcgagaacatcggcgagaagagctag

SEQ ID NO: 66333 - DNA, 2550 bp, Artificial Sequence
  derived and/or modified sequence
atggcactgatcatggagcctgtgtcaaagtggtcacccagccaggtcgtggattggatgaagggcctcgacgactgtcttcagcaatatattaaaaacttcgagcgggagaagatcagcggcgatcaacttctccgaatcacccatcaggagcttgaagatcttggcgtgtcgcggatcggtcaccaggaactcatcttggaagccgtcgacctcctctgcgccctgaactacggcctcgagaccgaaaatctgaagactctgagccataaacttaatgcttccgcaaagaacctgcagaacttcatcaccggcagaagacggagcggacactatgatgggcgcacttcaagaaagttgcctaatgattttttgacctctgtcgtggacttgataggtgccgccaagtctttgctggcctggttggaccgttcgccattcgccgcggtcaccgattatagcgtcacacgcaacaatgtgatccaactgtgtttagaactaaccactatagtacagcaagactgtaccgtgtacgagaccgagaataagatccttcacgtctgcaaaacactcagcggcgtgtgtgatcacatcatcagtctatcttctgaccccctggtctctcaatcggcccacttggaggtgatccagctagccaatattaaaccgtcagaaggcctaggaatgtatatcaagtcgacttacgatggtctgcacgttattaccggcactaccgagaacagtcccgcggatcgctgcaagaagattcatgccggggacgaggttattcaagtgaatcatcagacagtgccgttgattccgaggagccctacatcaagcgtggctacaccatcctcgactatatctacccccaccaaacgagattcctcagcactgcaagatctgtacattccccctccccccgctgagccatatatcccgagggacgagaagggcaacctgccgtgcgaagaccttcgtggccacatggtcggtaagcccgtgcacaagggctccgaaagtcccaatagtttcttggaccaggaataccgcaaacggttcaatattgtcgaggaggacactgtgctctattgttacgagtacgagaagggacgcagcagctcgcagggtcggagggagagcaccccgacgtatggaaagttgcgtcctatctcaatgcctgtcgagtataactgggtaggcgactatgaggatcctaataagatgaagcgtgattccagacgcgagaattctctgctgagatatatgtccaatgagaaaatcgcgcaagaggagtacatgtttcagcgtaacagtaaaaaagataccggcaagaaatccaaaaagaaaggagacaagtctaatagtcctactcattacagtctactgcccagtctgcagatggatgctctgagacaagacataatgggcaccccagttcctgaaacgacgctgtatcacacatttcagcagagtagcctgcagcataagtccaagaaaaaaaataaaggacctatcgctggtaaaagcaaaagacgaatttcttgcaaggacctgggacgaggggactgcgagggttggctgtggaagaaaaaagacgcaaaaagctatttcagtcagaaatggaaaaaatactggtttgtgttgaaagacgctagtctgtactggtatatcaatgaggaagatgaaaaagcagagggctttatctccctgcccgaatttaagatagatcgcgctagcgaatgtcgcaaaaagtatgctttcaaggcctgccatcctaaaatcaagagcttctatttcgccgctgagcacctcgatgacatgaacaggtggctgaacaggattaacatgctcaccgcaggctacgctgaaagggaacgaataaaacaagaacaggattactggtctgagagcgataaagaagaggcagacacaccatccactcctaaacaggactctccacccccaccatatgatacttatcctcggcctccctctatgtcatgtgcgagcccttacgtcgaagcgaaacattctcggctgtcctcaaccgaaactagccaatctcagtcttcccatgaggagtttcgccaagaggtgaccggttcttcagccgtgtctcccattcgcaagaccgccagccagaggagaagctggcaggatctgatcgaaaccccactcactagcagtggcctgcactatttacagaccctgccattggaagattcagtgttctcagattccgcagcaatctcaccagagcatcggcgccagagtacactcccaacgcaaaagtgccacctgcaggaccactatggcccttatccactagcagaatcggaaaggatgcaggtgctgaatggtaacggcggaaaaccccggtcatttactctccctcgtgactcagggtttaaccactgctgcctcaacgcccccgttagcgcatgcgaccctcaagacgacgtccagccgccagaggtggaagaggaagaggaagaagaagaagaggagggcgaggccgccggagaaaacatcggggagaaatcctag

SEQ ID NO: 66334 - DNA, 2550 bp, Artificial Sequence
  derived and/or modified sequence
atggccctgatcatggagcctgtgtccaagtggagccccagccaggtggtggactggatgaagggcctggatgactgcctgcagcagtacatcaagaactttgagcgggagaagatcagcggggaccagctgctgcgcatcacccaccaggagctggaggacctgggcgtgagccgcatcggccaccaggagctgatcctggaggccgtggacctgctgtgtgccctgaactacggcctggagacagagaacctgaagaccctgagccacaagctgaatgccagcgccaagaacctgcagaacttcatcaccggcagaagaagaagtggccactatgatggccgcaccagcaggaagctgcccaatgacttcctgacctctgtggtggacctgattggagctgccaagagcctgctggcctggctggacaggagcccctttgctgctgtgacagactacagcgtgaccagaaataatgtcatccagctgtgcctggagctgaccaccatcgtgcagcaggactgcaccgtgtatgaaacagagaacaagatcctgcacgtgtgcaagaccctgagcggcgtgtgtgaccacatcatcagcctgagcagtgaccccctggtgtcccagagcgcccacctggaggtgatccagctggccaacatcaagcccagcgagggcctgggcatgtacatcaagagcacctatgatggcctgcacgtgatcaccggcaccacagagaacagccctgctgaccgctgcaagaagatccacgccggagatgaggtgatccaggtgaaccaccagacagtgcccctcatccccaggagccccaccagctctgtggccacccccagcagcaccatcagcacccccaccaagagggacagcagcgccctgcaggacctgtacatccccccacctcctgctgagccctacatccccagagatgagaagggcaacctgccctgtgaggacctgcggggccacatggtgggcaagcctgtgcacaagggcagcgagagccccaacagcttcctggaccaggagtacaggaagcgcttcaacatcgtggaggaggacacagtgctgtactgctatgaatatgagaagggccgcagcagcagccagggccggcgggagagcacccccacctacggcaagctgcggcccatctccatgcctgtggagtacaactgggtgggggactatgaggaccccaacaagatgaagagggacagccggcgggagaacagcctgctgcgctacatgagcaatgagaagatcgcccaggaggagtacatgttccagaggaacagcaagaaggacaccgggaagaagagcaagaagaagggggacaagagcaacagccccacccactacagcctgctgcccagcctgcagatggatgccctgcggcaggacatcatgggcacccctgtgcctgagaccaccctgtaccacaccttccagcagagcagcctgcagcacaagagcaagaagaagaacaagggccccatcgccggcaagagcaagaggcgcatcagctgcaaggacctgggccgcggggactgtgagggctggctgtggaagaagaaggatgccaagagctacttcagccagaagtggaagaagtactggtttgtgctgaaggatgccagcctgtactggtacatcaatgaagaagatgagaaggccgagggcttcatcagcctgcctgagttcaagattgaccgggcctctgaatgtaggaagaagtatgccttcaaggcctgccaccccaagatcaagagcttctactttgctgctgagcacctggatgacatgaaccgctggctgaaccgcatcaacatgctgacagctggctatgcagagcgggagcgcatcaagcaggagcaggactactggagcgagagtgacaaggaggaggccgacacccccagcacccccaagcaggacagccccccaccaccctatgacacctacccccggccccccagcatgagctgtgccagcccctacgtggaggccaagcacagccggctgagcagcacagagaccagccagagccagagcagccatgaggagttccggcaggaggtgacaggcagcagcgctgtgagccccatcaggaagacagccagccagaggaggtcctggcaggacctgattgagacccccctgaccagcagcggcctgcactacctgcagaccctgcccctggaggacagcgtcttcagtgacagcgctgccatcagccctgagcaccggcggcagagcaccctgcccacccagaagtgccacctgcaggaccactacggcccctaccccctggccgagagcgagaggatgcaggtgctgaatggaaatggaggcaagcccaggagcttcaccctgccccgggacagcggcttcaaccactgctgcctgaatgcccctgtgtctgcctgtgacccccaggatgatgtgcagcccccagaggtggaggaggaggaggaggaggaggaggaggagggggaggccgctggagaaaatattggagagaagagctag

SEQ ID NO: 66335 - DNA, 2550 bp, Artificial Sequence
  derived and/or modified sequence
atggccctgatcatggagcccgtgagcaagtggagccccagccaggttgtcgactggatgaaaggactggacgattgcttgcagcagtatattaagaactttgaacgtgaaaagataagcggagaccagctgctacgaattacacaccaggagctggaagatcttggcgtgagtcggatcggccaccaggagctgatccttgaagctgtggacctcctgtgtgccctgaactacggcctggaaaccgagaatctgaaaactctgtctcacaagctcaacgccagtgctaaaaacctgcagaatttcatcactggtcggcggaggagtggccactacgatggtaggaccagtcggaagctgccaaacgattttctaacgagtgtcgtggatctgattggtgctgccaagagtcttttggcctggctcgacaggtctccattcgctgccgttaccgattacagcgtgacacgcaataatgtgattcaactctgcctggagctaacgacaatcgtacagcaagactgcacggtctatgaaactgagaataaaatattacatgtgtgcaagactctgagcggagtttgcgatcacattatcagcctctcgtctgatccccttgtctcacagagcgcgcacctggaagtcattcagctggcaaacattaagccctccgaaggcttaggcatgtatataaagagcacttatgatgggctccatgttattaccgggacgacagagaactcacccgcagaccgctgcaagaagattcacgcgggggatgaagtgatccaagtgaatcatcaaactgtcccactgatcccgcggtccccaacaagttccgtggcaaccccctcttccaccatctcaacccccacaaaacgcgactcctcggcgctccaggatctatatattccacctcctcctgccgagccgtatattccgcgcgatgagaaaggcaacttaccttgcgaagatctccggggccacatggttggaaagcctgtgcacaaaggatcagagtctcccaatagcttcctcgaccaagaataccgcaagcggttcaatattgtggaagaagataccgtattgtactgctatgagtacgagaagggccggtccagtagccaaggacggagagaatcaactccaacgtacggtaagctgcgcccgatctctatgcctgttgaatacaattgggtcggagactacgaggaccctaacaaaatgaagagggactctaggcgtgagaactctttgctccgctacatgtccaatgaaaaaatcgcccaggaagagtatatgttccaaagaaacagtaaaaaagatactggcaaaaagtccaagaagaaaggagataagtctaactcacccacacattattccctcctcccttcgctgcaaatggacgcactgaggcaagatatcatggggactccagtacctgagaccacactttaccatacattccaacagtcttcgctgcagcacaagtcgaagaaaaagaacaaagggcccattgcaggcaagagcaaaaggagaatcagctgcaaggacttgggtaggggtgattgtgaaggctggctgtggaagaagaaggacgccaaatcctacttttcccaaaagtggaaaaagtattggttcgttctgaaagatgctagcctttattggtatataaatgaggaggatgagaaggctgaagggtttatttccctccccgagttcaagatcgaccgcgcatctgagtgtagaaagaagtatgcatttaaggcttgtcaccctaagatcaagtccttttattttgccgccgaacatctggacgacatgaatcggtggctgaacaggattaacatgctgactgccgggtacgctgaacgtgaaagaataaagcaggaacaggattactggtctgaatcagataaggaggaagctgataccccttctactcccaagcaggattcccctccgccaccctacgacacctatccacggcccccttcaatgagttgcgcttctccctatgtggaggccaagcactcccgcctcagttcaaccgagacatcccagtcacagagctcacacgaggagtttaggcaggaggtaacagggagtagcgctgtgagtccaattaggaaaacagcttcccagagaagatcttggcaggacctcattgagactcccctgacaagctccggcctgcattatcttcagactcttcccctcgaagacagcgtgttttccgatagtgctgccattagcccagaacaccggagacagagcaccttacctactcagaaatgccacctgcaggatcattatggcccatatccactggcggagagtgagaggatgcaagtgctaaatggaaacgggggcaagccccggtctttcacactaccccgggactctggtttcaatcactgctgcctaaacgcccccgtgagcgcttgcgacccccaggacgatgtgcagccacccgaagtggaagaggaagaggaggaggaggaggaggaaggagaagcagcaggagaaaatataggtgagaagtcttag

SEQ ID NO: 66336 - DNA, 2550 bp, Artificial Sequence
  derived and/or modified sequence
atggcacttataatggaacctgttagcaagtggagtcccagccaggtcgtcgattggatgaagggactggatgattgcctgcaacaatatataaaaaattttgagcgcgaaaagatttccggggaccagctgcttaggattacacatcaagaactggaagacttgggggtatcacggattggacatcaggaactcattctcgaggcggtagacctgctgtgtgctctgaactacggcttggagacggaaaatctgaagaccctgagccacaaactgaatgcgtcggccaagaatttgcagaacttcattacagggagacgcagatctggtcactatgacggacggacatctcgaaagctcccgaacgactttcttacaagcgttgtcgacctgattggtgctgctaaaagcctactcgcctggcttgatagatccccctttgccgctgtgactgattatagcgttaccaggaacaatgtaattcagctgtgcctcgagctcactaccattgtgcagcaggactgtacggtatacgagacagaaaataagatcttacacgtgtgcaagactctgagtggggtctgtgatcacatcatcagcctaagctccgacccgctggtgtcccaatctgcccacctggaggtaatccagctcgccaatatcaagccctcagagggactgggcatgtacattaagtccacctacgatggattgcacgtgataactggcactaccgaaaactcccccgctgatagatgtaaaaaaattcacgccggagatgaagtaattcaggtgaaccaccagaccgtacctctgattccccgttctccaacatcgtcagtggcaaccccctcctccaccatctcaacacctacaaagcgcgactcgtcggcactgcaggacctatatatcccaccaccacctgccgagccatacattcctagagacgaaaagggaaacctgccttgcgaggatttgcgagggcatatggtgggcaagccagtacacaagggtagcgagagtccaaattcttttctagaccaggagtaccgtaaaaggtttaatattgtagaagaagacacagtcttatattgttatgagtatgagaagggcagatcctccagtcagggacgcagagaatccacgccaacatatgggaagctgagacctattagtatgccagtggaatacaactgggtgggagactacgaggatccgaataagatgaagagggattcaaggcgtgaaaattccctcctccgttacatgagcaacgagaaaattgctcaagaggaatacatgttccaaaggaattccaagaaggatactggcaagaagtccaaaaaaaagggcgataagtctaacagtcccacacactactccctactaccgtcgctccagatggatgctctgcggcaggacatcatgggaacccctgtcccagagactacattgtaccataccttccagcagtcaagcctccaacataaatccaaaaagaagaataaggggcctatcgcaggcaagtctaaaagaaggatctcctgtaaagacttagggcgaggggactgcgagggctggctgtggaaaaagaaggacgccaaatcatacttctctcagaagtggaaaaaatattggttcgtcctcaaggacgcctcgctctactggtatatcaacgaggaggatgagaaggctgagggtttcataagcctgcctgagtttaagatagacagagctagtgagtgtcgaaagaaatacgccttcaaggcctgtcatcccaaaattaagagcttctactttgctgcggagcacctggacgatatgaaccgctggctgaatcgtatcaacatgttaacagcagggtacgctgaacgggagcgtattaagcaggaacaggactattggagtgaaagcgataaagaagaggcggacaccccttccaccccaaagcaggattccccaccacccccatatgacacctatccacggcctccatctatgtcttgcgctagcccctatgtggaggccaagcactcacgcctctcttccacagagacatcccagtcccaatcatcccatgaggagttcaggcaagaggtaacaggtagctccgctgtctctcctatccggaagacggcaagtcagcgcaggagctggcaagatctcattgaaacccctctcacatctagcggcctgcactacctgcagactctgccgttagaggattccgtgtttagtgattctgctgccatctcccccgagcaccggcgacaaagcacactgcctactcaaaagtgtcaccttcaggaccattatgggccttatcctctggctgagagcgaacgcatgcaggtcctgaacggaaacgggggtaagccacgcagtttcactctccctcgcgacagcggatttaaccattgctgtctgaacgccccagtgtcagcctgcgatcctcaagacgacgtacagcccccagaagtggaggaagaagaagaagaggaggaagaggaaggagaggcagctggagagaatatcggtgaaaagtcctag

SEQ ID NO: 66337 - DNA, 2550 bp, Artificial Sequence
  derived and/or modified sequence
atggccctgatcatggagcccgtgagcaagtggagccccagccaggtggtggactggatgaagggcctggacgactgcctgcagcagtacatcaagaacttcgagagagagaagatcagcggcgaccagctgctgagaatcacccaccaggagctggaggacctgggcgtgagcagaatcggccaccaggagctgatcctggaggccgtggacctgctgtgcgccctgaactacggcctggagaccgagaacctgaagaccctgagccacaagctgaacgccagcgccaagaacctgcagaacttcatcaccggcagaagaagaagcggccactacgacggcagaaccagcagaaagctgcccaacgacttcctgaccagcgtggtggacctgatcggcgccgccaagagcctgctggcctggctggacagaagccccttcgccgccgtgaccgactacagcgtgaccagaaacaacgtgatccagctgtgcctggagctgaccaccatcgtgcagcaggactgcaccgtgtacgagaccgagaacaagatcctgcacgtgtgcaagaccctgagcggcgtgtgcgaccacatcatcagcctgagcagcgaccccctggtgagccagagcgcccacctggaggtgatccagctggccaacatcaagcccagcgagggcctgggcatgtacatcaagagcacctacgacggcctgcacgtgatcaccggcaccaccgagaacagccccgccgacagatgcaagaagatccacgccggcgacgaggtgatccaggtgaaccaccagaccgtgcccctgatccccagaagccccaccagcagcgtggccacccccagcagcaccatcagcacccccaccaagagagacagcagcgccctgcaggacctgtacatcccccccccccccgccgagccctacatccccagagacgagaagggcaacctgccctgcgaggacctgagaggccacatggtgggcaagcccgtgcacaagggcagcgagagccccaacagcttcctggaccaggagtacagaaagagattcaacatcgtggaggaggacaccgtgctgtactgctacgagtacgagaagggcagaagcagcagccagggcagaagagagagcacccccacctacggcaagctgagacccatcagcatgcccgtggagtacaactgggtgggcgactacgaggaccccaacaagatgaagagagacagcagaagagagaacagcctgctgagatacatgagcaacgagaagatcgcccaggaggagtacatgttccagagaaacagcaagaaggacaccggcaagaagagcaagaagaagggcgacaagagcaacagccccacccactacagcctgctgcccagcctgcagatggacgccctgagacaggacatcatgggcacccccgtgcccgagaccaccctgtaccacaccttccagcagagcagcctgcagcacaagagcaagaagaagaacaagggccccatcgccggcaagagcaagagaagaatcagctgcaaggacctgggcagaggcgactgcgagggctggctgtggaagaagaaggacgccaagagctacttcagccagaagtggaagaagtactggttcgtgctgaaggacgccagcctgtactggtacatcaacgaggaggacgagaaggccgagggcttcatcagcctgcccgagttcaagatcgacagagccagcgagtgcagaaagaagtacgccttcaaggcctgccaccccaagatcaagagcttctacttcgccgccgagcacctggacgacatgaacagatggctgaacagaatcaacatgctgaccgccggctacgccgagagagagagaatcaagcaggagcaggactactggagcgagagcgacaaggaggaggccgacacccccagcacccccaagcaggacagccccccccccccctacgacacctaccccagaccccccagcatgagctgcgccagcccctacgtggaggccaagcacagcagactgagcagcaccgagaccagccagagccagagcagccacgaggagttcagacaggaggtgaccggcagcagcgccgtgagccccatcagaaagaccgccagccagagaagaagctggcaggacctgatcgagacccccctgaccagcagcggcctgcactacctgcagaccctgcccctggaggacagcgtgttcagcgacagcgccgccatcagccccgagcacagaagacagagcaccctgcccacccagaagtgccacctgcaggaccactacggcccctaccccctggccgagagcgagagaatgcaggtgctgaacggcaacggcggcaagcccagaagcttcaccctgcccagagacagcggcttcaaccactgctgcctgaacgcccccgtgagcgcctgcgacccccaggacgacgtgcagccccccgaggtggaggaggaggaggaggaggaggaggaggagggcgaggccgccggcgagaacatcggcgagaagagctag

SEQ ID NO: 66338 - protein, 396 aa, Artificial Sequence
  derived and/or modified sequence
MATRVEEAARGRGGGAEEATEAGRGGRRRSPRQKLEESRSVQKQMKILQKKQAQIVKEKVHLQSEHSKAILARSKLESLCRELQRHNKTLKEENMQQAREEEERRKEATAHFQITLNEIQAQLEQHDIHNAKLRQENIELGEKLKKLIEQYALREEHIDKVFKHKELQQQLVDAKLQQTTQLIKEADEKHQREREFLLKEATESRHKYEQMKQQEVQLKQQLSLYMDKFEEFQTTMAKSNELFTTFRQEMEKMTKKIKKLEKETIIWRTKWENNNKALLQMAEEKTVRDKEYKALQIKLERLEKLCRALQTERNELNEKVEVLKEQVSIKAAIKAANRDLATPVMQPCTALDSHKELNTSSKRALGAHLEAEPKSQRSAVQKPPSTGSAPAIESVD

SEQ ID NO: 66339 - protein, 181 aa, Artificial Sequence
  derived and/or modified sequence
MKQEEAQLKEQLFLYMDKFEEFQTTMAKTNELFTAFKQETEKLTKKIKKLEKEMVIWYTKWENNNTTLLQMAEEKTIRDKNYKVFQIKLERLEKLYKALQIERNELSEKLGILKGQVSVKVADVDLAVPVTHSCADLDSSNMLNTSSKRAPGVHLEADPKGMNEVKCYSKALSTGSPLGID

SEQ ID NO: 66340 - DNA, 1191 bp, Artificial Sequence
  derived and/or modified sequence
atggccaccagagtggaggaggccgccagaggcagaggcggcggcgccgaggaggccaccgaggccggcagaggcggcagaagaagaagccccagacagaagctggaggagagcagaagcgtgcagaagcagatgaagatcctgcagaagaagcaggcccagatcgtgaaggagaaggtgcacctgcagagcgagcacagcaaggccatcctggccagaagcaagctggagagcctgtgcagagagctgcagagacacaacaagaccctgaaggaggagaacatgcagcaggccagagaggaggaggagagaagaaaggaggccaccgcccacttccagatcaccctgaacgagatccaggcccagctggagcagcacgacatccacaacgccaagctgagacaggagaacatcgagctgggcgagaagctgaagaagctgatcgagcagtacgccctgagagaggagcacatcgacaaggtgttcaagcacaaggagctgcagcagcagctggtggacgccaagctgcagcagaccacccagctgatcaaggaggccgacgagaagcaccagagagagagagagttcctgctgaaggaggccaccgagagcagacacaagtacgagcagatgaagcagcaggaggtgcagctgaagcagcagctgagcctgtacatggacaagttcgaggagttccagaccaccatggccaagagcaacgagctgttcaccaccttcagacaggagatggagaagatgaccaagaagatcaagaagctggagaaggagaccatcatctggagaaccaagtgggagaacaacaacaaggccctgctgcagatggccgaggagaagaccgtgagagacaaggagtacaaggccctgcagatcaagctggagagactggagaagctgtgcagagccctgcagaccgagagaaacgagctgaacgagaaggtggaggtgctgaaggagcaggtgagcatcaaggccgccatcaaggccgccaacagagacctggccacccccgtgatgcagccctgcaccgccctggacagccacaaggagctgaacaccagcagcaagagagccctgggcgcccacctggaggccgagcccaagagccagagaagcgccgtgcagaagccccccagcaccggcagcgcccccgccatcgagagcgtggactag

SEQ ID NO: 66341 - DNA, 1191 bp, Artificial Sequence
  derived and/or modified sequence
atggccaccagagttgaggaggctgcccgcggaagaggcggtggcgcagaagaagcaacagaagccggcaggggcgggaggaggcgatccccgcgccagaaacttgaagagtccaggtctgtccaaaaacaaatgaagatcctgcagaaaaaacaggcacagattgttaaggaaaaggtgcaccttcagtcagagcactcaaaggccatactggccagatccaaactagaatccttgtgtagggagctacagaggcataataagactctgaaagaggagaatatgcaacaggccagggaagaggaagaaagacgtaaagaagccacagcccattttcaaatcacactcaatgaaatccaggcacagcttgagcagcatgatattcacaatgccaagttgaggcaggagaatatcgagctaggcgagaagctcaagaaactgatcgagcagtatgccctgcgtgaggagcatatcgacaaggtctttaaacataaagaactgcaacaacagctggtggacgcaaaattacagcagacgacacagctcattaaagaagcagatgagaagcatcagagggaacgcgagttcctactgaaagaggctacagaatctcggcacaaatacgagcagatgaaacaacaggaagtgcagctgaagcagcaactgagcctctatatggacaaatttgaggaatttcagacaacaatggcgaaaagtaatgaattatttacgacttttcgccaggaaatggaaaagatgacgaaaaagatcaaaaagctagaaaaggagactatcatttggcggactaaatgggagaataacaacaaggcgttactgcagatggctgaagagaaaaccgtgcgggacaaagagtataaagctctgcaaataaagctggagagactagaaaagctttgtcgggccctgcaaactgagcgaaacgagctcaatgagaaggtagaagtgctgaaagagcaagtcagcattaaagcagccattaaggcagccaatagagatttagcaacccccgtgatgcagccatgtacagcattggacagtcacaaggagttgaacacatcctctaaacgagccctgggagctcatctggaggcagaacctaagtcacagagatcagctgtgcagaagccgccgagtactggaagcgctcctgcaattgagagcgtggattag

SEQ ID NO: 66342 - DNA, 1191 bp, Artificial Sequence
  derived and/or modified sequence
atggccaccagggtggaggaggccgcccggggccggggcggcggcgctgaggaggccacagaggccggccggggcggcagaagaagaagcccccggcagaagctggaggagagccgctctgtgcagaagcagatgaagatcctgcagaagaagcaggcccagatcgtgaaggagaaggtgcacctgcagagcgagcacagcaaggccatcctggcccggagcaagctggagagcctgtgccgggagctgcagaggcacaacaagaccctgaaggaggagaacatgcagcaggcccgggaggaggaggagaggaggaaggaggccacagcccacttccagatcaccctgaatgagatccaggcccagctggagcagcacgacatccacaatgccaagctgcggcaggagaacatcgagctgggggagaagctgaagaagctgattgagcagtatgccctgcgggaggagcacatcgacaaggtgttcaagcacaaggagctgcagcagcagctggtggatgccaagctgcagcagaccacccagctgatcaaggaggctgatgagaagcaccagcgggagcgggagttcctgctgaaggaggccacagagagccgccacaagtatgagcagatgaagcagcaggaggtgcagctgaagcagcagctgagcctgtacatggacaagtttgaggagttccagaccaccatggccaagagcaatgagctgttcaccaccttccggcaggagatggagaagatgaccaagaagatcaagaagctggagaaggagaccatcatctggaggaccaagtgggagaacaacaacaaggccctgctgcagatggccgaggagaagacagtgcgggacaaggagtacaaggccctgcagatcaagctggagcggctggagaagctgtgccgggccctgcagacagaaagaaatgagctgaatgagaaggtggaggtgctgaaggagcaggtgtccatcaaggccgccatcaaggccgccaacagagacctggccacccctgtgatgcagccctgcacagccctggacagccacaaggagctgaacaccagcagcaagagggccctgggcgcccacctggaggccgagcccaagagccagaggtctgctgtgcagaagccacccagcacaggcagcgccccagccatcgagagcgtggactag

SEQ ID NO: 66343 - DNA, 3998 bp, Artificial Sequence
  derived and/or modified sequence
cctgcgagattctgtgccccttgtcgggccgcttgtttggctgctgccgtcacctcatggcgacgcgggtagaggaggcagcgcggggaagaggcggcggcgccgaagaggcgactgaggccggacggggcggacggcgacgcagcccgcggcagaagctggaggagagcaggagtgttcagaagcaaatgaagatcctgcagaagaagcaagcccagattgtgaaagagaaagttcacttgcagagtgaacatagcaaggctatcttggcaagaagcaagctagaatctctttgcagagaacttcagcgtcacaataagacgttaaaggaggaaaatatgcagcaggcacgagaggaagaagaacgacgtaaagaagcaactgcacatttccagattaccttaaatgaaattcaagcccagctggagcagcatgacatccacaacgccaaactccgacaggaaaacattgagctgggggagaagctaaagaagctcatcgaacagtacgcactgagggaagagcacattgataaggtgttcaaacataaggaactgcaacagcagctcgtggatgccaaactgcagcaaacgacacaactgataaaagaagctgatgaaaaacatcagagagagagagagtttttattaaaagaagcgacagaatcgaggcacaaatacgaacaaatgaaacagcaagaagtacaactaaaacagcagctttctctttatatggataagtttgaagaattccagactaccatggcaaaaagcaatgaactgtttacaaccttcagacaggaaatggaaaagatgacaaagaaaattaaaaaactggaaaaagaaacaataatttggcgtaccaaatgggaaaacaataataaagcacttctgcaaatggctgaagagaaaacagtccgtgataaagagtacaaggcccttcaaataaaactggaacggttagagaagctgtgcagggctcttcagacagaaaggaatgagctcaatgagaaggtggaagtcctgaaagagcaggtatccatcaaagcggccatcaaagcggcgaacagggatttagcaacacctgtgatgcagccctgtactgccctggattctcacaaggagctgaacacttcctcgaaaagagccctgggagcgcacctggaggctgagcccaagagtcagagaagcgctgtgcaaaagcccccgtccacaggctctgctccggccatcgagtcggttgactaagatgaggtgtgatcactgtattgagagatatattttgtgtataactttctctgttagtagttaactattggttttgtggtgaaaattttcttactttttctaccatatctgtattttcttagaactactggacttatgtggtacaggaggctgcttagcagttttgaatagtttaatctataaattttcctcagctgtgttgcacatcagcctcgttctccctccactggaatgcatgtgttcattgccttgtcctttctctccctgctccttgcacattatcatcctaatgaaaatttcactgacagggccgaccattacaagggaactttgttctgacgatggttccttgatgtgaaaacaatattaatttaaacgtcttagcccccccccccataatattattcagaaaaacaaaataccaaggcgattagttttgtctaataacccatttaaatgccaagtaaaaataaaactcctagtgttgggtcagaagcatatttgattgaaattagctttttgaaaacatttatatctcgggacaaattgagatggccacatgcctagaatcctaagtttcggcagaatatgtatataaagatgtcacttgtggacaaaatagtacatagaggcaaatcactagacaaataagcttagtgtttacgtgactgaacagtcatcctgctttggtttcaggtgtgggatttggaccatgaggggctcccgtagaggatggcggtttgtgtttgattctgatttgggatttcagtacatattctccacttcccatagaaggccacttattctttgaaaactggtgttcatgtttgccgttcaatgaagtcccttgtcaaagacaaggacggtcaattcacgtgtcactttcactaggcagaagtttctccaataccttctggctacttgaaagttactacaaaaattccaccagcaaagtactccaggtttttcaaaagggaattttcattatggatcagtaccaaccgaaattgattttcatttccaaaacaaacactggcaccaacatttttactttgggaagacttggcagagtgttagtcatgatctgttacttacgtgttcagtctgttttctcacccccttcttagttaccatctcttttttaagaagaaaaaagaaaagccacagtattatcaaggtctctacacttggactgggggaaaatttgaaattaagcacataacttttgaattagttctttgtttcaatgttgaatgtggcgcagttatgcagatgattaatcaggctgcactgatggaagttttgactttgtccctggtataatttgcattgaaatgctttatgaaataaaaggttctactagaactgatgttagcacattccactgagcaaaactatcagactgacacttgttaaattgcttactggactgaataaactctgttttgtccagttaaaagggttttctctttgttacaagtgttatttgtaaagtcctgtcacattcatggtcgaaactgggttgaaagaattgaaaattgtccaacagatagatagataggaaaccgcctggagtggaggagggttgtatctaagcctccactatcagtcatgttaattcaaggggccacagtggaggaaaataaatccacaaagtagattatctaattaccatcaaaatgagtcagaagcaaaaaacaccaccctccaacagcctcttaggagtacaccctgttctgctactaaaatactagactcatttccctggtggtgggggggaatgcaggtatagatcagaaatataatccaccttaaaattagtactaatgatcacattatttcacaagaactctgctggatgtacagctcttaacattttattaagccatttgtgtagcccaccacgtttctttgtggtgcttgtcctgtgtggaagattgtaaatcttgggcctgttgcatacttccaagggctttaaagcaatgtgattaacagtacttggcctgctgcttttggcttactttgtatttttagctagatgctattatagtgttgaaaggatatggattctgtctgggatgcatttgttgtcctttcagaacccttcctcccattaccctgtgaataaaaacaaatgggaccccctgagaaggacatcttcctacagtgatcacctcaccagcccagtgttgtggctttgtagcgcaccccgtatctaccatattctagaacactgtaatgctactaggctggcccagaaaaggtttaaatgttgaattcacttaaattgcaattgttgcaccatcatggaatcgtgatgtgtattatttatattggcggtggactccaaggtgtagagaaaacttgggtcttgggtaatatggaccatttcatcctcagacttgttaggagtacatttcttggtcttgagaccagtatttttcagttatgtatgcaactgcctttattacacctggttatcacaattcaattctcaggtgttgcagaaaaatctacctctttcagactgtagatggaaataactgtgaaaaaaatgatgcagatatcttctagtttgtgctaaacacactgctttatttttacagcccacgtctttcatgaggatacgaattgttaagaggcagtctcgttttgcttttcaaagacattttgtagagatttttcactaatgtgaatctgattttatctacttgattctgtatagattaagtaaatatgtatgataaactt

SEQ ID NO: 66344 - DNA, 1191 bp, Artificial Sequence
  derived and/or modified sequence
atggccacccgggtggaggaggccgcccggggccggggcggcggcgccgaggaggcaaccgaggccgggcgcggaggacgcagacgctctcccagacagaagcttgaagagtcccgttcggtccagaagcagatgaagatactgcagaagaagcaggctcagatagttaaagaaaaggttcatctgcagtccgagcactctaaagccatactcgctcggagcaagctggagtcactgtgccgcgaactgcagcggcacaataagacactgaaggaggagaatatgcagcaagctcgcgaggaggaggagaggagaaaggaagctactgcccatttccaaattacccttaacgagatccaggcccaattagaacagcacgatatacataatgctaaactacgtcaggaaaacatagaactgggggaaaagctgaagaagctaattgaacagtatgccttaagggaagagcatattgacaaagtattcaagcataaagagctgcagcagcagctcgtggatgcaaaactccaacagacaactcaacttataaaggaagctgatgagaagcatcagcgcgagcgggagttcctcctcaaagaggccacagagagcaggcacaagtatgaacagatgaagcagcaggaggtgcagttgaagcagcagctttctttatacatggacaagtttgaagagttccagacaacaatggcaaaatccaacgaattatttacaacctttaggcaagagatggaaaaaatgacgaagaagatcaaaaagttggaaaaagaaacaatcatctggaggacaaaatgggagaacaataacaaagcgcttttgcagatggccgaagagaaaaccgttcgcgacaaagaatacaaggccttgcagatcaaactagaacggttagaaaaactgtgccgtgcccttcagactgagcgtaatgaacttaacgagaaggtggaagtactgaaggagcaggtcagcatcaaggcagctatcaaggccgcgaacagggacctcgccacccctgtcatgcagccttgtacagcacttgatagtcacaaggagcttaacacatccagcaagcgagcgctgggagctcatttagaagccgagccaaagtcacaacgatcagccgttcaaaagccaccctcaactggttcggctccagctatcgagtccgtcgactag

SEQ ID NO: 66345 - DNA, 1191 bp, Artificial Sequence
  derived and/or modified sequence
atggccaccagagtggaagaagccgcacgaggcaggggagggggagccgaagaagccactgaagccggaaggggtggcaggcggagaagcccacgtcaaaaacttgaagagtcgcgcagcgttcagaagcaaatgaaaatactccagaaaaagcaagctcagatcgttaaagagaaagtccatttgcagagtgagcactccaaggccatcttggcccgaagcaaactagagtctttatgtcgagaactgcagcgccacaacaaaacactgaaggaggagaacatgcagcaggccagggaggaggaggaacggcgtaaggaggccaccgcccacttccagattaccctgaacgaaatccaggcacagctggagcagcacgatatacataatgccaaactgaggcaggagaatatcgagttgggtgaaaaactgaaaaagctcatagagcagtacgctctcagagaagaacatattgacaaagttttcaagcacaaggaacttcagcaacagttggtagacgctaaattacagcagactacccagctgatcaaggaggctgacgaaaaacatcaacgggagcgggaatttctgctgaaggaagccacggagtccaggcataagtatgagcagatgaagcagcaagaggtgcagctgaagcagcagctgtctctgtatatggataagtttgaagagttccagacaacaatggccaagtccaatgagctgtttactacgtttaggcaggagatggagaagatgacgaagaagataaagaaactggaaaaagaaacgattatttggcgtactaagtgggagaacaacaacaaagccctgctgcagatggcagaggaaaaaacggtacgagacaaggagtacaaagcacttcaaataaagctggagcgactagagaagctgtgccgtgctctgcagactgaaaggaatgaactgaatgagaaagtggaggtcctgaaggagcaagtgtccataaaggcagccatcaaagccgctaatagggacctggcaactcccgtgatgcagccttgcacggcccttgactcacacaaggagcttaacacctctagcaaacgcgctctgggcgctcacctggaggcagaaccaaaatcacagagaagtgcagtacagaagcccccatccacagggagtgcacccgcaattgagtcagtcgactag

SEQ ID NO: 66346 - DNA, 546 bp, Artificial Sequence
  derived and/or modified sequence
atgaagcaggaggaggcccagctgaaggagcagctgttcctgtacatggacaagttcgaggagttccagaccaccatggccaagaccaacgagctgttcaccgccttcaagcaggagaccgagaagctgaccaagaagatcaagaagctggagaaggagatggtgatctggtacaccaagtgggagaacaacaacaccaccctgctgcagatggccgaggagaagaccatcagagacaagaactacaaggtgttccagatcaagctggagagactggagaagctgtacaaggccctgcagatcgagagaaacgagctgagcgagaagctgggcatcctgaagggccaggtgagcgtgaaggtggccgacgtggacctggccgtgcccgtgacccacagctgcgccgacctggacagcagcaacatgctgaacaccagcagcaagagagcccccggcgtgcacctggaggccgaccccaagggcatgaacgaggtgaagtgctacagcaaggccctgagcaccggcagccccctgggcatcgactag

SEQ ID NO: 66347 - DNA, 546 bp, Artificial Sequence
  derived and/or modified sequence
atgaagcaggaggaggcacagctgaaagaacaattgttcctctacatggataaattcgaggaattccagactactatggctaaaacaaacgagctattcacggcattcaagcaggagactgaaaaactcaccaagaaaattaagaagctggagaaggaaatggtgatatggtacaccaaatgggagaacaacaataccaccctgctgcagatggctgaggagaagaccattcgcgacaaaaattataaggtttttcaaattaagctggagaggctggaaaaactctataaagccctgcaaatcgagaggaacgagctgtccgagaagttaggaatcctcaaggggcaggtcagcgttaaagtggctgacgtggacctcgccgtgcctgtgacccactcatgcgccgatctagattcctctaacatgttaaatacttctagtaaacgagcgcccggggtgcatctggaagccgaccctaagggaatgaacgaggtgaaatgctattccaaagccctaagcactggcagccccctggggatcgattag

SEQ ID NO: 66348 - DNA, 546 bp, Artificial Sequence
  derived and/or modified sequence
atgaagcaagaagaagcccaattgaaagagcagctgttcctttacatggacaagttcgaagagtttcagacaactatggctaagaccaatgaactttttactgctttcaaacaagaaacagagaagctaacgaagaagatcaaaaagttagaaaaggagatggtgatctggtacaccaaatgggagaacaataacactacgctgctccaaatggccgaagagaaaaccattagagacaagaattataaggtcttccagattaagctggagagactagaaaagctgtacaaggcattgcagatcgaacgtaatgagctctcagagaaattgggaatccttaaaggccaagtgtcagtcaaggtggccgacgttgatttggctgtccctgtgactcatagctgcgcagatttggacagctccaatatgttaaacacctccagcaagagggcacccggcgttcacctcgaggcagatcctaaaggcatgaacgaggttaagtgctatagcaaagctttaagcactggctctcccctaggaattgactag

SEQ ID NO: 66349 - DNA, 546 bp, Artificial Sequence
  derived and/or modified sequence
atgaagcaggaggaggcccagctgaaggagcagctgttcctgtacatggacaagtttgaggagttccagaccaccatggccaagaccaatgagctgttcaccgccttcaagcaggagacagagaagctgaccaagaagatcaagaagctggagaaggagatggtgatctggtacaccaagtgggagaacaacaacaccaccctgctgcagatggccgaggagaagaccatccgggacaagaactacaaggtgttccagatcaagctggagcggctggagaagctgtacaaggccctgcagattgaaagaaatgagctgtctgagaagctgggcatcctgaagggccaggtgtctgtgaaggtggctgatgtggacctggccgtgcctgtgacccacagctgtgccgacctggacagcagcaacatgctgaacaccagcagcaagagggcccctggggtgcacctggaggccgaccccaagggcatgaatgaggtgaagtgctacagcaaggccctgagcacaggcagccccctgggcatcgactag

SEQ ID NO: 66350 - DNA, 546 bp, Artificial Sequence
  derived and/or modified sequence
atgaagcaggaggaggcccagctgaaggagcagctgttcctgtacatggacaagttcgaagaatttcagacaacaatggccaaaacaaatgagctgttcacagcgtttaaacaagagactgagaaactgactaagaaaatcaaaaagctggagaaggaaatggtgatctggtatactaagtgggaaaataacaacactaccttgttgcagatggcggaggagaaaaccatacgcgataaaaattacaaagtgtttcagattaagcttgaacgtctcgagaaattgtataaagctctacagatcgagcgcaacgagttgtcggagaagcttggcatcctgaagggtcaggtgagcgtaaaagtggctgacgtcgatctggctgttcctgtaactcattcatgcgcagatttagatagttccaacatgcttaatacgagttctaagagggctcccggagtgcaccttgaagctgatccaaagggtatgaacgaggtgaagtgttacagtaaggccctctctaccggtagtccacttgggattgattag

SEQ ID NO: 66351 - DNA, 546 bp, Artificial Sequence
  derived and/or modified sequence
atgaagcaggaggaggcccagctgaaggagcagctgttcctgtacatggataaatttgaagaatttcaaactactatggccaagaccaatgaactgttcaccgcttttaaacaggaaaccgagaaattaacgaagaagattaaaaagctggagaaggaaatggtcatttggtacaccaagtgggagaataacaacaccacactgctccaaatggcagaggagaaaacaatccgggataaaaattataaggtatttcagattaaactagagagactggaaaagctgtataaagcactgcaaatcgagcgcaatgaactgtcagagaagttgggcattctgaagggacaggtttctgtgaaggtcgcggacgtggacttggctgtcccggttacacatagctgtgcggaccttgacagctcgaacatgctgaacacaagcagcaaaagagcccccggtgtgcatctggaagctgaccctaaaggaatgaatgaagtcaagtgttattcaaaagctttgagcacagggagccctctgggtatagattag

SEQ ID NO: 66352 - DNA, 546 bp, Artificial Sequence
  derived and/or modified sequence
atgaagcaggaagaggcacagctcaaggaacagttattcctttatatggataagtttgaggaattccagacgaccatggctaagacaaatgagctgttcacggcctttaagcaggaaacagaaaagctaaccaaaaaaattaaaaagctcgagaaagagatggtgatttggtataccaaatgggaaaataacaataccaccttattgcagatggcagaggagaaaaccattagagacaagaattacaaagtctttcagatcaagctggagcgcttagagaagctgtacaaagcactccagatcgagcgcaacgagctcagcgagaaactgggcatcctgaagggtcaggtgtctgtcaaggtcgcggacgtagacctggctgttccggtcacgcacagctgtgctgatctggattcatcaaatatgctcaataccagttcgaaacgcgctcccggagtgcacttagaggctgatccaaagggaatgaatgaggtgaaatgctactccaaggcactgtctacgggtagccccttaggcatcgactag

SEQ ID NO: 66353 - DNA, 546 bp, Artificial Sequence
  derived and/or modified sequence
atgaaacaggaagaagcacagctcaaggaacagctattcctgtatatggacaaatttgaggagttccagaccactatggcgaagacaaacgagctgtttaccgcttttaaacaagaaaccgagaagctgacgaagaagattaaaaagctggagaaagagatggtgatctggtatacgaaatgggagaataataacaccaccctcctgcagatggccgaggaaaaaactataagagataagaattataaggtttttcaaataaagttagagaggctggaaaagttgtataaagctttgcagatcgagaggaatgaactgagcgagaagctcggaattctgaaaggacaagtaagtgtaaaggtggccgacgtggacctcgccgtgccggtcacccattcttgcgcagatttggattccagcaatatgctcaacacatctagtaagcgggctcctggagtccacctggaagcggacccgaaggggatgaacgaagttaaatgctactcaaaggcactttctactggatcgcccctgggtatcgattag

SEQ ID NO: 66354 - DNA, 7299 bp, Artificial Sequence
  derived and/or modified sequence
atagtcagtgtgagtttgagaaagaaaaacacactgtagagctctactataaaagttaataggatagattgttaaactacattctgccatctttggctatttggttgctaaatactttagaatattacttacagctaggctgattataacagaagaaggattaagtatgacagcttgtctcaataatggaagtaaaaagcagagatcctggaaagaatctgccatccatcagaggaatttgtctgactttgtggtattgctagggggtgtatggttggagtattattttgatggtgctggatcaccctcatcacagtaaactcaagaacataggacagcttgtgaaataggttcttacttgtaaggaggaacatatgcagcagaaaaaagaggaggaagaagttcttaaagaagtaactgcacatttccaaattactttaactgaaactcaagcccagctggaacagcatgaaatacacaatgccaaactgcagcaggagaacatggaaatgggagaaaagctaaagaagctcactgaccagtatgcactgagggaagaggtaaacggcgtttggtttgtttatagacagctgctcaccagtagcaaaagctacaccctaccgtaaagtaaaaactctttcacaggacagtattttagaacttttgtgtatgcacagtggaaattacatgtttattaggaaaagagtagaaacctgtaaacagaatgactaaattggagcatcacttggcccaagtgtcagtggagtaggataagtaaagggatttctaggagatgtgtaccacttgtctcccatatgatgctacaagattgtcaatatagcatacagatatttttctcttatgcagtctaataatacagatttgttccctaaatactctgtatctcagatttctgtgacaatctgaacaatataaataggagaattgtgctatttgtgagaataaggaacctactaattacccatcaccaagtcacattgtttgtgtaatcaatgaagtaaaaagtttgtggaggactcaatagttgtcgaacctagtcattggagttattttataaattgatgtggaagttgtatgatggctaaataaaaaacaaataggtgataacctgcttatttgtttttattttttctttacttttagaggtctatacatagggtaagatttcaattttcaaaggatgcatccccttcctttattatgctttaagctagtaaaatatatatttaaatccttacttagtagattaaaattggaaatagaaagtgacaatttaaaaattaataaaacagtaaatattactttatgcatatcaaaatgttattttgagttacaccttttcatgctacttttgaaaacatttttctttaagattttgagtatcttttaaaccattttcctctatgtttcaagaacatttcaaacttattatggaagctgcaaacttatagtagaatatatcacttggctttagcaattatttacttttgtttctagcaactcttgtttccatctatttttaagcaaatccaagatattatatcattttatttattactattcaaatatgcatcatgaaataagattctttttaagccataatcactgtactatttttactccaaaaggttaaacaattgctatgtaatcacataccttctcactgtactatttaaatatctgttacttcccttttccttcaggttgtttacatcaacatcaaaataaggtttatacattttattgttttaatatgtctcaagtctttttagtatataagcttcccccccctcttttttttccttggaatgtatttattaaagaaattttttaggcctatatagtgaacttttaaaattaaatttgttttatattataaagcatattatgaatatcatcagtttttttaaaagaatcctttaaattccattgttttaaataatggtattaaaaatgattaattttattttattttttattattttactctttaggatttatattattttaactgtattaaactctccaaatttgctatagaagtagcagattgggagaggacatgtgttcaagttgtactacttgtatgtcttgtttagatattacagtctttttcttttatcagaaaataattgaataatgataaaatcagttgcagattaagacagattatctgttgcagtcttctcaaaacttaatttaagtacattattttcagctagcatttcttccttcacatagaacctccatgtgtggagggatttcctaatgagtctattgtatgtacaatagcacttaatgacatagcttttaaataataacaggattttaccaaatgtttaatatgtgccaggcatcaagcaccttacacagtttaattattgcatagatttggacagcaactctgcaagttaggtatggtcatgaacctttgcagataaggaaactgtgtttcacaaggagaagaaattgtcctggatcatacaataagctaggatttgctccagaccatttttttcattttatcaggctacctacaattaaggaatttcagaagattttgtgaacaaaaaatgtccaggaattatgtgtgtaataaatgaatttgatattttgatctccttatccatctttttcttgataaaatatcagcttttttttttccaatgtagggcagaagcaagaagtacagatattttgatggggacagcccacgtctgatagggtgggacatggggcagcagttagagggttgtgctctttctagtgtgggatagtttgcaagatgatatgttgtagccacttctgcagtgacggggacagaaggagtcagtgttcttaactacagtggtagcagcagaaaagaagggtaagcagggttctagaaatttgtgttatgttttctccccactgtatttatttctttggttagtggtgcaagaaattctgttttcctgtagcaaattaataaagcgttcaaacataaggaattacgacaacagcttgtagatgccagacttcaacaaacagcacagctgataaaagaagctgatgaaagacatcagagagagagagagtttgtaagttctacttcttggaaaaaaaaaaaagatcgccaaaattgtaaccaaagccatttaaaacaaactcctcacttaacatagtgccagggcatgcaattttgtttcttactctctggatgtgggatatgcgagtgtgtgtgtgtgtgtgtgtgtgtgtgtattaagctttctgtttctgatgaaattttcatatgaaatttactggagataagattaaattagtggaaaaacaagataattttgctttctatgtagtggtcaccaagttaaagaattgtgccagttattaggcaagataggctttgagatttagggacagttaaattttacaccaacttagtgaacatgagacttctacctagtgttacatttcatttttaaataagcaatttaaaaattggtaaatgatttgtttactttgattatattctggtataattttctgacaaaattatctgtgtcttggtcagcattgttgctagaatatgtattcagattttgtctgtccataattgagaacacagaaaaaatctaatttgactatacccatttacccccatggaaatgaaactatattctatgaatgaaaaatgattttaataatgtggtgtattacattttcttcattcaagtaatgtaggccctgagtagagcatgttatgaatatttagttccttagtgttttctcattcaagcctctcatattgaatgagtctagggtttggagagatgtttcacacagcatgtctcttcagtgcaagctgacagatatcagtgcacaattaaagaaacttaattgcacctttcaacttggagtataaattttgtatgtatctatgtatatctatgtgtgtattttgtggtttaaggcttatttacataatatgtgacattttacctcagaaattcagtgactgaatttcacagctgcttcccatgcatctttattatctatgtttctgaaaaactcaaatactaactaatctcttttcttcccttagctgttcctttcctgtggttttaaaaaagtgaccagaaactaggtctctattttcattgctttgctgcatattcttttaacctgcttttatcttttacagagttgaggggctttctaaataacctagacaatgtcaagattcttagctgcgttttctgtctaaaagtgtagatgtctagttattcctcatgtaaaacacaacatttcaaccctgagtactataaactttattatgcttctaggttactttttctctttaagcaattattcctacattcctaagtgttcaccagtggaacagataagagatagaagtagttagaaattgagataattgggttgacctgtcattgttgccaggataattactggaagattaagcctatctgttagacattttgaccatgtttataattgttgttagtattctgtcagaatgtatctgttttctagttattaaaagaagcaacagaatcgaggcacaaatatgaagaaatgaaacaagaagaagcacaactgaaagagcagcttttcctttatatggataagtttgaagaattccagactaccatggcaaaaaccaatgaactttttacagccttcaagcaggaaacggaaaagctgacaaagaaaattaaaaaactggaaaaagaaatggtaatatggtataccaaatgggaaaataataatacaacacttctgcaaatggctgaagagaaaactattcgtgataaaaattataaggtctttcaaataaaattggagcggttagagaagctgtacaaggctcttcaaatagaaaggaatgaactcagtgagaaactgggaattctgaaagggcaggtctctgtgaaagtagcagatgtagatttagcagtgcctgtgacgcattcctgtgctgacctggattcttccaatatgctgaacacttcctctaaaagagccccaggagtccatctggaggctgaccccaaaggaatgaatgaagtaaaatgctactcaaaagccctctccacaggatctcctctaggcattgattaagattaagtgtgatcattgtactgatggatatattttgtgtacatgtttctcttttagttgtaactattgattttgtaatgaaaatttcctctcctttttctaccatatctctgtttttttagaactactcaactgtgtggtaacagaaagcttcttaccaatttccccaactatgttgcacatcagcctcattttccccctttattggaatgcatgttttcattgccttctcctttcaaagtgtacgtttgtgtgttcatcaccttaaattatcttaatttgagacttttttataatggtttcgtaatgtgaaatcaaatactaatttaaactctggagcccataatatctacataaaagaaaatataaactgactaatattgtcaagtcatttaaatgataagtaaaacttcaatggattaagaaacaagcatggcatatttgattcagatcagttttttgacaatatttgtatgactttccaaattgatgtgactgtaaactttgaattcctcaaaattgacagaatatatatatatatatatatatatatatatatatatatgtatgtacacacacacagagagatcatttaaatgtaaatgatgttaagaaaaaccaaaacagtagcatatgcaggcaagtcattggaccaataggcttaatatttatgaaactgacaattgttctgctttagtttcaggttacaattatgtttaaagaaaaaaaaatcagtatctagatctctgcacttggcatggaaaattttgaactatttattccttaattttcttttatttcagtttctcatagagctaaatggttttacatatattctcttgtcagatttgtggtctaatagaggtagaaaatggaaattttcccagtacttagaaatatggtacttaggaagaagtctaggatgtgaattacatatacacttcccctagtgactatgataatcaagggggcagatagcagaggaaaataagttaacatgaaatttgacaaattttattactttgccaaaattagcaaaacaaaaatactcaccttcccctgctcaccccccaactttttataaatattcaattcagctacaaaacaaaatactggacccacttctttcagaagagatgaagataccttatatgccctaaagttaataccagcagtcatattttatcagatgtaaatctggatgtaagctcttaatgttatactaaggcagtttcttaggctgtgacacttctttgtggtacttgttttgtgtgaaaggtaaattttggggagaaaacaatgtgaaaaacagaacttgttctgttgtttttggcatactgtttatgttagatacactgtgttacaatacaatattacgaagatctgcattgtattttggaatttggtttcctttcagaattattgctctggctagcattggaaacaacaacaacaacaaaacccaaaggaaccctttgcagaagattcccttgtaaatggccctgtggcatgcccagtatctgcaatgttctagaatagaagttggcaaacctctctgtttgccaagcctgcagagttgaacatgtccataaatgtatacaatctgaccctgttttttggccctgtttctggacactgtagctgaccaagaaaatgtttaaatgttgcgatcaattaaatttttttgttgtatcattctggagttgtaatatgtatagtggcaggggattccaagctatagaaaaaacatgagtctagaatgacagagtgtgtcatcttcaaatgtgtattaatatatttcttgatgatgagaccaatatttctaagttaatggaactattttattacacctgataatcacagttcaattcttgtctgttgcagaattatctacctctttcaaactgtaaatgaaaataactgtgaaaaaaaggatgcagtactgataaaaacactgctttgtttttatctcacctcttttttaaggatatgattttataagaggcagttctcttttgcttttcaagacttctgtagagtttgtgttttttgtttttgtttttgtttttgtttttgtttttttacctaatgtgaatcttattttatctactcaacttcgttcaggttaactaaagatatagatataatggttaa

SEQ ID NO: 66355 - DNA, 3315 bp, Artificial Sequence
  derived and/or modified sequence
ttgattatattctggtataattttctgacaaaattatctgtgtcttggtcagcattgttgctagaatatgtattcagattttgtctgtccataattgagaacacagaaaaaatctaatttgactatacccatttacccccatggaaatgaaactatattctatgaatgaaaaatgattttaataatgtggtgtattacattttcttcattcaagtaatgtaggccctgagtagagcatgttatgaatatttagttccttagtgttttctcattcaagcctctcatattgaatgagtctagggtttggagagatgtttcacacagcatgtctcttcagtgcaagctgacagatatcagtgcacaattaaagaaacttaattgcacctttcaacttggagtataaattttgtatgtatctatgtatatctatgtgtgtattttgtggtttaaggcttatttacataatatgtgacattttacctcagaaattcagtgactgaatttcacagctgcttcccatgcatctttattatctatgtttctgaaaaactcaaatactaactaatctcttttcttcccttagctgttcctttcctgtggttttaaaaaagtgaccagaaactaggtctctattttcattgctttgctgcatattcttttaacctgcttttatcttttacagagttgaggggctttctaaataacctagacaatgtcaagattcttagctgcgttttctgtctaaaagtgtagatgtctagttattcctcatgtaaaacacaacatttcaaccctgagtactataaactttattatgcttctaggttactttttctctttaagcaattattcctacattcctaagtgttcaccagtggaacagataagagatagaagtagttagaaattgagataattgggttgacctgtcattgttgccaggataattactggaagattaagcctatctgttagacattttgaccatgtttataattgttgttagtattctgtcagaatgtatctgttttctagttattaaaagaagcaacagaatcgaggcacaaatatgaagaaatgaaacaagaagaagcacaactgaaagagcagcttttcctttatatggataagtttgaagaattccagactaccatggcaaaaaccaatgaactttttacagccttcaagcaggaaacggaaaagctgacaaagaaaattaaaaaactggaaaaagaaatggtaatatggtataccaaatgggaaaataataatacaacacttctgcaaatggctgaagagaaaactattcgtgataaaaattataaggtctttcaaataaaattggagcggttagagaagctgtacaaggctcttcaaatagaaaggaatgaactcagtgagaaactgggaattctgaaagggcaggtctctgtgaaagtagcagatgtagatttagcagtgcctgtgacgcattcctgtgctgacctggattcttccaatatgctgaacacttcctctaaaagagccccaggagtccatctggaggctgaccccaaaggaatgaatgaagtaaaatgctactcaaaagccctctccacaggatctcctctaggcattgattaagattaagtgtgatcattgtactgatggatatattttgtgtacatgtttctcttttagttgtaactattgattttgtaatgaaaatttcctctcctttttctaccatatctctgtttttttagaactactcaactgtgtggtaacagaaagcttcttaccaatttccccaactatgttgcacatcagcctcattttccccctttattggaatgcatgttttcattgccttctcctttcaaagtgtacgtttgtgtgttcatcaccttaaattatcttaatttgagacttttttataatggtttcgtaatgtgaaatcaaatactaatttaaactctggagcccataatatctacataaaagaaaatataaactgactaatattgtcaagtcatttaaatgataagtaaaacttcaatggattaagaaacaagcatggcatatttgattcagatcagttttttgacaatatttgtatgactttccaaattgatgtgactgtaaactttgaattcctcaaaattgacagaatatatatatatatatatatatatatatatatatatatgtatgtacacacacacagagagatcatttaaatgtaaatgatgttaagaaaaaccaaaacagtagcatatgcaggcaagtcattggaccaataggcttaatatttatgaaactgacaattgttctgctttagtttcaggttacaattatgtttaaagaaaaaaaaatcagtatctagatctctgcacttggcatggaaaattttgaactatttattccttaattttcttttatttcagtttctcatagagctaaatggttttacatatattctcttgtcagatttgtggtctaatagaggtagaaaatggaaattttcccagtacttagaaatatggtacttaggaagaagtctaggatgtgaattacatatacacttcccctagtgactatgataatcaagggggcagatagcagaggaaaataagttaacatgaaatttgacaaattttattactttgccaaaattagcaaaacaaaaatactcaccttcccctgctcaccccccaactttttataaatattcaattcagctacaaaacaaaatactggacccacttctttcagaagagatgaagataccttatatgccctaaagttaataccagcagtcatattttatcagatgtaaatctggatgtaagctcttaatgttatactaaggcagtttcttaggctgtgacacttctttgtggtacttgttttgtgtgaaaggtaaattttggggagaaaacaatgtgaaaaacagaacttgttctgttgtttttggcatactgtttatgttagatacactgtgttacaatacaatattacgaagatctgcattgtattttggaatttggtttcctttcagaattattgctctggctagcattggaaacaacaacaacaacaaaacccaaaggaaccctttgcagaagattcccttgtaaatggccctgtggcatgcccagtatctgcaatgttctagaatagaagttggcaaacctctctgtttgccaagcctgcagagttgaacatgtccataaatgtatacaatctgaccctgttttttggccctgtttctggacactgtagctgaccaagaaaatgtttaaatgttgcgatcaattaaatttttttgttgta

SEQ ID NO: 66356 - protein, 436 aa, Artificial Sequence
  derived and/or modified sequence
MAALSKSIPHNCYEIGHTWHPSCRVSFLQITGGALEESLKIYAPLYLIAAILRKRKLDYYLHKLLPEILQSASFLTANGALYMAFFCILRKILGKFYSWTPGFGAALPASYVAILIERKSRRGLLTIYMANLVLLFCITAAMYMFFFRCKDGLKGFTFSALRFIVGKEEIPTHSFSPEAAYAKVEQKREQHEEKPGRMNMIGLVRKFVDSICKHGPRHRCCKHYEDNCISYCIKGFIRMFSVGYLIQCCLRIPSAFRHLFTQPSRLLSLFYNKENFQLGAFLGSFVSIYKGTSCFLRWIRNLDDELHAIIAGFLAGISMMFYKSTTISMYLASKLVETMYFKGIEAGKVPYFPHADTIIYSISTAICFQAAVMEVQTLRPSYWKFLLRLTKGKFAVMNRKVLDVFGTGASKHFQDFIPRLDPRYTTVTPELPTEFS

SEQ ID NO: 66357 - protein, 160 aa, Artificial Sequence
  derived and/or modified sequence
MAALSKSIPHNCYEIGHTWHPSCRVSFLQITGGALEESLKIYAPLYLIAAILRKRKLDYYLHKLLPEILQSASFLTANGALYMAFFCILRKILGKFYSWTPGFGAALPASYVAILIERKSRRGLLTIYMANLMESHCLPQAGVISAPCSLCLPGSRDSPA

SEQ ID NO: 66358 - DNA, 1311 bp, Artificial Sequence
  derived and/or modified sequence
atggccgccctgagcaagagcatcccccacaactgctacgagatcggccacacctggcaccccagctgcagagtgagcttcctgcagatcaccggcggcgccctggaggagagcctgaagatctacgcccccctgtacctgatcgccgccatcctgagaaagagaaagctggactactacctgcacaagctgctgcccgagatcctgcagagcgccagcttcctgaccgccaacggcgccctgtacatggccttcttctgcatcctgagaaagatcctgggcaagttctacagctggacccccggcttcggcgccgccctgcccgccagctacgtggccatcctgatcgagagaaagagcagaagaggcctgctgaccatctacatggccaacctggtgctgctgttctgcatcaccgccgccatgtacatgttcttcttcagatgcaaggacggcctgaagggcttcaccttcagcgccctgagattcatcgtgggcaaggaggagatccccacccacagcttcagccccgaggccgcctacgccaaggtggagcagaagagagagcagcacgaggagaagcccggcagaatgaacatgatcggcctggtgagaaagttcgtggacagcatctgcaagcacggccccagacacagatgctgcaagcactacgaggacaactgcatcagctactgcatcaagggcttcatcagaatgttcagcgtgggctacctgatccagtgctgcctgagaatccccagcgccttcagacacctgttcacccagcccagcagactgctgagcctgttctacaacaaggagaacttccagctgggcgccttcctgggcagcttcgtgagcatctacaagggcaccagctgcttcctgagatggatcagaaacctggacgacgagctgcacgccatcatcgccggcttcctggccggcatcagcatgatgttctacaagagcaccaccatcagcatgtacctggccagcaagctggtggagaccatgtacttcaagggcatcgaggccggcaaggtgccctacttcccccacgccgacaccatcatctacagcatcagcaccgccatctgcttccaggccgccgtgatggaggtgcagaccctgagacccagctactggaagttcctgctgagactgaccaagggcaagttcgccgtgatgaacagaaaggtgctggacgtgttcggcaccggcgccagcaagcacttccaggacttcatccccagactggaccccagatacaccaccgtgacccccgagctgcccaccgagttcagctag

SEQ ID NO: 66359 - DNA, 483 bp, Artificial Sequence
  derived and/or modified sequence
atggccgccctgagcaagagcatcccccacaactgctacgagatcggccacacctggcaccccagctgcagagtgagcttcctgcagatcaccggcggcgccctggaggagagcctgaagatctacgcccccctgtacctgatcgccgccatcctgagaaagagaaagctggactactacctgcacaagctgctgcccgagatcctgcagagcgccagcttcctgaccgccaacggcgccctgtacatggccttcttctgcatcctgagaaagatcctgggcaagttctacagctggacccccggcttcggcgccgccctgcccgccagctacgtggccatcctgatcgagagaaagagcagaagaggcctgctgaccatctacatggccaacctgatggagagccactgcctgccccaggccggcgtgatcagcgccccctgcagcctgtgcctgcccggcagcagagacagccccgcctag

SEQ ID NO: 66360 - DNA, 888 bp, Artificial Sequence
  derived and/or modified sequence
atgtacatgttcttcttcagatgcaaggacggcctgaagggcttcaccttcagcgccctgagattcatcgtgggcaaggaggagatccccacccacagcttcagccccgaggccgcctacgccaaggtggagcagaagagagagcagcacgaggagaagcccggcagaatgaacatgatcggcctggtgagaaagttcgtggacagcatctgcaagcacggccccagacacagatgctgcaagcactacgaggacaactgcatcagctactgcatcaagggcttcatcagaatgttcagcgtgggctacctgatccagtgctgcctgagaatccccagcgccttcagacacctgttcacccagcccagcagactgctgagcctgttctacaacaaggagaacttccagctgggcgccttcctgggcagcttcgtgagcatctacaagggcaccagctgcttcctgagatggatcagaaacctggacgacgagctgcacgccatcatcgccggcttcctggccggcatcagcatgatgttctacaagagcaccaccatcagcatgtacctggccagcaagctggtggagaccatgtacttcaagggcatcgaggccggcaaggtgccctacttcccccacgccgacaccatcatctacagcatcagcaccgccatctgcttccaggccgccgtgatggaggtgcagaccctgagacccagctactggaagttcctgctgagactgaccaagggcaagttcgccgtgatgaacagaaaggtgctggacgtgttcggcaccggcgccagcaagcacttccaggacttcatccccagactggaccccagatacaccaccgtgacccccgagctgcccaccgagttcagctag

SEQ ID NO: 66361 - DNA, 1311 bp, Artificial Sequence
  derived and/or modified sequence
atggctgccctgtctaagtctataccccacaattgctacgaaattggccacacatggcacccctcctgtagggtaagtttcctccagatcacaggtggagccctggaggagtcgcttaagatctacgccccgttgtatctcatagctgccattctgcggaaacgaaagctggattactacttgcacaagcttctgcccgaaatcttgcagtccgcctcctttttgaccgcgaacggggccttgtatatggccttcttttgcattctgaggaaaatcctggggaagttctatagttggactccagggttcggtgcagcactgccggcatcttatgttgccattcttatcgaaaggaaatctcgtcgcggcctgctgaccatatatatggccaatctggttctgcttttttgtattactgccgcaatgtacatgttcttctttcgttgcaaggatggtctaaaaggcttcaccttctccgctttgcgctttattgttggtaaagaagagatccctacccatagcttctccccggaagcagcttacgccaaggtggagcagaagagggagcaacacgaagaaaagcctggaaggatgaacatgatcggactggtccgcaaatttgtcgactctatctgcaaacatgggcctagacatcggtgctgtaaacactacgaagacaattgtatctcttattgtatcaaagggttcatccgaatgttctctgtcggctatctgatccagtgctgtctccgaatcccctcagcttttcggcatctttttacccagccaagccggttactgtctttgttctataacaaagagaactttcagcttggggctttcctgggctccttcgtgtctatctacaaaggcacatcctgtttcttaaggtggattcgcaatctggatgacgagctccatgccatcattgcgggattcctggccggcatctccatgatgttttacaagtccactacaattagcatgtacctagcttctaaactggtggagaccatgtacttcaaaggtatcgaggctggaaaagtaccatacttcccacacgccgacacgattatctatagtatatccaccgccatttgcttccaagcagcagttatggaggtgcagactctgaggcccagttactggaaattcttgctgcgactcaccaagggcaaattcgctgtcatgaatcgaaaggtgctggatgtatttggcaccggcgcttcgaagcactttcaggattttatcccccgattagaccccagatacactaccgtgacacctgaactgccgaccgagttctcgtag

SEQ ID NO: 66362 - DNA, 483 bp, Artificial Sequence
  derived and/or modified sequence
atggcagctcttagcaagtccatccctcataactgctatgagatcggtcacacatggcacccttcctgtagggtatcgtttctgcagatcacgggaggagccctcgaggagagccttaagatttacgcccccctctacctgatcgccgccatccttaggaaaaggaagttggactactacttacataagctactgccagagatcctgcagtcagccagcttcctaaccgctaatggagcactgtatatggcgtttttctgtattcttcgcaaaatcctgggaaagttttacagttggactccagggtttggcgcagcgctccctgccagctatgtggcgatccttatcgagcgcaagtcaaggcgagggctactcaccatttacatggctaacttaatggagagtcattgcctgccccaagccggagtcatctctgccccctgctcactctgcctgcccggttcgcgcgactcccctgcttag

SEQ ID NO: 66363 - DNA, 888 bp, Artificial Sequence
  derived and/or modified sequence
atgtatatgttttttttcaggtgtaaggatggtcttaagggcttcactttctcggccctccgctttatcgtgggcaaggaagagataccgacacacagcttttcaccagaggccgcctacgcaaaggtggagcagaagagagagcagcacgaagagaaacccggacggatgaacatgattggactggtgcgaaaattcgtagattccatttgtaagcacggcccccgccaccgctgttgtaagcactacgaggacaattgtataagctactgtattaagggcttcatccgcatgttttctgtaggatatctgattcagtgttgccttaggatcccttctgctttcagacatctgttcacccagccatccagactcctgtccctattctacaataaagaaaacttccagctcggtgcttttttgggctccttcgtgagcatctacaaaggaacatcgtgttttctcagatggataaggaacttagacgatgagttgcacgctatcatcgccgggtttttagccggaattagcatgatgttctacaagagcacaacaatctcgatgtacctcgcttccaaactggtcgaaaccatgtacttcaagggaatagaagctggaaaggtgccctattttcctcacgctgatacaataatatattcaatttctactgccatctgctttcaggctgcggtcatggaggtgcagacactccggcccagctattggaaattcctactcaggttaacaaagggaaaatttgctgtaatgaaccggaaagttcttgatgtgttcggaaccggagcctccaaacatttccaagattttataccacggctcgatcccaggtatacaacagtgaccccagaactcccaactgaatttagttag

SEQ ID NO: 66364 - DNA, 1311 bp, Artificial Sequence
  derived and/or modified sequence
atggccgccctgagcaagagcatcccccacaactgctatgaaattggccacacctggcaccccagctgccgggtgtccttcctgcagatcactggaggagccctggaggagagcctgaagatctatgcccccctgtacctgattgctgccatcctgaggaagaggaagctggactactacctgcacaagctgctgcctgagatcctgcagagcgccagcttcctgacagccaacggggccctgtacatggccttcttctgcatcctgaggaagatcctgggcaagttctacagctggaccccaggctttggagctgccctgcctgccagctatgtggccatcctgattgaaaggaagagcagaagaggcctgctgaccatctacatggccaacctggtgctgctcttctgcatcacagctgccatgtacatgttcttcttccgctgcaaggatggcctgaagggcttcaccttcagcgccctgcgcttcatcgtgggcaaggaggagatccccacccacagcttcagccctgaggccgcctatgccaaggtggagcagaagcgggagcagcacgaggagaagccaggccgcatgaacatgattggcctggtgaggaagtttgtggacagcatctgcaagcacggccccaggcaccgctgctgcaagcactatgaggacaactgcatctcctactgcatcaagggcttcatccgcatgttttctgtgggctacctgatccagtgctgcctgcgcatccccagcgccttccgccacctgttcacccagcccagccggctgctgagcctcttctacaacaaggagaacttccagctgggcgccttcctgggcagctttgtgtccatctacaagggcaccagctgcttcctgcgctggatccggaacctggatgatgagctgcacgccatcatcgccggcttcctggccggcatctccatgatgttctacaagagcaccaccatctccatgtacctggccagcaagctggtggagaccatgtacttcaagggcatcgaggccggcaaggtgccctacttcccccatgctgacaccatcatctacagcatcagcacagccatctgcttccaggccgctgtgatggaggtgcagaccctgcggcccagctactggaagttcctgctgcggctgaccaagggcaagtttgctgtgatgaacaggaaggtgctggatgtgtttggaactggagccagcaagcacttccaggacttcatcccccggctggacccccgctacaccaccgtgaccccagagctgcccacagagttctcctag

SEQ ID NO: 66365 - DNA, 483 bp, Artificial Sequence
  derived and/or modified sequence
atggccgccctgagcaagagcatcccccacaactgctatgaaattggccacacctggcaccccagctgccgggtgtccttcctgcagatcactggaggagccctggaggagagcctgaagatctatgcccccctgtacctgattgctgccatcctgaggaagaggaagctggactactacctgcacaagctgctgcctgagatcctgcagagcgccagcttcctgacagccaacggggccctgtacatggccttcttctgcatcctgaggaagatcctgggcaagttctacagctggaccccaggctttggagctgccctgcctgccagctatgtggccatcctgattgaaaggaagagcagaagaggcctgctgaccatctacatggccaacctgatggagagccactgcctgccccaggccggggtcatcagcgccccctgcagcctgtgcctgcccggcagccgggacagccctgcctag

SEQ ID NO: 66366 - DNA, 888 bp, Artificial Sequence
  derived and/or modified sequence
atgtacatgttcttcttccgctgcaaggatggcctgaagggcttcaccttcagcgccctgcgcttcatcgtgggcaaggaggagatccccacccacagcttcagccctgaggccgcctatgccaaggtggagcagaagcgggagcagcacgaggagaagccaggccgcatgaacatgattggcctggtgaggaagtttgtggacagcatctgcaagcacggccccaggcaccgctgctgcaagcactatgaggacaactgcatctcctactgcatcaagggcttcatccgcatgttttctgtgggctacctgatccagtgctgcctgcgcatccccagcgccttccgccacctgttcacccagcccagccggctgctgagcctcttctacaacaaggagaacttccagctgggcgccttcctgggcagctttgtgtccatctacaagggcaccagctgcttcctgcgctggatccggaacctggatgatgagctgcacgccatcatcgccggcttcctggccggcatctccatgatgttctacaagagcaccaccatctccatgtacctggccagcaagctggtggagaccatgtacttcaagggcattgaagctgggaaggtgccctacttcccccacgccgacaccatcatctacagcatcagcacagccatctgcttccaggccgctgtgatggaggtgcagaccctgcggcccagctactggaagttcctgctgcggctgaccaagggcaagtttgctgtgatgaacaggaaggtgctggatgtgtttggcaccggggccagcaagcacttccaggacttcatcccccggctggacccccgctacaccaccgtgaccccagagctgcccacagagttctcctag

SEQ ID NO: 66367 - DNA, 1311 bp, Artificial Sequence
  derived and/or modified sequence
atggccgccctgagcaagagcatcccccacaactgctacgagatcggccacacctggcaccccagctgccgagtgtcttttctgcagatcacaggaggcgctctggaagaatccctgaagatttatgctcccctgtatctgatcgccgctatcctgagaaagcgcaagctcgactattacctgcacaagttgctgcctgagatccttcagtcagcctcattccttaccgcaaacggggcgctgtacatggcctttttttgtatactgcgaaagatacttggtaagttctattcctggactccagggttcggcgctgccctcccggcatcttatgtcgctatacttattgagcggaagtctagacgcggtctgctgactatatacatggctaatctcgttcttctgttttgtatcactgcagccatgtacatgtttttcttccggtgcaaggatggcctgaaagggtttaccttcagtgcgctgaggtttatagtagggaaagaagagatacctacacacagcttctctccggaggccgcctacgccaaggtcgaacagaagagagaacaacatgaggaaaaacccggccgcatgaatatgataggcctagttcgtaagtttgtagactccatctgtaagcatggcccccggcatcggtgctgcaagcactacgaagataattgcatctcttattgcattaagggcttcattagaatgtttagcgtgggctacttaattcagtgttgcctgaggattcccagcgctttcaggcatctgttcacacagccgagcaggctcctttcactcttctataataaagagaactttcaactcggggcctttcttgggagcttcgtgagtatatacaagggaacatcctgtttcctacgctggatcagaaacctcgatgacgagctccacgccattatcgctggtttcctggccggcataagcatgatgttctacaaatccacaaccatttcaatgtacctggcatcaaagctcgtcgaaacaatgtatttcaaaggcatcgaagcaggcaaagtgccctacttccctcatgctgacaccatcatttattcaattagtacggctatatgcttccaagctgccgtgatggaggtacagactttaagaccatcctattggaaattcctactgcgcttgaccaagggcaaatttgccgtaatgaacagaaaggtgctggatgtctttggtactggagcttctaagcacttccaggactttattccccgtctggatccgcgatataccaccgttacaccagaattgcctacagaatttagttag

SEQ ID NO: 66368 - DNA, 483 bp, Artificial Sequence
  derived and/or modified sequence
atggccgccctgagcaagagcatcccccacaactgctacgagatcggccacacatggcacccctcctgtagagtatcttttcttcagattacagggggcgcactcgaggagagcctcaaaatctacgcccccctgtacctgatcgcggccattctgcggaaaaggaagctggactattatcttcataagctgctgcctgaaattctacagtcagcgtcttttttaaccgccaacggagcactgtacatggcttttttctgcatacttaggaaaatcctgggcaaattttacagctggacacctggatttggagctgcgcttccagccagctacgtggctattctaatcgaaaggaagagccggaggggcttgctaactatttatatggccaacctgatggaatcacactgcctgcctcaggcgggtgtcatttccgccccatgtagcctttgccttccaggttccagggactccccggcttag

SEQ ID NO: 66369 - DNA, 888 bp, Artificial Sequence
  derived and/or modified sequence
atgtacatgttcttcttccggtgcaaggacggcctgaagggcttcacgttcagtgcactaagatttatcgtggggaaggaggaaatccctactcactcctttagtccggaagcagcatatgcgaaagtggagcagaagagggagcagcatgaagagaagcctggtcgcatgaacatgatcgggctggtcagaaaatttgtggacagcatctgcaagcacggcccacgacatcggtgctgcaaacactatgaggacaactgcatcagttactgtatcaagggattcattagaatgttctctgtgggttaccttattcagtgctgcttaaggatcccgtctgccttccggcatcttttcactcagccttccaggttgctttctcttttctataataaagagaactttcagctaggcgcatttctggggtcatttgtttccatttataagggaacttcctgctttctacggtggatccgtaatctggatgacgagttgcatgccattatcgctgggtttctagctggtattagtatgatgttttacaagagtacaaccattagtatgtatttggcaagtaagttggtcgagactatgtacttcaagggcatcgaggcagggaaggttccgtactttcctcacgccgacaccattatttattcaatcagcaccgccatatgtttccaagccgctgtgatggaagtgcagaccctgcgccccagttattggaaattcctcctgagattgacgaaagggaaatttgccgtgatgaaccgcaaagtcctggacgtcttcggtaccggggcttcgaagcactttcaggatttcataccgcggctcgatcctcgctatactaccgtgacccccgaactcccaactgagttctcgtag

SEQ ID NO: 66370 - DNA, 1311 bp, Artificial Sequence
  derived and/or modified sequence
atggcagcgctgtcaaagtcaatcccacacaattgttacgaaatcggccacacctggcatccatcttgtagggtatcgttcctgcaaattacaggcggagccctggaggagagcctgaagatttacgccccactgtatctgatcgccgcaatcctgcggaagagaaagctcgactattaccttcacaaacttctgccagaaatcctccagagcgcttcatttcttaccgctaacggagccctgtacatggcgttcttctgcatattgcgcaagattttgggcaagttttattcatggacccccggttttggagctgccttgcccgcatcatatgtcgcaatattgattgagcgaaagagtaggcgagggttgctgactatctatatggccaaccttgttctcctgttctgtatcaccgccgctatgtacatgttcttttttaggtgtaaggacggcctgaagggttttacttttagcgctctccgcttcatcgttggaaaagaggagatccccacacactccttcagtcctgaggcggcatatgcaaaggtggaacaaaaacgcgagcagcatgaggaaaaacccggacggatgaatatgatcgggctggtgagaaaattcgttgatagcatctgcaaacacgggccacggcatcgatgctgcaaacactatgaggacaactgcatcagctattgcatcaagggttttatccgcatgttcagtgtcggctacctcatccagtgctgtctgcgcatcccctcagcctttcgacatttattcacccagccatccagactcctgtcattattttataacaaggaaaactttcagttgggcgcttttctgggcagtttcgtttccatttacaagggaacgagctgtttcctgcggtggattagaaatctggatgacgaactacatgctataatcgccggttttctcgcaggtatcagtatgatgttttacaagtccacgaccatcagcatgtacctggctagcaaacttgttgagactatgtattttaaagggattgaggcgggaaaagtgccatactttcctcacgcagatactatcatatactctatatccaccgcaatttgctttcaggccgcagtaatggaagtgcaaaccctgcgtccaagctactggaagttcctcctgcggctcacgaaaggaaaattcgctgtgatgaacagaaaggtgttggacgtcttcggcacaggggcttctaaacatttccaggattttattcccagactggatcctcgatacacaaccgtgactcccgagcttccgacagagttctcgtag

SEQ ID NO: 66371 - DNA, 483 bp, Artificial Sequence
  derived and/or modified sequence
atggccgcactctccaagtctattccccataattgttacgagatcggccatacatggcacccgagctgccgagtgagttttctccagattactgggggagcactcgaggaatccctcaaaatctatgcccctctgtacttaatagcggctatcctccggaaaagaaaactcgattattatttgcataagcttctgccagaaatcctgcagagtgcctctttcctgactgcaaacggagccctgtacatggcttttttttgtattttgcggaagatattaggcaagttttattcctggaccccaggattcggcgctgccttgcccgcttcctatgtcgcaatcctgattgaaagaaagtcaaggcgcggactgctgaccatatacatggcgaacttgatggaatcacattgtctcccgcaagccggtgtcatcagtgcgccatgctctctgtgcttgcccggatctcgcgacagcccagcatag

SEQ ID NO: 66372 - DNA, 888 bp, Artificial Sequence
  derived and/or modified sequence
atgtatatgtttttcttccgttgtaaggatgggttaaagggatttacattttctgccctgcgcttcattgttggtaaggaggaaatacccacccactccttcagtcctgaggcagcttacgctaaggtggagcagaagagggaacaacacgaagagaaaccaggacggatgaacatgatcggcttggtgaggaaattcgtggatagcatttgcaaacacgggcctcgccacaggtgctgtaaacactacgaggataactgtatctcatattgtatcaaaggattcatacgaatgttctcggtgggctatcttatacagtgctgtctccgtattccgtcagcctttcgccacctgtttactcagccctctcgactcctgagcttgttctataataaagagaattttcagttgggggctttcctgggatcattcgtgtccatatacaaaggaacttcatgcttccttagatggatccgcaatcttgacgacgagctccatgccatcattgcagggtttttggccggtatcagcatgatgttctataagtcaactactatctccatgtaccttgccagtaaactggtggaaaccatgtactttaaggggatcgaggctggcaaagttccttatttcccccacgcagacaccattatctattctatttctaccgcaatctgtttccaggccgcagtcatggaagtgcagacattgagaccctcatattggaaattcctgttacgtctgacaaaggggaagtttgcggttatgaatcgaaaggtccttgatgtatttgggacaggcgcatctaaacacttccaggacttcatcccgaggcttgaccctagatatacaactgtgaccccagagctgccgactgagtttagctag

SEQ ID NO: 66373 - DNA, 3894 bp, Artificial Sequence
  derived and/or modified sequence
gtcccgcccccttgagctgcgatacgccgagcgctcaacatccgaggactttggcccagagtaaccccgctctcgtgacctttcccctccattccgcacctccgagtgctggccgggcgagaggctggcggctgggctctcgcgcccctccctgcagggctcaggctctccccctcctgtcttctccgcgctgttcctcgtcatggcggccctcagcaagtccatccctcataactgctatgagatcggccacacttggcacccttcctgccgggtctccttcctgcagatcaccgggggcgccctggaggagtccctgaagatctatgctcctctgtacttgattgcagcaattctccggaaacggaaattagactattatttacacaaactactccctgagatcctacaatccgcttcatttctaactgctaatggggccttgtatatggctttcttttgcattttaaggaagatacttggaaaattctactcatggactcctggctttggtgccgctctgccagcatcttatgtggccattctcattgaaagaaaaagcaggagagggctgctcacaatttatatggccaacttggtccttttgttttgcatcacagctgccatgtacatgttctttttcaggtgcaaggatggcttgaaaggatttacattttctgcacttaggttcattgtagggaaggaagaaattcccacacattctttttcaccagaggcagcatatgcaaaagtggaacaaaagagagagcaacatgaggaaaaacccggaagaatgaatatgattggtctagtcaggaaatttgtggattcaatatgcaaacatggaccaaggcatagatgttgcaaacattatgaagataattgcatctcttattgcattaaaggtttcatcagaatgtttagcgtggggtacttgatccagtgctgcctccgaatcccttctgcatttaggcatctgtttacacagccatctcggctactttctctcttctacaataaagaaaacttccagcttggagcttttcttggctcttttgttagtatatacaagggtactagttgcttcctgcgctggatcagaaacttagatgatgaactacatgctattatagctggatttttggcaggtatatcaatgatgttttataaaagcacaacaatttccatgtatttagcgtccaaattggtagagacaatgtatttcaaaggcattgaagcagggaaggttccctattttcctcatgcagatactatcatctattccatctctacagcaatttgcttccaggcagctgtcatggaagttcagactttgagaccatcttactggaagttccttttaagactcaccaagggcaaatttgctgtcatgaaccgaaaagtccttgatgtttttggtactggtgcatctaaacactttcaggatttcatccccaggttggatccaagatacacaactgtaacaccagagttgcccacagagttttcctgaagatgactgtaacttattaatgtgactaaatgtttcatcttgaagagttaattatgttgaacacaaaggagggggcccaagctcgaacttcagtgttatttcagttagagatactcttttcatttgttttgtttttcttatgaatcagaaattcagaagctttttaggaagatgttgcttaataattaagcttcctccatagccagaataagattctggatcactgtagtgactgacattatatattattgatcaaattatgtccacaagcaatattatataatctacgtagaagtgtaataacaaacaagagtacacttaaaattactttaaaagatgtctttagttcattccaatataattcttgattaaaattaggattatttctacattttaggatttacaaaggatcacgggtacatggatttggtctatatatttttttaaagttttgaattggtatctgtagtagtggaatgttatagatttgaagtaactctccacggacagtgctgctttcgtgtagagcaatttaattggagaagtggccattcttacttcagggatgcaaagatgggtctcataccatttggataaatgtcgtggtatccatgctttttttcaactaataacatcatctctcttcatgaccagttaattgggctatttggcagcccagtgaacctatgtactaatggcaagttaggggcaaatggaaatggacacatccgataaagttgaaatgtatgttttaatctttcacagaagtattacacttgaatatttaaaaacaaaacttttaaacttcctataggtttatgatgtttgttttcatttatatggacataatccttcatagctcagtttatatgccattgttgtattagaagggatcaaaatcctatggaacaaagtagtcttggcaagttggcagtttgtgtcctctcagctgtttaacttatgtaatggatgttttgcacctgaaaacactataaaaatccagtggttgtttaaaaagtccatttgtcactaattccattcaggttctccaaccttcttcttgaatatcattgtcaccatttttactgttagaataaagaggtgacaccataaagtcctgctgataatgagagtagttcaggacagctgtgattgaaatatggtcgctatttacagtttttcagggaaaagttatacttttctatgttaataaagagctgaagtggtctacagttaatgtgacatgtagggatgatgatatttttaaaatacattttgttgctaaaaagtttttaggccagtgcaaattatgcagtagaacttgtgttgcaaaaggaattataacccatactttaaaaatgcttaatccctcatattcaatttcatcaagccttgtatacttctgcttaaatgtaattcaatccttggttgttatggcaaacagaaacccaacaaaaagacagactctggtactatggtaacagagccactttatcatttggtcaaaatttggcattatgattagctttgtagaactgacctgtttatttggcaatgctgttaaaggatcatttcggtttcagacttcaaagttgattaataaatttaatcttaactttttattcactggaatcaaaacgatggttggtactgtgtttactgtttaaaatgaagtactaaagccctgagaactgcacctcattttctttatccagaaattgtgcttatatattttcctgtcaggtttaaaaagatgttttaattcataaattattgttttcattgacattaaaagactgtgatattgaaagatgaattacgaaatttgctgagattgtttagtaaaattttgctggtcaaaaaggtgtatttctacaatttaccttttcatttttataaattgcagtcatttttttaaattttatgtaaaatgtaaaatgaaatagctatcatgaagcagaatacaatgatgaatgtataggttgagtgaataaccaatttgcagtggtggattgagaagtccagtttgatttcattgggacagactgcaaagtgtagttgtttgagcaaacacaaagaaactttgtgtttttgaagacaatcagaatgattacctttctacctctaactaatcaggtattgattgacaactttttggcattataaataaagtaaaatagatctctgcattccaaaatatgttttttagtttatttatatcctgaagaaatggtaagttttcactggaactgattacagtaaacaataatatgtccccttagtctttctgacatttttatatagattgagattgaaaaaccgtgcatttggggcagtggtattatggtcatttcgttgctattttctgttttaataaaatc

SEQ ID NO: 66374 - DNA, 1325 bp, Artificial Sequence
  derived and/or modified sequence
gcgcccctccctgcagggctcaggctctccccctcctgtcttctccgcgctgttcctcgtcatggcggccctcagcaagtccatccctcataactgctatgagatcggccacacttggcacccttcctgccgggtctccttcctgcagatcaccgggggcgccctggaggagtccctgaagatctatgctcctctgtacttgattgcagcaattctccggaaacggaaattagactattatttacacaaactactccctgagatcctacaatccgcttcatttctaactgctaatggggccttgtatatggctttcttttgcattttaaggaagatacttggaaaattctactcatggactcctggctttggtgccgctctgccagcatcttatgtggccattctcattgaaagaaaaagcaggagagggctgctcacaatttatatggccaacttgatggagtctcactgtcttccccaggctggagtgatttcagctccctgcagcctctgcctcccaggttcaagggattctcctgcctgagtctcctgagtagctgggactacaggggtgcaccattacacctggctaatttttgtatttttagtagagacgggatttcaccatgttggccaggtaagtcttgaactcctgacctcaagtgatctgcctgtctcggcctcccaaattgctgggattataggtgtgagccaccatgcctgtccaacataatgtttttgaggttcattcatatcagtactttttttttcccttttcatgactgaatagtattccattgtttggattacattttgtttatggacatattaattgaccatttggattatttccagttttcagttatgaaaattggagagaagtctttgggttgacatatgttttaatttctcttggcttgatacctaaatgtagaattgttaggtcataagaataatgcttaaaaaaaaagtagttccattttacattgccacttggcagtgtatgaggggtccagtttgtcagcatccttgccaacatttggtatgatcagactattttattatagccattctagaaatgtatggtaatttttatggtaattttcatttccctaatgactagtgatgttggacttcttttcatagtgcttattgggcatttgtatacattttgtgaaatgtctattaaattttcttgcccttttttcatggggtttattgtcttattactgaattgcaggaggtgactttgaaaagtttttcattttggatcaaatcttttattaaatataggatttgggaatatattttcccagatcgtggcc

SEQ ID NO: 66375 - DNA, 1440 bp, Artificial Sequence
  derived and/or modified sequence
cttgagctgcgatacgccgagcgctcaacatccgaggactttggcccagagtaaccccgctctcgtgacctttcccctccattccgcacctccgagtgctggccgggcgagaggctggcggctgggctctcgcgcccctccctgcagggctcaggctctccccctcctgtcttctccgcgctgttcctcgtcatggcggccctcagcaagtccatccctcacagctgccatgtacatgttctttttcaggtgcaaggatggcttgaaaggatttacattttctgcacttaggttcattgtagggaaggaagaaattcccacacattctttttcaccagaggcagcatatgcaaaagtggaacaaaagagagagcaacatgaggaaaaacccggaagaatgaatatgattggtctagtcaggaaatttgtggattcaatatgcaaacatggaccaaggcatagatgttgcaaacattatgaagataattgcatctcttattgcattaaaggtttcatcagaatgtttagcgtggggtacttgatccagtgctgcctccgaatcccttctgcatttaggcatctgtttacacagccatctcggctactttctctcttctacaataaagaaaacttccagcttggagcttttcttggctcttttgttagtatatacaagggtactagttgcttcctgcgctggatcagaaacttagatgatgaactacatgctattatagctggatttttggcaggtatatcaatgatgttttataaaagcacaacaatttccatgtatttagcgtccaaattggtagagacaatgtatttcaaaggcattgaagcagggaaggttccctattttcctcatgcagatactatcatctattccatctctacagcaatttgcttccaggcagctgtcatggaagttcagactttgagaccatcttactggaagttccttttaagactcaccaagggcaaatttgctgtcatgaaccgaaaagtccttgatgtttttggtactggtgcatctaaacactttcaggatttcatccccaggttggatccaagatacacaactgtaacaccagagttgcccacagagttttcctgaagatgactgtaacttattaatgtgactaaatgtttcatcttgaagagttaattatgttgaacacaaaggagggggcccaagctcgaacttcagtgttatttcagttagagatactcttttcatttgttttgtttttcttatgaatcagaaattcagaagctttttaggaagatgttgcttaataattaagcttcctccatagccagaataagattctggatcactgtagtgactgacattatatattattgatcaaattatgtccacaagcaatattatataatctacgtagaagtgtaataacaaacaagagtacacttaaa

SEQ ID NO: 66376 - protein, 266 aa, Artificial Sequence
  derived and/or modified sequence
MLLLTRSPTAWHRLSQLKPRVLPGTLGGQALHLRSWLLSRQGPAETGGQGQPQGPGLRTRLLITGLFGAGLGGAWLALRAEKERLQQQKRTEALRQAAVGQGDFHLLDHRGRARCKADFRGQWVLMYFGFTHCPDICPDELEKLVQVVRQLEAEPGLPPVQPVFITVDPERDDVEAMARYVQDFHPRLLGLTGSTKQVAQASHSYRVYYNAGPKDEDQDYIVDHSIAIYLLNPDGLFTDYYGRSRSAEQISDSVRRHMAAFRSVLS

SEQ ID NO: 66377 - protein, 136 aa, Artificial Sequence
  derived and/or modified sequence
MLLLTRSPTAWHRLSQLKPRVLPGTLGGQALHLRSWLLSRQGPAETGGQGQPQGPGLRTRLLITGLFGAGLGGAWLALRAEKERLQQQKRTEALRQAAVGQGDFHLLDHRGRARCKADFRGQWVLMYFGFTHCPDI

SEQ ID NO: 66378 - DNA, 801 bp, Artificial Sequence
  derived and/or modified sequence
atgctgttgctgactagatcccctaccgcatggcatcgactgtctcagctcaagccccgcgtcctcccggggaccctgggtggccaggctctgcatctgcgtagttggctgctctcacgccaaggtcccgccgaaaccggcgggcaggggcaacctcagggaccagggctaagaacccggctgctgattactggcctgttcggggcagggctcggcggtgcgtggctggctctgcgggccgagaaggaacggttgcaacagcaaaaacgtacagaggcacttagacaggcagccgtaggacagggagactttcatcttttagatcacagaggccgcgctcgatgcaaagctgacttccggggccagtgggttcttatgtatttcggatttacgcattgccccgatatctgccccgatgaattagaaaagctagtgcaggtggtgcgacaactcgaggccgaacctggcttgcctccagtgcagcccgtgttcataaccgtggatcctgagagagacgacgtcgaggcaatggcccgatatgtgcaggactttcatccccgactcttgggcctcaccgggagtacaaaacaggttgcccaggcctcacactcctaccgggtgtactacaacgcaggacctaaagatgaggaccaggactacatagtggaccattctattgcgatctatctgctcaaccctgatgggctgttcacagactactacgggcgtagtagaagcgcagagcaaattagtgattcagttcggagacatatggcagcctttcggagtgtcctgtcctag

SEQ ID NO: 66379 - DNA, 801 bp, Artificial Sequence
  derived and/or modified sequence
atgctcctgctgaccagatccccaaccgcctggcatcggctctctcagctcaaaccccgggtactcccagggactctcggcggacaggctctccacctgaggtcttggctgctctcgagacagggaccagcagaaacaggcgggcagggccaaccacaggggccaggattgcggacccgccttttaattactgggcttttcggtgccggtctggggggagcctggctggccctgcgggccgagaaggagcgactgcagcagcagaagagaactgaggctctgagacaagcagccgtggggcagggagatttccatttactcgatcataggggtagagcccgttgtaaagccgatttccgaggtcagtgggtactaatgtactttgggttcacacattgcccagacatctgtcctgatgagctagagaagctcgttcaggtggttcgacaacttgaggccgagccaggcttgccccccgttcaaccagtgttcataactgttgatccagaacgagatgacgtagaagccatggccaggtacgtgcaagacttccaccccaggctcctcgggctgaccggcagcactaagcaagttgcacaagcctcccactcttaccgggtgtactataacgcagggcctaaggatgaagaccaagactacattgtcgatcattcaattgcgatctatctgctcaaccccgatggcctgttcacagactattatggacggagccgcagtgcggagcagatctcagattccgttcgaagacacatggccgctttcaggagcgtgctatcctag

SEQ ID NO: 66380 - DNA, 411 bp, Artificial Sequence
  derived and/or modified sequence
atgctcctcttgacccgctcaccaactgcctggcaccgcctcagccagctcaaacccagagtgctgcctggcacgcttggcggccaggccctacatctgaggtcctggctactgtctaggcagggtccagccgaaactgggggccagggccagccacagggccccggcctgagaaccaggcttctgatcactgggttgtttggagctgggctaggcggtgcttggctggctctcagggcggaaaaggagcgacttcagcagcagaagaggaccgaggctctgaggcaggccgcggtaggccagggtgatttccatctgctggaccatcgggggcgtgccagatgtaaagctgatttcaggggacaatgggtcctgatgtacttcggttttacccactgcccagacatatag

SEQ ID NO: 66381 - DNA, 411 bp, Artificial Sequence
  derived and/or modified sequence
atgctcctcctgactcgcagtcccactgcctggcaccgcctgagccaactgaaaccaagagtgcttccggggaccctgggcggacaggcgctgcacctgcgatcctggctgctgagcagacaaggcccagcagagactggcggtcagggtcagccccaaggccccggactgcggacccggttgttgattacaggccttttcggagcggggctaggaggcgcgtggcttgccttgagagcagagaaggaaagattacagcagcagaagaggaccgaagcactccgacaggcggctgttgggcagggggactttcacctgttggatcacagggggagagctaggtgcaaggctgactttagaggccaatgggtgttgatgtactttggatttacacactgtcccgatatttag

SEQ ID NO: 66382 - DNA, 801 bp, Artificial Sequence
  derived and/or modified sequence
atgctcctgctcaccaggagtcccacggcatggcatcgcctaagtcagctgaaaccccgggttttaccagggacactgggtggtcaggctcttcatctgcggagctggctgctcagtcggcaggggcccgctgaaaccggagggcagggacagccgcaggggccagggcttcgtaccaggcttctaataaccgggctgttcggggccggtcttggcggggcctggctggctctgcgggccgagaaggagcggctgcagcagcagaagcgtaccgaagcccttcgccaggctgccgtggggcagggtgacttccatctgctggaccacaggggcagggcgagatgcaaggccgatttccgcggtcagtgggttctgatgtactttggcttcacacattgtcccgacatctgccctgatgaattggaaaaattggtgcaggtcgttcggcaactcgaagccgagccaggattaccacctgtgcagccagtgttcattacggtggatccagaacgagatgacgtcgaagctatggccaggtacgtgcaggatttccatccaagactgctgggtctgactgggagcactaaacaggttgcccaggcctctcactcgtatagagtctactataatgcaggtccgaaggatgaggaccaggattatatcgtcgatcacagtatcgctatttacctgctcaatcccgacgggctgttcaccgattattatggcagatcccgcagcgccgaacagatcagtgacagcgtgcggagacatatggcggcttttcgaagtgtgctctcttag

SEQ ID NO: 66383 - DNA, 801 bp, Artificial Sequence
  derived and/or modified sequence
atgctgctccttacccggtcccctacagcctggcaccgacttagccaacttaaaccacgtgttctgcctggcacccttggcggacaggccttacaccttaggtcctggttattgtcgcgccagggcccagctgaaactggaggccaggggcagccccaggggcccgggctcagaaccagattgctcattacggggcttttcggggcggggctgggaggcgcatggctggctctgcgcgcggagaaggagcgcctgcagcaacaaaaaaggaccgaagcactgagacaggccgcagtgggtcagggcgacttccacctactggatcatagagggagggcgcgctgtaaagccgatttccgtggacaatgggtacttatgtactttggcttcacacactgccctgatatttgccccgatgagctggagaaacttgtacaggtcgtcagacagctcgaggctgaaccaggacttccccctgtgcagcccgtgttcattactgttgatcccgagcgagatgacgtcgaggccatggctaggtatgtacaggactttcaccctcgcctgctcggcctgacagggtcaactaagcaggtggctcaagcttcccacagctacagagtatattataacgccggacccaaagatgaggaccaggattatatagtcgaccactccattgcaatatatctcttgaatccggacgggttgttcacagattactacggaagatccagatcagccgagcagatctcagactctgttcgtaggcacatggccgcgtttagatcggtgttgtcttag

SEQ ID NO: 66384 - DNA, 801 bp, Artificial Sequence
  derived and/or modified sequence
atgctgctgctgaccaggagccccacagcctggcaccggctgagccagctgaagccccgggtgctgcccggcaccctgggcggccaggccctgcacctgcgctcctggctgctgagccggcagggccctgctgagaccggcggccagggccagccccagggccctggcctgcggacccggctgctgatcaccggcctgtttggagctggcctgggcggggcctggctggccctgcgggcagagaaggagcggctgcagcagcagaagaggacagaggccctgcggcaggccgctgtgggccagggcgacttccacctgctggaccaccggggccgggcccgctgcaaggctgacttccggggccagtgggtgctgatgtacttcggcttcacccactgcccagacatctgcccagatgagctggagaagctggtgcaggtggtgcggcagctggaggccgagcccggcctgccccctgtgcagcccgtcttcatcaccgtggaccctgagagagatgatgtggaggccatggcccgctacgtgcaggacttccacccccggctgctgggcctgaccggcagcaccaagcaggtggcccaggccagccacagctacagagtgtactacaatgccggccccaaggatgaggaccaggactacatcgtggaccacagcatcgccatctacctgctgaacccagatggcctcttcacagactactacggccgcagccgctctgctgagcagatcagtgacagcgtgagaagacacatggccgccttccgctctgtgctgtcctag

SEQ ID NO: 66385 - DNA, 411 bp, Artificial Sequence
  derived and/or modified sequence
atgctgctgctgaccaggagccccacagcctggcaccggctgagccagctgaagccccgggtgctgcccggcaccctgggcggccaggccctgcacctgcgctcctggctgctgagccggcagggccctgctgagaccggcggccagggccagccccagggccctggcctgcggacccggctgctgatcaccggcctgtttggagctggcctgggcggggcctggctggccctgcgggcagagaaggagcggctgcagcagcagaagaggacagaggccctgcggcaggccgctgtgggccagggcgacttccacctgctggaccaccggggccgggcccgctgcaaggctgacttccggggccagtgggtgctgatgtacttcggcttcacccactgcccagacatctag

SEQ ID NO: 66386 - DNA, 801 bp, Artificial Sequence
  derived and/or modified sequence
atgctgctgctgacccggagccccaccgcctggcaccggctgagccaacttaagccgcgtgtactgcctggcacccttggcggccaagcattgcacctgagatcttggctcctgagcaggcagggcccagccgagacgggggggcaagggcagcctcaaggcccagggctgcgcactaggttactgataacggggctttttggggccgggctcgggggtgcctggttggctttgcgcgccgaaaaagagcgcttacagcaacagaagaggacggaggctctgaggcaggccgccgtgggccagggcgattttcacttgttggaccaccggggacgagctaggtgcaaggcagatttccggggacaatgggtgctgatgtacttcggttttacacactgcccggacatatgccccgatgagctggaaaagctggtgcaggtcgtgcgccagttagaagctgagcctgggttgccacctgtgcagccagtgtttataaccgtggacccggaacgtgacgacgtggaagctatggcacgatatgtgcaagactttcatccaagactgctggggcttaccgggtctacgaaacaggtggcacaggcctcgcattcctacagggtatactacaacgccgggcctaaagatgaggaccaggattacatcgtcgatcattctatagcaatctacttgctaaatccagacggcttgttcactgactactacgggcggtcccgctcggccgaacagatctccgattctgttcgccgccatatggccgcttttaggtccgtcctgtcatag

SEQ ID NO: 66387 - DNA, 801 bp, Artificial Sequence
  derived and/or modified sequence
atgctgctgctgacccggagccccaccgcctggcaccggctgagccaactaaaaccacgggtgctgccgggaacactggggggccaggccctacatctccgctcctggctgttgtcccgccaggggcccgcagaaacaggagggcaaggccagccgcaggggccggggctgcgaaccaggttattaattacagggctcttcggcgccggcctgggtggcgcttggctggccctcagggccgaaaaggagcgcctccagcagcagaagcggacagaggctctgcgtcaggctgctgtggggcagggtgattttcacttgctggaccaccggggaagagcaagatgtaaggccgactttcgtggacagtgggtgttaatgtacttcggctttacacattgcccagacatctgccccgacgaactggagaaattggttcaagttgtgcggcaacttgaagcagagcccggattaccacctgtgcagccggtgttcattacagttgacccagagagagatgacgtcgaagcaatggcccgctatgtgcaggatttccaccctagacttctcggacttacagggtctactaagcaggtggcacaggcctcccacagttacagggtgtactacaacgccgggcccaaagacgaggaccaggactatattgtggaccactctatcgctatttaccttcttaaccctgacgggctttttacagactactatggaagaagtcggtccgcagagcagatttccgacagcgtgcggcgacacatggcagcctttagatccgtcctgtcctag

SEQ ID NO: 66388 - DNA, 411 bp, Artificial Sequence
  derived and/or modified sequence
atgctgctgctgacccggagccccaccgcctggcaccggctgagccagctaaaacctagggtattacccggcacactgggtggacaagctttgcacctgagaagttggctgctgagcaggcaaggccctgcagagacgggaggccagggacagcctcagggtccgggcctgcggacacgtttgcttatcactggcctctttggtgcaggcctgggaggcgcctggctggctctgagagcggaaaaagaaagactgcaacagcagaaaaggaccgaagcacttcgtcaggccgctgtgggtcagggagatttccatttgctggatcatagagggcgagccagatgcaaagctgactttcgcggacagtgggtgttgatgtacttcggctttacccattgtcctgatatttag

SEQ ID NO: 66389 - DNA, 411 bp, Artificial Sequence
  derived and/or modified sequence
atgctgctgctgacccggagccccaccgcctggcaccggctgagccaacttaaaccacgggtgctgcctggaacgttaggtggccaggccctacacttgcgcagctggctcctgagtaggcaggggcctgccgaaacaggcggtcagggtcagccacagggccctggccttcgcactcgtctgctcattactggcctcttcggcgcagggcttggcggagcttggctcgctctgcgggcagaaaaagagcgcttgcagcagcagaagcgcacagaagccctgaggcaagccgcagtgggccaaggagacttccacctgcttgaccacagagggcgggctagatgcaaagctgattttagaggacagtgggtcctcatgtactttggcttcacccattgccccgatatatag

SEQ ID NO: 66390 - DNA, 801 bp, Artificial Sequence
  derived and/or modified sequence
atgctgctgctgacccggagccccaccgcctggcaccggctgagccagttaaagcctagagtgctgcctggaacgcttgggggacaggctcttcacttgaggtcatggttattgtcccgacagggccccgcagaaacagggggtcagggccagccacaaggacccggcttgcgtaccagactgctgataaccggcctgttcggagccgggctcggcggagcctggcttgccttgcgcgctgagaaggaacgactccagcagcagaagcggactgaagccctcaggcaggccgccgtcggccagggagatttccatcttctcgaccacaggggtcgagctagatgtaaagccgacttccgtgggcagtgggtgttaatgtacttcggttttacacattgtcccgacatctgtccagacgaactagagaagctcgtgcaggtggttagacagctcgaagcggagcctggcctccctcccgtacagccggttttcataaccgtcgacccggagagagatgacgtggaggccatggctcgctacgtgcaggactttcatccaagactgttaggactaactggatccacaaaacaggttgcacaggcctcccattcataccgggtatattacaacgccgggcccaaggatgaggaccaggattatattgtggatcactcaatcgctatatatctcctcaatcccgacggcctgttcaccgactattatggccgtagccgcagcgcagagcagatttcagatagcgtgcgcaggcacatggccgcctttcgctccgtgttgtcatag

SEQ ID NO: 66391 - DNA, 801 bp, Artificial Sequence
  derived and/or modified sequence
atgctgctgctgacccggagccccaccgcctggcaccggctgagccaactgaagcctcgcgtgctgccaggaaccttgggggggcaggccctccacctgcggagctggttgttaagccggcaggggccagcggaaactggcggacaaggccagccgcaaggacctggtttgcgaaccagattgttgattactgggctgttcggggccggattaggaggagcatggttggcactgcgcgcggagaaggagaggctccagcaacagaagcgaacagaagccttaaggcaagcggcagtcggacaaggggacttccacctgctcgatcacaggggcagagcacggtgtaaggctgatttccgcggtcagtgggtactgatgtacttcggtttcacacattgccctgacatttgcccagatgaactagaaaagttggtgcaggtcgtaaggcagctcgaagctgaaccaggcttgccccctgttcaacctgtgttcatcactgtcgatccagaacgggacgatgtcgaggccatggccagatacgtacaagactttcacccacggctgttgggtctcaccgggagcacgaaacaggtggctcaggcatcgcactcctaccgagtttactacaatgctggccctaaagacgaggaccaggattacattgtggaccactctattgctatttatctgttgaacccggatggactcttcacggattattacgggcggagcagatccgccgagcaaatatccgacagcgttcgacgccatatggccgcttttaggagcgtgcttagctag

SEQ ID NO: 66392 - DNA, 801 bp, Artificial Sequence
  derived and/or modified sequence
atgttgctcctcaccagatccccgactgcttggcacagactgtcacagctgaaaccaagagtccttccgggaaccctggggggacaggccctccatctgcggtcctggctgctgtcaagacaaggacccgctgagacggggggacagggacagccgcaaggacccggactgcgcacaaggctgctgattacgggccttttcggcgctggactcggaggggcttggttagccctgagggcagaaaaggagagacttcagcagcagaagagaaccgaagccctcagacaggcagcggtgggccagggtgacttccaccttctcgaccatcggggacgcgcaaggtgcaaagcagattttagaggacaatgggtcctcatgtattttggcttcacccattgccctgacatctgcccagacgagctggagaaactggtccaggtcgtgaggcagctggaggctgaaccaggacttccaccagtgcagcccgtgtttataacggtagatccagagagggacgacgtggaagcaatggccaggtacgttcaggattttcaccccaggctgctgggactgaccggcagtactaaacaggtcgcccaggcctcacactcctaccgtgtctactacaacgccggtccgaaagacgaggaccaggattacatcgtagaccattcaattgcaatctatctgctgaatccagacggattgtttactgattattatggcaggagcaggtccgctgaacaaatttccgacagcgtcagacggcatatggccgcttttcgcagtgttctgtcatag

SEQ ID NO: 66393 - DNA, 801 bp, Artificial Sequence
  derived and/or modified sequence
atgctgctgcttacacggagcccaacagcatggcatcggctgagccagctgaaacctagagttttgcctgggaccctggggggacaggccctgcatcttagaagttggctcctgtctaggcagggtccagccgagacaggtggccagggccagccacaggggcctggccttcgtacgagactcctgataactgggttgtttggcgcagggcttgggggagcttggctcgccctgcgcgctgagaaagagcggttacagcaacaaaagaggacagaggcactgcggcaggctgccgtggggcagggcgactttcatcttcttgaccacagggggagagccaggtgcaaagctgactttcgaggacagtgggtgctcatgtattttggttttacacactgtccagatatctgcccggacgagctcgagaagttggtccaagtagtgaggcagctggaagcggaacctgggctgccacccgtccaacccgtgttcatcacggtggaccctgagagggatgatgtggaggccatggccagatatgttcaggattttcaccctcgacttcttggcctgactgggagtacaaaacaggtagctcaggcctctcactcatatcgggtgtactataacgccggacctaaggacgaggaccaggactacatagtggaccattctattgccatatacctcctcaatcctgacgggctgtttactgattattacggacgcagccggagcgcggagcagatctctgacagcgtacggaggcatatggcagctttcagatcagtgctgagttag

SEQ ID NO: 66394 - DNA, 411 bp, Artificial Sequence
  derived and/or modified sequence
atgctgctgttgaccagatccccaactgcgtggcatagactgagccagctgaagccccgagtgctccctggtacgctcggcggacaggccctccacctgcgctcttggcttctgtcgagacagggtccggctgaaactggcggacaagggcaaccgcagggcccaggtctgagaaccagattgttgattaccggcctgttcggggctggcctcggtggggcatggctcgccctccgcgctgagaaagagagattgcagcaacagaaacgaaccgaagctctgaggcaggctgcggtggggcaaggtgactttcatttacttgatcatcgtggtagggccagatgcaaagctgacttcagggggcagtgggtgttgatgtactttggctttactcactgccctgacatctag

SEQ ID NO: 66395 - DNA, 411 bp, Artificial Sequence
  derived and/or modified sequence
atgttgctcctaacccgcagcccaacggcttggcatcggttgagccagttgaaaccacgggtcctcccagggacactggggggacaggctctccatctgcggagctggcttctgtctcggcagggcccagccgagaccggaggccagggacaaccacagggacctggtcttagaacccgtctgcttattacaggcttattcggtgccggacttggaggagcttggctcgcattgcgcgctgagaaggagcgcctgcagcagcagaagaggaccgaggctctgagacaggccgcagtcgggcagggcgatttccacttgttagaccataggggtcgcgctagatgcaaggcggacttccgcggacagtgggtcctgatgtatttcggattcacccactgtccggatatatag

SEQ ID NO: 66396 - DNA, 801 bp, Artificial Sequence
  derived and/or modified sequence
atgttgctgctgacaagatcacccactgcgtggcaccgtctgagccaactaaagccccgtgtgctgcctggcacgctcggcggacaggctttgcatctcagatcttggttgctttctcggcagggtccagcggaaacaggaggtcagggtcagcctcagggcccaggattacgaacgcggctcctgatcaccgggcttttcggtgcgggactgggtggcgcatggctggcattgagagcagagaaggaaaggctccagcagcagaagcgaacagaagccctccggcaggctgctgtcggacagggcgactttcacctcttagaccatcgtggacgtgctcgctgcaaagcggacttcagaggacaatgggtgctcatgtattttgggttcacccattgtcctgatatttgcccggatgagctggaaaaactcgtgcaggtggtgcgtcagctagaggccgaacccggactaccacctgttcagcctgtgtttatcactgttgacccagagagagacgatgtggaggcaatggcacgctatgtgcaggatttccacccccgactcttgggcttgacaggcagtaccaagcaagtcgctcaagcttcacattcgtaccgggtatattataatgcaggcccaaaagatgaggaccaggactatatagtggaccactcaatagcaatctatcttctgaaccccgatggactctttacagattactatgggaggtctcggagtgccgaacagatatctgacagcgtcaggcgacatatggcggctttccggagcgtgttgtcttag

SEQ ID NO: 66397 - DNA, 801 bp, Artificial Sequence
  derived and/or modified sequence
atgctgctcctcacacgcagccctaccgcttggcaccggttgtctcagctgaaacccagggttcttccgggaacattgggtggacaggcactgcacttgagatcgtggctcctctcaagacaggggccagccgagactggcggtcagggacagccccaagggcctgggctccgcacccggctgttgatcacgggcctattcggcgcagggctgggcggagcctggttggccttgcgtgcggaaaaggaacgcttgcagcaacagaagcgcaccgaagccctgcggcaggccgctgtcgggcagggagactttcacctgttggatcacagggggagagctagatgtaaagccgattttagaggccagtgggtgctgatgtactttggctttacccactgtcccgatatctgtccagatgagctggaaaaattggtgcaagtggtgcggcagctggaagccgaacccggattaccgcctgtccagcccgtgttcataaccgtagaccccgaacgggacgatgtggaagccatggcaaggtacgtacaggattttcaccctagacttctggggctgacaggctccactaagcaggtggctcaggcctcccacagttacagggtctactacaatgcaggacctaaagacgaagaccaggattacatcgtcgaccatagcatagccatctaccttctcaatcctgatggactctttactgattattatggcaggagtcggagcgccgaacagatcagtgatagtgtccgaagacacatggccgcttttcggtccgtgctgagttag

SEQ ID NO: 66398 - DNA, 992 bp, Artificial Sequence
  derived and/or modified sequence
tccggggacgcctgcgccctgcctgtgagcgtgtggcgcccgctttccctgagccggcggggcagagcgcagggagctggaggtcggcgcttcctctcgtgcttggtccactgacgcgcggccccgccgcgaggtgcggacgccggggctgggaggggaggaggagcatcagatccatgctgctgctgactcggagccccacagcttggcacaggctctctcagctcaagcctcgggtcctccctgggaccctgggaggccaggccctgcatctgaggtcctggcttttgtcaaggcagggccctgcagagacaggtgggcagggccagccccagggccctgggcttcgaacccggctgctgatcacaggcctgttcggggctggactcggtggggcctggctggccctgagggctgagaaggagaggctgcagcagcaaaagcgaacagaagccctgcgccaggcagctgtgggccagggcgacttccacctgctggatcacagaggccgggctcgctgcaaggctgacttccggggccagtgggtgctgatgtactttggcttcactcactgccctgacatctgcccagacgagctggagaagctggtgcaggtggtgcggcagctggaagcagagcctggtttgcctccagtgcagcctgtcttcatcactgtggaccccgagcgggacgacgttgaagccatggcccgctacgtccaggacttccacccaagactgttgggtctgaccggctccaccaaacaggttgcccaggctagtcacagttaccgcgtgtactacaatgcaggccccaaggatgaggaccaggactacatcgtggaccactccattgccatctacctgctcaaccctgacggcctcttcacggattactacggccggagcagatcggctgagcagatctcagacagtgtgcggcggcacatggcggctttccgcagtgtcctgtcttgagccactgcagtctgg

SEQ ID NO: 66399 - DNA, 992 bp, Artificial Sequence
  derived and/or modified sequence
gctccggggacgcctgcgccctgcctgtgagcgtgtggcgcccgctttccctgagccggcggggcagagcgcagggagctggaggtcggcgcttcctctcgtgcttggtccactgacgcgcggccccgccgcgaggagcatcagatccatgctgctgctgactcggagccccacagcttggcacaggctctctcagctcaagcctcgggtcctccctgggaccctgggaggccaggccctgcatctgaggtcctggcttttgtcaaggcagggccctgcagagacaggtgggcagggccagccccagggccctgggcttcgaacccggctgctgatcacaggcctgttcggggctggactcggtggggcctggctggccctgagggctgagaaggagaggctgcagcagcaaaagcgaacagaagccctgcgccaggcagctgtgggccagggcgacttccacctgctggatcacagaggccgggctcgctgcaaggctgacttccggggccagtgggtgctgatgtactttggcttcactcactgccctgacatctgcccagacgagctggagaagctggtgcaggtggtgcggcagctggaagcagagcctggtttgcctccagtgcagcctgtcttcatcactgtggaccccgagcgggacgacgttgaagccatggcccgctacgtccaggacttccacccaagactgttgggtctgaccggctccaccaaacaggttgcccaggctagtcacagttaccgcgtgtactacaatgcaggccccaaggatgaggaccaggactacatcgtggaccactccattgccatctacctgctcaaccctgacggcctcttcacggattactacggccggagcagatcggctgagcagatctcagacagtgtgcggcggcacatggcggctttccgcagtgtcctgtcttgagccactgcagtctgggccccatcattaaacgggctgcgtttaa

SEQ ID NO: 66400 - DNA, 617 bp, Artificial Sequence
  derived and/or modified sequence
tcaggcccagggcgctgcccgggtggccgcggcgctggacgacggctcggcccttggccgcttcgagcggatgctggcggcgcagggcgtggatcccggtctggcccgagccctgtgctcgggaagtcccgcagaacgccggcagctgctgcctcgcgcccgggagcaggaggagctgctggcgcccgcagatggagcatcagatccatgctgctgctgactcggagccccacagcttggcacaggctctctcagctcaagcctcgggtcctccctgggaccctgggaggccaggccctgcatctgaggtcctggcttttgtcaaggcagggccctgcagagacaggtgggcagggccagccccagggccctgggcttcgaacccggctgctgatcacaggcctgttcggggctggactcggtggggcctggctggccctgagggctgagaaggagaggctgcagcagcaaaagcgaacagaagccctgcgccaggcagctgtgggccagggcgacttccacctgctggatcacagaggccgggctcgctgcaaggctgacttccggggccagtgggtgctgatgtactttggcttcactcactgccctgacatctg

SEQ ID NO: 66401 - DNA, 568 bp, Artificial Sequence
  derived and/or modified sequence
gcaggcaccgtggagctggtccgggcgctgccgctggcgctggtgctgcacgagctcggggccgggcgcagccgcgctggggagccgctccgcctgggggtgggcgcagagctgctggtcgacgtgggtcagaggctgcgccgtggagcatcagatccatgctgctgctgactcggagccccacagcttggcacaggctctctcagctcaagcctcgggtcctccctgggaccctgggaggccaggccctgcatctgaggtcctggcttttgtcaaggcagggccctgcagagacaggtgggcagggccagccccagggccctgggcttcgaacccggctgctgatcacaggcctgttcggggctggactcggtggggcctggctggccctgagggctgagaaggagaggctgcagcagcaaaagcgaacagaagccctgcgccaggcagctgtgggccagggcgacttccacctgctggatcacagaggccgggctcgctgcaaggctgacttccggggccagtgggtgctgatgtactttggcttcactcactgccctgacatctg

SEQ ID NO: 66402 - DNA, 1002 bp, Artificial Sequence
  derived and/or modified sequence
gcaggcaccgtggagctggtccgggcgctgccgctggcgctggtgctgcacgagctcggggccgggcgcagccgcgctggggagccgctccgcctgggggtgggcgcagagctgctggtcgacgtgggtcagaggctgcgccgtggagcatcagatccatgctgctgctgactcggagccccacagcttggcacaggctctctcagctcaagcctcgggtcctccctgggaccctgggaggccaggccctgcatctgaggtcctggcttttgtcaaggcagggccctgcagagacaggtgggcagggccagccccagggccctgggcttcgaacccggctgctgatcacaggcctgttcggggctggactcggtggggcctggctggccctgagggctgagaaggagaggctgcagcagcaaaagcgaacagaagccctgcgccaggcagctgtgggccagggcgacttccacctgctggatcacagaggccgggctcgctgcaaggctgacttccggggccagtgggtgctgatgtactttggcttcactcactgccctgacatctgcccagacgagctggagaagctggtgcaggtggtgcggcagctggaagcagagcctggtttgcctccagtgcagcctgtcttcatcactgtggaccccgagcgggacgacgttgaagccatggcccgctacgtccaggacttccacccaagactgttgggtctgaccggctccaccaaacaggttgcccaggctagtcacagttaccgcgtgtactacaatgcaggccccaaggatgaggaccaggactacatcgtggaccactccattgccatctacctgctcaaccctgacggcctcttcacggattactacggccggagcagatcggctgagcagatctcagacagtgtgcggcggcacatggcggctttccgcagtgtcctgtcttgagccactgcagtctgggccccatcattaaacgggctgcgtttaa

SEQ ID NO: 66403 - DNA, 1051 bp, Artificial Sequence
  derived and/or modified sequence
tcaggcccagggcgctgcccgggtggccgcggcgctggacgacggctcggcccttggccgcttcgagcggatgctggcggcgcagggcgtggatcccggtctggcccgagccctgtgctcgggaagtcccgcagaacgccggcagctgctgcctcgcgcccgggagcaggaggagctgctggcgcccgcagatggagcatcagatccatgctgctgctgactcggagccccacagcttggcacaggctctctcagctcaagcctcgggtcctccctgggaccctgggaggccaggccctgcatctgaggtcctggcttttgtcaaggcagggccctgcagagacaggtgggcagggccagccccagggccctgggcttcgaacccggctgctgatcacaggcctgttcggggctggactcggtggggcctggctggccctgagggctgagaaggagaggctgcagcagcaaaagcgaacagaagccctgcgccaggcagctgtgggccagggcgacttccacctgctggatcacagaggccgggctcgctgcaaggctgacttccggggccagtgggtgctgatgtactttggcttcactcactgccctgacatctgcccagacgagctggagaagctggtgcaggtggtgcggcagctggaagcagagcctggtttgcctccagtgcagcctgtcttcatcactgtggaccccgagcgggacgacgttgaagccatggcccgctacgtccaggacttccacccaagactgttgggtctgaccggctccaccaaacaggttgcccaggctagtcacagttaccgcgtgtactacaatgcaggccccaaggatgaggaccaggactacatcgtggaccactccattgccatctacctgctcaaccctgacggcctcttcacggattactacggccggagcagatcggctgagcagatctcagacagtgtgcggcggcacatggcggctttccgcagtgtcctgtcttgagccactgcagtctgggccccatcattaaacgggctgcgtttaa

SEQ ID NO: 66404 - DNA, 801 bp, Artificial Sequence
  derived and/or modified sequence
atgctgctgctgaccagaagccccaccgcctggcacagactgagccagctgaagcccagagtgctgcccggcaccctgggcggccaggccctgcacctgagaagctggctgctgagcagacagggccccgccgagaccggcggccagggccagccccagggccccggcctgagaaccagactgctgatcaccggcctgttcggcgccggcctgggcggcgcctggctggccctgagagccgagaaggagagactgcagcagcagaagagaaccgaggccctgagacaggccgccgtgggccagggcgacttccacctgctggaccacagaggcagagccagatgcaaggccgacttcagaggccagtgggtgctgatgtacttcggcttcacccactgccccgacatctgccccgacgagctggagaagctggtgcaggtggtgagacagctggaggccgagcccggcctgccccccgtgcagcccgtgttcatcaccgtggaccccgagagagacgacgtggaggccatggccagatacgtgcaggacttccaccccagactgctgggcctgaccggcagcaccaagcaggtggcccaggccagccacagctacagagtgtactacaacgccggccccaaggacgaggaccaggactacatcgtggaccacagcatcgccatctacctgctgaaccccgacggcctgttcaccgactactacggcagaagcagaagcgccgagcagatcagcgacagcgtgagaagacacatggccgccttcagaagcgtgctgagctag

SEQ ID NO: 66405 - DNA, 411 bp, Artificial Sequence
  derived and/or modified sequence
atgctgctgctgaccagaagccccaccgcctggcacagactgagccagctgaagcccagagtgctgcccggcaccctgggcggccaggccctgcacctgagaagctggctgctgagcagacagggccccgccgagaccggcggccagggccagccccagggccccggcctgagaaccagactgctgatcaccggcctgttcggcgccggcctgggcggcgcctggctggccctgagagccgagaaggagagactgcagcagcagaagagaaccgaggccctgagacaggccgccgtgggccagggcgacttccacctgctggaccacagaggcagagccagatgcaaggccgacttcagaggccagtgggtgctgatgtacttcggcttcacccactgccccgacatctag

SEQ ID NO: 66406 - protein, 686 aa, Artificial Sequence
  derived and/or modified sequence
MNAAGIRAPEAAGADGTRLAPGGSPCLRRRGRPEESPAAVVAPRGAGELQAAGAPLRFHPASPRRLHPASTPGPAWGWLLRRRRWAALLVLGLLVAGAADGCELVPRHLRGRRATGSAATAASSPAAAAGDSPALMTDPCMSLSPPCFTEEDRFSLEALQTIHKQMDDDKDGGIEVEESDEFIREDMKYKDATNKHSHLHREDKHITIEDLWKRWKTSEVHNWTLEDTLQWLIEFVELPQYEKNFRDNNVKGTTLPRIAVHEPSFMISQLKISDRSHRQKLQLKALDVVLFGPLTRPPHNWMKDFILTVSIVIGVGGCWFAYTQNKTSKEHVAKMMKDLESLQTAEQSLMDLQERLEKAQEENRNVAVEKQNLERKMMDEINYAKEEACRLRELREGAECELSRRQYAEQELEQVRMALKKAEKEFELRSSWSVPDALQKWLQLTHEVEVQYYNIKRQNAEMQLAIAKDEAEKIKKKRSTVFGTLHVAHSSSLDEVDHKILEAKKALSELTTCLRERLFRWQQIEKICGFQIAHNSGLPSLTSSLYSDHSWVVMPRVSIPPYPIAGGVDDLDEDTPPIVSQFPGTMAKPPGSLARSSSLCRSRRSIVPSSPQPQRAQLAPHAPHPSHPRHPHHPQHTPHSLPSPDPDILSVSSCPALYRNEEEEEAIYFSAEKQCIHLGLGACKSE

SEQ ID NO: 66407 - protein, 599 aa, Artificial Sequence
  derived and/or modified sequence
LLVLGLLVAGAADGCELVPRHLRGRRATGSAATAASSPAAAAGDSPALMTDPCMSLSPPCFTEEDRFSLEALQTIHKQMDDDKDGGIEVEESDEFIREDMKYKDATNKHSHLHREDKHITIEDLWKRWKTSEVHNWTLEDTLQWLIEFVELPQYEKNFRDNNVKGTTLPRIAVHEPSFMISQLKISDRSHRQKLQLKALDVVLFGPLTRPPHNWMKDFILTVSIVIGVGGCWFAYTQNKTSKEHVAKMMKDLESLQTAEQSLMDLQERLEKAQEENRNVAVEKQNLERKMMDEINYAKEEACRLRELREGAECELSRRQYAEQELEQVRMALKKAEKEFELRSSWSVPDALQKWLQLTHEVEVQYYNIKRQNAEMQLAIAKDEAEKIKKKRSTVFGTLHVAHSSSLDEVDHKILEAKKALSELTTCLRERLFRWQQIEKICGFQIAHNSGLPSLTSSLYSDHSWVVMPRVSIPPYPIAGGVDDLDEDTPPIVSQFPGTMAKPPGSLARSSSLCRSRRSIVPSSPQPQRAQLAPHAPHPSHPRHPHHPQHTPHSLPSPDPDILSVSSCPALYRNEEEEEAIYFSAEKQCIHLGLGACKSE

SEQ ID NO: 66408 - DNA, 2061 bp, Artificial Sequence
  derived and/or modified sequence
atgaacgccgccggcatcagagcccccgaggccgccggcgccgacggcaccagactggcccccggcggcagcccctgcctgagaagaagaggcagacccgaggagagccccgccgccgtggtggcccccagaggcgccggcgagctgcaggccgccggcgcccccctgagattccaccccgccagccccagaagactgcaccccgccagcacccccggccccgcctggggctggctgctgagaagaagaagatgggccgccctgctggtgctgggcctgctggtggccggcgccgccgacggctgcgagctggtgcccagacacctgagaggcagaagagccaccggcagcgccgccaccgccgccagcagccccgccgccgccgccggcgacagccccgccctgatgaccgacccctgcatgagcctgagccccccctgcttcaccgaggaggacagattcagcctggaggccctgcagaccatccacaagcagatggacgacgacaaggacggcggcatcgaggtggaggagagcgacgagttcatcagagaggacatgaagtacaaggacgccaccaacaagcacagccacctgcacagagaggacaagcacatcaccatcgaggacctgtggaagagatggaagaccagcgaggtgcacaactggaccctggaggacaccctgcagtggctgatcgagttcgtggagctgccccagtacgagaagaacttcagagacaacaacgtgaagggcaccaccctgcccagaatcgccgtgcacgagcccagcttcatgatcagccagctgaagatcagcgacagaagccacagacagaagctgcagctgaaggccctggacgtggtgctgttcggccccctgaccagacccccccacaactggatgaaggacttcatcctgaccgtgagcatcgtgatcggcgtgggcggctgctggttcgcctacacccagaacaagaccagcaaggagcacgtggccaagatgatgaaggacctggagagcctgcagaccgccgagcagagcctgatggacctgcaggagagactggagaaggcccaggaggagaacagaaacgtggccgtggagaagcagaacctggagagaaagatgatggacgagatcaactacgccaaggaggaggcctgcagactgagagagctgagagagggcgccgagtgcgagctgagcagaagacagtacgccgagcaggagctggagcaggtgagaatggccctgaagaaggccgagaaggagttcgagctgagaagcagctggagcgtgcccgacgccctgcagaagtggctgcagctgacccacgaggtggaggtgcagtactacaacatcaagagacagaacgccgagatgcagctggccatcgccaaggacgaggccgagaagatcaagaagaagagaagcaccgtgttcggcaccctgcacgtggcccacagcagcagcctggacgaggtggaccacaagatcctggaggccaagaaggccctgagcgagctgaccacctgcctgagagagagactgttcagatggcagcagatcgagaagatctgcggcttccagatcgcccacaacagcggcctgcccagcctgaccagcagcctgtacagcgaccacagctgggtggtgatgcccagagtgagcatccccccctaccccatcgccggcggcgtggacgacctggacgaggacaccccccccatcgtgagccagttccccggcaccatggccaagccccccggcagcctggccagaagcagcagcctgtgcagaagcagaagaagcatcgtgcccagcagcccccagccccagagagcccagctggccccccacgccccccaccccagccaccccagacacccccaccacccccagcacaccccccacagcctgcccagccccgaccccgacatcctgagcgtgagcagctgccccgccctgtacagaaacgaggaggaggaggaggccatctacttcagcgccgagaagcagtgcatccacctgggcctgggcgcctgcaagagcgagtag

SEQ ID NO: 66409 - DNA, 1800 bp, Artificial Sequence
  derived and/or modified sequence
ctgctggtgctgggcctgctggtggccggcgccgccgacggctgcgagctggtgcccagacacctgagaggcagaagagccaccggcagcgccgccaccgccgccagcagccccgccgccgccgccggcgacagccccgccctgatgaccgacccctgcatgagcctgagccccccctgcttcaccgaggaggacagattcagcctggaggccctgcagaccatccacaagcagatggacgacgacaaggacggcggcatcgaggtggaggagagcgacgagttcatcagagaggacatgaagtacaaggacgccaccaacaagcacagccacctgcacagagaggacaagcacatcaccatcgaggacctgtggaagagatggaagaccagcgaggtgcacaactggaccctggaggacaccctgcagtggctgatcgagttcgtggagctgccccagtacgagaagaacttcagagacaacaacgtgaagggcaccaccctgcccagaatcgccgtgcacgagcccagcttcatgatcagccagctgaagatcagcgacagaagccacagacagaagctgcagctgaaggccctggacgtggtgctgttcggccccctgaccagacccccccacaactggatgaaggacttcatcctgaccgtgagcatcgtgatcggcgtgggcggctgctggttcgcctacacccagaacaagaccagcaaggagcacgtggccaagatgatgaaggacctggagagcctgcagaccgccgagcagagcctgatggacctgcaggagagactggagaaggcccaggaggagaacagaaacgtggccgtggagaagcagaacctggagagaaagatgatggacgagatcaactacgccaaggaggaggcctgcagactgagagagctgagagagggcgccgagtgcgagctgagcagaagacagtacgccgagcaggagctggagcaggtgagaatggccctgaagaaggccgagaaggagttcgagctgagaagcagctggagcgtgcccgacgccctgcagaagtggctgcagctgacccacgaggtggaggtgcagtactacaacatcaagagacagaacgccgagatgcagctggccatcgccaaggacgaggccgagaagatcaagaagaagagaagcaccgtgttcggcaccctgcacgtggcccacagcagcagcctggacgaggtggaccacaagatcctggaggccaagaaggccctgagcgagctgaccacctgcctgagagagagactgttcagatggcagcagatcgagaagatctgcggcttccagatcgcccacaacagcggcctgcccagcctgaccagcagcctgtacagcgaccacagctgggtggtgatgcccagagtgagcatccccccctaccccatcgccggcggcgtggacgacctggacgaggacaccccccccatcgtgagccagttccccggcaccatggccaagccccccggcagcctggccagaagcagcagcctgtgcagaagcagaagaagcatcgtgcccagcagcccccagccccagagagcccagctggccccccacgccccccaccccagccaccccagacacccccaccacccccagcacaccccccacagcctgcccagccccgaccccgacatcctgagcgtgagcagctgccccgccctgtacagaaacgaggaggaggaggaggccatctacttcagcgccgagaagcagtgcatccacctgggcctgggcgcctgcaagagcgagtag

SEQ ID NO: 66410 - DNA, 2061 bp, Artificial Sequence
  derived and/or modified sequence
atgaatgccgccggaatcagagccccagaggccgccggagccgacggcacaaggttggctcccggggggtccccctgcctccgtaggagggggaggcctgaagagtccccggccgcagtcgtggcacctagaggagcaggagaactgcaggcagccggtgctcccctgcgcttccatcctgcctcacccaggaggctgcatccagcaagcactcctggtcctgcctggggttggctcctgcgccgacgtcggtgggccgctcttctcgttcttggactgctcgtggcaggggccgccgacggctgcgagctagtgcctcgccatctaagagggcggagggccactggtagcgctgcgactgccgcttcctccccagccgctgcggctggcgactcccccgccctgatgacagacccctgtatgagcctgagccctccatgttttaccgaagaggatcgcttttcacttgaggcgttgcagacaattcacaaacagatggatgatgacaaggatggaggaatcgaggtggaagagtccgatgagtttattagggaagatatgaagtacaaggacgctacaaacaagcactctcacctccatagggaggataagcatatcaccattgaagacttatggaagaggtggaagaccagtgaggtccataactggactcttgaagacacactccagtggctgatagaatttgtggagcttccacagtacgagaaaaactttcgggacaataacgtgaaaggcaccactctgcccaggattgctgtccacgagccatctttcatgatcagccagttaaagatctcagatcggtctcacagacagaaactccagttgaaagctctggatgtcgtcttatttgggcccctcacacgacccccacacaattggatgaaagacttcatcttgaccgtgtctatagtaattggcgttggcggctgctggttcgcttatacccagaataaaacctcaaaggaacacgtggccaaaatgatgaaagatttggagagcctgcagaccgcagaacaatcattgatggatcttcaggagcgcctggagaaggctcaggaagagaaccggaacgtggccgtagaaaagcagaatctggaaaggaaaatgatggacgagatcaattatgccaaagaagaggcctgtcgtctcagagaactgagagagggcgctgagtgcgagctgagtaggcggcaatatgccgagcaagagctggaacaagttcgcatggccctcaagaaggctgaaaaggagtttgagctgcgctcctcatggtccgtaccagacgcactccaaaaatggttgcaactaacacacgaggtagaggtgcagtactacaacattaaacgacaaaacgccgaaatgcagctagcgatcgccaaagacgaagcggaaaaaataaagaagaaaagaagtaccgttttcggcacactacatgttgctcactctagctcactcgacgaagtggaccacaagatcctcgaggctaagaaggcactgtctgaactgaccacctgcttacgtgaacgcctgtttagatggcagcagatcgaaaaaatatgcggctttcagattgctcacaacagtggtctcccttccctgacatcctccctgtattctgaccatagctgggttgtgatgccaagagtgagtattccgccctatccaatcgccgggggagtggacgacctggatgaagacactcctcccatcgtgtctcagtttcctgggaccatggcaaagccaccaggctccttagcgagatcttcgtctctctgccgaagtagaagatccatcgtaccatcatccccgcagccgcagcgagcccagctggctccccacgcgccccacccatctcatcctaggcaccctcaccatcctcaacatactccacactccctccccagccctgacccggatatcctctccgtcagcagctgccctgctttgtaccgcaatgaagaggaggaagaagctatctacttcagcgccgagaagcagtgtattcacttaggactgggagcttgcaaatcagagtag

SEQ ID NO: 66411 - DNA, 1800 bp, Artificial Sequence
  derived and/or modified sequence
cttctggtactggggctgttggtggcaggggccgccgacggttgcgagctagtgccccggcacctacgcggtcgacgtgccaccggctcagccgctaccgccgcatcttcacctgcagcagcggcgggtgactcgccagcccttatgacagacccgtgtatgtctctttcccccccgtgcttcactgaggaggatcgattttccctggaagctctccaaaccatacacaagcagatggacgatgataaagacggaggaattgaggtcgaggagtccgatgagtttatccgagaggacatgaagtacaaagatgctaccaacaagcatagtcacctgcaccgcgaggacaagcacataaccatcgaggacctatggaagaggtggaagacatctgaagttcacaattggacactggaagacacactgcagtggctgatcgaattcgttgaattgccccagtacgagaaaaactttcgggataacaacgtgaaaggaacaacacttcctagaatcgctgttcacgagccttctttcatgatcagtcaattgaagatctctgaccgttcccatcgccagaaactgcaattgaaagccttggatgtagtgctgttcggtcctcttactagaccgccacataactggatgaaggacttcatcctgactgtgtccatagtgatcggggtcggcggttgttggtttgcctatacacagaacaagacctccaaagaacatgtcgcaaagatgatgaaggacctagagagtctgcaaactgcggagcaaagtctcatggacctgcaggaaagactagagaaagcccaggaagagaaccggaacgtggccgtcgagaagcagaatctggagagaaaaatgatggatgagattaattacgcaaaggaggaggcctgtcgcctgcgcgagctacgggaaggggccgagtgcgagctttccaggcggcagtacgcggagcaggagttggaacaggtaaggatggccctgaaaaaggccgaaaaggagttcgagttaagatcttcttggtccgtgcctgacgccctccagaagtggctccaactgacacatgaggtcgaagtgcagtactataatatcaaacgacagaatgctgaaatgcaactggccatcgcaaaggacgaagcagagaaaattaaaaagaaaaggagcacggtgtttggtactctgcacgtagcccactcctcctccctagacgaagtcgatcacaagatcctggaggctaagaaagccctttccgagctgacaacatgtctgcgagagagacttttccgctggcaacagatagagaaaatctgtggatttcagattgcccacaacagcggcctccccagcctcacatcatccttgtacagcgatcatagctgggtggtgatgcctagggtgtctattcccccttaccccatcgccggtggggtggacgatttggacgaagatacccctccaatcgtaagccagttccctgggacgatggcaaagccacccggctccctggcgcggagttcatccctctgtaggtcaagaagaagcatagtaccatcctccccccaacctcagagggcccaactagccccacatgccccgcacccctctcatccacgacacccccatcatccccagcatacacctcactccctaccctcacccgatccagatatcctgtctgtaagctcttgtccagcactgtatagaaatgaggaagaggaagaggccatctatttctcagctgagaagcagtgtattcacttgggtctcggcgcttgtaaatcagagtag

SEQ ID NO: 66412 - DNA, 2061 bp, Artificial Sequence
  derived and/or modified sequence
atgaatgctgctggcatccgggcccctgaggccgccggggctgatggcacccggctggcccctgggggcagcccctgcctgcggcggcggggccggcctgaggagagccctgctgctgtggtggcccccaggggggccggggagctgcaggccgccggggcccccctgcgcttccacccagccagcccccggcggctgcacccagccagcaccccaggccctgcctggggctggctgctgcggcggcggcgctgggccgccctgctggtgctgggcctgctggtggccggggctgctgatggctgtgagctggtgcccaggcacctgcggggccggcgggccactggatctgctgccacagctgccagcagccctgctgctgctgctggggacagccctgccctgatgacagacccctgcatgagcctgagccccccctgcttcacagaagaagatcgcttcagcctggaggccctgcagaccatccacaagcagatggatgatgacaaggatggcggcatcgaggtggaggagagtgatgagttcatccgggaggacatgaagtacaaggatgccaccaacaagcacagccacctgcaccgggaggacaagcacatcaccatcgaggacctgtggaagcgctggaagaccagcgaggtgcacaactggaccctggaggacaccctgcagtggctgattgaatttgtggagctgccccagtatgagaagaacttccgggacaacaacgtgaagggcaccaccctgcccagaattgctgtgcatgagcccagcttcatgatcagccagctgaagatcagtgacaggagccaccggcagaagctgcagctgaaggccctggatgtggtgctgtttggccccctgaccaggcctccccacaactggatgaaggacttcatcctgactgtgtccatcgtgattggagtgggcggctgctggtttgcctacacccagaacaagaccagcaaggagcacgtggccaagatgatgaaggacctggagagcctgcagacagctgagcagagcctgatggacctgcaggagcggctggagaaggcccaggaggagaacagaaatgtggccgtggagaagcagaacctggagaggaagatgatggatgagatcaactatgccaaggaggaggcctgccgcctgcgggagctgcgggagggcgcagaatgtgagctgagccggcggcagtatgcagagcaggagctggagcaggtgaggatggccctgaagaaggccgagaaggagtttgagctgcggagctcctggagcgtgcctgatgccctgcagaagtggctgcagctgacccatgaggtggaggtgcagtactacaacatcaagaggcagaatgctgagatgcagctggccatcgccaaggatgaagctgagaagatcaagaagaagaggagcacagtgtttggcaccctgcacgtggcccacagcagcagcctggatgaggtggaccacaagatcctggaggccaagaaggccctgtctgagctgaccacctgcctgcgggagcggctcttccgctggcagcagatcgagaagatctgtggcttccagatcgcccacaacagcggcctgcccagcctgaccagcagcctgtacagcgaccacagctgggtggtgatgccccgggtgtccatccccccctaccccatcgccggcggcgtggatgacctggatgaggacaccccacccatcgtgtcccagtttcctggcaccatggccaagcccccaggcagcctggcccggagcagcagcctgtgccgcagcagaagaagcatcgtgcccagcagcccccagccccagagggcccagctggcccctcatgccccccaccccagccaccccaggcacccccaccacccccagcacaccccccacagcctgcccagcccagaccctgacatcctgtctgtgagcagctgcccagccctgtacagaaatgaggaggaggaggaggccatctacttctctgctgagaagcagtgcatccacctgggcctgggcgcctgcaagtctgagtag

SEQ ID NO: 66413 - DNA, 1800 bp, Artificial Sequence
  derived and/or modified sequence
ctgctggtgctgggcctgctggtggccggggctgctgatggctgtgagctggtgcccaggcacctgcggggcagaagagccaccggcagcgctgccacagctgccagcagccctgctgctgctgctggggacagccctgccctgatgacagacccctgcatgagcctgagccccccctgcttcacagaggaggaccgcttcagcctggaggccctgcagaccatccacaagcagatggatgatgacaaggatggcggcatcgaggtggaggagagtgatgagttcatccgggaggacatgaagtacaaggatgccaccaacaagcacagccacctgcaccgggaggacaagcacatcaccatcgaggacctgtggaagcgctggaagaccagcgaggtgcacaactggaccctggaggacaccctgcagtggctgattgaatttgtggagctgccccagtatgagaagaacttccgggacaacaacgtgaagggcaccaccctgcccagaattgctgtgcatgagcccagcttcatgatcagccagctgaagatcagtgacaggagccaccggcagaagctgcagctgaaggccctggatgtggtgctgtttggccccctgacccggcccccccacaactggatgaaggacttcatcctgactgtgtccatcgtcatcggcgtgggcggctgctggtttgcctacacccagaacaagaccagcaaggagcacgtggccaagatgatgaaggacctggagagcctgcagacagctgagcagagcctgatggacctgcaggagcggctggagaaggcccaggaggagaacagaaatgtggccgtggagaagcagaacctggagaggaagatgatggatgagatcaactatgccaaggaggaggcctgccgcctgcgggagctgcgggagggcgcagaatgtgagctgagccggcggcagtatgcagagcaggagctggagcaggtgaggatggccctgaagaaggccgagaaggagtttgagctgcggagctcctggagcgtgcctgatgccctgcagaagtggctgcagctgacccatgaggtggaggtgcagtactacaacatcaagaggcagaatgctgagatgcagctggccatcgccaaggatgaggccgagaagatcaagaagaagaggagcacagtgtttggcaccctgcacgtggcccacagcagcagcctggatgaggtggaccacaagatcctggaggccaagaaggccctgtctgagctgaccacctgcctgcgggagcggctcttccgctggcagcagatcgagaagatctgtggcttccagatcgcccacaacagcggcctgcccagcctgaccagcagcctgtacagcgaccacagctgggtggtgatgccccgggtgtccatccccccctaccccatcgccggcggcgtggatgacctggatgaggacaccccacccatcgtgtcccagtttcctggcaccatggccaagcccccaggcagcctggcccggagcagcagcctgtgccgcagccgccgcagcatcgtgcccagcagcccccagccccagagggcccagctggccccccacgccccccaccccagccaccccaggcacccccaccacccccagcacaccccccacagcctgcccagcccagaccctgacatcctgtctgtgagcagctgcccagccctgtacagaaatgaggaggaggaggaggccatctacttctctgctgagaagcagtgcatccacctgggcctgggcgcctgcaagtctgagtag

SEQ ID NO: 66414 - DNA, 2061 bp, Artificial Sequence
  derived and/or modified sequence
atgaacgccgccggcatccgggcccccgaggccgccggcgccgacggcacacgcctggcccctggaggctctccctgcctgcggagacggggccggccagaggaatctcctgcagctgtggtggccccaaggggagccggcgagcttcaagcagctggggctcccctgcgttttcatccagccagtcccaggagattacaccctgcctctacccccggccccgcctggggatggcttttgcggcggagaagatgggccgcactgctcgtccttgggctgctcgtagcaggcgcagcagacgggtgcgaactggttcccagacacctacgtggaagaagggctaccggctctgctgccaccgccgcttctagcccagcagccgctgccggcgacagcccagccctgatgacagacccgtgtatgtccttatctcctccctgtttcacagaagaagatcgctttagcttggaagccctccagaccatccacaagcaaatggacgacgacaaggacggtggcatcgaggtggaggaatcagacgagtttatcagggaggatatgaagtacaaagacgccactaataagcatagccatctgcatcgggaagataagcatattacgatcgaggatttgtggaagcggtggaaaacctcagaggtacacaactggacgctggaggacactttacagtggctgatcgaattcgttgagctgccccagtacgaaaagaattttcgcgataataatgtgaaaggtacaacactcccgcggatcgccgtacatgaacctagttttatgatctctcaactgaaaatcagcgatcggagtcataggcagaaacttcagttaaaggcgctggacgtggtgttgtttggccctctcactaggccaccacacaactggatgaaagactttatcctgaccgtgtcaatagtcatcggcgtaggagggtgttggttcgcttatactcagaacaaaacttcaaaggagcacgtggcgaagatgatgaaagatctggagagcctgcagactgccgagcagtcactgatggatcttcaggagaggttggagaaggcccaagaggagaaccggaatgtcgctgtagagaaacagaacctcgagcgaaagatgatggatgagatcaactacgccaaggaggaggcctgcaggcttcgcgagctgcgggaaggggctgaatgcgaactgagtcggcgccagtacgcagagcaggaacttgagcaggtgagaatggccctcaagaaggcagagaaggagttcgagctgcgctcatcttggtccgtgcctgacgcactgcagaagtggctacaacttacccacgaggtggaggtacaatattataatattaagagacagaacgccgagatgcaactcgccattgctaaggacgaggccgagaagattaaaaaaaagaggtctacagtatttggcactctgcacgttgcccactcaagcagcctggatgaggttgatcacaaaatccttgaggctaaaaaagctcttagcgagctgaccacatgtctgcgcgagcgcctatttcgctggcagcagattgagaaaatttgtggtttccagatcgcacacaacagcggactccctagcttgacatcatcgctgtactccgatcatagttgggtagtcatgcctcgggtcagcatcccaccttatcccatagctggcggcgtagacgatctggacgaagacacaccccccatcgtttcacaatttcccgggaccatggcaaagccacctggcagcctggcccgctcctcctcgctctgccgcagccgaaggtctatcgttccctcctcgccacagccccaaagagctcagctcgctcctcatgctccacatccgtctcacccgaggcatccacatcacccccaacacaccccacactctctgcctagccccgaccccgacatcctctcagtttcctcatgccctgctctgtatcgaaacgaagaggaggaagaggcaatatacttctccgccgagaaacagtgtatacacctaggactaggcgcctgcaaatcagagtag

SEQ ID NO: 66415 - DNA, 1800 bp, Artificial Sequence
  derived and/or modified sequence
ctgctggtgctgggcctgctggtggccggcgccgccgacggctgcgaactggttcccagacacctgaggggtcgccgggctaccggcagtgcggcaactgccgcaagttccccggcggctgccgcgggtgatagccctgccttgatgactgatccgtgcatgtctctgtcccccccctgcttcacagaggaagacaggttttctcttgaagctttgcagaccattcacaagcagatggatgatgataaggatggcggcattgaggtggaagagagcgacgaattcatcagggaagacatgaaatacaaggatgcgacaaacaagcatagtcatctccatcgcgaggacaagcatataaccattgaggacttatggaagagatggaagacatctgaggtgcacaactggactctggaggacacactccagtggctgatagaattcgtggagctcccacagtacgagaagaattttcgggataataacgtaaaaggaaccactctcccaagaatcgctgtgcatgagccctccttcatgatatcccagcttaaaatctccgataggtctcatcgccagaagctccaactgaaggcactcgacgttgtgctgtttggtccactgacacggcccccacacaattggatgaaagacttcattttaactgtgagcattgtgattggcgtaggggggtgctggttcgcatatacccagaataagacttcgaaagaacatgttgcgaagatgatgaaagacctggagtcacttcagacagcggagcaatccttgatggacctccaggaaaggctcgagaaagcacaggaggagaacaggaatgtagcagtagaaaagcagaacctggagcggaagatgatggacgaaatcaactatgcaaaggaagaagcatgcaggcttcgcgagcttagggaaggcgccgagtgtgagttgtctcgcaggcaatacgcggagcaggagttggagcaggttaggatggcccttaaaaaagcggagaaagagttcgaactcaggagtagctggtcagtgccagatgctctgcagaagtggctgcagctgacacatgaggtggaggtgcaatattacaacattaagcgacaaaatgcggaaatgcagctggccatagctaaagatgaagcggaaaagattaaaaagaagaggtctacagtgtttggaacacttcatgtggcgcactcatctagtctggacgaggtagatcacaaaatcctcgaagccaagaaggccctctccgaactgacaacatgtttgagggagcgcttatttcgctggcagcagattgagaagatttgcggcttccagatcgcccacaattcagggcttccctcactgacttccagtctgtattcggaccactcatgggttgtgatgccaagggtctccatcccaccttacccaattgccgggggtgtcgatgatctggatgaagacactccccccatagtgtcgcagttcccggggactatggccaaacctccaggaagtctcgcgcgatcttcaagcctgtgtcggtccaggaggagcattgtaccatcgtctcctcagccgcagagggctcagttggctcctcatgctcctcatccgtctcatcctcgacacccccatcaccctcagcatactcctcactctctgcctagcccagatcccgacattctgtctgtgagtagttgccctgccttgtacagaaatgaagaggaggaggaggcaatttacttcagcgcggagaaacaatgcatacaccttggcttgggagcttgcaaatctgagtag

SEQ ID NO: 66416 - DNA, 2061 bp, Artificial Sequence
  derived and/or modified sequence
atgaatgcagccggaatccgagctcctgaggcagcaggcgcagacggcacacgtctagctcctgggggatctccatgcctaaggaggcggggacgtccggaggaaagccctgctgcagtggttgctcccaggggggcaggggagttgcaagcggctggcgctccacttaggttccacccagcttcaccacgcagattacacccagcttctaccccagggccagcttggggctggttactgaggagaagacgctgggccgcattgttagtgctgggcttattagttgctggtgctgcagacggatgtgaacttgtccctcgacaccttagaggaaggcgggcaaccggaagtgctgcaaccgctgcctccagtccagcggcagccgctggagacagcccagctttgatgaccgacccctgtatgtccctgtccccaccctgttttaccgaggaggatcgcttttccttggaagcactccagactatccacaagcagatggatgacgacaaggacgggggaatagaagtcgaggaaagtgacgagtttattcgagaggatatgaaatacaaggacgcgacgaacaaacatagtcatcttcatcgtgaggacaagcacattactatcgaggatttgtggaaaaggtggaaaacttcagaggtacataattggactttagaggacacattgcagtggttgatcgagtttgtcgaactgccccagtacgaaaagaattttcgggataataatgtgaagggcacgactctccccaggatcgcagtccacgaaccctcatttatgatctcccagctgaaaatttccgatcggtcccatagacagaagttacagctcaaggctcttgacgtggttttgttcggtccattgaccagacccccacacaactggatgaaagattttatcttgacagtttccatcgtaattggggtcgggggttgctggttcgcctacactcagaataagacttccaaagaacatgttgccaaaatgatgaaggacctggagagcctccaaacagccgagcagagcctgatggatctgcaggagaggctcgagaaggcccaggaggagaacaggaatgttgccgtcgagaaacagaatctggagagaaagatgatggacgagataaactacgctaaggaagaagcctgcagattgcgggaactgagggagggcgcagagtgtgaactgagtcgacggcagtatgccgaacaagaactggagcaggttcgcatggccctgaaaaaggccgaaaaggagttcgagctgcgttcttcctggagcgtgccagatgcattacagaagtggctccagttgacacacgaagtcgaagtccagtactataacattaaacgccagaatgcggaaatgcaactggctatcgccaaagatgaagccgaaaagatcaaaaaaaagcgttccaccgttttcggtacactacacgttgcccatagctcctctcttgatgaggtcgaccacaagatacttgaggccaaaaaggccttgagcgaactgactacttgcctaagagagcggctcttccgttggcagcagatcgagaaaatctgcggatttcagattgctcacaattccggtttgcctagcctgacctcaagcctgtactcagatcactcttgggttgtgatgcccagggttagcatcccaccttacccgattgctggcggagtggatgacctagatgaagacacccctcctatcgtaagccagtttccgggaactatggccaagcccccaggttccctggcaaggagttctagcctctgtcgtagtcgacggtccattgttccttcttccccccagcctcaacgagcacaactggctccccacgcaccacacccatcacacccaagacacccacatcacccgcagcatacaccacattccttaccttcccctgaccccgacatcctgtccgtgtcaagctgtcccgctctgtatagaaacgaagaggaagaggaggcgatctacttctcggcagagaaacagtgtattcatttaggtctgggtgcgtgcaagtctgaatag

SEQ ID NO: 66417 - DNA, 1800 bp, Artificial Sequence
  derived and/or modified sequence
ttactagtgctaggcttactggtggcaggagcggctgatgggtgcgagctggtgcctcgccacctcaggggcagaagggccaccggcagcgctgccactgctgctagctccccagccgctgccgcaggcgactctccagcccttatgacggatccatgtatgtcattatcacctccatgctttacagaagaggaccgattctctcttgaggctctccagaccattcataagcagatggatgacgacaaggatggtgggatcgaggttgaggaatccgatgagtttatccgggaggacatgaagtacaaggatgccacaaataaacattctcacctgcatcgagaagacaagcatattaccattgaggacttgtggaagaggtggaagacttccgaggttcacaactggacacttgaggatactctgcagtggctcattgaattcgtcgaattaccccagtatgagaaaaattttagagataacaacgtcaaaggtaccacccttcctcgaattgcagtccacgaacccagcttcatgattagccagctaaagatctcagatcgtagccaccggcaaaagctgcagctgaaagccctggacgtggtactcttcggccctctgacaagacctccacataactggatgaaagattttatccttacagtttctattgtgatcggcgttggaggttgctggtttgcttacacgcagaacaaaacatctaaggagcatgtggccaaaatgatgaaagatctggaatctctccagaccgctgagcagtcactcatggatcttcaagagcgtctcgaaaaagcccaggaggaaaatcggaacgtcgccgttgaaaaacagaatcttgaaaggaagatgatggatgagatcaattatgctaaagaggaagcttgccgactgcgggaactaagagagggtgccgagtgtgagctcagcagacgccagtacgcagaacaggagctggaacaggtccgcatggcattgaagaaggcagagaaggaattcgaactgagatctagttggtcagtgcctgacgccctacagaaatggctgcagttaactcacgaagtcgaggtgcagtattataatatcaaacgtcagaatgcagagatgcagctggctattgctaaggatgaagcagaaaagattaaaaaaaagcgcagtactgtttttggcactctccacgtcgcacacagctcaagtctggatgaagttgaccataaaatcctggaggccaaaaaggcgctgtctgagctgacgacgtgcttgagggaaaggttgttccgctggcagcagatcgaaaaaatatgcggattccaaattgcccacaattctggtctccctagcctgaccagtagcttatattcagaccacagctgggtcgtgatgcccagggtttctatccctccgtaccctatcgccggaggggtcgatgacttagatgaagacaccccacccatcgttagccaatttcctggaactatggccaaaccccctgggagcctcgcgaggtcctcatcactctgtaggtcccgtagatcaattgtcccttcatcaccccaaccgcaacgcgctcagctcgcacctcatgctccccaccccagtcacccacgccacccccaccacccgcagcatacaccccactctctgccaagccctgatccagatatcctctcagtatctagttgtccagccctctatcgtaatgaggaagaagaagaagccatctatttctctgccgaaaaacagtgcattcacctgggcctaggagcttgtaaatctgagtag

SEQ ID NO: 66418 - DNA, 3922 bp, Artificial Sequence
  derived and/or modified sequence
ccgcggcggcggcggcgcgggagctggggttggtgtttggcggcgccagagcagcggatcccggtctcgccgcagcagcagcgcgggtgtcgtgcaccgcctgaagacgccgtacctttctaccccccaccttttttttttttttttttaaataaccggaaccaatgaacgcagccgggatcagagctccggaggccgccggtgccgatgggaccaggctggcgcccggcgggagcccgtgtctgaggcggcgggggcggccggaggagtcgccggcggcggtggtggcgcctcgcggagccggcgagctgcaggcggccggggcgccgctgcgctttcacccggcttctcctcggcgccttcatcccgcctcgactcctggcccagcgtggggctggctgctgcggcggcggcgctgggctgcgttgctggtgctcgggctgctggtagccggagcggcggacggatgcgagcttgtgccccggcacctccgcgggcggcgggcgactggctctgccgcaactgccgcctcctctcccgccgcggcggccggcgatagcccggcgctcatgacagatccctgcatgtcactgagtccaccatgctttacagaagaagacagatttagtctggaagctcttcaaacaatacataaacaaatggatgatgacaaagatggtggaattgaagtagaggaaagtgatgaattcatcagagaagatatgaaatataaagatgctactaataaacacagccatctgcacagagaagataaacatataacgattgaggatttatggaaacgatggaaaacatcagaagttcataattggacccttgaagacactcttcagtggttgatagagtttgttgaactaccccaatatgagaagaattttagagacaacaatgtcaaaggaacgacacttcccaggatagcagtgcacgaaccttcatttatgatctcccagttgaaaatcagtgaccggagtcacagacaaaaacttcagctcaaggcattggatgtggttttgtttggacctctaacacgcccacctcataactggatgaaagattttatcctcacagtttctatagtaattggtgttggaggctgctggtttgcttatacgcagaataagacatcaaaagaacatgttgcaaaaatgatgaaagatttagagagcttacaaactgcagagcaaagtctaatggacttacaggagaggcttgaaaaggcacaggaagaaaacagaaatgttgctgtagaaaagcaaaatttagagcgcaaaatgatggatgaaatcaattatgcaaaggaggaggcttgtcggctgagagagctaagggagggagctgaatgtgaattgagtagacgtcagtatgcagaacaggaattggaacaggttcgcatggctctgaaaaaggccgaaaaagaatttgaactgagaagcagttggtctgttccagatgcacttcagaaatggcttcagttaacacatgaagtagaagtgcaatactacaatattaaaagacaaaacgctgaaatgcagctagctattgctaaagatgaggcagaaaaaattaaaaagaagagaagcacagtctttgggactctgcacgttgcacacagctcctccctagatgaggtagaccacaaaattctggaagcaaagaaagctctctctgagttgacaacttgtttacgagaacgactttttcgctggcaacaaattgagaagatctgtggctttcagatagcccataactcaggactccccagcctgacctcttccctttattctgatcacagctgggtggtgatgcccagagtctccattccaccctatccaattgctggaggagttgatgacttagatgaagacacacccccaatagtgtcacaatttcccgggaccatggctaaacctcctggatcattagccagaagcagcagcctgtgccgttcacgccgcagcattgtgccgtcctcgcctcagcctcagcgagctcagcttgctccacacgccccccacccgtcacaccctcggcaccctcaccacccgcaacacacaccacactccttgccttcccctgatccagatatcctctcagtgtcaagttgccctgcgctttatcgaaatgaagaggaggaagaggccatttacttctctgctgaaaagcaatgtattcaccttgggctcggtgcgtgcaaaagtgaatgagactaagtagtaaagctctcaaaaaaaaaaaggaagtgccagacacagcttcagaatgtgactccttaaattcttccattggaaggaaacagtctcctcctttaagcctcgagatataccaaacattatctccgcgaaagatatcaagagatgaggtgtccctagaggattcctcccgaggggattcgcctgtaactgtggatgtgtcttggggttctcccgactgtgtaggtctgacagaaactaagagtatgatcttcagtcctgcaagcaaagtgtacaatggcattttggagaaatcctgtagcatgaaccagctttccagtggcatcccggtgcctaaacctcgccacacatcatgttcctcagctggcaacgacagtaaaccagttcaggaagccccaagtgttgccagaataagcagcatcccacatgacctttgtcataatggagagaaaagcaaaaagccatcaaaaatcaaaagcctttttaagaagaaatctaagtgaactggctgacttgatggaatcatgttcaagtggcatctgtaaactattatcccccaccctccactccccaccttttttttggtttaattttaggaatgtaactccattggggctttccaggccggatgccatagtggaacatccagaagggcaactgtctactgtctgcttatttaagtgactatatataatcaattcatcaagccagttattactgaaaaatcattgaaatgagacagtttacagtcatttctgcctatttatttctgctttgttctcagtgatgtatatgcaacattttgttgaaagccacgatggacttacaagctttaatggactcgtaagccagcatgggcttgcaaaaatttcttgtttaccagagcatcttcttatctttccacagagctatttacatcctggactatataacttaaaagaagtaaaacgtaattgcactactgttttccagactggaaaaaaaaaaaatctctgcaagtgaaactgtatagagtttataaaatgactatggataggggactgttttcacttttagatcaaaatgggtttttaagtagaacctagggtttctaattgacttgatttctggaaatgaaaacccgcgcttttattatgggaagcttcttgaactgcatttactattgtgaagtttcaagtcccgctgtaaagatcatgttgttttgttttccccagggctttcactgtgatttactgcattgcaggctgtatgataaaacacacataatttaaagagagaaggctcttgattccttatgcaagtggaagagttgaaacttgattgaaggacttaaaacattcacaaccttaagccgaggtggggggatatggggattcaggcaattgtttacacactttgaataactgcaaaggatttacggtttgtgaaaaatgtgtactgtggaaaagataataaattgaagacattattgtgtgggattgtgctgatttttgttgataacacaaaaaacactatgttttctggagagctgtgtaagctgtcttgttgcttagttgcaatataagaaatagtgatgttttggacgtaagttgtcaacaaatttctattttatattgttatatttttatgtagtttgaaatgtaaaaatgttctaatatcaagattaacaaatataaatttatggtgcattt

SEQ ID NO: 66419 - DNA, 3925 bp, Artificial Sequence
  derived and/or modified sequence
ccgcggcggcggcggcgcgggagctggggttggtgtttggcggcgccagagcagcggatcccggtctcgccgcagcagcagcgcgggtgtcgtgcaccgcctgaagacgccgtacctttctaccccccaccttttttttttttttttttaaataaccggaaccaatgaacgcagccgggatcagagctccggaggccgccggtgccgatgggaccaggctggcgcccggcgggagcccgtgtctgaggcggcgggggcggccggaggagtcgccggcggcggtggtggcgcctcgcggagccggcgagctgcaggcggccggggcgccgctgcgctttcacccggcttctcctcggcgccttcatcccgcctcgactcctggcccagcgtggggctggctgctgcggcggcggcgctgggctgcgttgctggtgctcgggctgctggtagccggagcggcggacggatgcgagcttgtgccccggcacctccgcgggcggcgggcgactggctctgccgcaactgccgcctcctctcccgccgcggcggccggcgatagcccggcgctcatgacagatccctgcatgtcactgagtccaccatgctttacagaagaagacagatttagtctggaagctcttcaaacaatacataaacaaatggatgatgacaaagatggtggaattgaagtagaggaaagtgatgaattcatcagagaagatatgaaatataaagatgctactaataaacacagccatctgcacagagaagataaacatataacgattgaggatttatggaaacgatggaaaacatcagaagttcataattggacccttgaagacactcttcagtggttgatagagtttgttgaactaccccaatatgagaagaattttagagacaacaatgtcaaaggaacgacacttcccaggatagcagtgcacgaaccttcatttatgatctcccagttgaaaatcagtgaccggagtcacagacaaaaacttcagctcaaggcattggatgtggttttgtttggacctctaacacgcccacctcataactggatgaaagattttatcctcacagtttctatagtaattggtgttggaggctgctggtttgcttatacgcagaataagacatcaaaagaacatgttgcaaaaatgatgaaagatttagagagcttacaaactgcagagcaaagtctaatggacttacaggagaggcttgaaaaggcacaggaagaaaacagaaatgttgctgtagaaaagcaaaatttagagcgcaaaatgatggatgaaatcaattatgcaaaggaggaggcttgtcggctgagagagctaagggagggagctgaatgtgaattgagtagacgtcagtatgcagaacaggaattggaacaggttcgcatggctctgaaaaaggccgaaaaagaatttgaactgagaagcagttggtctgttccagatgcacttcagaaatggcttcagttaacacatgaagtagaagtgcaatactacaatattaaaagacaaaacgctgaaatgcagctagctattgctaaagatgaggcagaaaaaattaaaaagaagagaagcacagtctttgggactctgcacgttgcacacagctcctccctagatgaggtagaccacaaaattctggaagcaaagaaagctctctctgagttgacaacttgtttacgagaacgactttttcgctggcaacaaattgagaagatctgtggctttcagatagcccataactcaggactccccagcctgacctcttccctttattctgatcacagctgggtggtgatgcccagagtctccattccaccctatccaattgctggaggagttgatgacttagatgaagacacacccccaatagtgtcacaatttcccgggaccatggctaaacctcctggatcattagccagaagcagcagcctgtgccgttcacgccgcagcattgtgccgtcctcgcctcagcctcagcgagctcagcttgctccacacgccccccacccgtcacaccctcggcaccctcaccacccgcaacacacaccacactccttgccttcccctgatccagatatcctctcagtgtcaagttgccctgcgctttatcgaaatgaagaggaggaagaggccatttacttctctgctgaaaagcaatgtattcaccttgggctcggtgcgtgcaaaagtgaatgagactaagtagtaaagctctcaaaaaaaaaaaggaagtgccagacacagcttcagaatgtgactccttaaattcttccattggaaggaaacagtctcctcctttaagcctcgagatataccaaacattatctccgcgaaagatatcaagagatgaggtgtccctagaggattcctcccgaggggattcgcctgtaactgtggatgtgtcttggggttctcccgactgtgtaggtctgacagaaactaagagtatgatcttcagtcctgcaagcaaagtgtacaatggcattttggagaaatcctgtagcatgaaccagctttccagtggcatcccggtgcctaaacctcgccacacatcatgttcctcagctggcaacgacagtaaaccagttcaggaagccccaagtgttgccagaataagcagcatcccacatgacctttgtcataatggagagaaaagcaaaaagccatcaaaaatcaaaagcctttttaagaagaaatctaagtgaactggctgacttgatggaatcatgttcaagtggcatctgtaaactattatcccccaccctccactccccaccttttttttggtttaattttaggaatgtaactccattggggctttccaggccggatgccatagtggaacatccagaagggcaactgtctactgtctgcttatttaagtgactatatataatcaattcatcaagccagttattactgaaaaatcattgaaatgagacagtttacagtcatttctgcctatttatttctgctttgttctcagtgatgtatatgcaacattttgttgaaagccacgatggacttacaagctttaatggactcgtaagccagcatgggcttgcaaaaatttcttgtttaccagagcatcttcttatctttccacagagctatttacatcctggactatataacttaaaagaagtaaaacgtaattgcactactgttttccagactggaaaaaaaaaaaatctctgcaagtgaaactgtatagagtttataaaatgactatggataggggactgttttcacttttagatcaaaatgggtttttaagtagaacctagggtttctaattgacttgatttctggaaatgaaaacccgcgcttttattatgggaagcttcttgaactgcatttactattgtgaagtttcaagtcccgctgtaaagatcatgttgttttgttttccccagggctttcactgtgatttactgcattgcaggctgtatgataaaacacacataatttaaagagagaaggctcttgattccttatgcaagtggaagagttgaaacttgattgaaggacttaaaacattcacaaccttaagccgaggtggggggatatggggattcaggcaattgtttacacactttgaataactgcaaaggatttacggtttgtgaaaaatgtgtactgtggaaaagataataaattgaagacattattgtgtgggattgtgctgatttttgttgataacacaaaaaacactatgttttctggagagctgtgtaagctgtcttgttgcttagttgcaatataagaaatagtgatgttttggacgtaagttgtcaacaaatttctattttatattgttatatttttatgtagtttgaaatgtaaaaatgttctaatatcaagattaacaaatataaatttatggtgcatttaga

SEQ ID NO: 66420 - protein, 841 aa, Artificial Sequence [sequence omitted]

SEQ ID NO: 66421 - protein, 754 aa, Artificial Sequence
  derived and/or modified sequence
LLVLGLLVAGAADGCELVPRHLRGRRATGSAATAASSPAAAAGDSPALMTDPCMSLSPPCFTEEDRFSLEALQTIHKQMDDDKDGGIEVEESDEFIREDMKYKDATNKHSHLHREDKHITIEDLWKRWKTSEVHNWTLEDTLQWLIEFVELPQYEKNFRDNNVKGTTLPRIAVHEPSFMISQLKISDRSHRQKLQLKALDVVLFGPLTRPPHNWMKDFILTVSIVIGVGGCWFAYTQNKTSKEHVAKMMKDLESLQTAEQSLMDLQERLEKAQEENRNVAVEKQNLERKMMDEINYAKEEACRLRELREGAECELSRRQYAEQELEQVRMALKKAEKEFELRSSWSVPDALQKWLQLTHEVEVQYYNIKRQNAEMQLAIAKDEVAASYLIQAEKIKKKRSTVFGTLHVAHSSSLDEVDHKILEAKKALSELTTCLRERLFRWQQIEKICGFQIAHNSGLPSLTSSLYSDHSWVVMPRVSIPPYPIAGGVDDLDEDTPPIVSQFPGTMAKPPGSLARSSSLCRSRRSIVPSSPQPQRAQLAPHAPHPSHPRHPHHPQHTPHSLPSPDPDILSVSSCPALYRNEEEEEAIYFSAEKQWEVPDTASECDSLNSSIGRKQSPPLSLEIYQTLSPRKISRDEVSLEDSSRGDSPVTVDVSWGSPDCVGLTETKSMIFSPASKVYNGILEKSCSMNQLSSGIPVPKPRHTSCSSAGNDSKPVQEAPSVARISSIPHDLCHNGEKSKKPSKIKSLFKKKSK

SEQ ID NO: 66422 - DNA, 72 bp, Artificial Sequence
  derived and/or modified sequence
cagcgcaccacagcacacacagtatacacatgacccacaatacacacaacacacaacacattcacacaccac

SEQ ID NO: 66423 - DNA, 2526 bp, Artificial Sequence
  derived and/or modified sequence
atgaacgccgccggcatcagagcccccgaggccgccggcgccgacggcaccagactggcccccggcggcagcccctgcctgagaagaagaggcagacccgaggagagccccgccgccgtggtggcccccagaggcgccggcgagctgcaggccgccggcgcccccctgagattccaccccgccagccccagaagactgcaccccgccagcacccccggccccgcctggggctggctgctgagaagaagaagatgggccgccctgctggtgctgggcctgctggtggccggcgccgccgacggctgcgagctggtgcccagacacctgagaggcagaagagccaccggcagcgccgccaccgccgccagcagccccgccgccgccgccggcgacagccccgccctgatgaccgacccctgcatgagcctgagccccccctgcttcaccgaggaggacagattcagcctggaggccctgcagaccatccacaagcagatggacgacgacaaggacggcggcatcgaggtggaggagagcgacgagttcatcagagaggacatgaagtacaaggacgccaccaacaagcacagccacctgcacagagaggacaagcacatcaccatcgaggacctgtggaagagatggaagaccagcgaggtgcacaactggaccctggaggacaccctgcagtggctgatcgagttcgtggagctgccccagtacgagaagaacttcagagacaacaacgtgaagggcaccaccctgcccagaatcgccgtgcacgagcccagcttcatgatcagccagctgaagatcagcgacagaagccacagacagaagctgcagctgaaggccctggacgtggtgctgttcggccccctgaccagacccccccacaactggatgaaggacttcatcctgaccgtgagcatcgtgatcggcgtgggcggctgctggttcgcctacacccagaacaagaccagcaaggagcacgtggccaagatgatgaaggacctggagagcctgcagaccgccgagcagagcctgatggacctgcaggagagactggagaaggcccaggaggagaacagaaacgtggccgtggagaagcagaacctggagagaaagatgatggacgagatcaactacgccaaggaggaggcctgcagactgagagagctgagagagggcgccgagtgcgagctgagcagaagacagtacgccgagcaggagctggagcaggtgagaatggccctgaagaaggccgagaaggagttcgagctgagaagcagctggagcgtgcccgacgccctgcagaagtggctgcagctgacccacgaggtggaggtgcagtactacaacatcaagagacagaacgccgagatgcagctggccatcgccaaggacgaggtggccgccagctacctgatccaggccgagaagatcaagaagaagagaagcaccgtgttcggcaccctgcacgtggcccacagcagcagcctggacgaggtggaccacaagatcctggaggccaagaaggccctgagcgagctgaccacctgcctgagagagagactgttcagatggcagcagatcgagaagatctgcggcttccagatcgcccacaacagcggcctgcccagcctgaccagcagcctgtacagcgaccacagctgggtggtgatgcccagagtgagcatccccccctaccccatcgccggcggcgtggacgacctggacgaggacaccccccccatcgtgagccagttccccggcaccatggccaagccccccggcagcctggccagaagcagcagcctgtgcagaagcagaagaagcatcgtgcccagcagcccccagccccagagagcccagctggccccccacgccccccaccccagccaccccagacacccccaccacccccagcacaccccccacagcctgcccagccccgaccccgacatcctgagcgtgagcagctgccccgccctgtacagaaacgaggaggaggaggaggccatctacttcagcgccgagaagcagtgggaggtgcccgacaccgccagcgagtgcgacagcctgaacagcagcatcggcagaaagcagagcccccccctgagcctggagatctaccagaccctgagccccagaaagatcagcagagacgaggtgagcctggaggacagcagcagaggcgacagccccgtgaccgtggacgtgagctggggcagccccgactgcgtgggcctgaccgagaccaagagcatgatcttcagccccgccagcaaggtgtacaacggcatcctggagaagagctgcagcatgaaccagctgagcagcggcatccccgtgcccaagcccagacacaccagctgcagcagcgccggcaacgacagcaagcccgtgcaggaggcccccagcgtggccagaatcagcagcatcccccacgacctgtgccacaacggcgagaagagcaagaagcccagcaagatcaagagcctgttcaagaagaagagcaagtag

SEQ ID NO: 66424 - DNA, 2265 bp, Artificial Sequence
  derived and/or modified sequence
ctgctggtgctgggcctgctggtggccggcgccgccgacggctgcgagctggtgcccagacacctgagaggcagaagagccaccggcagcgccgccaccgccgccagcagccccgccgccgccgccggcgacagccccgccctgatgaccgacccctgcatgagcctgagccccccctgcttcaccgaggaggacagattcagcctggaggccctgcagaccatccacaagcagatggacgacgacaaggacggcggcatcgaggtggaggagagcgacgagttcatcagagaggacatgaagtacaaggacgccaccaacaagcacagccacctgcacagagaggacaagcacatcaccatcgaggacctgtggaagagatggaagaccagcgaggtgcacaactggaccctggaggacaccctgcagtggctgatcgagttcgtggagctgccccagtacgagaagaacttcagagacaacaacgtgaagggcaccaccctgcccagaatcgccgtgcacgagcccagcttcatgatcagccagctgaagatcagcgacagaagccacagacagaagctgcagctgaaggccctggacgtggtgctgttcggccccctgaccagacccccccacaactggatgaaggacttcatcctgaccgtgagcatcgtgatcggcgtgggcggctgctggttcgcctacacccagaacaagaccagcaaggagcacgtggccaagatgatgaaggacctggagagcctgcagaccgccgagcagagcctgatggacctgcaggagagactggagaaggcccaggaggagaacagaaacgtggccgtggagaagcagaacctggagagaaagatgatggacgagatcaactacgccaaggaggaggcctgcagactgagagagctgagagagggcgccgagtgcgagctgagcagaagacagtacgccgagcaggagctggagcaggtgagaatggccctgaagaaggccgagaaggagttcgagctgagaagcagctggagcgtgcccgacgccctgcagaagtggctgcagctgacccacgaggtggaggtgcagtactacaacatcaagagacagaacgccgagatgcagctggccatcgccaaggacgaggtggccgccagctacctgatccaggccgagaagatcaagaagaagagaagcaccgtgttcggcaccctgcacgtggcccacagcagcagcctggacgaggtggaccacaagatcctggaggccaagaaggccctgagcgagctgaccacctgcctgagagagagactgttcagatggcagcagatcgagaagatctgcggcttccagatcgcccacaacagcggcctgcccagcctgaccagcagcctgtacagcgaccacagctgggtggtgatgcccagagtgagcatccccccctaccccatcgccggcggcgtggacgacctggacgaggacaccccccccatcgtgagccagttccccggcaccatggccaagccccccggcagcctggccagaagcagcagcctgtgcagaagcagaagaagcatcgtgcccagcagcccccagccccagagagcccagctggccccccacgccccccaccccagccaccccagacacccccaccacccccagcacaccccccacagcctgcccagccccgaccccgacatcctgagcgtgagcagctgccccgccctgtacagaaacgaggaggaggaggaggccatctacttcagcgccgagaagcagtgggaggtgcccgacaccgccagcgagtgcgacagcctgaacagcagcatcggcagaaagcagagcccccccctgagcctggagatctaccagaccctgagccccagaaagatcagcagagacgaggtgagcctggaggacagcagcagaggcgacagccccgtgaccgtggacgtgagctggggcagccccgactgcgtgggcctgaccgagaccaagagcatgatcttcagccccgccagcaaggtgtacaacggcatcctggagaagagctgcagcatgaaccagctgagcagcggcatccccgtgcccaagcccagacacaccagctgcagcagcgccggcaacgacagcaagcccgtgcaggaggcccccagcgtggccagaatcagcagcatcccccacgacctgtgccacaacggcgagaagagcaagaagcccagcaagatcaagagcctgttcaagaagaagagcaagtag

SEQ ID NO: 66425 - DNA, 2526 bp, Artificial Sequence
  derived and/or modified sequence
atgaacgccgctggtattcgtgcgcccgaagccgccggagccgacggaacccgcttggctccaggtggatcgccttgtctgagaaggcgcgggcggccggaggaatctcccgcagctgtggtggcccctcggggcgcgggagaactgcaggccgcgggcgcaccacttcggttccatcccgctagcccacggaggctccaccctgcttcaactccgggcccagcatggggttggctgctccgaagacgaagatgggcggccttgttagtgctcggactgcttgtggccggcgctgccgacggatgtgagttagtgccaaggcatctgaggggacggcgagccacagggtcagcagccacagccgctagcagccctgccgcggccgctggagattctcccgccctcatgacggacccctgcatgagcttaagccccccttgttttacagaggaagaccgttttagtctggaagcacttcagacaattcataaacagatggacgatgacaaagatggggggatcgaggtcgaagagtctgacgagtttattcgtgaagatatgaaatacaaggatgctaccaacaagcacagccatttgcacagggaggataaacatatcactatcgaagacttgtggaagagatggaaaacatcggaagtgcataattggacacttgaagatactctgcagtggcttattgagttcgtggaactgccccagtacgagaagaactttagagacaataatgtgaagggaactaccttgccccggattgcggtccacgagcctagctttatgatttcacagctgaaaatatccgacagaagccatcggcagaaactccagttgaaagctctagatgtggtgctcttcggacctctgactagaccgcctcacaactggatgaaggacttcattcttaccgtctcaatcgttatcggtgtgggagggtgttggttcgcttatacgcagaacaaaacgagcaaagaacacgtcgctaaaatgatgaaggatttggagtcactgcagaccgccgagcagagtctaatggacctccaggagcgcctggagaaagctcaggaggagaaccgtaacgtggccgtcgagaaacaaaatcttgagaggaagatgatggatgagataaactacgctaaagaggaggcgtgccgcctgcgggagcttagggagggcgcggagtgcgagctcagtagacgacaatacgctgagcaggaactggagcaggttcgcatggctttgaaaaaagctgaaaaagagttcgagctgcgctctagttggtctgtgccagatgctctccagaaatggttgcagctcacacacgaagtagaagttcagtactataacatcaaacgtcagaacgctgagatgcagctcgcaatcgccaaggacgaagtggctgcctcctatctgatacaggccgaaaagatcaaaaagaaaagaagtaccgttttcggcactctgcatgtggcccactcttcctcactcgatgaggtggaccacaagatcttggaggctaaaaaagccctcagtgaactaacgacttgcttgcgcgagaggctcttcagatggcagcagattgagaaaatctgcgggttccagatcgcacacaactctggacttccgagtctgacttcctccctctacagcgatcactcttgggtggtcatgccacgcgtgtcaataccaccttatcctatcgctgggggggtagacgatctggacgaggacacccccccaattgtttcgcagttcccaggaaccatggccaaacctcctggttccctcgcaagatcctcttccctttgcaggagcagacgaagtatcgtgccttccagccctcagccgcagagggcccagctggccccccatgccccacacccatcacaccctagacaccctcaccacccccagcacacgccccattcattaccttcgcctgatccggacattctgagcgtctccagctgccccgccctgtatcgaaatgaagaagaggaagaggcaatttacttttccgcggagaaacagtgggaggtgcccgataccgcctctgagtgtgacagcctaaattcttcaattggccggaagcagagcccccccttgtctctggaaatctaccagaccctgtcccccagaaaaatctcccgggatgaggtgagtcttgaggactcctcccgcggcgattctcccgtgactgttgacgtcagctggggctccccagactgtgtcggactcactgagaccaagagtatgatctttagccctgctagcaaagtttataacggaattctagagaagtcctgctcgatgaatcagctgtccagcggcatcccagttcctaagccccgacatacttcctgctcttccgctgggaacgactctaagcccgtccaggaggccccatctgtggccagaatcagtagtatcccgcacgatctgtgtcataatggcgaaaaaagcaagaaacccagtaaaatcaaaagcctgtttaagaaaaagtctaagtag

SEQ ID NO: 66426 - DNA, 2265 bp, Artificial Sequence
  derived and/or modified sequence
ttgctcgtcttaggactgctggtagctggagccgctgacggctgcgaactggttccccgacacctcagaggaaggagggccaccggctccgctgccaccgccgcttcgtcacccgccgccgcagcgggagactcaccagcactgatgacagatccctgcatgtccctgtcacctccatgcttcacagaagaggacaggttttccctcgaggctctgcagaccatccacaaacaaatggacgatgataaagacggcggaattgaggtggaagaatctgatgagtttattcgagaagacatgaaatataaagacgctacaaacaaacatagtcacttgcaccgtgaagacaaacacattacaatcgaagatttgtggaaacggtggaaaacatcagaggtccataactggactctggaggatactttacagtggctcatcgaattcgtggaactgccccagtatgagaagaactttcgcgacaacaacgtcaaaggaaccacactcccacgcattgcagtccatgaacccagtttcatgatctctcagctaaaaatcagcgatagatcacaccggcagaaattacagcttaaggctttggatgtggtccttttcggccccctcacccgacctccccataactggatgaaggatttcattctgactgtgtccattgtgataggagtggggggatgctggttcgcctatacccagaacaaaaccagtaaggagcacgtggccaagatgatgaaggatttagaatctttgcagactgctgagcagtcccttatggacctccaagaacgactggaaaaagcacaggaggagaaccgtaacgtagcggtagagaagcagaatttagaaaggaagatgatggatgagatcaactacgcaaaggaagaggcatgtaggctaagagagttgagagagggtgctgaatgcgagctttctcgccgtcagtacgcagaacaggaactggaacaggtccgtatggctctgaagaaagccgagaaagagtttgagctccgatcctcttggagtgttcctgatgctctgcagaagtggctacaactgactcacgaggtagaggttcaatattacaatattaaaaggcagaatgctgaaatgcaactggctatcgcgaaggacgaggtggcagcatcttatcttatccaggctgagaagataaaaaaaaaaagatctaccgtcttcggaacattgcacgtagctcactcatcctccctcgacgaagtggatcacaaaatactggaggcaaagaaggcactgtccgagctcaccacctgcctgagggagcggctcttccgctggcagcagatcgagaaaatctgtggttttcagatcgcgcataattccggtttacctagtctgaccagttccctgtatagcgaccactcttgggtcgtgatgccacgagtcagtatccccccttatccgatagcagggggtgtggacgacctggacgaggacactccacccatcgtgtctcagtttcctggtaccatggccaagccacccggaagcctagctagatctagtagtttgtgcaggtcacgccgctctatcgtcccttcatcgccgcaaccacaacgagctcagttggcaccccacgccccccatcccagtcatcccaggcacccgcaccacccacagcatactcctcactctctgccgagtcccgaccctgatatcctgagcgtgagcagttgtcccgctttgtatagaaatgaagaagaagaggaagctatctacttttccgctgaaaaacagtgggaagttccggacacagcttctgagtgcgactccctcaattccagcatcggtcgcaagcagtctccccctctgtccctagagatttatcagacactgtctccccgaaaaatatcccgggatgaggtctccctggaagactcatctcgtggggactcacccgtgacagttgacgtgagctgggggagcccggattgcgtgggcttgacagaaaccaaatctatgatattctcccccgcctctaaggtgtacaacgggattttagagaaatcgtgcagtatgaatcagctctcctccggcattcccgttcctaaaccaaggcacacatcatgcagcagtgcaggcaacgattcaaagccggtgcaggaggcaccaagcgtggctcgcatttcatccatcccacatgacctctgccacaatggagagaagagtaagaagccttctaagatcaagtctttgttcaagaagaaatccaagtag

SEQ ID NO: 66427 - DNA, 2526 bp, Artificial Sequence
  derived and/or modified sequence
atgaatgctgctggcatccgggcccctgaggccgccggggctgatggcacccggctggcccctgggggcagcccctgcctgcggcggcggggccggcctgaggagagccctgctgctgtggtggcccccaggggggccggggagctgcaggccgccggggcccccctgcgcttccacccagccagcccccggcggctgcacccagccagcaccccaggccctgcctggggctggctgctgcggcggcggcgctgggccgccctgctggtgctgggcctgctggtggccggggctgctgatggctgtgagctggtgcccaggcacctgcggggccggcgggccactggatctgctgccacagctgccagcagccctgctgctgctgctggggacagccctgccctgatgacagacccctgcatgagcctgagccccccctgcttcacagaagaagatcgcttcagcctggaggccctgcagaccatccacaagcagatggatgatgacaaggatggcggcatcgaggtggaggagagtgatgagttcatccgggaggacatgaagtacaaggatgccaccaacaagcacagccacctgcaccgggaggacaagcacatcaccatcgaggacctgtggaagcgctggaagaccagcgaggtgcacaactggaccctggaggacaccctgcagtggctgattgaatttgtggagctgccccagtatgagaagaacttccgggacaacaacgtgaagggcaccaccctgcccagaattgctgtgcatgagcccagcttcatgatcagccagctgaagatcagtgacaggagccaccggcagaagctgcagctgaaggccctggatgtggtgctgtttggccccctgaccaggcctccccacaactggatgaaggacttcatcctgactgtgtccatcgtgattggagtgggcggctgctggtttgcctacacccagaacaagaccagcaaggagcacgtggccaagatgatgaaggacctggagagcctgcagacagctgagcagagcctgatggacctgcaggagcggctggagaaggcccaggaggagaacagaaatgtggccgtggagaagcagaacctggagaggaagatgatggatgagatcaactatgccaaggaggaggcctgccgcctgcgggagctgcgggagggcgcagaatgtgagctgagccggcggcagtatgcagagcaggagctggagcaggtgaggatggccctgaagaaggccgagaaggagtttgagctgcggagctcctggagcgtgcctgatgccctgcagaagtggctgcagctgacccatgaggtggaggtgcagtactacaacatcaagaggcagaatgctgagatgcagctggccatcgccaaggatgaggtggccgccagctacctgatccaggccgagaagatcaagaagaagaggagcacagtgtttggcaccctgcacgtggcccacagcagcagcctggatgaggtggaccacaagatcctggaggccaagaaggccctgtctgagctgaccacctgcctgcgggagcggctcttccgctggcagcagatcgagaagatctgtggcttccagatcgcccacaacagcggcctgcccagcctgaccagcagcctgtacagcgaccacagctgggtggtgatgccccgggtgtccatccccccctaccccatcgccggcggcgtggatgacctggatgaggacaccccacccatcgtgtcccagtttcctggcaccatggccaagcccccaggcagcctggcccggagcagcagcctgtgccgcagcagaagaagcatcgtgcccagcagcccccagccccagagggcccagctggcccctcatgccccccaccccagccaccccaggcacccccaccacccccagcacaccccccacagcctgcccagcccagaccctgacatcctgtctgtgagcagctgcccagccctgtacagaaatgaggaggaggaggaggccatctacttctctgctgagaagcagtgggaggtgcctgacacagcctctgaatgtgacagcctgaacagcagcattggaaggaagcagagcccccccctgagcctggagatctaccagaccctgagccccaggaagatcagcagagatgaggtgtccctggaggacagcagcagaggagacagccctgtgacagtggatgtgtcctggggcagcccagactgtgtgggcctgacagagaccaagtccatgatcttctccccagccagcaaggtgtacaacggcatcctggagaagagctgcagcatgaaccagctgagcagcggcatccctgtgcccaagcccaggcacaccagctgcagcagcgctggaaatgacagcaagcctgtgcaggaggcccccagcgtggcccgcatcagcagcatcccccatgacctgtgccacaacggggagaagagcaagaagcccagcaagatcaagagcctcttcaagaagaagagcaagtag

SEQ ID NO: 66428 - DNA, 2265 bp, Artificial Sequence
  derived and/or modified sequence
ctgctggtgctgggcctgctggtggccggggctgctgatggctgtgagctggtgcccaggcacctgcggggcagaagagccaccggcagcgctgccacagctgccagcagccctgctgctgctgctggggacagccctgccctgatgacagacccctgcatgagcctgagccccccctgcttcacagaggaggaccgcttcagcctggaggccctgcagaccatccacaagcagatggatgatgacaaggatggcggcatcgaggtggaggagagtgatgagttcatccgggaggacatgaagtacaaggatgccaccaacaagcacagccacctgcaccgggaggacaagcacatcaccatcgaggacctgtggaagcgctggaagaccagcgaggtgcacaactggaccctggaggacaccctgcagtggctgattgaatttgtggagctgccccagtatgagaagaacttccgggacaacaacgtgaagggcaccaccctgcccagaattgctgtgcatgagcccagcttcatgatcagccagctgaagatcagtgacaggagccaccggcagaagctgcagctgaaggccctggatgtggtgctgtttggccccctgacccggcccccccacaactggatgaaggacttcatcctgactgtgtccatcgtcatcggcgtgggcggctgctggtttgcctacacccagaacaagaccagcaaggagcacgtggccaagatgatgaaggacctggagagcctgcagacagctgagcagagcctgatggacctgcaggagcggctggagaaggcccaggaggagaacagaaatgtggccgtggagaagcagaacctggagaggaagatgatggatgagatcaactatgccaaggaggaggcctgccgcctgcgggagctgcgggagggcgcagaatgtgagctgagccggcggcagtatgcagagcaggagctggagcaggtgaggatggccctgaagaaggccgagaaggagtttgagctgcggagctcctggagcgtgcctgatgccctgcagaagtggctgcagctgacccatgaggtggaggtgcagtactacaacatcaagaggcagaatgctgagatgcagctggccatcgccaaggatgaggtggccgccagctacctgatccaggccgagaagatcaagaagaagaggagcacagtgtttggcaccctgcacgtggcccacagcagcagcctggatgaggtggaccacaagatcctggaggccaagaaggccctgtctgagctgaccacctgcctgcgggagcggctcttccgctggcagcagatcgagaagatctgtggcttccagatcgcccacaacagcggcctgcccagcctgaccagcagcctgtacagcgaccacagctgggtggtgatgccccgggtgtccatccccccctaccccatcgccggcggcgtggatgacctggatgaggacaccccacccatcgtgtcccagtttcctggcaccatggccaagcccccaggcagcctggcccggagcagcagcctgtgccgcagccgccgcagcatcgtgcccagcagcccccagccccagagggcccagctggccccccacgccccccaccccagccaccccaggcacccccaccacccccagcacaccccccacagcctgcccagcccagaccctgacatcctgtctgtgagcagctgcccagccctgtacagaaatgaggaggaggaggaggccatctacttctctgctgagaagcagtgggaggtgcctgacacagcctctgaatgtgacagcctgaacagcagcatcggcaggaagcagagcccccccctgagcctggagatctaccagaccctgagccccaggaagatcagcagagatgaggtgtccctggaggacagcagcagaggagacagccctgtgacagtggatgtgtcctggggcagcccagactgtgtgggcctgacagagaccaagtccatgatcttcagccctgccagcaaggtgtacaacggcatcctggagaagagctgcagcatgaaccagctgagcagcggcatccctgtgcccaagcccaggcacaccagctgcagcagcgctggaaatgacagcaagcctgtgcaggaggcccccagcgtggcccgcatcagcagcatcccccatgacctgtgccacaatggagagaagagcaagaagcccagcaagatcaagagcctcttcaagaagaagagcaagtag

SEQ ID NO: 66429 - DNA, 2526 bp, Artificial Sequence
  derived and/or modified sequence
atgaacgccgccggcatccgggcccccgaggccgccggcgccgacggaactaggctggctcccggcggctccccctgccttaggaggaggggcaggcccgaagagtccccggctgcagtggtcgctcctcggggagccggcgaactgcaggcagccggggctcccctgagattccatcctgcaagtccaaggcgcctgcatcctgcgtccacccctgggccagcatggggctggctactgcggagacggcggtgggctgctctgctggttttgggccttttggtcgctggcgctgccgacggttgcgagcttgtcccccgccacctgcgcgggaggcgtgccacagggagcgccgccacagccgcgtcctcccccgcggctgccgctggcgatagcccggcgctgatgacagacccctgtatgagcctgtctccaccttgtttcactgaggaagaccgcttctccctggaagctctacaaactatccataagcaaatggacgacgacaaggatggcggaatcgaggtggaggaatctgatgagttcatcagggaggacatgaagtacaaagatgctacaaataagcatagccatctgcatcgcgaagacaagcacatcaccatagaggatctttggaaaaggtggaaaaccagcgaggtgcataattggactctcgaagacacccttcagtggctcatcgagtttgtggaactcccccagtacgagaagaattttagagacaacaacgtgaagggaactaccctgcccaggattgctgtccatgagccctccttcatgatttcccagcttaagatcagcgaccggagtcatcgccagaagctgcaattgaaggctctcgatgtcgtcctgtttgggccactgacccgacccccgcataactggatgaaggactttattctcaccgtatccattgtgatcggagtgggaggctgttggttcgcctatacacagaacaagacatccaaggagcacgtggctaaaatgatgaaggaccttgagagcctgcagaccgccgaacagtctctcatggacctacaggagcgattggaaaaggcacaggaagagaatagaaatgttgccgtggaaaagcagaacctcgaacgcaagatgatggacgagattaactacgccaaggaagaagcttgcaggttgcgtgaactgagagaaggcgctgaatgcgagctgtcccgcaggcaatacgcagagcaggaactcgagcaggtgcggatggctcttaaaaaggccgagaaagagttcgagttgaggtccagttggtcagtccctgacgccctacagaagtggttgcagctcacccatgaggtggaggtccaatactacaacatcaaaagacagaacgcagaaatgcaactcgccatcgctaaggacgaagttgcagcctcctaccttattcaagctgaaaaaatcaaaaagaagcgcagtacagtgtttggcactcttcacgttgctcattcttcaagtctagatgaggtggatcataagatcctcgaggcaaagaaggccttgtccgagttaaccacttgtttgagagagcggctcttcagatggcagcagattgagaagatctgcggtttccaaatcgcacataattcaggtctaccctccttgacgagctccctgtactccgatcacagctgggttgttatgccccgggtgagcatccctccatacccaatcgccgggggcgtggacgacctcgatgaggacacacctcccatcgtaagtcagtttccaggaactatggccaagccccccggatccctagctaggtctagtagcctgtgcagaagccggcgtagtattgtcccatcaagcccacaaccacagagggcacagctggctcctcatgccccacaccccagtcatccaaggcatccacaccatcctcagcacactcctcatagtcttcctagtcctgatccagatatcctttccgtctcatcgtgtcctgctctgtatcgtaatgaggaagaagaagaggccatatattttagtgccgagaaacagtgggaggtccccgacacagccagcgagtgtgactctctgaatagctctatcgggagaaagcaaagccccccactcagtctagagatttaccagactctatctccgcgcaagatctcacgggacgaagtgagtttggaagacagctcccgcggggactctccagtgacggtagacgtgtcttgggggagccctgattgcgtaggattaacggagaccaagagcatgattttcagtcctgcttcaaaggtatacaatggaatcctggagaaatcgtgctcaatgaaccagttgtcaagcggaatccccgttccgaagccccgccatacatcgtgctctagcgccggcaatgacagtaagccagtccaggaggctccatcagtcgccagaatctcaagtatcccccatgatctgtgccacaatggcgaaaagtccaaaaagcccagcaagatcaaatcactgttcaagaaaaagtccaaatag

SEQ ID NO: 66430 - DNA, 2265 bp, Artificial Sequence
  derived and/or modified sequence
ctgctggtgctgggcctgctggtggccggcgccgccgacggctgcgaattggttccaaggcacttaagaggccggcgggcaacgggctcagctgctaccgctgcctcgagccctgcagcggccgccggtgactccccggcccttatgaccgatccttgcatgtcactgtcccccccgtgcttcaccgaggaggaccgtttttctctcgaagcgttgcaaacaatacacaagcagatggacgatgacaaggatggcggaatcgaggtcgaggaaagtgatgagttcataagggaagacatgaaatacaaggacgctacaaataaacacagccacctgcacagagaggataaacatatcaccattgaggatctatggaagcggtggaaaacatctgaggtccacaactggaccctggaggacactctgcagtggctcattgagtttgttgaacttccccagtatgaaaagaacttccgtgataataatgtgaaaggaacaacacttccacgtattgcggtacatgagcctagcttcatgattagccaactgaagatttcggatcgttcccatcgccagaagttgcagctgaaagcattggatgtggtgttattcgggcccttgactcggcctccacacaattggatgaaggattttattctgacggtgtctatcgtcatcggcgttggtggatgctggtttgcttatacccagaacaagacgagcaaggagcatgtagccaaaatgatgaaagacctagagagtctgcaaactgctgagcagtctctgatggatctgcaggaacggttggagaaggctcaagaggaaaacagaaacgtagccgtagagaagcaaaaccttgagagaaagatgatggacgaaatcaattatgcaaaagaggaggcatgcagactgagggagctgcgtgagggagccgagtgcgagttaagtagacgacagtacgccgaacaggagcttgaacaggtgaggatggcgctgaagaaggcagagaaggagttcgaactgaggagttcgtggtctgtgcctgatgcactgcagaagtggttgcagctgactcacgaggtggaagttcagtactataacatcaagcgccagaatgctgaaatgcagctggccattgctaaggatgaggtcgctgcttcttacctcattcaggcggagaaaataaagaagaagcgatcaacagtgtttggcactctccatgtcgcccacagctcctccctggatgaggttgatcacaaaattctcgaggcaaagaaggccttgagcgagctgacaacctgcctacgtgagaggctgttccggtggcaacagattgagaaaatctgcggtttccagatagctcacaactccggactgccctcccttacgagcagcctgtatagcgatcactcttgggtggtcatgcctagggtctccatcccaccctaccccatagccggcggcgtggacgatttagacgaagataccccacccattgtgagtcagttccccggtactatggcaaagccccctggctcgcttgcccgcagttcaagcttatgcagatccagacggagcattgtaccaagctcaccacaaccccagcgcgcccagcttgcacctcacgccccacacccgtcccatcctcggcacccccaccacccgcagcacacacctcactctctcccgagtcccgatcccgatatcctcagcgtgtcatcttgcccagccctgtaccgcaatgaggaggaggaggaagccatctacttcagtgctgagaagcagtgggaagttcctgacacagcctctgagtgcgactctcttaacagcagtatcggtagaaaacagtcaccacctctaagtctcgaaatctaccagactctttcgcctagaaaaattagtcgggatgaagttagcttggaggattcatcccgcggcgacagtccagtgaccgtcgacgtgagttgggggtctccagactgcgtaggattaactgagacgaagagcatgatcttctcaccggctagcaaggtgtataacggtatcttagaaaagtcatgttctatgaaccagctgtcttcaggcatcccagtcccaaaacctcggcacaccagctgttcctccgctggaaatgactccaagccagttcaggaggcacctagtgtggccaggatttcatcgattccccatgacctgtgccacaatggcgaaaagagtaaaaagccatcaaagataaaaagtttgttcaaaaagaagtccaaatag

SEQ ID NO: 66431 - DNA, 2526 bp, Artificial Sequence
  derived and/or modified sequence
atgaacgccgcaggcatccgcgcacccgaggcagctggcgctgacggcactagactggcccctggaggttctccttgcctaaggaggagaggaagacctgaagaaagcccggcagccgtagtagcaccacggggtgccggagaactgcaggcagcaggggcacccctgagatttcacccagctagtcccagacgtttgcatcccgcttctacacctggtcctgcttggggatggcttctccgcagacgaagatgggcagctctcttggttttgggtctgcttgttgccggtgcggcagatggatgtgagctcgttcctcggcacctgcgcggtcgccgtgcaactgggtcagcggcaacggccgcttcctcgcccgcagccgcagccggtgactcaccggctctcatgacggacccatgcatgagcctgtctccaccttgcttcactgaagaagacagattcagcctggaagcgctgcagacaattcataagcagatggacgatgacaaagatgggggaatagaagtagaagaatccgatgaattcatccgggaagatatgaagtacaaggatgcgacaaacaaacattcccaccttcacagggaggataaacacattaccatcgaggatctttggaagagatggaaaaccagtgaggtgcacaattggaccctcgaggacaccctgcagtggctcatcgagtttgtagaactgccccagtacgagaaaaatttccgggataataatgttaagggtacaacactgccacgaatagctgtgcatgaaccctcctttatgatctcccagctgaagatttccgaccggtcccatcggcagaagctgcagttaaaagcactggacgtggttctgttcgggccactgaccagaccacctcataattggatgaaggactttatcttaaccgtctccatcgtaattggggtgggtgggtgctggtttgcttacacacaaaacaaaaccagcaaggagcacgtggccaaaatgatgaaggacctggagtctctgcagacagcagaacaaagtctcatggatttacaggagaggcttgaaaaagcccaggaagaaaacagaaatgtggccgtggaaaaacagaatctggaacgcaagatgatggacgaaatcaactacgctaaagaggaagcctgtaggctgagagagctgcgggaaggcgctgagtgcgagctgtcaagaaggcagtacgctgagcaggagctggagcaagtgcgtatggcacttaaaaaggccgaaaaggaattcgaactgagatcttcatggagcgtccccgacgccctgcagaaatggctccagctgacccacgaagtcgaagtccagtactacaatataaagcggcaaaacgcggagatgcaactagctatagcgaaggatgaggtggccgcttcatacctgattcaagccgagaagattaagaagaagcgtagcaccgtgttcggtacgctgcatgtcgctcactcatcgtcgcttgacgaggtggaccacaaaatcctggaggcaaaaaaagcattgtctgagctgaccacctgtctccgggagagactgtttcgttggcaacagattgagaagatttgcggatttcaaattgcccataattctggacttccaagtctaacttcttctctgtactcagaccactcatgggttgtcatgccaagggtgtccatccccccatatcccattgccggtggagtcgacgatctcgacgaggatactccaccaatcgtgtcccagttccctgggacaatggccaagcctcccggaagtctggctcgaagttccagtttgtgtcgctcaaggcgctccatcgtgccgtcttcaccacagccacagcgtgcccagttggcacctcacgccccacaccctagccacccgagacaccctcaccacccccagcatacgccacactccctgccatcccctgatcccgatatcctgagcgttagcagttgtcctgccctctaccgtaacgaggaggaagaggaggctatatactttagtgcggagaaacaatgggaagttcctgacaccgcttctgaatgcgactccctcaactcttccattggcagaaagcaatctcccccactgtcgctggagatttaccagacactgtccccccgtaaaattagtcgtgacgaagtgagcctggaggattcgagtcgcggagactctcctgtcacagtggacgtgtcctggggatcgccagattgtgtaggattgacggagacaaagagtatgattttctcacccgctagcaaagtgtataacgggattttggagaagagctgctcgatgaaccagctgtccagtggcatccccgtcccgaaaccccgtcatacatcttgctcctctgctgggaacgattctaaaccagtgcaggaggccccaagcgttgctcgaatctcatctatcccccatgacctctgccacaacggagagaaaagcaaaaagccaagcaagattaaatcactgtttaagaaaaaatctaagtag

SEQ ID NO: 66432 - DNA, 2265 bp, Artificial Sequence
  derived and/or modified sequence
cttctggtactcggtcttctcgttgccggagcagccgatggatgtgagttagtcccaaggcatctaagaggacgccgagcgaccggcagtgcggcaaccgcagcttcatccccagccgcagccgcaggggattccccagccttaatgaccgacccctgcatgtcgttgtctcccccttgctttactgaagaagacaggttcagcctggaggcccttcagactatccacaagcagatggatgatgacaaggacggcggaatagaagtggaggagagcgacgagttcatcagagaagacatgaaatataaggatgcaactaataagcactcacatttacatagagaggacaagcatatcaccatcgaggacctctggaaacggtggaagacgtcagaagtccacaattggacactggaggacactctacagtggcttatcgagttcgtcgagctgccacaatatgagaagaactttcgcgataataacgtgaagggtactacccttccacgaatcgcggttcacgaaccctcctttatgatttcccagctgaagattagcgaccggagtcacaggcagaaactgcagctgaaggccctcgacgttgtcctcttcggtcctctgacaaggcctccccataattggatgaaggatttcattcttactgtgtcaatagtgatcggagtcggtggatgttggttcgcttacacacaaaacaaaacatccaaggagcacgtggcgaaaatgatgaaggacctggaatcgcttcagaccgcggaacagagcttaatggatctgcaggagagactggagaaagcacaggaggagaatcgcaacgtggccgtcgagaagcagaatctggaaaggaaaatgatggacgagatcaattatgccaaagaggaggcctgccgcctccgggagttgagggagggggctgagtgtgagctttcccgcagacagtacgctgagcaagaactggagcaagtaaggatggctctcaaaaaagccgagaaagagtttgagctccgctcttcctggagcgttcctgacgccctccagaaatggctgcagctgactcacgaggtcgaggtccagtactataacatcaagcgacagaacgcagagatgcagttagccatcgcgaaggacgaggtggctgctagttatctgatccaggccgagaagattaagaagaagcggtccactgtttttgggaccctgcatgtggctcacagctcgagccttgacgaagtggaccacaagatccttgaagccaaaaaggcactttccgaactgaccacttgcctgcgtgaacggttattccggtggcagcagattgagaaaatctgtggattccagatcgcgcacaactctgggctacccagtttgacttctagcctatactccgaccactcttgggtggtcatgccacgagttagcatcccgccatatcccattgctgggggtgtcgacgacctggatgaggatacacctcctattgtgtctcagtttcccggtacaatggccaagccacccggttccctggctcgctcatcatctctatgccgctccagacgctctatcgtgccgagctctccacaacctcaaagggctcaattggcacctcacgctccccacccttctcaccctcggcacccacaccacccccagcacactccccactctcttccgtcgcctgatcccgatatcctatctgtgagctcttgccccgctctctatagaaatgaagaggaggaggaggccatctactttagtgcggaaaagcagtgggaagtgcccgacaccgcctccgagtgcgattccttaaatagctctatagggagaaaacagtctccgcctctgtcactggagatctatcagaccttgagtcctcggaagattagccgcgacgaggtgtcactggaagacagcagtaggggggattctccagttacggttgatgttagttgggggtccccagattgcgtgggactgaccgaaactaagagcatgatattttctcctgcaagtaaggtgtacaatggaatcctggagaagtcatgctcaatgaatcagcttagttccggcattcccgttccaaagccaaggcatacttcatgctcttctgctgggaacgatagtaaaccagtgcaggaagcacccagtgtggccagaattagcagcataccacacgacctgtgtcacaacggcgagaaaagcaaaaagccctctaaaattaagtctctctttaaaaagaaatccaagtag

SEQ ID NO: 66433 - DNA, 5178 bp, Artificial Sequence
  derived and/or modified sequence
gaggcgggggattggtatgcgagcgaatgtgcgaggggagggaggcgtcccggcggagcgtggtactacgaccagcgcgggccggagggggcggggggatgcgccgcggcggcggcggcgcgggagctggggttggtgtttggcggcgccagagcagcggatcccggtctcgccgcagcagcagcgcgggtgtcgtgcaccgcctgaagacgccgtacctttctaccccccaccttttttttttttttttttaaataaccggaaccaatgaacgcagccgggatcagagctccggaggccgccggtgccgatgggaccaggctggcgcccggcgggagcccgtgtctgaggcggcgggggcggccggaggagtcgccggcggcggtggtggcgcctcgcggagccggcgagctgcaggcggccggggcgccgctgcgctttcacccggcttctcctcggcgccttcatcccgcctcgactcctggcccagcgtggggctggctgctgcggcggcggcgctgggctgcgttgctggtgctcgggctgctggtagccggagcggcggacggatgcgagcttgtgccccggcacctccgcgggcggcgggcgactggctctgccgcaactgccgcctcctctcccgccgcggcggccggcgatagcccggcgctcatgacagatccctgcatgtcactgagtccaccatgctttacagaagaagacagatttagtctggaagctcttcaaacaatacataaacaaatggatgatgacaaagatggtggaattgaagtagaggaaagtgatgaattcatcagagaagatatgaaatataaagatgctactaataaacacagccatctgcacagagaagataaacatataacgattgaggatttatggaaacgatggaaaacatcagaagttcataattggacccttgaagacactcttcagtggttgatagagtttgttgaactaccccaatatgagaagaattttagagacaacaatgtcaaaggaacgacacttcccaggatagcagtgcacgaaccttcatttatgatctcccagttgaaaatcagtgaccggagtcacagacaaaaacttcagctcaaggcattggatgtggttttgtttggacctctaacacgcccacctcataactggatgaaagattttatcctcacagtttctatagtaattggtgttggaggctgctggtttgcttatacgcagaataagacatcaaaagaacatgttgcaaaaatgatgaaagatttagagagcttacaaactgcagagcaaagtctaatggacttacaggagaggcttgaaaaggcacaggaagaaaacagaaatgttgctgtagaaaagcaaaatttagagcgcaaaatgatggatgaaatcaattatgcaaaggaggaggcttgtcggctgagagagctaagggagggagctgaatgtgaattgagtagacgtcagtatgcagaacaggaattggaacaggttcgcatggctctgaaaaaggccgaaaaagaatttgaactgagaagcagttggtctgttccagatgcacttcagaaatggcttcagttaacacatgaagtagaagtgcaatactacaatattaaaagacaaaacgctgaaatgcagctagctattgctaaagatgaggttgctgcttcatatctgattcaggcagaaaaaattaaaaagaagagaagcacagtctttgggactctgcacgttgcacacagctcctccctagatgaggtagaccacaaaattctggaagcaaagaaagctctctctgagttgacaacttgtttacgagaacgactttttcgctggcaacaaattgagaagatctgtggctttcagatagcccataactcaggactccccagcctgacctcttccctttattctgatcacagctgggtggtgatgcccagagtctccattccaccctatccaattgctggaggagttgatgacttagatgaagacacacccccaatagtgtcacaatttcccgggaccatggctaaacctcctggatcattagccagaagcagcagcctgtgccgttcacgccgcagcattgtgccgtcctcgcctcagcctcagcgagctcagcttgctccacacgccccccacccgtcacaccctcggcaccctcaccacccgcaacacacaccacactccttgccttcccctgatccagatatcctctcagtgtcaagttgccctgcgctttatcgaaatgaagaggaggaagaggccatttacttctctgctgaaaagcaatgggaagtgccagacacagcttcagaatgtgactccttaaattcttccattggaaggaaacagtctcctcctttaagcctcgagatataccaaacattatctccgcgaaagatatcaagagatgaggtgtccctagaggattcctcccgaggggattcgcctgtaactgtggatgtgtcttggggttctcccgactgtgtaggtctgacagaaactaagagtatgatcttcagtcctgcaagcaaagtgtacaatggcattttggagaaatcctgtagcatgaaccagctttccagtggcatcccggtgcctaaacctcgccacacatcatgttcctcagctggcaacgacagtaaaccagttcaggaagccccaagtgttgccagaataagcagcatcccacatgacctttgtcataatggagagaaaagcaaaaagccatcaaaaatcaaaagcctttttaagaagaaatctaagtgaactggctgacttgatggaatcatgttcaagtggcatctgtaaactattatcccccaccctccactccccaccttttttttggtttaattttaggaatgtaactccattggggctttccaggccggatgccatagtggaacatccagaagggcaactgtctactgtctgcttatttaagtgactatatataatcaattcatcaagccagttattactgaaaaatcattgaaatgagacagtttacagtcatttctgcctatttatttctgctttgttctcagtgatgtatatgcaacattttgttgaaagccacgatggacttacaagctttaatggactcgtaagccagcatgggcttgcaaaaatttcttgtttaccagagcatcttcttatctttccacagagctatttacatcctggactatataacttaaaagaagtaaaacgtaattgcactactgttttccagactggaaaaaaaaaaaatctctgcaagtgaaactgtatagagtttataaaatgactatggataggggactgttttcacttttagatcaaaatgggtttttaagtagaacctagggtttctaattgacttgatttctggaaatgaaaacccgcgcttttattatgggaagcttcttgaactgcatttactattgtgaagtttcaagtcccgctgtaaagatcatgttgttttgttttccccagggctttcactgtgatttactgcattgcaggctgtatgataaaacacacataatttaaagagagaaggctcttgattccttatgcaagtggaagagttgaaacttgattgaaggacttaaaacattcacaaccttaagccgaggtggggggatatggggattcaggcaattgtttacacactttgaataactgcaaaggatttacggtttgtgaaaaatgtgtactgtggaaaagataataaattgaagacattattgtgtgggattgtgctgatttttgttgataacacaaaaaacactatgttttctggagagctgtgtaagctgtcttgttgcttagttgcaatataagaaatagtgatgttttggacgtaagttgtcaacaaatttctattttatattgttatatttttatgtagtttgaaatgtaaaaatgttctaatatcaagattaacaaatataaatttatggtgcatttagattgcgttgtattaatttataaagtatggtgttcattaaattggtgggttgtataagggtagcttttgttgttaaaaaaacagtagagagttaagttccatatagcaacaaagtatgttaacatctagggagtttctgcttataccactttaaaaatatgcaatcataagtgatttggttactgcaatgcagatggatgtttggatgaacaactgatacattttagttagaatgctttttcagcattatggctaaaatatatgtctaacccagtgctatttaggtgaaaatgctaattgataaaccagaagtttcttttgagatttgctttaaagaaatgctttagtaagaatatgaacaatttcctgatgtctcctataaattgtgattgtttattctattactattgttaaaaacttgaatggtatttatattggctgatatttatatacttaatagattgagttctgtaagggcaaaaacggattgaaatgaacatagcgttttgcactaatgataagataacctgagaggtagggttgaggaacacagggttgaaagctgttggagaggggaaaagttgtgcataaagaactgaaaagggttctggagtgttcattcagagtgaagggaaaactttatccttctatttcttataaccagacaggaggagttcttccctttgaaaattgcaaaaggaatgagaactttgcagttggatgaatagagaagggaaaagttgctggagcacggagtgaagatgggaggagctgttagcaaggcccactgctgctcctgggtgagaagggagctctggagcaggaccagctgggggccggcactgctgcttagagtggaggaggctggccaaagagactgtgggctgttttcagtcagggagcatgtgcattgtttgtgctcaatttcagacactcatttataaacaaattcaaccaagggatatttactgctttatgttgcttatgataattattttgcattaatacagtatacacatttgtaaattcaacaggaaattattgagttttggaaagctacagtaatttctgtattacatcatttatatgtgaaaagttggacatttctgtaagtttttaaaattatccatttgttactttaacattttaaaattatggtgttttcctgattttaaaagcaatattttccttactgt

SEQ ID NO: 66434 - DNA, 3613 bp, Artificial Sequence
  derived and/or modified sequence
agagcagcggatcccggtctcgccgcagcagcagcgcgggtgtcgtgcaccgcctgaagacgccgtacctttctaccccccaccttttttttttttttttttaaataaccggaaccaatgaacgcagccgggatcagagctccggaggccgccggtgccgatgggaccaggctggcgcccggcgggagcccgtgtctgaggcggcgggggcggccggaggagtcgccggcggcggtggtggcgcctcgcggagccggcgagctgcaggcggccggggcgccgctgcgctttcacccggcttctcctcggcgccttcatcccgcctcgactcctggcccagcgtggggctggctgctgcggcggcggcgctgggctgcgttgctggtgctcgggctgctggtagccggagcggcggacggatgcgagcttgtgccccggcacctccgcgggcggcgggcgactggctctgccgcaactgccgcctcctctcccgccgcggcggccggcgatagcccggcgctcatgacagatccctgcatgtcactgagtccaccatgctttacagaagaagacagatttagtctggaagctcttcaaacaatacataaacaaatggatgatgacaaagatggtggaattgaagtagaggaaagtgatgaattcatcagagaagatatgaaatataaagatgctactaataaacacagccatctgcacagagaagataaacatataacgattgaggatttatggaaacgatggaaaacatcagaagttcataattggacccttgaagacactcttcagtggttgatagagtttgttgaactaccccaatatgagaagaattttagagacaacaatgtcaaaggaacgacacttcccaggatagcagtgcacgaaccttcatttatgatctcccagttgaaaatcagtgaccggagtcacagacaaaaacttcagctcaaggcattggatgtggttttgtttggacctctaacacgcccacctcataactggatgaaagattttatcctcacagtttctatagtaattggtgttggaggctgctggtttgcttatacgcagaataagacatcaaaagaacatgttgcaaaaatgatgaaagatttagagagcttacaaactgcagagcaaagtctaatggacttacaggagaggcttgaaaaggcacaggaagaaaacagaaatgttgctgtagaaaagcaaaatttagagcgcaaaatgatggatgaaatcaattatgcaaaggaggaggcttgtcggctgagagagctaagggagggagctgaatgtgaattgagtagacgtcagtatgcagaacaggaattggaacaggttcgcatggctctgaaaaaggccgaaaaagaatttgaactgagaagcagttggtctgttccagatgcacttcagaaatggcttcagttaacacatgaagtagaagtgcaatactacaatattaaaagacaaaacgctgaaatgcagctagctattgctaaagatgaggttgctgcttcatatctgattcaggcagaaaaaattaaaaagaagagaagcacagtctttgggactctgcacgttgcacacagctcctccctagatgaggtagaccacaaaattctggaagcaaagaaagctctctctgagttgacaacttgtttacgagaacgactttttcgctggcaacaaattgagaagatctgtggctttcagatagcccataactcaggactccccagcctgacctcttccctttattctgatcacagctgggtggtgatgcccagagtctccattccaccctatccaattgctggaggagttgatgacttagatgaagacacacccccaatagtgtcacaatttcccgggaccatggctaaacctcctggatcattagccagaagcagcagcctgtgccgttcacgccgcagcattgtgccgtcctcgcctcagcctcagcgagctcagcttgctccacacgccccccacccgtcacaccctcggcaccctcaccacccgcaacacacaccacactccttgccttcccctgatccagatatcctctcagtgtcaagttgccctgcgctttatcgaaatgaagaggaggaagaggccatttacttctctgctgaaaagcaatgggaagtgccagacacagcttcagaatgtgactccttaaattcttccattggaaggaaacagtctcctcctttaagcctcgagatataccaaacattatctccgcgaaagatatcaagagatgaggtgtccctagaggattcctcccgaggggattcgcctgtaactgtggatgtgtcttggggttctcccgactgtgtaggtctgacagaaactaagagtatgatcttcagtcctgcaagcaaagtgtacaatggcattttggagaaatcctgtagcatgaaccagctttccagtggcatcccggtgcctaaacctcgccacacatcatgttcctcagctggcaacgacagtaaaccagttcaggaagccccaagtgttgccagaataagcagcatcccacatgacctttgtcataatggagagaaaagcaaaaagccatcaaaaatcaaaagcctttttaagaagaaatctaagtgaactggctgacttgatggaatcatgttcaagtggcatctgtaaactattatcccccaccctccactccccaccttttttttggtttaattttaggaatgtaactccattggggctttccaggccggatgccatagtggaacatccagaagggcaactgtctactgtctgcttatttaagtgactatatataatcaattcatcaagccagttattactgaaaaatcattgaaatgagacagtttacagtcatttctgcctatttatttctgctttgttctcagtgatgtatatgcaacattttgttgaaagccacgatggacttacaagctttaatggactcgtaagccagcatgggcttgcaaaaatttcttgtttaccagagcatcttcttatctttccacagagctatttacatcctggactatataacttaaaagaagtaaaacgtaattgcactactgttttccagactggaaaaaaaaaaaatctctgcaagtgaaactgtatagagtttataaaatgactatggataggggactgttttcacttttagatcaaaatgggtttttaagtagaacctagggtttctaattgacttgatttctggaaatgaaaacccgcgcttttattatgggaagcttcttgaactgcatttactattgtgaagtttcaagtcccgctgtaaagatcatgttgttttgttttccccagggctttcactgtgatttactgcattgcaggctgtatgataaaacacacataatttaaagagagaaggctcttgattccttatgcaagtggaagagttgaaacttgattgaaggacttaaaacattcacaaccttaagccgaggtggggggatatggggattcaggcaattgtttacacactttgaataactgcaaaggatttacggtttgtgaaaaatgtgtactgtggaaaagataataaattgaagacattattgtg

SEQ ID NO: 66435 - protein, 1276 aa, Artificial Sequence
  derived and/or modified sequence
MDLFDFFRDWDLEQQCHYEQDRSALKKREWERRNQEVQQEDDLFSSGFDLFGEPYKTNKGDALANRVQNTLGNYDEMKNLLTNHSNQNHLVGIPKNSVPQNPNNKNEPSFFPEQKNRIIPPHQDNTHPSAPMPPPSVVILNSTLIHSNRKSKPEWSRDSHNPSTVLASQASGQPNKMQTLTQDQSQAKLEDFFVYPAEQPQIGEVEESNPSAKEDSNPNSSGEDAFKEIFQSNSPEESEFAVQAPGSPLVASSLLAPSSGLSVQNFPPGLYCKTSMGQQKPTAYVRPMDGQDQAPDISPTLKPSIEFENSFGNLSFGTLLDGKPSAASSKTKLPKFTILQTSEVSLPSDPSCVEEILRESQHLTPGFTLQKWNDPTTRASTKSVSFKSMLEDDLKLSSDEDDLEPVKTLTTQCTATELYQAVEKAKPRNNPVNPPLATPQPPPAVQASGGSGSSSESESSSESDSDTESSTTDSESNEAPRVATPEPEPPSTNKWQLDKWLNKVTSQNKSFICGQNETPMETISLPPPIIQPMEVQMKVKTNASQVPAEPKERPLLSLIREKARPRPTQKIPETKALKHKLSTTSETVSQRTIGKKQPKKVEKNTSTDEFTWPKPNITSSTPKEKESVELHDPPRGRNKATAHKPAPRKEPRPNIPLAPEKKKYRGPGKIVPKSREFIETDSSTSDSNTDQEETLQIKVLPPCIISGGNTAKSKEICGASLTLSTLMSSSGSNNNLSISNEEPTFSPIPVMQTEILSPLRDHENLKNLWVKIDLDLLSRVPGHSSLHAAPAKPDHKETATKPKRQTAVTAVEKPAPKGKRKHKPIEVAEKIPEKKQRLEEATTICLLPPCISPAPPHKPPNTRENNSSRRANRRKEEKLFPPPLSPLPEDPPRRRNVSGNNGPFGQDKNIAMTGQITSTKPKRTEGKFCATFKGISEGDTPKKASSATITVTNTAIATATVTATAIVTTTVTATATATATTTTTTTTISTITSTITTGLMDSSHLEMTSWAALPLLSSSSTNVRRPKLTFDDSVHNADYYMQEAKKLKHKADALFEKFGKAVNYADAALSFTECGNAMERDPLEAKSPYTMYSETVELLRYAMRLKNFASPLASDGDKKLAVLCYRCLSLLYLRMFKLKKDHAMKYSRSLMEYFKQNASKVAQIPSPWVSNGKNTPSPVSLNNVSPINAMGNCNNGPVTIPQRIHHMAASHVNITSNVLRGYEHWDMADKLTRENKEFFGDLDTLMGPLTQHSSMTNLVRYVRQGLCWLRIDAHLL

SEQ ID NO: 66436 - protein, 1278 aa, Artificial Sequence
  derived and/or modified sequence
MDLFDFFRDWDLEQQCHYEQDRSALKKREWERRNQEVQQEDDLFSSGFDLFGEPYKTNKGDALANRVQNTLGNYDEMKNLLTNHSNQNHLVGIPKNSVPQNPNNKNEPSFFPEQKNRIIPPHQDNTHPSAPMPPPSVVILNSTLIHSNRKSKPEWSRDSHNPSTVLASQASGQPNKMQTLTQDQSQAKLEDFFVYPAEQPQIGEVEESNPSAKEDSNPNSSGEDAFKEIFQSNSPEESEFAVQAPGSPLVASSLLAPSSGLSVQNFPPGLYCKTSMGQQKPTAYVRPMDGQDQAPDISPTLKPSIEFENSFGNLSFGTLLDGKPSAASSKTKLPKFTILQTSEVSLPSDPSCVEEILRESQHLTPGFTLQKWNDPTTRASTKSVSFKSMLEDDLKLSSDEDDLEPVKTLTTQCTATELYQAVEKAKPRNNPVNPPLATPQPPPAVQASGGSGSSSESESSSESDSDTESSTTDSESNEAPRVATPEPEPPSTNKWQLDKWLNKVTSQNKSFICGQNETPMETISLPPPIIQPMEVQMKVKTNASQVPAEPKERPLLSLIREKARPRPTQKIPETKALKHKLSTTSETVSQRTIGKKQPKKVEKNTSTDEFTWPKPNITSSTPKEKESVELHDPPRGRNKATAHKPAPRKEPRPNIPLAPEKKKYRGPGKIVPKSREFIETDSSTSDSNTDQEETLQIKVLPPCIISGGNTAKSKEICGASLTLSTLMSSSGSNNNLSISNEEPTFSPIPVMQTEILSPLRDHENLKNLWVKIDLDLLSRVPGHSSLHAAPAKPDHKETATKPKRQTAVTAVEKPAPKGKRKHKPIEVAEKIPEKKQRLEEATTICLLPPCISPAPPHKPPNTRENNSSRRANRRKEEKLFPPPLSPLPEDPPRRRNVSGNNGPFGQDKNIAMTGQITSTKPKRTEGKFCATFKGISVNEGDTPKKASSATITVTNTAIATATVTATAIVTTTVTATATATATTTTTTTTISTITSTITTGLMDSSHLEMTSWAALPLLSSSSTNVRRPKLTFDDSVHNADYYMQEAKKLKHKADALFEKFGKAVNYADAALSFTECGNAMERDPLEAKSPYTMYSETVELLRYAMRLKNFASPLASDGDKKLAVLCYRCLSLLYLRMFKLKKDHAMKYSRSLMEYFKQNASKVAQIPSPWVSNGKNTPSPVSLNNVSPINAMGNCNNGPVTIPQRIHHMAASHVNITSNVLRGYEHWDMADKLTRENKEFFGDLDTLMGPLTQHSSMTNLVRYVRQGLCWLRIDAHLL

SEQ ID NO: 66437 - DNA, 3831 bp, Artificial Sequence
  derived and/or modified sequence
atggacctgttcgacttcttcagagactgggacctggagcagcagtgccactacgagcaggacagaagcgccctgaagaagagagagtgggagagaagaaaccaggaggtgcagcaggaggacgacctgttcagcagcggcttcgacctgttcggcgagccctacaagaccaacaagggcgacgccctggccaacagagtgcagaacaccctgggcaactacgacgagatgaagaacctgctgaccaaccacagcaaccagaaccacctggtgggcatccccaagaacagcgtgccccagaaccccaacaacaagaacgagcccagcttcttccccgagcagaagaacagaatcatccccccccaccaggacaacacccaccccagcgcccccatgcccccccccagcgtggtgatcctgaacagcaccctgatccacagcaacagaaagagcaagcccgagtggagcagagacagccacaaccccagcaccgtgctggccagccaggccagcggccagcccaacaagatgcagaccctgacccaggaccagagccaggccaagctggaggacttcttcgtgtaccccgccgagcagccccagatcggcgaggtggaggagagcaaccccagcgccaaggaggacagcaaccccaacagcagcggcgaggacgccttcaaggagatcttccagagcaacagccccgaggagagcgagttcgccgtgcaggcccccggcagccccctggtggccagcagcctgctggcccccagcagcggcctgagcgtgcagaacttcccccccggcctgtactgcaagaccagcatgggccagcagaagcccaccgcctacgtgagacccatggacggccaggaccaggcccccgacatcagccccaccctgaagcccagcatcgagttcgagaacagcttcggcaacctgagcttcggcaccctgctggacggcaagcccagcgccgccagcagcaagaccaagctgcccaagttcaccatcctgcagaccagcgaggtgagcctgcccagcgaccccagctgcgtggaggagatcctgagagagagccagcacctgacccccggcttcaccctgcagaagtggaacgaccccaccaccagagccagcaccaagagcgtgagcttcaagagcatgctggaggacgacctgaagctgagcagcgacgaggacgacctggagcccgtgaagaccctgaccacccagtgcaccgccaccgagctgtaccaggccgtggagaaggccaagcccagaaacaaccccgtgaacccccccctggccaccccccagcccccccccgccgtgcaggccagcggcggcagcggcagcagcagcgagagcgagagcagcagcgagagcgacagcgacaccgagagcagcaccaccgacagcgagagcaacgaggcccccagagtggccacccccgagcccgagccccccagcaccaacaagtggcagctggacaagtggctgaacaaggtgaccagccagaacaagagcttcatctgcggccagaacgagacccccatggagaccatcagcctgcccccccccatcatccagcccatggaggtgcagatgaaggtgaagaccaacgccagccaggtgcccgccgagcccaaggagagacccctgctgagcctgatcagagagaaggccagacccagacccacccagaagatccccgagaccaaggccctgaagcacaagctgagcaccaccagcgagaccgtgagccagagaaccatcggcaagaagcagcccaagaaggtggagaagaacaccagcaccgacgagttcacctggcccaagcccaacatcaccagcagcacccccaaggagaaggagagcgtggagctgcacgacccccccagaggcagaaacaaggccaccgcccacaagcccgcccccagaaaggagcccagacccaacatccccctggcccccgagaagaagaagtacagaggccccggcaagatcgtgcccaagagcagagagttcatcgagaccgacagcagcaccagcgacagcaacaccgaccaggaggagaccctgcagatcaaggtgctgcccccctgcatcatcagcggcggcaacaccgccaagagcaaggagatctgcggcgccagcctgaccctgagcaccctgatgagcagcagcggcagcaacaacaacctgagcatcagcaacgaggagcccaccttcagccccatccccgtgatgcagaccgagatcctgagccccctgagagaccacgagaacctgaagaacctgtgggtgaagatcgacctggacctgctgagcagagtgcccggccacagcagcctgcacgccgcccccgccaagcccgaccacaaggagaccgccaccaagcccaagagacagaccgccgtgaccgccgtggagaagcccgcccccaagggcaagagaaagcacaagcccatcgaggtggccgagaagatccccgagaagaagcagagactggaggaggccaccaccatctgcctgctgcccccctgcatcagccccgcccccccccacaagccccccaacaccagagagaacaacagcagcagaagagccaacagaagaaaggaggagaagctgttccccccccccctgagccccctgcccgaggacccccccagaagaagaaacgtgagcggcaacaacggccccttcggccaggacaagaacatcgccatgaccggccagatcaccagcaccaagcccaagagaaccgagggcaagttctgcgccaccttcaagggcatcagcgagggcgacacccccaagaaggccagcagcgccaccatcaccgtgaccaacaccgccatcgccaccgccaccgtgaccgccaccgccatcgtgaccaccaccgtgaccgccaccgccaccgccaccgccaccaccaccaccaccaccaccaccatcagcaccatcaccagcaccatcaccaccggcctgatggacagcagccacctggagatgaccagctgggccgccctgcccctgctgagcagcagcagcaccaacgtgagaagacccaagctgaccttcgacgacagcgtgcacaacgccgactactacatgcaggaggccaagaagctgaagcacaaggccgacgccctgttcgagaagttcggcaaggccgtgaactacgccgacgccgccctgagcttcaccgagtgcggcaacgccatggagagagaccccctggaggccaagagcccctacaccatgtacagcgagaccgtggagctgctgagatacgccatgagactgaagaacttcgccagccccctggccagcgacggcgacaagaagctggccgtgctgtgctacagatgcctgagcctgctgtacctgagaatgttcaagctgaagaaggaccacgccatgaagtacagcagaagcctgatggagtacttcaagcagaacgccagcaaggtggcccagatccccagcccctgggtgagcaacggcaagaacacccccagccccgtgagcctgaacaacgtgagccccatcaacgccatgggcaactgcaacaacggccccgtgaccatcccccagagaatccaccacatggccgccagccacgtgaacatcaccagcaacgtgctgagaggctacgagcactgggacatggccgacaagctgaccagagagaacaaggagttcttcggcgacctggacaccctgatgggccccctgacccagcacagcagcatgaccaacctggtgagatacgtgagacagggcctgtgctggctgagaatcgacgcccacctgctgtag

SEQ ID NO: 66438 - DNA, 13641 bp, Artificial Sequence
  derived and/or modified sequence
cgccgcctgtgcagccgctgccgccgccgccgccgccgccgccgccgccgccgccgccgccgccgctgccgccccggctgccgcgccgcgccgctgcctctgccccggccgcccccgccgccgctgccgccgccggcccgcagccagccaggcgggcggcccagcccgcctgagcccgcagcggctgccgccgcagcgtcgggtcgctgggtgcgcgggctaccgcggaccgagcggacccgagtgggcgaccaggcgcttgcccgcccagtgccactgccgccgcttcctcgccggagcacaggaccagacacctccagcgcccgctgctgctgccgatgcggcccggacacttttagctgggcgggagggctggagagccgggggccgccgagaaccgccagcgagctgtgccgagagccgcgccgacccgctgcgatcagggacaggcgcccgcccgccgccgccgcctggccgctatggatctattcgactttttcagagactgggacttggagcagcagtgtcactatgaacaagaccgtagtgcacttaaaaaaagggaatgggagcggaggaatcaagaagtccagcaagaagacgatctcttttcttcaggctttgatctttttggggagccatacaagacaaacaaaggtgatgcacttgccaaccgagtccagaacacgcttggaaactatgatgaaatgaagaatttgctaactaaccattctaatcagaatcacctagtgggaattccaaagaattctgtgccccagaatcccaacaacaaaaatgaaccaagcttttttccagaacaaaagaacagaataattccacctcaccaggataatacccatccttcagcaccaatgcctccaccttctgttgtgatactgaattcaactctaatacacagcaacagaaaatcaaaacctgagtggtcacgtgatagtcataaccctagcactgtactggcaagccaggccagtggtcagccaaacaagatgcagactttgacacaggaccagtctcaagccaaactggaagacttctttgtctacccagctgaacagccccagattggagaagttgaagagtcaaacccatctgcaaaggaagacagtaaccctaattctagtggagaagatgctttcaaagaaatctttcaatccaattcaccggaagaatctgaattcgccgtgcaagcgcctgggtctcccctagtggcttcctctttattagctcctagcagtggcctttcagttcaaaacttcccaccagggctttactgcaaaacaagcatggggcagcaaaagccaactgcatacgtcagacccatggatggccaggaccaggcaccggacatctcaccaacactgaaaccttcaattgaatttgagaacagctttgggaatctgtcatttggaacactcttggatggaaaacccagtgcagccagttcaaagactaaactgccaaagttcaccatcctccaaacaagtgaagtaagccttcccagtgatccaagctgtgttgaagaaatcttgcgggaatcgcagcatctgaccccaggattcaccttacaaaagtggaatgacccaaccaccagagcttctacaaagtcagtgtctttcaaatcgatgcttgaggatgacctgaagctgagcagtgatgaagatgaccttgagcctgtgaagaccttgaccactcagtgcactgccactgagctctaccaggctgttgaaaaggcaaaacctaggaataatcctgtgaacccacccttggccactccccagcccccacctgcagtgcaagccagcgggggttctggcagctccagcgaatcggagagcagctctgagtcggattcagacactgaaagtagcaccactgacagcgaatctaatgaggcacctcgtgtggcaactccagagcctgagccaccctcaaccaacaagtggcaactggataaatggcttaacaaagtgacatcccagaacaagtcttttatttgtggccaaaatgaaacacccatggagactatttctctgcctcctccaatcatccaaccaatggaagtccagatgaaagtgaagacgaatgccagtcaggtcccagctgaacccaaagaaaggcctctcctcagtctcattagggagaaagcccgtccacggcccactcagaaaattccagaaacaaaggctttgaagcataagttgtcaacaactagtgagacagtgtctcaaaggacaattgggaaaaaacagcccaaaaaagttgagaagaacaccagcactgacgagtttacctggcccaaaccaaatattaccagcagcactcccaaagaaaaagaaagtgtggagcttcatgacccaccaagaggccgcaacaaagccactgcccacaaaccagcccctaggaaagaaccaagacctaacatccctttggctcccgagaagaagaagtacagagggcctggcaagattgtgccaaagtctcgggaattcattgaaacagattcatctacatctgactccaacacagatcaggaagagaccctgcaaatcaaagtcctgcctccgtgcattatttctggaggtaatactgccaaatccaaggaaatctgtggtgccagcctgaccctcagcaccttaatgagtagcagtggcagcaacaacaacttatccatcagtaatgaagagccaacattttcacctattcctgtcatgcaaactgaaatcctgtcccctctgcgagatcatgagaacctgaaaaacctctgggtgaagattgaccttgacttactctctagagtacctggccacagctcactccatgcagcacctgccaagccagaccacaaggagactgccacaaaacccaagcgtcagacagctgtcacagctgtggagaaaccagcccctaagggcaaacgtaagcacaagccaatagaagttgcagagaagatccctgagaagaagcagcgcctggaggaggccacaactatctgcttgctccctccttgcatctcaccagccccaccccacaagcctcccaacactagagaaaataattcatccaggagagcaaatagaagaaaggaagaaaaactatttcctcctccactttccccactgccagaggaccctccacgccgcagaaatgtcagtggcaataatggtccctttggtcaagacaaaaacatcgccatgactggacaaatcacatctaccaaacctaagagaactgaaggcaaattctgtgctactttcaaagggatatcggagggagacactccaaaaaaggcatcctctgccaccatcactgtcaccaatactgctattgccactgctactgtcactgctactgccattgtcaccaccactgtcacagctactgccaccgccacggccaccaccacaactactaccactaccatttccaccatcacctctaccatcactactggcctcatggatagcagtcacctggagatgacgtcctgggcggctctgccccttctatccagcagcagcactaatgtccggagacccaagctcacttttgatgactcggttcacaatgctgattattacatgcaagaagctaagaagctgaagcacaaagctgatgcactgttcgagaaatttggcaaagctgtgaattatgctgatgccgccctctccttcactgaatgtggcaatgccatggaacgcgaccctctggaagcaaagtccccatacaccatgtactctgagactgtggagctcctcaggtatgcaatgaggctgaagaactttgcaagtcccttggcttcggatggggacaaaaagctagcagtactatgctaccgatgtttatcactcctctatttgagaatgtttaagctgaagaaggaccatgctatgaagtactccagatcactgatggaatattttaagcaaaatgcttcaaaagtcgcacagataccctctccatgggtaagcaatggaaagaacactccatccccagtgtctctcaacaacgtctcccccatcaacgcaatggggaactgtaacaatggcccagtcaccattccccagcgcattcaccacatggctgccagccacgtcaacatcactagcaatgtgttacggggctatgaacactgggatatggccgacaaactgacaagagaaaacaaagaattctttggtgatctggacacgctgatggggcctctgacccagcacagcagcatgaccaatcttgtccgctacgttcgccaaggactgtgttggctgcgcatcgatgcccacttgttgtagtgggtgttctcagatctctagcatcacgacccatcactctacctctaccagcgcactgatggtcactggtggaactccactcactggggaacgttctctttggttatgtttgtttttatgcttcttttgttatctgtaaaaaacagaagtcattgtaagttgacactacaacttaagggcagtgtacgttttattacttagtcattttttttcttttagcatttgatatgcatttctcagattccaccatctttttgtgctttatggaatgacagtccctacaatattgttttaagcccacactacccaaaacaaagaatgggaagcacttgtgataaagacaggctcctgagaaatgcaacaagtggtcttacatatacatgagaacttagacacaagggaccatcccccaaactctactcttatacccagaaaagaacatatttcagaatctgtcaaacttttgtgtatcccacagattcaatcttcaggtgagaattttcattgtcaaaacccactggttagatgttgtagcaacatcataaaatcaagagtatcaagaaaataaatgagcatagcaatgctactcttaaaaagatgctatgccacacaaccagaggactttcttgttagcatccctttcctgattccctattttgttaattttaatgataagaagaaagggtgacatttattttgacaagttttaggcatcagctggcatcagtgtttttcaactccattatttgaagtgtaaatcctcacctggggttctctgtgtgcaaagctgtccttttgaagaacagtttggttgatgcatgccttagtagccaaaatgctacactctagacttacaagtgggagttaagagaggtctggaaagtgtccaacaaggaattcacacctctgcctcctttgcaacaacaacatttacacagttggtaagtgggtccataactggcaggatttttaaattgtattttgctcaaatctatgggaacaaaagtcaaggtatcactacctagaagtaatgatatacagttttcttcctagtggcttgaaaatctggacttcctcaattattattcacattttctctcttataggttttctgttttctactttcttttttctcttatctgtgtttccctttcctttgtttggctcattaacttttgactgaattacaattactccttttattaaagtccatattattgtgaatcatttccatgaaaatttctaagaaaactccaaactctctaaatagtagctaacttttatttttttaaaatgagtcgtggggtagtgcttcaccttgagatgctttgaaagagccctaaacattgggaaccattcacctaatttggagacatttctcactggttgtgactacccccttatgatccttcacattcattttatgtccctaaacatcacaatgtaaatatcatttttgatgttccagctcaccagaagattcttacacttggggtaaacactatccatgcattacttactggtaattacctgctggtatataattccatgtagcctttaatatgctgggttatcaaattctgttcactgagttatgaccagataaataatagatatgcacatgaaagatgcaaacttgtgtgattattaaagccagccatgcaggtccatgatagaaacagcaggtgatgactctgcactctcattgtcaaggttagatatatccccagttgcaaaacagccagacttgagctgtgctctggtcatctttgagtttaaggccttttgttgtataaggctgtggaagttgtactccaatggctgaagccatgttgttaatatggctgatgggagcatccctgcagctgaacccagcactttttatgctcccactgtggttgagctttatgtttacagtctcagcaacaacacttatgcatccaaacactcacaaatgaaacctgaaagaatcttttctgagcctcttaaaagaggaaaatgatgataacattaaagactctgaacacccaaggttggtgtcacatataaaaattaagctgatgactttgcagtgactcaagttgtctctttatcatggtttaccaggtagagtgcctggctattactatataatgaagcccactggcttgacttgtaagttcaacctaaaccacaatcctagaccatcatggatttaggagtagattcttcttgaaatcccacatccagaaactagacattagaatgttgaggcagtttcccagagaaacaagcatattgcctcatggatgaaagacttgtagttctagtttcagtgacttgttatatctacttacatacaacagggaggcaagaggattctctgtcatctctggtgactgagtgtaaaatatgtgccaagtctgcagcacagtgaccaaatctgacaatcgagctctggatcaccacttgattatgtagtagactcatttataaagcagcttaggaactaattaaacatggaggatgaattaccttcctatcccttgagataagacatctttcagtttcatgattaaggattgttgctgttttatagttactctgttcatcacagtgtaaatggtgatgcgtgtcgtaggtgtgcagctatttgagggactaagggatggagatattctgtcaaatgaatctcttcagtataccagtttgtgggagggatatgagacatgtggatggcagtgagagatcgtgcctctagatcttgatggaggcttggtgagacacacttaaataagcacgtggaggttagaatagagggcagagtaaaaggaagctccatctgagcaagtacaccaaatgatctcagccctgcaacttgacccaggtagggccaccactacgccttcacttgtcacccaagctccaaccacagagagtttgacaagtttgtgttatgatgttggcttggctttgtatttttaattaactttggatttttagtggttttgtcatataactgtctgagtttggtaggtaggattactttgaaaagggtttactagtgtggtcctccgggtagaatttagctgtaagcatgttgttagccagcctgtagactgttaattacttaataatctcattgggaaaatactagtagttttatatttggatgacataattggaaaagcagattagctgctactacttttaaaagacttaaggtcgggatgcctttttttccatgtaaggaaatgaaaagaccaaaatcttcaggcaaaaagcaagttgcaaaattagaaaccattggctaaaaatgtgttttgttgagtttccaaatggatgaattttcatttggacattacatcactaaattcattagattttgtctgcattggaaagatactcttctagcatatctttcccaaagatatctaatttggattctgtttcatgcaaatttgcatcccggaggttgaagttggagtttgaggttggaaaatatctttgaaggcagaatcagttgagttgtgagggtgaagcctcacatacttctcaacagacatgataaaattcacctgcatgagttggcaggtgggagaaccaaactggatcactgggtaagactactcagtaaagcaatgaactgcttgcttagagaagcatcactatccccattgagaaaaatgtgtggcaagatgatacagctacacagtatcaaatgaatgggtcaattcagcacccccaaatttaattctgtggggaaaaattattgagccagttgtcagtgttctgttacatgactggcagactaaattcttcatcgttgttgttattgttgttgttgtttctcattttcactcgcacggccttattctcataattaaaatctaattcattttctctttagtgttagtagactccaacaacagaagtggcatctgtgtattcataatcagcatttaccctggcaggagactaatcagataggccggtctcagacattaatcctaccatctgatatttttggtgaaggaaaaagtattaattctctttccatcctcctcctcagaaatatagaagccctctttaccaaaatcatcacattttactctgtaatctaccagctaaaagaaaattgcattgtggggagggcagaaagggggtgggggtgggggcgggggggtggggggtggggaagccccacaaagccagattgcagttcttgcccctttttgcgtctgacatgagatgttaaagaattattcatagtgctcacattgggttaggggacactgaactgctttttagatccatgatcagtcatcattcttctaagagattggagctttgctgtttcattaactgtgcagtgtagactaatggtgtttaataaaaatcattcaaaatttcaaactcttttgccagtgacctcaattttgttggctctgtgatttgtatcagactttgaggagggaagggggaagtgaaggaagcctacgtccaggcccctgacaggatgctgcagtagcaagctcaagctcgcctgcctgccagcagttgctggtgagcagcagcatgcagaccagctgtgggaagcctcctgaagaatgccccagctgatgctttcagctgggaatagtttgttcctattggggaactcattgttctccagtctctgcagcaggaagccagctgtcatattcggagggaatttcagatgctttacctttttggttttgtcctgcatcactcatgtggctacgaaagtgtctctgagaatagagcccaatgtggtgacaatgggtagtcaaatgcaccccagatgctcaagccctgttgtggttctgcagtgtttatgaaattgggaggaaggagaccctggacagtaagcaaaattggagacactccaacgaggctaagttaatgccgtgttgcccagaacaagatctagcttctcatttggtcagcctagcatgcaaccagtggtgtgctggtaaaatgtttaacaaccagctcgctgagaatagaaagcacctggtttgcaccatttgccaatttccatggcataaatactaccactttagatgattttaagctaccaactgtgatgtcactgaacacatggttggaaagagatgcacgcagttggctcttgcaagcctgggcaaaaatgcttcaacacgccactggatgcagccagtcagagggttcatatttaatatatgtgttcatgtggacacacacagacacacacacacaaactcacccttacacacacacttcgatgactaaaacaattacatagttttaagatatgaatcaatgtgtgaatgtagaaagcttatgataaggccctagaggtatgggttgccctggaagcctaggttttaagcaggagaatagctgagaagaatgaagccctcctgagctgaaaggagagatggatcaatggagatggttccatcatctccttccatatctcacaggtaaaatgggcactcagaaaaccctcacgattgattttttaaaaagataagtgagtgttttttattttattattattgtcatcattattttgatttacaaatgctatttgtaacttttacatgtaactaggataaagtatttacgggaactctatggagaatagcacaatccagaatttactgtgtttttcttttatgtgacgtggaaactcagtaattctcccaccttcacattgttgttcataagaattttactttagttattagggaatctaagttttttgttaacatttgtttttagttaaaagtatctacttactgttttagctctgaactcaaaccagaatatctctgtatcaattgcatgactattcagaaacaataatccaaaccaaaataattctttttccacccagtacgaagaaaactaagctcagtaacaagaaggcataaactaaagtatataatgaggctttcattaaatacacacacacacacactcacacacacacacatacactttttaaatttttaaattaggcctccacacataaatcattttgaaagtagaatagaaaatctcaaagaattcattctcctggtcctgtgcatcttctgcagttaataagaggtttgtatctggaaagatggaagaacttgttctaaaatcttatttttcaaaaaaaaatttccattttctctctgggcctgtatccatggttgaatgttagccctggaggagatccatgtcttactcgctctttctggcccttctgtcttttgcctctgcaattctttttgtagctggcacgatagcagggactgggggtctatcctttcatggtattgctacaatatttgtccttactggaaaatggtaacatccgggtctgatttaattggcattacacttacacagggactctgagcacccccgtcaccacaccagacagtggaccagttttcacagctacaaagagctagaaatgtgtttaacatcatccagtgcatcccctaattcaaaaccatcctcactaatcaatcatattcacccataaatattacaaatgagattgattccatctcaagacaatttgtcaaatacttaattttcttcctggatgattctacttactggatattttagaaagagaaatgtctgagataaaatccctcacatttactcaatataacaaattactgtttctactcctattctgagtagtgcttctgaagattgtttgctgtagtgttgtctttgataaaatgaatgtcagtagtgagccttttagagataccatgctcagaaatcctctttgggatcagaagatacctaaaattctccccttttgcccacttggttagatgagtgatatattctttggatcctgcaaagaagagattggtttattttcttttctggtggtggtagtggttgtatctgtggctgtgatggttgttgttacttgtctctctctctctctggctctggcttttgctttcctgctagtgttctttctctttccaaacaaatagttaaattaaatgtgagcttctgaattgtacttgttcatactttcaaaacataacagattaataaaaatagatgtgtcctgatttaaaacatgccccctggaaaggcatgctgtattatgaaatcgtgataatataactgcattattacatggcagtataaatattagtctgttgaattcatttgtccaattgtataactttgtggagcagtgttttgacctttgatacataattctggagcaagtggagtggttgcaggcagatgagacagtgttatatcaggatttttcaatcaactttagttggaggcctggcaattacaaacatcttcagatgtttctgtaaccattataaatatgaaaaaaacctcttcaaaaaatttcccatagtacttcagtcaagactttttaggtttatcttttttttttcatttctccttttccttttccattatttttcgatgggggggttgttatcattgactgaagaaatattttgattgcaatggtctctctctctctccccctctctctctctctcctctattctttcctccttccctctgtccatcacccctcattaaaatattgaaatctggagtctttgataaatctgcattagaccaggctatatgctaggaatgaaatctgggcaaatatcgatgggttttcaaagaatgctccatgttcattgggccctttcacaccccacagtgataaatgaaaaggatagaggtagttttttcaaaagagcactttaataatatcctctgagacctaatgcagtttaacaaatgactccacctatttttccagtaggtaaattgactgagacttgcaaaatacccctgagagttgtcaggggtgtcttctgcctggtctatagcgtgtgtgtttgctttgtatctaacaggcacattcacgtctcgtgtactcatatgaagtatttcctaacattcccattagcctgtatataagaatcagaaagataatcccaacatgttgtaaatgaagatgtgactctataacctttctcttcttcctggaaaaaaaaggacattttcatgcatattttaaacagaaattttgtatatttaagtgtcatagaaaatatttattgagtaactgggacacaaatgggaatttaattgtcatcatatgctttgtgtgtggggatgcttaccaacaccatgtcgctggaccattgtggcaagccataactgcacaaagagtacacatcgtcagtgtgtgtgtgtgtgtgtgtgtgcgcgcacacacgtgcgtgtgtgtgtccctgcatgtgcaacatgtctagcttgctgtccttcatgggattttagctttcccttcttgaaaaacattattttacagttccaggaggccctggttacattactatatgaaggcagtgatttgaaatgaaaattcctttcctcttggaagctttggtcataatatcatggttcaattaaacggattccaccggactttgtgatgaaaaaggctctgttaaaatccaattgagtttccaagaggaaattgtagtaggtcaagatgcatgagagggaagatggaggccacctcaactggagaacatgagctgagttgagccctcagtgttgaagttgacttgctccaagctgcagtctaaaaccctggggcccgtgcctggcctatgctccctcccaagtaagtagaggagcagaaccatcaggaacagcctgcctggctcctatgaagaaaacttcctgacgtcctgtccccaaaggaagaccctttccccaagggcaccccaggtggccattaaattgtgatgatcattcagaaagtgcccccttggctttatgagaatccaattagtcttctgaaccaccttttcttgggtgcagatttccaacattcatgctcattgcagatccaccaactgtcactgttcttaacaagcatgctcgtcttgtcagaatttcagtaagttccaatttcctgtacagaccagggtaaactgttctaaaatcaatcaattaatgaaatgttatctggtttttaaaagctggtttcatgtgctttatgtgtataaaactatatctgcctgtgtggctttgcatttcaaatgtgtggcgcacaagcgttttgttggtgctttgttctcagtacagtaactctgtgtacaaacattttaatgtggttttgttgttttccaacaagatgtctctgtaaaaatgatattggctgagctggtgcgttggtttctctcatagaggcattaactatactgccaatgcattgaattatttaaaaatgcaaaataaaatttttatgaaaatctca

SEQ ID NO: 66439 - DNA, 3831 bp, Artificial Sequence
  derived and/or modified sequence
atggacctgtttgatttttttagagattgggatttggagcagcagtgccattacgagcaggatcggagcgcactgaagaagcgcgagtgggagagacgaaatcaggaggtgcagcaggaagatgacttgttctcgagtggatttgacttgttcggggagccctacaagacgaataaaggggatgccctggccaatcgcgtgcaaaatacactgggcaattacgatgagatgaagaatctcctgaccaatcatagtaatcaaaatcacctcgtcggcattcccaagaattccgtccctcagaatccaaataataagaacgagcccagcttctttcctgagcagaagaataggatcatccctccccatcaagataacacccacccatccgccccgatgccgcccccatccgttgtcatcttaaactccacccttatccactccaatcgtaagtccaagcccgagtggtctagagactctcataaccctagtaccgtgttagcctctcaagcatctgggcagcctaacaagatgcagactctgactcaggaccagtcccaggccaagctggaagacttctttgtgtatcctgcagagcagccccagatcggcgaggttgaggagagtaatccaagtgcgaaggaggactcaaacccaaatagctctggcgaggacgcctttaaggaaatctttcagagcaatagcccagaagagtcagagttcgccgtacaggcccccggatcacctcttgtagcttccagcctgctggctccttccagcggactgagcgtccagaactttccaccaggcctttattgcaaaaccagtatgggccaacaaaagcccaccgcctatgtgcgacccatggacggacaggatcaggcccccgacatcagtcccactctgaagcccagcattgaattcgaaaactcattcggtaacctatctttcggtacgctgctggacggcaagcccagcgctgcctcttccaagactaaattacctaagttcactatacttcaaacatcagaagtgtcgctgccctccgacccatcttgtgttgaagaaatcctgcgcgagtcccaacatctcacgccagggttcacccttcagaaatggaacgacccaaccactcgagcgagtacaaagtcagtatcgtttaaaagcatgctcgaagacgacttaaaactttctagtgatgaggacgatctggagcctgttaagacattgaccacccagtgcacagcaactgagctttaccaggctgtggaaaaggccaaacctcggaataacccagtgaaccctcccctggcgaccccacagcctcccccagcagtgcaggcatcaggtggttctggcagctcctcggaaagcgaatcttcctctgagtcagactctgataccgagtcctccacaaccgattccgaaagcaacgaagccccacgcgtggcaacccccgaacccgaaccaccgtccacaaacaaatggcagctggataagtggctgaataaggtcacctctcaaaacaagtctttcatctgtggccagaacgagacacccatggagacaatatcactacctccgcccattatccagccgatggaagtgcaaatgaaggtgaagacaaacgcctcccaggtgccagctgaaccgaaagaacgcccgcttctttctctgatcagggagaaggcacgcccaaggcccacgcaaaagatcccggagaccaaggctttgaaacacaaactgtcaactacaagtgagaccgtgagccagaggacgatcggcaaaaaacagcccaaaaaagtggaaaaaaacactagtactgacgaatttacgtggcccaagcccaacattaccagtagcaccccgaaggagaaagaatctgtggaactgcatgacccacctagagggagaaataaagccacagcccataaacccgccccgaggaaagagccccgccccaacatccccttggctccagagaaaaaaaaatatcgtggcccaggaaaaatcgtgccaaagtcccgggaatttattgagactgattccagtacaagcgattcaaatactgaccaagaagagacattgcagattaaagtgctccccccctgcatcatttcaggcggcaacaccgcaaaatcgaaggagatctgtggagcttcgctgaccctgtctaccctcatgagcagctcgggcagtaataacaacctttcaatatccaacgaagagccaacattcagccctatccccgtaatgcagaccgaaattcttagccctttgagagatcacgaaaatctgaagaatttatgggtgaaaattgacctcgatctgctgagtcgagtgcccggacattcttcactccacgccgcccccgcaaaaccagatcataaggaaacagcaactaaaccaaagcgccagacagctgtgaccgcagtagagaaacctgctcctaaaggcaagcgaaaacacaagcccatagaagtggcagagaagataccagaaaagaaacagaggcttgaagaggcaaccactatttgcttgctgcctccttgtattagtcccgcaccccctcataaacctcctaacacgcgcgagaataactcttcaagaagagccaaccgacggaaggaagagaaattgtttccacccccactgagcccattgccagaggacccaccgcggaggcggaatgtgagtgggaacaatggacccttcgggcaggacaagaacatcgccatgacaggacaaattacaagcacgaaaccaaagagaaccgagggaaaattctgcgccacctttaaaggcatttccgaaggtgatacccctaagaaagccagctccgccaccatcactgttacaaacaccgctatcgcaactgctacagttaccgctacagccattgtgacaacaaccgtcactgccaccgccactgctacggccacaacaacaactactactacaaccatcagcactatcacttcaaccattacaaccggtcttatggattcttcacatctcgaaatgactagttgggcagcattgcccctcctctcttcatcctccactaacgtgcgccggcccaaattaacattcgatgacagtgtgcataacgctgactattacatgcaggaagctaaaaaactgaagcataaggccgacgcgctctttgagaagttcggcaaggccgtaaattacgcagacgccgctctttcatttacggagtgtggcaacgccatggagcgggaccctctcgaagctaaaagtccgtacaccatgtacagcgagacggtggagttattaaggtacgcgatgcggttaaagaattttgcttccccccttgccagcgatggcgacaagaagcttgctgtcctgtgctatcgttgtctatccctcttatacctgagaatgttcaagttaaaaaaggaccacgcaatgaagtactctaggtccctcatggagtactttaaacagaatgcctccaaagtcgctcagattcctagcccctgggtctcaaacggcaagaacacacccagcccagtgtctcttaataatgtcagcccaatcaacgcgatgggaaactgtaacaacggacctgttacaattccccagagaatacaccacatggccgcctctcacgtcaacatcacgagcaacgtactaaggggctatgaacactgggatatggcggacaaactgacccgagagaacaaagaattcttcggtgatctggacaccctcatgggtcccctcactcagcactcttcaatgacgaatctggtgagatacgtgaggcaagggctgtgctggctgcggatcgatgcccacttgctgtag

SEQ ID NO: 66440 - DNA, 3831 bp, Artificial Sequence
  derived and/or modified sequence
atggacctgtttgacttcttccgggactgggacctggagcagcagtgccactatgagcaggacagaagtgccctgaagaagcgggagtgggagaggaggaaccaggaggtgcagcaggaggatgacctcttcagcagcggctttgacctgtttggagagccctacaagaccaacaagggagatgccctggccaacagagtgcagaacaccctgggcaactatgatgagatgaagaacctgctgaccaaccacagcaaccagaaccacctggtgggcatccccaagaacagcgtgccccagaaccccaacaacaagaatgagcccagcttcttccctgagcagaagaaccgcatcatccccccccaccaggacaacacccaccccagcgcccccatgcccccacccagcgtggtgatcctgaacagcaccctcatccacagcaacaggaagagcaagccagagtggagccgggacagccacaaccccagcacagtgctggccagccaggccagcggccagcccaacaagatgcagaccctgacccaggaccagagccaggccaagctggaggacttctttgtgtacccagctgagcagccccagatcggggaggtggaggagagcaaccccagcgccaaggaggacagcaaccccaacagcagtggagaagatgccttcaaggagatcttccagagcaacagccctgaggagagcgagtttgctgtgcaggcccctggcagccccctggtggccagcagcctgctggcccccagcagcggcctgtctgtgcagaacttccccccaggcctgtactgcaagacctccatgggccagcagaagcccacagcctacgtgcggcccatggatggccaggaccaggccccagacatcagccccaccctgaagcccagcattgaatttgagaacagctttggaaacctgagctttggcaccctgctggatggcaagcccagcgctgccagcagcaagaccaagctgcccaagttcaccatcctgcagaccagcgaggtgtccctgcccagcgaccccagctgtgtggaggagatcctgcgggagagccagcacctgaccccaggcttcaccctgcagaagtggaatgaccccaccacccgggccagcaccaagtctgtgtccttcaagtccatgctggaggatgacctgaagctgagcagtgatgaagatgacctggagcctgtgaagaccctgaccacccagtgcacagccacagagctgtaccaggccgtggagaaggccaagcccaggaacaaccctgtgaacccccccctggccaccccccagcccccacctgctgtgcaggccagcggcggcagcggcagcagcagcgagagcgagagcagcagcgagagtgacagcgacacagagagcagcaccacagacagcgagagcaatgaggccccccgggtggccaccccagagcctgagccccccagcaccaacaagtggcagctggacaagtggctgaacaaggtgaccagccagaacaagagcttcatctgtggccagaatgagacccccatggagaccatcagcctgcccccacccatcatccagcccatggaggtgcagatgaaggtgaagaccaatgccagccaggtgcctgctgagcccaaggagcggcccctgctgagcctcatccgggagaaggcccggccccggcccacccagaagatccctgagaccaaggccctgaagcacaagctgagcaccaccagcgagaccgtgtcccagaggaccatcggcaagaagcagcccaagaaggtggagaagaacaccagcacagatgagttcacctggcccaagcccaacatcaccagcagcacccccaaggagaaggagagcgtggagctgcatgaccccccccggggcaggaacaaggccacagcccacaagccagcccccaggaaggagccccggcccaacatccccctggcccctgagaagaagaagtaccggggccctgggaagatcgtgcccaagagccgggagttcatcgagacagacagcagcaccagtgacagcaacacagaccaggaggagaccctgcagatcaaggtgctgcccccctgcatcatcagcggcggcaacacagccaagagcaaggagatctgtggggccagcctgaccctgagcaccctgatgagcagcagcggcagcaacaacaacctgagcatcagcaatgaggagcccaccttcagccccatccctgtgatgcagacagagatcctgagccccctgcgggaccacgagaacctgaagaacctgtgggtgaagattgacctggacctgctgagccgggtgcccggccacagcagcctgcacgccgccccagccaagccagaccacaaggagacagccaccaagcccaagaggcagacagctgtgacagctgtggagaagccagcccccaagggcaagaggaagcacaagcccatcgaggtggccgagaagatccctgagaagaagcagaggctggaggaggccaccaccatctgcctgctgcccccctgcatcagccctgccccaccccacaagccacccaacacccgggagaacaacagcagcagaagagccaacagaaggaaggaggagaagctgtttcctccacccctgagccccctgcctgaagatcctccaagaagaagaaatgtgtctggcaacaacggccccttcggccaggacaagaacatcgccatgacaggccagatcaccagcaccaagcccaagaggacagagggcaagttctgtgccaccttcaagggcatcagcgagggggacacccccaagaaggccagcagcgccaccatcaccgtgaccaacacagccatcgccacagccaccgtgacagccacagccatcgtgaccaccaccgtgacagccacagccacagccacagccaccaccaccaccaccaccaccaccatcagcaccatcaccagcaccatcaccaccggcctgatggacagcagccacctggagatgacctcctgggccgccctgcccctgctgagcagcagcagcaccaacgtgcggcggcccaagctgacctttgatgattctgtgcacaatgctgactactacatgcaggaggccaagaagctgaagcacaaggcagatgccctgtttgagaagtttgggaaggctgtgaactatgcagatgctgccctgtccttcacagaatgtggaaatgccatggagcgggaccccctggaggccaagagcccctacaccatgtacagcgagaccgtggagctgctgcgctatgccatgaggctgaagaactttgccagccccctggccagtgatggagacaagaagctggccgtgctgtgctaccgctgcctgagcctgctgtacctgaggatgttcaagctgaagaaggaccacgccatgaagtacagccgcagcctgatggagtacttcaagcagaatgccagcaaggtggcccagatccccagcccctgggtgtccaatggcaagaacacccccagccctgtgtccctgaacaacgtgagccccatcaatgccatgggcaactgcaacaatggacctgtgaccatcccccagaggatccaccacatggccgccagccacgtgaacatcaccagcaatgtgctgcggggctatgagcactgggacatggctgacaagctgacccgggagaacaaggagttctttggagacctggacaccctgatgggccccctgacccagcacagctccatgaccaacctggtgcgctacgtgcggcagggcctgtgctggctgagaattgatgcccacctgctgtag

SEQ ID NO: 66441 - DNA, 3831 bp, Artificial Sequence
  derived and/or modified sequence
atggacctgttcgacttcttccgggactgggacctggagcagcagtgccattacgagcaggacagatctgcgctgaaaaaacgcgagtgggaacggcgaaaccaggaggtacaacaggaggatgatctcttcagctcaggctttgacttgttcggagaaccctataaaaccaacaaaggtgatgcacttgcaaaccgagtacagaatacactggggaactacgacgaaatgaagaatttgctaaccaaccacagtaatcagaatcacctggtcggcatccccaagaactctgtaccccagaacccaaacaataagaatgaaccttcattcttccctgaacaaaaaaaccgaattatcccacctcaccaagacaacactcaccctagcgccccaatgccccccccttctgtcgtgatactcaactctacactgattcattctaaccgcaagtcaaagcccgagtggtctcgcgactcacacaacccttccactgtactcgcttctcaggcttccgggcagcccaacaagatgcaaacactgactcaggaccagagccaggccaagctggaggatttttttgtataccccgccgaacagccgcagatcggcgaggtcgaagagtccaacccttctgcaaaagaggatagcaatcccaatagtagcggggaagacgcttttaaagaaatttttcagtccaattctccagaagaaagcgagttcgcggtgcaggcccccggttctccactcgtggcgagcagcttgctagcacctagtagcggcctgtctgtgcagaacttcccacctggattgtattgcaaaacatccatgggtcagcagaagcctaccgcctacgtccgacctatggacggacaggaccaagctcccgatattagccccaccctgaaaccaagtattgagttcgaaaatagcttcgggaacctctcattcggtaccctactcgacggaaaaccatctgctgcaagttctaagaccaagctaccaaagttcaccattttacaaaccagcgaagtgagtctgcctagcgacccatcctgcgtggaagagatccttagagagtctcagcacctcacacctggctttaccctgcagaaatggaacgacccaacaacccgagctagcacaaagagtgtttcctttaaaagcatgcttgaggacgatctgaaactttcttcagatgaagacgatttggagccagtgaaaactttaactacccagtgtacagccaccgagctttatcaggcagtggaaaaggccaagccgcgtaataaccccgtgaatccgccactcgcgaccccgcagcccccaccagctgttcaggccagcggtggcagcgggagttcgtctgagtcagagagctcgagcgagtccgactccgacaccgaatccagcacaaccgacagcgaaagtaacgaagcaccaagagtggcaactcctgaacctgagcctccatcgaccaacaagtggcagctggacaagtggctgaataaggtgactagccagaacaagtctttcatatgcggacagaatgagacaccaatggagactatctcactgcccccccccatcatccagcccatggaagttcagatgaaagtgaagacgaatgccagccaggtgcctgcagagccaaaagagcgaccgctcttgtcgctcataagagaaaaggcacgcccaaggcctactcagaagataccagagacaaaggcgctaaaacacaagctgtctaccacctccgagaccgtaagccagcgcactatcggtaagaaacagcccaagaaagtcgagaagaatacttccacggatgagttcacatggcccaagcctaacatcaccagctccaccccaaaggaaaaagaaagcgtggaacttcacgatcccccccgggggcgtaacaaggctacggcccacaaacctgctccaagaaaggaaccgaggcctaacatccccctggctcccgagaagaaaaaataccgcggtccggggaagattgtacccaagtcccgagagtttattgagactgattcctccacctccgactcaaacacagatcaagaagagacgttgcagataaaggtccttcctccctgcattatatctggcggtaacaccgctaagtccaaagagatttgcggcgccagcctcactctaagtacactgatgtcgagctccgggagtaataataatttgtccatcagcaatgaggaaccaacgttttctccaatccctgtgatgcagacagagatccttagcccattgagggatcatgagaatctgaaaaacctgtgggtgaagatagaccttgatcttctttccagggtgccagggcattctagcctgcatgcagcccctgccaaacccgatcacaaggagaccgccactaaaccaaagagacaaaccgctgtcaccgcagtcgagaagcctgcccccaaggggaagcggaaacataaacctatcgaggtcgccgagaagataccagaaaaaaaacagaggttagaggaagccaccaccatctgcctgctgcctccctgtattagccctgctccgccgcataagccccccaatactcgagaaaacaactcaagtaggcgggccaacagacggaaagaagagaagctctttccacctcccctgtctccacttcccgaagacccacctagaagacgaaatgtgagcggtaataacggccctttcggccaggataaaaacattgccatgactgggcagatcacgtcaacgaaacccaaaaggacagagggaaagttttgtgctacctttaagggcatatctgagggggatacccccaaaaaagcatcctccgccactataaccgtgactaacacggccattgctaccgcaaccgtaactgccactgctatcgttacaaccaccgtcactgcgactgctactgcgactgctacaacgactaccaccactaccactatctctaccatcacctctaccataacaacaggtctgatggactctagccacctggagatgacgagttgggcggccctgcctctgctttcgtcgtcatccacaaacgtgagacgccctaaattaaccttcgatgactcagtccacaacgccgattactacatgcaggaggctaagaaacttaaacataaagctgatgccttgtttgaaaaattcggaaaagctgttaactacgccgacgccgctctgtcatttacagaatgcggaaacgccatggagagagaccctctcgaagccaagagtccatataccatgtacagcgaaaccgtcgagcttctgaggtatgccatgaggctgaagaatttcgcctcccccctggcatccgacggggacaaaaaactggccgtgttgtgctaccgttgtctttcactgctgtacctcagaatgttcaagcttaagaaggaccacgctatgaagtattctcggtcactcatggaatattttaaacaaaatgcttccaaggtggcgcagatccctagtccttgggtgagcaatggcaagaacacaccgagccctgtttcattgaacaacgtcagccccattaacgcgatgggcaactgtaataacgggccagtgactatcccccaacgcatccaccacatggcagcctcgcatgtgaacatcacgagcaatgtgctgcggggttacgagcattgggatatggctgacaagctcaccagggaaaataaagaattctttggcgatctcgacaccctcatgggcccacttacacagcattcctccatgacaaacctcgtccgctatgtgcgacagggtctgtgctggctcagaatcgacgctcacctcctgtag

SEQ ID NO: 66442 - DNA, 3830 bp, Artificial Sequence
  derived and/or modified sequence
atggacctgtttgattttttcagggactgggatttggagcagcagtgccactatgaacaagataggtcagcactgaagaagcgggaatgggaacggaggaaccaagaggtgcagcaagaagatgatctgttttcctcgggctttgatttgttcggcgaaccgtacaaaaccaataaaggggatgctctggccaatagggtgcagaatacgctcggaaattacgacgaaatgaagaatctgctcaccaatcactctaaccagaaccatctggtgggcattccaaaaaattccgttccgcagaatccgaataataagaatgagccatcctttttccctgagcagaaaaatagaatcatccccccacatcaggataatacacacccttctgctcctatgcctcctccttccgtggttatcctcaattccactttaatacacagcaatagaaagagcaagccagaatggtcacgggattctcataatccctcaactgttttggccagccaggcctcaggtcagccaaacaaaatgcagactctcactcaggatcagtcccaagccaaattggaggacttttttgtctaccccgctgagcaacctcagattggggaggtggaggagagtaatccgagcgcaaaggaagatagcaaccccaactctagcggggaggatgcgtttaaggaaatctttcagtctaatagccccgaggagtcagaatttgccgtgcaggcccctggctcccctctggtagccagcagtctcctggctcccagtagtgggctgtctgttcaaaactttccgcctggactgtactgcaagaccagtatgggacagcagaagccaaccgcctatgtaaggcctatggatggacaggatcaggcccctgacatctcccctactttgaaaccatccattgaatttgaaaatagtttcggaaacctgagcttcggtaccttgctcgatgggaagcctagtgccgctagcagcaagaccaaactgcctaagtttaccatattacaaacttcagaagttagcctgccttccgatccttcctgtgtcgaggaaatcctcagggagtcacaacaccttacccctgggttcaccctccagaagtggaatgaccctacgactagggcctctacaaaaagtgtgagcttcaagtctatgcttgaagatgatctgaagttgtcttccgacgaggatgacctggagccagtgaagacacttaccacgcagtgcaccgccacggaactttaccaggctgtcgaaaaagctaagcctcggaacaacccagtcaacccaccactggccaccccccagccccctccggctgtgcaggcctccggtgggagcggatccagcagcgagagtgagagctccagcgaatccgattctgacactgagagcagtactaccgatagcgaaagtaatgaggcaccaagagtagccacgccagagcccgaaccaccgtccactaataagtggcagctcgacaaatggctaaacaaggtgacaagtcaaaataaaagctttatttgtggccaaaatgagacgccgatggaaacaatctctctcccaccacctattattcagccgatggaggttcagatgaaagtgaaaacaaacgcgtcccaagttcccgctgaaccgaaagagcggccactgctatccctgattagagaaaaggctcggccacgccctacccaaaagatccccgagactaaggcccttaagcacaaactgtcaactactagcgagactgtctctcagcgcaccattggtaaaaaacagcccaagaaagttgaaaaaaatacctccaccgatgagtttacgtggcctaagccaaatatcacttcatccacgcccaaggagaaagaatctgtcgaactccacgaccctcccagagggaggaacaaggctacagcacataagcccgctcccaggaaggagcctcgtcctaacatcccattggcgcctgagaagaagaaatatcgcggtcctgggaaaatcgtgccgaaaagtcgcgaatttatcgagacagattcctctacctccgactccaacacagatcaggaggaaacgctgcagataaaggtgctccccccatgcataatttcaggcggtaacacggccaagtccaaggaaatttgtggggcatcccttacgctatcaacactaatgagcagctccggtagtaacaacaacctgtccattagcaacgaggaacctacatttagtccaatccctgtgatgcaaaccgagatactgtctccattgcgagaccacgagaacctcaagaatctgtgggttaaaatcgatctcgacctgctgtcccgcgtgcccggacattcatccttacacgcagcacccgctaaacctgatcacaaagaaactgctactaaaccgaagcgtcagacagcagtcactgcggtcgaaaagcctgctcctaaggggaaacgaaaacataagccaattgaggttgcagaaaagatccctgagaaaaagcagaggctcgaagaggccaccaccatctgcctcttgcccccatgtatcagtcctgcccctccgcacaaaccgcctaatacccgggagaataattcttctagaagagcaaaccggaggaaggaggagaaattgtttcccccaccccttagccctttacctgaagaccctcccaggcgaaggaacgtcagcggcaacaatggccctttcgggcaggacaaaaacatagcaatgaccgggcagattactagcacgaagcctaagaggactgaggggaagttttgcgccaccttcaaagggatcagcgaaggggataccccgaagaaggcttcatcagcaaccattaccgtcacaaacacagccattgccactgcaaccgtgacagccaccgccattgttacaacgaccgtgaccgcgacggccactgcgactgccaccaccacgactactaccacgacgatatctacaatcacctcaactattaccaccggactcatggattcatctcacctggagatgacatcgtgggccgcactccctctgctgtccagttctagcaccaatgtgaggaggcccaaactgacatttgatgatagcgtacataatgcagactactatatgcaggaagcgaagaaactgaagcataaagccgatgcattattcgagaaatttggaaaagcagtgaactacgccgatgctgctctgagtttcacggagtgtgggaacgctatggagcgggaccccctagaagctaagtccccttataccatgtatagcgagactgtggagttactcaggtatgctatgcgcttgaagaactttgcctccccgctcgcaagtgacggagacaaaaagctcgccgtcctgtgctatcgttgtctgtccctgctgtatctgaggatgttcaagcttaaaaaggaccatgctatgaaatactctaggagcctgatggagtatttcaagcagaacgcttctaaggtggcacagattcctagtccctgggtgtccaacggtaagaatacacccagccctgtgagcttgaacaacgtgtccccaatcaatgcaatggggaactgcaacaacggcccagttacaatcccacaaagaatccaccacatggcggcatcccatgtaaacattacctcaaacgtcctcaggggttacgagcattgggacatggcagacaagctcacccgtgaaaataaggagttctttggagatctcgacacgcttatggggccactgacccagcatagctctatgaccaatctggtgaggtacgttaggcaggggttatgctggctgcgcatcgatgctcacctgctcta

SEQ ID NO: 66443 - DNA, 3837 bp, Artificial Sequence
  derived and/or modified sequence
atggacctctttgacttctttagggattgggatctggagcagcaatgtcattacgagcaggacagatcggctctcaagaagagagaatgggagcgccgcaaccaagaggtgcaacaggaggatgaccttttttctagcggctttgacttgttcggagagccatataaaaccaacaaaggcgatgctctagcgaatagggtccagaacactcttggaaattacgatgaaatgaaaaacctgctcaccaatcatagtaatcaaaaccacttagtgggtatccccaaaaattccgttcctcagaacccaaataacaagaatgaaccttcatttttcccagagcagaagaatcgcatcatcccaccccaccaggacaatacacacccttctgcccccatgccaccaccatcggtcgtgattctcaatagcactctgattcactccaatcggaaaagcaagcccgagtggtctagagattcacataatccctcaaccgtattagcatcacaagcaagcggccagccaaataagatgcagaccctaacacaggaccaatcgcaggccaagctggaagacttctttgtctatcctgccgagcagccccagatcggggaggtggaagaatcaaatccatctgccaaggaagattcaaacccaaattcgtctggcgaagacgccttcaaagagatctttcaatcaaacagcccagaggagtcagagtttgccgtgcaggctcctggatcacccctggttgcttcttcactgctggcaccttccagcggactcagtgtgcagaatttcccaccgggcctatattgtaagaccagcatgggccagcagaaaccaaccgcatacgtaagaccgatggacggtcaggaccaggcccccgatatctcccctaccctcaaacccagtatcgagttcgaaaattcgtttggaaatttaagcttcggaactctgttagatgggaaaccctcagctgcgtctagcaaaacaaaacttcccaaattcactatcctgcagacaagtgaggtaagcctcccgagcgatccctcatgtgtcgaggagattttgagggagagtcagcacttgacacccgggttcactctgcagaaatggaatgaccctacgaccagggcttctaccaaatctgtaagctttaaatcaatgcttgaagatgatctaaaactttcgtctgatgaggatgacctggaaccagtcaagactctgacgacccagtgcactgcgaccgagctgtatcaggctgtggagaaagctaaaccacgcaataatcccgtgaacccgcctttggctacgccccagccccctcctgctgtccaggcaagtgggggctcagggtcctcttctgaatccgaatcaagcagcgagagcgactcggacacagagtctagcaccaccgattctgaatcgaacgaggccccccgcgtggccacccctgagcccgagccgccctccacaaacaagtggcagctggacaagtggttgaataaggtaacttcccagaacaaaagctttatctgcggacagaatgagacccctatggagacaattagcctcccacccccaatcatacaacctatggaggtccagatgaaggtgaagacaaatgcaagtcaggtgcccgctgagcctaaggagagacctcttttgtctctgataagagaaaaagccagacctcgaccaacacagaagatccctgagactaaagctctcaaacataaactcagcaccacgagcgagacggtttctcagcggacaattggcaagaaacaacccaaaaaggtcgagaaaaatacttcaaccgatgagttcacttggcccaaacctaatatcacaagtagtacaccaaaggaaaaagagtctgtggaactgcatgacccgccccgcggaagaaacaaggccactgcacacaaacctgcaccgagaaaggagccacgccccaatattccactggccccagagaagaaaaagtaccggggcccaggtaaaatcgtgccaaagtccagagagttcatcgaaacggactcaagcactagcgattcaaacacggaccaggaagaaacacttcaaataaaggtcctgcccccctgcatcataagtgggggaaatactgctaagagtaaagaaatttgcggtgctagtctgacactgagcactctgatgagctcctccgggagtaataataacctgagcatctccaacgaagaaccaaccttctcccctatcccagtaatgcagacggaaattttgagccctctgcgggaccacgaaaacctgaaaaacctctgggttaaaatagatctggatctcctgtcaagggtgccagggcacagtagtctccacgctgctcctgccaaaccagatcataaggagacagcaacaaagcctaagcgccagacggctgtgacagccgttgaaaagccagcacctaaaggaaagcggaagcataaacccattgaagttgccgaaaaaatcccagagaaaaagcagcgcctggaggaagccaccacaatctgtctcttaccgccatgcataagtcccgccccacctcataaaccgcccaatacaagagagaacaactcctcccgccgagccaacagacgtaaggaggagaagctctttccacctcccctcagccctctccctgaggacccccctagacgcaggaacgtgtccggcaacaatgggccgtttggccaggacaaaaatattgctatgactggccaaataacttccacaaagcccaaacgcacggagggcaaattctgtgcaacctttaaaggcatctctgttaacgagggcgacacacccaagaaggctagcagcgctaccatcaccgttaccaataccgccatagccacagccacagttaccgccacagccatcgttaccactacagtgacagctacggctaccgcaacagccactaccactactactaccacgactatttctacgataacctctacaattactaccggcctgatggacagttcccaccttgagatgacatcctgggccgctctgcccctgctaagttcgtcatccacgaatgtccggcgtccgaagctgaccttcgatgattcggtgcacaatgccgactactacatgcaggaagctaaaaaactgaaacacaaagccgacgctctcttcgaaaagtttgggaaagccgtaaattatgccgacgctgccctctcctttaccgagtgtggcaacgctatggagagggaccccctggaagccaaatccccctacaccatgtattcagaaaccgtagaactcttacgctatgccatgcgcctgaagaattttgctagccccctggcatcggatggtgataaaaagcttgcagttctctgctatagatgtctgagcctgctgtacctgcgaatgttcaagctgaaaaaggaccatgcaatgaaatatagccgtagcctgatggagtacttcaagcagaatgctagtaaggtggctcaaattccttccccttgggtatctaatggaaagaacacaccttcaccggtctcattaaacaacgtgagtccgataaacgccatggggaactgcaacaacggccctgtgacgatcccacagagaatccaccacatggcggcatctcatgtgaatatcacttcgaatgttcttcgagggtatgagcactgggatatggcggataagctgacacgtgaaaacaaggagttttttggagacctggataccttgatggggccgctgacccagcactcctctatgaccaatctggtccggtatgtcagacagggactgtgctggctgcgcatcgacgcgcacttactgtag

SEQ ID NO: 66444 - DNA, 3831 bp, Artificial Sequence
  derived and/or modified sequence
atggatctttttgacttcttccgggattgggatctggagcagcagtgtcactatgagcaggacagatctgctctgaaaaagcgagaatgggagaggcggaatcaggaggttcagcaggaagatgatctttttagtagtggttttgacttattcggtgaaccatacaagacaaacaaaggcgatgccctggcaaaccgggtccagaacaccctcggcaactatgacgagatgaagaatctgctcacaaaccattcaaatcaaaatcacctggttggtatcccaaaaaatagcgtgccacaaaaccccaataataaaaatgaaccaagcttctttcctgagcagaaaaacaggataatccctccacaccaggacaacacccatcccagtgcaccaatgccacccccctctgtagttatcctcaacagtaccctaattcactccaatcgcaagtctaaacctgagtggagtagggacagccacaacccgtcgactgtgctcgccagccaagcctccggccagccaaataaaatgcagacgctcacacaggatcagagccaggccaaactggaggacttcttcgtctatcccgcggagcagccgcagatcggagaggttgaagaatcgaatcctagcgcgaaggaggacagcaaccctaatagctccggcgaggatgcctttaaggaaatcttccagtcgaattcccctgaggaatctgagttcgccgtgcaggctccagggagtcccctggttgcctcctcccttctcgccccctcatccggcctgtctgtacagaattttccccctgggctgtattgcaaaacctccatgggacaacaaaagccaaccgcatacgtgaggccgatggacggacaggatcaggcgccggatatctctccaaccctaaaaccctccatcgagttcgaaaattcattcgggaatctctccttcggcactctgctcgacgggaaaccatccgctgcctcctcgaagactaagctccccaaattcactattttacagacatccgaggtgagtctcccttccgacccaagctgtgtggaggagattctgcgcgaatcacagcatctgacaccaggattcactctgcagaagtggaacgaccctactactcgcgcaagtacaaagtccgtgtcgtttaagagcatgttggaggatgacctaaagttgtcatctgatgaggatgatttggaaccagtcaaaaccctgaccacacagtgcaccgcaacggaactgtaccaggctgtcgaaaaagccaagccacgtaacaatcctgtgaaccccccactggcgaccccacagccaccacccgccgtgcaagcttcaggaggatcaggaagcagctctgagagcgagtctagcagcgagagcgactccgatactgagagctccacaacagactctgaatctaatgaagcaccccgggtggctacacccgaacccgagccaccgagcaccaacaaatggcagcttgataagtggctcaacaaagtgacttcccagaataaatcgtttatctgtgggcagaatgagacccctatggaaaccatttcattacctccacccatcatccagcccatggaggttcaaatgaaggttaaaactaacgcctcacaggtccctgccgaacccaaggagcgcccactgctgtcactaatccgggagaaggcacggcccagacctacccagaaaattcccgaaaccaaagcactcaaacacaagctctccactacatcggagaccgtctctcagcgaacaatcggcaagaagcagcccaaaaaagtggagaagaacacgtctactgacgaatttacgtggcctaaaccaaatataacaagtagtacccccaaggagaaagaaagcgtcgagctccacgatcctccaagagggagaaacaaagcaactgcccacaaaccagcccctagaaaggagcctcggcccaatatccccctggcaccggagaaaaagaaatataggggtcccggcaaaatcgtgcctaaatctagagaatttatcgaaacagactcatccacatcagactccaacacagaccaggaggaaactctgcaaattaaagtgctgccaccctgcatcattagcgggggcaatactgccaaatctaaagaaatctgtggcgcatcattaaccttgtccacgctgatgtccagctctggctccaacaacaatctaagtatcagtaacgaggaacccacattctcccctatccctgtaatgcaaactgaaatactgagtcccctgcgagaccacgagaatctgaagaatctatgggtaaagatagatctcgacttgctgtcccgggtgcccgggcatagctccctccacgctgccccagccaagccggatcacaaggagaccgccaccaaacctaaacgccagacagctgtgaccgcagtggagaaacccgcaccaaagggcaaacggaagcacaaaccaatagaggttgccgaaaaaatacctgagaagaaacagagactggaggaggcgacgacaatctgtctcctcccgccctgcatatccccagctcctccacataagccaccaaacacacgggagaacaactcaagccgcagagccaacagaaggaaggaagaaaaactttttccccctcctctgagccctctccccgaggatccccctaggagaagaaatgtgagcggcaacaacgggccttttggtcaggacaaaaacatcgcaatgacagggcagataacatcaaccaaacccaagcgcacggagggaaagttttgtgctacgttcaagggaatatctgagggagacaccccaaaaaaagcgtccagtgctaccatcacggttacgaacaccgccatcgccacagcgacggtaaccgcgactgctattgtaactacaaccgtgacagctacggcgaccgccacagccaccactactacaacgacaacaaccatctcaaccatcaccagcaccatcactactggtctgatggattcatcccaccttgagatgaccagctgggctgcacttcccctcctgagttcctcctccactaatgtccgccgccccaaactgacatttgacgattccgtccacaatgctgattattacatgcaggaggccaagaagcttaagcataaggccgacgctcttttcgaaaagtttggaaaagctgtcaactatgccgacgctgccctgagctttaccgagtgtggaaacgccatggagagggatcccctagaggccaaaagtccatacacaatgtacagcgagaccgttgaattacttagatatgccatgcgcctcaagaatttcgcaagcccgctggctagcgacggagacaagaagttagcagtactctgctacagatgcctgtccctgctctaccttcgtatgtttaagctgaagaaggatcacgctatgaagtatagtaggtcactaatggagtactttaaacaaaacgcctccaaagtggcgcagattccatccccatgggtctccaacggaaagaacacacctagtcccgtttctttgaacaatgtctctccaatcaacgccatgggaaactgtaataacggacccgtgactatcccacagcggatccaccacatggcagcctctcacgtcaacatcacttcaaatgtgctgagaggatacgaacactgggacatggcagacaaactgacccgggagaacaaggaattctttggagatctcgacacactgatgggaccacttactcagcactccagtatgacaaacctcgtacgatacgttcgtcagggactgtgctggcttagaatcgatgcccacctgctgtag

SEQ ID NO: 66445 - DNA, 3837 bp, Artificial Sequence
  derived and/or modified sequence
atggacctgtttgacttcttccgggactgggacctggagcagcagtgccactatgagcaggacagaagtgccctgaagaagcgggagtgggagaggaggaaccaggaggtgcagcaggaggatgacctcttcagcagcggctttgacctgtttggagagccctacaagaccaacaagggagatgccctggccaacagagtgcagaacaccctgggcaactatgatgagatgaagaacctgctgaccaaccacagcaaccagaaccacctggtgggcatccccaagaacagcgtgccccagaaccccaacaacaagaatgagcccagcttcttccctgagcagaagaaccgcatcatccccccccaccaggacaacacccaccccagcgcccccatgcccccacccagcgtggtgatcctgaacagcaccctcatccacagcaacaggaagagcaagccagagtggagccgggacagccacaaccccagcacagtgctggccagccaggccagcggccagcccaacaagatgcagaccctgacccaggaccagagccaggccaagctggaggacttctttgtgtacccagctgagcagccccagatcggggaggtggaggagagcaaccccagcgccaaggaggacagcaaccccaacagcagtggagaagatgccttcaaggagatcttccagagcaacagccctgaggagagcgagtttgctgtgcaggcccctggcagccccctggtggccagcagcctgctggcccccagcagcggcctgtctgtgcagaacttccccccaggcctgtactgcaagacctccatgggccagcagaagcccacagcctacgtgcggcccatggatggccaggaccaggccccagacatcagccccaccctgaagcccagcattgaatttgagaacagctttggaaacctgagctttggcaccctgctggatggcaagcccagcgctgccagcagcaagaccaagctgcccaagttcaccatcctgcagaccagcgaggtgtccctgcccagcgaccccagctgtgtggaggagatcctgcgggagagccagcacctgaccccaggcttcaccctgcagaagtggaatgaccccaccacccgggccagcaccaagtctgtgtccttcaagtccatgctggaggatgacctgaagctgagcagtgatgaagatgacctggagcctgtgaagaccctgaccacccagtgcacagccacagagctgtaccaggccgtggagaaggccaagcccaggaacaaccctgtgaacccccccctggccaccccccagcccccacctgctgtgcaggccagcggcggcagcggcagcagcagcgagagcgagagcagcagcgagagtgacagcgacacagagagcagcaccacagacagcgagagcaatgaggccccccgggtggccaccccagagcctgagccccccagcaccaacaagtggcagctggacaagtggctgaacaaggtgaccagccagaacaagagcttcatctgtggccagaatgagacccccatggagaccatcagcctgcccccacccatcatccagcccatggaggtgcagatgaaggtgaagaccaatgccagccaggtgcctgctgagcccaaggagcggcccctgctgagcctcatccgggagaaggcccggccccggcccacccagaagatccctgagaccaaggccctgaagcacaagctgagcaccaccagcgagaccgtgtcccagaggaccatcggcaagaagcagcccaagaaggtggagaagaacaccagcacagatgagttcacctggcccaagcccaacatcaccagcagcacccccaaggagaaggagagcgtggagctgcatgaccccccccggggcaggaacaaggccacagcccacaagccagcccccaggaaggagccccggcccaacatccccctggcccctgagaagaagaagtaccggggccctgggaagatcgtgcccaagagccgggagttcatcgagacagacagcagcaccagtgacagcaacacagaccaggaggagaccctgcagatcaaggtgctgcccccctgcatcatcagcggcggcaacacagccaagagcaaggagatctgtggggccagcctgaccctgagcaccctgatgagcagcagcggcagcaacaacaacctgagcatcagcaatgaggagcccaccttcagccccatccctgtgatgcagacagagatcctgagccccctgcgggaccacgagaacctgaagaacctgtgggtgaagattgacctggacctgctgagccgggtgcccggccacagcagcctgcacgccgccccagccaagccagaccacaaggagacagccaccaagcccaagaggcagacagctgtgacagctgtggagaagccagcccccaagggcaagaggaagcacaagcccatcgaggtggccgagaagatccctgagaagaagcagaggctggaggaggccaccaccatctgcctgctgcccccctgcatcagccctgccccaccccacaagccacccaacacccgggagaacaacagcagcagaagagccaacagaaggaaggaggagaagctgtttcctccacccctgagccccctgcctgaagatcctccaagaagaagaaatgtgtctggcaacaacggccccttcggccaggacaagaacatcgccatgacaggccagatcaccagcaccaagcccaagaggacagagggcaagttctgtgccaccttcaagggcatctctgtgaatgaaggagacacccccaagaaggccagcagcgccaccatcaccgtgaccaacacagccatcgccacagccaccgtgacagccacagccatcgtgaccaccaccgtgacagccacagccacagccacagccaccaccaccaccaccaccaccaccatcagcaccatcaccagcaccatcaccaccggcctgatggacagcagccacctggagatgacctcctgggccgccctgcccctgctgagcagcagcagcaccaacgtgcggcggcccaagctgacctttgatgattctgtgcacaatgctgactactacatgcaggaggccaagaagctgaagcacaaggcagatgccctgtttgagaagtttgggaaggctgtgaactatgcagatgctgccctgtccttcacagaatgtggaaatgccatggagcgggaccccctggaggccaagagcccctacaccatgtacagcgagaccgtggagctgctgcgctatgccatgaggctgaagaactttgccagccccctggccagtgatggagacaagaagctggccgtgctgtgctaccgctgcctgagcctgctgtacctgaggatgttcaagctgaagaaggaccacgccatgaagtacagccgcagcctgatggagtacttcaagcagaatgccagcaaggtggcccagatccccagcccctgggtgtccaatggcaagaacacccccagccctgtgtccctgaacaacgtgagccccatcaatgccatgggcaactgcaacaatggacctgtgaccatcccccagaggatccaccacatggccgccagccacgtgaacatcaccagcaatgtgctgcggggctatgagcactgggacatggctgacaagctgacccgggagaacaaggagttctttggagacctggacaccctgatgggccccctgacccagcacagctccatgaccaacctggtgcgctacgtgcggcagggcctgtgctggctgagaattgatgcccacctgctgtag

SEQ ID NO: 66446 - DNA, 7319 bp, Artificial Sequence
  derived and/or modified sequence
gccgctgcctctgccccggccgcccccgccgccgctgccgccgccggcccgcagccagccaggcgggcggcccagcccgcctgagcccgcagcggctgccgccgcagcgtcgggtcgctgggtgcgcgggctaccgcggaccgagcggacccgagtgggcgaccaggcgcttgcccgcccagtgccactgccgccgcttcctcgccggagcacaggaccagacacctccagcgcccgctgctgctgccgatgcggcccggacacttttagctgggcgggagggctggagagccgggggccgccgagaaccgccagcgagctgtgccgagagccgcgccgacccgctgcgatcagggacaggcgcccgcccgccgccgccgcctggccgctatggatctattcgactttttcagagactgggacttggagcagcagtgtcactatgaacaagaccgtagtgcacttaaaaaaagggaatgggagcggaggaatcaagaagtccagcaagaagacgatctcttttcttcaggctttgatctttttggggagccatacaagacaaacaaaggtgatgcacttgccaaccgagtccagaacacgcttggaaactatgatgaaatgaagaatttgctaactaaccattctaatcagaatcacctagtgggaattccaaagaattctgtgccccagaatcccaacaacaaaaatgaaccaagcttttttccagaacaaaagaacagaataattccacctcaccaggataatacccatccttcagcaccaatgcctccaccttctgttgtgatactgaattcaactctaatacacagcaacagaaaatcaaaacctgagtggtcacgtgatagtcataaccctagcactgtactggcaagccaggccagtggtcagccaaacaagatgcagactttgacacaggaccagtctcaagccaaactggaagacttctttgtctacccagctgaacagccccagattggagaagttgaagagtcaaacccatctgcaaaggaagacagtaaccctaattctagtggagaagatgctttcaaagaaatctttcaatccaattcaccggaagaatctgaattcgccgtgcaagcgcctgggtctcccctagtggcttcctctttattagctcctagcagtggcctttcagttcaaaacttcccaccagggctttactgcaaaacaagcatggggcagcaaaagccaactgcatacgtcagacccatggatggccaggaccaggcaccggacatctcaccaacactgaaaccttcaattgaatttgagaacagctttgggaatctgtcatttggaacactcttggatggaaaacccagtgcagccagttcaaagactaaactgccaaagttcaccatcctccaaacaagtgaagtaagccttcccagtgatccaagctgtgttgaagaaatcttgcgggaatcgcagcatctgaccccaggattcaccttacaaaagtggaatgacccaaccaccagagcttctacaaagtcagtgtctttcaaatcgatgcttgaggatgacctgaagctgagcagtgatgaagatgaccttgagcctgtgaagaccttgaccactcagtgcactgccactgagctctaccaggctgttgaaaaggcaaaacctaggaataatcctgtgaacccacccttggccactccccagcccccacctgcagtgcaagccagcgggggttctggcagctccagcgaatcggagagcagctctgagtcggattcagacactgaaagtagcaccactgacagcgaatctaatgaggcacctcgtgtggcaactccagagcctgagccaccctcaaccaacaagtggcaactggataaatggcttaacaaagtgacatcccagaacaagtcttttatttgtggccaaaatgaaacacccatggagactatttctctgcctcctccaatcatccaaccaatggaagtccagatgaaagtgaagacgaatgccagtcaggtcccagctgaacccaaagaaaggcctctcctcagtctcattagggagaaagcccgtccacggcccactcagaaaattccagaaacaaaggctttgaagcataagttgtcaacaactagtgagacagtgtctcaaaggacaattgggaaaaaacagcccaaaaaagttgagaagaacaccagcactgacgagtttacctggcccaaaccaaatattaccagcagcactcccaaagaaaaagaaagtgtggagcttcatgacccaccaagaggccgcaacaaagccactgcccacaaaccagcccctaggaaagaaccaagacctaacatccctttggctcccgagaagaagaagtacagagggcctggcaagattgtgccaaagtctcgggaattcattgaaacagattcatctacatctgactccaacacagatcaggaagagaccctgcaaatcaaagtcctgcctccgtgcattatttctggaggtaatactgccaaatccaaggaaatctgtggtgccagcctgaccctcagcaccttaatgagtagcagtggcagcaacaacaacttatccatcagtaatgaagagccaacattttcacctattcctgtcatgcaaactgaaatcctgtcccctctgcgagatcatgagaacctgaaaaacctctgggtgaagattgaccttgacttactctctagagtacctggccacagctcactccatgcagcacctgccaagccagaccacaaggagactgccacaaaacccaagcgtcagacagctgtcacagctgtggagaaaccagcccctaagggcaaacgtaagcacaagccaatagaagttgcagagaagatccctgagaagaagcagcgcctggaggaggccacaactatctgcttgctccctccttgcatctcaccagccccaccccacaagcctcccaacactagagaaaataattcatccaggagagcaaatagaagaaaggaagaaaaactatttcctcctccactttccccactgccagaggaccctccacgccgcagaaatgtcagtggcaataatggtccctttggtcaagacaaaaacatcgccatgactggacaaatcacatctaccaaacctaagagaactgaaggcaaattctgtgctactttcaaagggatatcggtaaatgagggagacactccaaaaaaggcatcctctgccaccatcactgtcaccaatactgctattgccactgctactgtcactgctactgccattgtcaccaccactgtcacagctactgccaccgccacggccaccaccacaactactaccactaccatttccaccatcacctctaccatcactactggcctcatggatagcagtcacctggagatgacgtcctgggcggctctgccccttctatccagcagcagcactaatgtccggagacccaagctcacttttgatgactcggttcacaatgctgattattacatgcaagaagctaagaagctgaagcacaaagctgatgcactgttcgagaaatttggcaaagctgtgaattatgctgatgccgccctctccttcactgaatgtggcaatgccatggaacgcgaccctctggaagcaaagtccccatacaccatgtactctgagactgtggagctcctcaggtatgcaatgaggctgaagaactttgcaagtcccttggcttcggatggggacaaaaagctagcagtactatgctaccgatgtttatcactcctctatttgagaatgtttaagctgaagaaggaccatgctatgaagtactccagatcactgatggaatattttaagcaaaatgcttcaaaagtcgcacagataccctctccatgggtaagcaatggaaagaacactccatccccagtgtctctcaacaacgtctcccccatcaacgcaatggggaactgtaacaatggcccagtcaccattccccagcgcattcaccacatggctgccagccacgtcaacatcactagcaatgtgttacggggctatgaacactgggatatggccgacaaactgacaagagaaaacaaagaattctttggtgatctggacacgctgatggggcctctgacccagcacagcagcatgaccaatcttgtccgctacgttcgccaaggactgtgttggctgcgcatcgatgcccacttgttgtagtgggtgttctcagatctctagcatcacgacccatcactctacctctaccagcgcactgatggtcactggtggaactccactcactggggaacgttctctttggttatgtttgtttttatgcttcttttgttatctgtaaaaaacagaagtcattgtaagttgacactacaacttaagggcagtgtacgttttattacttagtcattttttttcttttagcatttgatatgcatttctcagattccaccatctttttgtgctttatggaatgacagtccctacaatattgttttaagcccacactacccaaaacaaagaatgggaagcacttgtgataaagacaggctcctgagaaatgcaacaagtggtcttacatatacatgagaacttagacacaagggaccatcccccaaactctactcttatacccagaaaagaacatatttcagaatctgtcaaacttttgtgtatcccacagattcaatcttcaggtgagaattttcattgtcaaaacccactggttagatgttgtagcaacatcataaaatcaagagtatcaagaaaataaatgagcatagcaatgctactcttaaaaagatgctatgccacacaaccagaggactttcttgttagcatccctttcctgattccctattttgttaattttaatgataagaagaaagggtgacatttattttgacaagttttaggcatcagctggcatcagtgtttttcaactccattatttgaagtgtaaatcctcacctggggttctctgtgtgcaaagctgtccttttgaagaacagtttggttgatgcatgccttagtagccaaaatgctacactctagacttacaagtgggagttaagagaggtctggaaagtgtccaacaaggaattcacacctctgcctcctttgcaacaacaacatttacacagttggtaagtgggtccataactggcaggatttttaaattgtattttgctcaaatctatgggaacaaaagtcaaggtatcactacctagaagtaatgatatacagttttcttcctagtggcttgaaaatctggacttcctcaattattattcacattttctctcttataggttttctgttttctactttcttttttctcttatctgtgtttccctttcctttgtttggctcattaacttttgactgaattacaattactccttttattaaagtccatattattgtgaatcatttccatgaaaatttctaagaaaactccaaactctctaaatagtagctaacttttatttttttaaaatgagtcgtggggtagtgcttcaccttgagatgctttgaaagagccctaaacattgggaaccattcacctaatttggagacatttctcactggttgtgactacccccttatgatccttcacattcattttatgtccctaaacatcacaatgtaaatatcatttttgatgttccagctcaccagaagattcttacacttggggtaaacactatccatgcattacttactggtaattacctgctggtatataattccatgtagcctttaatatgctgggttatcaaattctgttcactgagttatgaccagataaataatagatatgcacatgaaagatgcaaacttgtgtgattattaaagccagccatgcaggtccatgatagaaacagcaggtgatgactctgcactctcattgtcaaggttagatatatccccagttgcaaaacagccagacttgagctgtgctctggtcatctttgagtttaaggccttttgttgtataaggctgtggaagttgtactccaatggctgaagccatgttgttaatatggctgatgggagcatccctgcagctgaacccagcactttttatgctcccactgtggttgagctttatgtttacagtctcagcaacaacacttatgcatccaaacactcacaaatgaaacctgaaagaatcttttctgagcctcttaaaagaggaaaatgatgataacattaaagactctgaacacccaaggttggtgtcacatataaaaattaagctgatgactttgcagtgactcaagttgtctctttatcatggtttaccaggtagagtgcctggctattactatataatgaagcccactggcttgacttgtaagttcaacctaaaccacaatcctagaccatcatggatttaggagtagattcttcttgaaatcccacatccagaaactagacattagaatgttgaggcagtttcccagagaaacaagcatattgcctcatggatgaaagacttgtagttctagtttcagtgacttgttatatctacttacatacaacagggaggcaagaggattctctgtcatctctggtgactgagtgtaaaatatgtgccaagtctgcagcacagtgaccaaatctgacaatcgagctctggatcaccacttgattatgtagtagactcatttataaagcagcttaggaactaattaaacatggaggatgaattaccttcctatcccttgagataagacatctttcagtttcatgattaaggattgttgctgttttatagttactctgttcatcacagtgtaaatggtgatgcgtgtcgtaggtgtgcagctatttgagggactaagggatggagatattctgtcaaatgaatctcttcagtataccagtttgtgggagggatatgagacatgtggatggcagtgagagatcgtgcctctagatcttgatggaggcttggtgagacacacttaaataagcacgtggaggttagaatagagggcagagtaaaaggaagctccatctgagcaagtacaccaaatgatctcagccctgcaacttgacccaggtagggccaccactacgccttcacttgtcacccaagctccaaccacagagagtttgacaagtttgtgttatgatgttggcttggctttgtatttttaattaactttggatttttagtggttttgtcatataactgtctgagtttggtaggtaggattactttgaaaagggtttactagtgtggtcctccgggtagaatttagctgtaagcatgttgttagccagcc

SEQ ID NO: 66447 - DNA, 3837 bp, Artificial Sequence
  derived and/or modified sequence
atggacctgttcgacttcttccgggactgggacctggagcagcagtgccattatgagcaagatcgctccgcccttaaaaagcgagagtgggaaaggcgcaatcaggaagttcagcaggaagacgatttgttctcgagcggatttgacctcttcggggaaccgtataagaccaataaaggggacgccctcgccaatcgggtccagaataccctgggaaactacgatgaaatgaaaaacctgctaaccaatcacagcaatcagaatcacctggttggcatcccaaagaactcggtacctcaaaacccgaacaataagaatgagcctagcttttttccagaacagaaaaataggatcattccaccccatcaagataatactcacccatcggcccctatgccaccacctagtgtcgtgattctgaatagtacgcttatccactccaaccggaagtcaaagccagaatggtccagagatagccacaacccaagcaccgtgctggcttcccaagcttcaggacagccgaacaagatgcagaccctcacgcaggaccaaagtcaggccaaattggaggattttttcgtgtatccagccgagcaaccacagatcggggaggtcgaggagagcaacccgtcagctaaagaggacagtaatcccaactccagcggggaagacgcattcaaagagatttttcagtccaatagtccagaggaaagtgagtttgccgtgcaggccccagggagtcccttggtggcaagttccctgttagccccatcttctggcctgtccgtgcagaattttccccccggtctgtactgtaaaacctcaatggggcaacagaagcccactgcctatgttaggcctatggatggtcaagaccaggcccctgatatctctcccacactcaagcccagtatcgaatttgagaacagctttggcaaccttagctttggcaccctgttagacggaaagccttcagctgcatcaagcaagacaaagctgcctaaattcaccattcttcaaacttccgaggtgagccttccctctgacccgtcctgtgtcgaggagatcctgcgcgaaagccagcatttgacacccggcttcacactgcagaaatggaacgaccccacaacaagagccagcacaaaatccgtatcgttcaaatctatgcttgaagacgaccttaagctgagcagcgatgaagatgatctcgaacccgttaagacactcaccacacagtgcacggctactgaactttatcaagcggttgaaaaagccaagcccaggaacaatcccgtgaaccccccactggccacccctcaaccccctcccgccgttcaggcttccggtggcagcggctcctcatcagagtctgaatccagtagcgagtccgatagtgacacagagagctcaacaactgactccgagtcaaatgaggcccctagagtggcgacccccgagcctgagccccctagtaccaacaaatggcaactcgataagtggctcaacaaggtgacctcccagaataagtcatttatatgtggacagaatgaaactcctatggaaacgatctctctgcctcctcctatcatccagcctatggaggtgcagatgaaggtcaagactaatgcctcacaggtgccggctgagccaaaggaacgacctctgctatctcttatccgcgagaaggcccgacccagacctactcagaagattcctgagaccaaggccctcaagcacaaattaagtaccacctcagagacagtgtcacaacggacgatcggtaaaaaacaacccaagaaagttgagaagaatacttcgactgatgagtttacttggcccaaaccgaacattacctcttctaccccgaaggagaaggagtccgttgaactgcatgatccgccgaggggtaggaataaggctacagcccataaacccgcccccaggaaggaacctcgcccgaatattcctctggctcccgaaaagaaaaaatacagaggccctggcaagattgttcccaagtcccgtgagtttatcgagaccgactcttcaacttctgatagcaacactgatcaggaggaaacactgcaaatcaaggtgctacctccatgcattatcagcggaggcaacacagccaagtctaaagaaatttgtggcgcatccctgactctttcaaccctcatgtcctcaagcgggagcaacaacaatctgtccataagtaatgaggagcccacattcagcccaattccggttatgcagactgagatcttatcacccctgcgcgaccacgagaaccttaagaacctgtgggtgaaaatcgatcttgacctgctgagccgtgttcccggccacagctcactgcatgcagcccccgccaaacctgaccacaaggagacagctaccaaaccgaagcgccaaacagcggtcaccgccgtggagaaaccggcccctaagggaaaaagaaaacacaagcccatcgaggtcgcagagaaaatacctgaaaagaagcagcgtttagaagaggccactaccatctgccttctgccaccttgtatctcaccagcgccaccgcacaagcctccaaacaccagagagaacaacagctctcgccgggccaacaggagaaaggaggaaaagctctttcctccacccctatcccccctccccgaggatcctcccaggaggcggaatgtgtcaggaaacaatggccctttcgggcaagacaagaacatagctatgacagggcagattacctcaactaagccaaagcgcaccgagggcaaattctgtgcaacattcaaagggatctctgtcaacgaaggagataccccgaaaaaggctagcagtgccacaattacggttactaatacagccatcgccacagccaccgtgacagcgaccgccatcgtaacaaccacagttacagctacggccacagccacggctactactaccaccacaacgactacaattagcactatcacatctacaattacaacaggcttgatggattccagccaccttgaaatgacgagctgggccgccctccccttgttatccagcagctcaactaatgttcggcgcccaaagcttacatttgacgactctgtgcacaatgccgattactatatgcaagaggctaaaaagctaaagcataaggccgatgccttgttcgagaagttcgggaaggcagttaactacgcagatgctgcactgagctttaccgaatgtggtaacgccatggaacgggaccccctcgaggccaaaagtccctacacaatgtactccgaaaccgtagaactgttgagatacgcaatgcggctcaagaattttgcatccccgctcgcaagcgacggtgataagaagctggcagtgttgtgttaccgatgcttgagtttgctgtacctccggatgttcaaattgaagaaagaccatgccatgaaatatagcagaagtctcatggaatattttaaacagaacgcttccaaagttgcccaaatcccttccccctgggtcagtaacggcaagaacacacccagccccgtgagcttaaataacgtgtcccctataaacgcgatggggaattgcaacaacggtccagtgacaatccctcagcgcatccatcacatggccgcgagccacgtcaatatcacttcaaatgtgctgcggggctacgaacattgggacatggcagataagctcacaagggaaaacaaggaattctttggagaccttgatacccttatgggaccgctgactcagcattcttctatgacaaatttagtcagatatgtacgccaaggactttgttggctccgaatcgatgcccacttattatag

SEQ ID NO: 66448 - DNA, 3831 bp, Artificial Sequence
  derived and/or modified sequence
atggacctgttcgacttcttccgggactgggacctggagcagcagtgtcattacgagcaggaccgcagtgccctcaaaaaacgggagtgggaacgccgaaaccaggaggtgcaacaagaagacgatctcttctcctctgggtttgatctgtttggggagccttataagaccaacaaaggagacgcccttgcgaacagggtgcaaaataccctgggaaattatgatgagatgaaaaacttgttgaccaaccattcaaaccaaaaccatctggtcggtattcctaaaaatagcgttcctcagaatcctaacaataagaatgagccttctttcttcccagaacagaaaaatcgtattatcccgcctcaccaggataacacccacccgtctgcccccatgcccccgccatctgtggtcattctgaactccactttaatccatagtaaccgaaagtccaaacccgagtggagccgggatagtcacaacccaagcacagtgctggcctcccaggcgtccggccaacctaataagatgcaaacactgactcaagatcagtcccaggccaagcttgaagatttctttgtttatccagctgaacagccacagatcggagaagtagaagaaagcaatcctagcgccaaagaagatagcaatcccaacagcagcggagaggacgcattcaaggagatatttcagtccaattcaccagaagaatcagagtttgccgtccaggcaccgggatctcccttggttgcctccagccttcttgcaccttcatctggactcagtgtgcagaatttcccgccaggattatattgtaagacctccatgggtcagcagaaacccaccgcctatgtgaggcccatggacggccaggatcaggcacctgatataagtcccacactgaagcccagcattgaatttgagaattcttttggaaacctctcatttggcactctcttagacggaaaaccaagcgcggcctcttcaaagaccaaactgccgaaattcacaatcttgcagacttcagaggtgtcactcccttcagacccatcttgcgtcgaggaaatcctccgcgaatctcagcacctgactcccgggtttaccctccaaaaatggaacgaccctaccacgagagcttccacaaagtcagtctctttcaaaagcatgctcgaggacgatttgaagctgagctctgatgaagatgatttggaaccagtcaagacactcacaacccagtgcaccgcaacggagttataccaagccgttgaaaaggctaagccgaggaacaaccccgtgaacccccctcttgcgactccacagccacctcctgccgtacaggcatcgggcggcagcggctcctcttctgagagcgagtcatccagcgagtctgactctgacaccgaatccagcacaacagactcagaatcaaatgaggctccccgagtcgcaacaccagaaccagaaccgcctagtacaaacaaatggcagctggataaatggctcaataaagttacatcccagaataagagctttatatgtggacagaacgagaccccgatggaaaccatctcactgccacctcctattatccagccaatggaggttcaaatgaaggtgaagaccaacgcctcgcaggtcccggccgagcctaaggagcgaccacttctgtcactcattagggaaaaagccagaccaagaccgacccagaaaatcccggagaccaaagctctgaagcacaagctgtctactactagtgaaactgtatctcaacgcaccatcggaaaaaaacagccaaagaaagtcgagaagaatacctcaacggatgagttcacgtggcccaagcctaatataacttcttccactcccaaagaaaaggagtccgtggagctgcatgatcccccacgaggccggaataaagccacagcacacaagccagcgccccgcaaagagccccggcctaatattcccctggccccagagaagaagaaatacagaggcccgggtaaaattgtccctaaaagtagggagttcattgagaccgactcttccacctcagacagtaacacggaccaggaggagacacttcagataaaagtgctcccaccttgcataatctcaggaggaaacactgctaagagtaaggagatctgtggagcgtcgctgactctctcgactctcatgtcatcaagtggtagtaacaacaacctgtcaatttctaacgaggaacctacatttagcccaattcctgttatgcagaccgaaattttatctcccctccgcgaccacgagaatctcaagaatctgtgggtaaaaatcgacctggacttgctgagccgggtaccaggacacagcagcctgcacgctgcaccagccaagcccgatcacaaagagacagccactaagcctaaacggcaaacagcagttaccgccgtcgagaaaccggcccctaaaggcaagcgaaagcacaaacccatagaggtcgctgagaaaattcccgagaagaaacaacgcctggaggaggcaacaactatttgtctcctgccaccctgcatcagcccggccccccctcataagccgcccaatactcgagaaaataactccagcaggcgagcaaacagacggaaggaggaaaagttatttcccccaccactgtcccctctaccagaagacccccccaggagacggaatgtgagtggaaacaacggcccgttcgggcaggacaaaaatattgccatgaccggccaaattacctccactaagcccaaacgaactgagggtaagttttgtgcaacatttaagggtatctctgagggagacacaccaaagaaggctagttcggctaccataactgtgacaaacacagctattgccaccgccaccgtgacagctacagctatcgttacaaccacagttacagctacagcaaccgccaccgcaaccaccacgactacaactacaaccatctccactattactagtacgataacaaccggactcatggattcgagccacctcgagatgacctcctgggcagccctccctctcctgtcaagctccagtacaaacgttcggagaccaaaactgacttttgatgactcagtccataacgctgactattacatgcaggaggccaagaagttgaaacacaaagccgatgcgctctttgaaaagtttggaaaggccgtaaactacgcagatgccgccttgagtttcaccgagtgtgggaacgctatggagagggatccgctggaagctaagtcgccatataccatgtactcagagactgttgaactgctacgctacgccatgagactgaaaaacttcgcttcacctctcgcatccgacggtgataaaaagctcgctgtgttgtgctacaggtgtctgagtttactatatttacggatgtttaagctgaagaaggaccacgccatgaagtattctcgctccttgatggaatatttcaagcagaacgcaagtaaggtagcccaaattcctagcccctgggtgagcaacgggaagaacaccccatcccctgtgagtctgaacaatgtctcccctatcaatgcaatgggtaattgtaacaatggtcctgtcactattccccaacgcattcatcacatggcggcaagccatgtaaacattacaagcaatgtcctccgcggctacgagcattgggatatggcagacaaactgactagagagaataaagaattcttcggcgacctggatactttaatgggacctctgacccagcacagctccatgacaaaccttgtgagatatgtgcgacagggcttgtgttggctacgaattgatgcacacttgttgtag

SEQ ID NO: 66449 - DNA, 3837 bp, Artificial Sequence
  derived and/or modified sequence
atggatctgtttgattttttccgggactgggacctggagcaacagtgtcattacgagcaggatagatcggcgctcaagaagagggaatgggaaaggagaaatcaggaagtgcagcaggaggatgaccttttttcatccggcttcgacctttttggggaaccatacaagactaataaaggcgatgcattggccaatagagttcagaacacgcttggaaattacgacgagatgaagaacctcttgaccaatcactctaaccaaaaccacctggtggggataccaaaaaactccgtgcctcagaatccaaataacaagaatgagccaagctttttcccagaacagaaaaacagaataataccaccacatcaggataacactcatccgagtgctcctatgccacccccttcagtcgtgatactcaatagtacactgatccacagtaacaggaagtcaaagccagagtggtcccgagactcccataatccctccactgtattggcgagccaagcctcaggtcaacccaacaaaatgcagacactgacacaggatcaatcccaggccaagctggaggatttttttgtgtaccctgccgaacaacctcagatcggtgaggttgaagagtctaaccccagcgccaaggaggatagcaacccaaatagcagcggggaggatgctttcaaggagatttttcagtctaattcgcccgaagaatccgaatttgctgtccaagccccagggtcaccactggtggcctcgagtctgctagcaccaagctccgggttgtctgtgcagaattttcctcctggtctgtattgtaagacatccatgggccagcaaaagcccactgcatatgtcaggcccatggacggccaggaccaggcgcctgatatctcccccactttaaagccctcaatcgagttcgaaaactcctttgggaacctcagcttcggcactctcctggatggtaagccgtccgcagcctcttctaagaccaagctaccaaagttcacgattttgcagacttctgaggtctccctgcccagtgatccctcttgtgtagaagaaatcctgagggaatcacagcatttaacaccaggcttcaccctacagaagtggaacgaccccacaacgcgggctagcacaaagtcggtgtcgtttaaaagcatgctggaggacgacttaaaactatcgagcgacgaagacgatttggaaccagtaaaaactctgacgacccaatgtaccgccactgaattatatcaggccgtggaaaaggcaaaaccgaggaacaatcccgtaaaccccccactagcaacccctcagccccctccagccgtgcaggcgtccggaggttccggttcttcctccgagtccgagtcttcatctgagagcgatagcgatacagagtcttctactacagactccgaatcaaacgaagcacccagggtcgccacacctgaaccagaaccaccctcaactaacaagtggcagctggacaagtggctcaataaggtgacgagtcagaacaagtcctttatttgcgggcagaacgaaaccccaatggagaccatttcgctgcctccgccaatcatccagcccatggaggtccagatgaaggtgaagacaaatgcttcccaggttccggctgagcccaaggagagacccctgctcagcctgattcgagaaaaagccaggcccagacccacgcaaaagatacccgagactaaagccctgaagcacaagttgtcgactacatcagagactgtgagccagcgcactatcggaaaaaaacagcccaagaaggtcgaaaaaaacacgagtactgacgaatttacatggcccaagcctaacatcactagcagtacccccaaggaaaaggagtcagttgagctgcacgatccccctcggggaagaaataaagcaactgcgcacaagcccgctcctagaaaggaaccgagacctaatattcctctggcccctgagaagaaaaaatatcggggaccaggtaaaatagttcccaaaagcagggaattcatcgagaccgattcaagcaccagcgactctaacacggatcaggaggaaaccctccagatcaaggtgttaccgccatgcataatctcaggcggaaacacagcaaagagtaaggaaatttgcggcgcttctctcaccttatccacccttatgagtagtagtggaagcaataacaacttatccattagcaacgaagagcctactttcagccccatccccgttatgcaaaccgaaattctcagcccattacgcgatcatgagaacctgaaaaacctgtgggttaaaatcgatcttgatctactctcaagagttcctggccactcttccctgcatgcagcccctgctaagccggaccataaagagaccgccaccaaaccgaagagacagacagccgtcaccgccgtagaaaaacctgcaccgaaggggaagaggaaacacaaacctattgaagttgcagaaaaaatccccgaaaagaagcagcgcctggaggaggctaccaccatttgccttcttcccccatgtatctcccctgcaccaccacacaagccccctaatactagggagaataactccagccgacgcgcaaaccgacggaaggaagaaaagctctttccaccgccattatcaccgctgccggaggatccacccaggcggcgaaacgtaagtggcaataatgggcctttcgggcaggacaagaatatcgccatgacagggcagatcacaagcaccaaacccaagcggaccgaggggaagttttgtgctaccttcaaaggaatttccgtcaatgagggggacacccccaagaaagccagcagtgcgacaataacagtcaccaacactgcgatcgcaaccgcgactgtgaccgctaccgcgattgtcaccacaaccgttaccgctacggcaacagctaccgctactactacaacaacaacaaccaccatctccacgataacttccactatcaccaccgggttgatggatagcagccacctggagatgacttcatgggcagcactccctctgttaagttcaagttccactaatgtgcgcaggccgaaactgacattcgacgacagcgtccacaatgccgattattatatgcaggaggcgaaaaagctgaagcataaggcagatgcactcttcgaaaaattcggtaaggcagttaattacgccgatgccgctctgtcctttacagagtgtggcaatgctatggaacgcgatcctctggaggccaaatccccttataccatgtacagtgagaccgtggaactattaagatacgccatgcgcctcaaaaactttgcctcaccactggccagcgacggagataagaagctggcagtgctatgctatcgctgtttgtctctgctttatttacgaatgtttaagctcaagaaggaccatgccatgaaatacagccggagcttgatggaatatttcaagcagaacgcgtccaaggtcgcccagatcccctcaccctgggtttcaaatggaaagaatacgccttctcctgtgtccctgaacaacgtgtctcctattaatgccatgggcaactgtaacaatggtcctgtcacaatcccgcaaaggattcatcatatggcggcttcgcatgtgaatatcaccagcaacgtactgcggggttatgagcactgggacatggctgataagctgaccagggaaaataaagagttcttcggcgatttggatactcttatgggtcctcttactcagcacagttctatgactaatctggtgcgatatgtacggcaaggtctttgttggttacgaattgatgctcacctactttag

SEQ ID NO: 66450 - DNA, 3830 bp, Artificial Sequence
  derived and/or modified sequence
atggatctctttgatttctttcgcgactgggacctggagcagcagtgtcattacgagcaagacagatctgctctgaagaagagggagtgggagcggaggaaccaagaggtccagcaggaggatgatctattttctagcggctttgacctttttggagagccctataagactaataagggagacgctctggcgaacagggtccagaatacactcggaaattacgacgagatgaagaatctactgacaaaccatagcaatcaaaatcacctggtcggaattccaaaaaattcagtgccgcagaaccctaacaataaaaacgaaccgtctttctttccagagcaaaaaaaccgtatcatccccccacaccaagacaatacccacccaagtgctcctatgccaccaccatctgttgttattctgaacagcaccttgatccatagcaaccgtaaaagtaagcccgaatggtctagagacagtcacaatcccagcacggtcctggcctctcaagcttctgggcagcctaacaagatgcagacactgacacaggaccagtcgcaagccaagctggaagactttttcgtctaccccgctgagcagcctcagatcggcgaagtggaggagagcaacccgagtgcaaaggaggacagtaaccccaactcctccggcgaggacgcctttaaggaaatcttccagtcgaactcgccagaggaaagcgagtttgcggtgcaggcaccgggatcccctctggtggcttcaagtcttttagcaccttcctcaggcttatccgttcaaaactttccacccggattgtactgcaagacgagcatgggccagcaaaaacctacagcctacgtgcgccctatggacgggcaggatcaggctcctgatatttcgcccaccttgaaaccaagcattgagttcgagaattctttcggcaatctgagcttcggcacactgctggacgggaaaccatccgccgcatccagtaaaacaaagttacccaagttcaccattttacaaacctccgaagttagcttgcctagcgatcctagctgcgtggaggaaatccttcgcgaatcccagcacctcacacctggattcacactccagaagtggaacgacccgaccacgagagctagtacaaagagtgtaagcttcaaaagcatgctcgaggacgacctgaagctgagtagtgacgaggatgaccttgaacctgtgaagacgttgactactcaatgtaccgccactgaactgtatcaggccgttgaaaaggccaagcctaggaacaaccctgtgaatcccccattagcaacccctcaacccccacccgctgtccaggcatccggcggaagcggatctagttccgaaagtgaatcctcttccgagtctgatagtgacaccgagtcaagcacgactgatagtgagtcgaacgaagcacctcgggttgccaccccagaacccgaaccgccttctaccaataagtggcagttagacaaatggcttaacaaagttacatcccagaacaaaagcttcatctgcgggcagaacgagacaccaatggagactataagcctgccaccacccatcattcagccgatggaagtgcagatgaaagtgaagactaatgcctctcaggttccagccgaacctaaggagaggccgctcctgtcgctgatacgcgaaaaagccaggccaaggccgacccagaagatcccggaaacaaaggcactcaaacacaagctgtccacaacttctgagaccgtgagccaaaggaccattggcaaaaagcaaccaaaaaaggtcgaaaaaaacacctcgaccgacgagtttacatggcccaagccgaatattacatcttctacaccaaaagaaaaggagtccgtggagctgcatgatcccccaaggggaaggaataaggcgaccgctcacaagcccgcacccaggaaggaaccgaggccaaacatcccactagctccggaaaagaagaagtaccgtgggcctgggaaaatcgtcccaaaatctcgcgagtttatcgagacagacagctcaacaagtgactcgaacaccgaccaggaggagacccttcagattaaggttttgccaccatgcataatttctggcggaaataccgccaaatcaaaggaaatttgtggcgcttctttgactttgtcaaccctcatgagctccagcggatccaataataacctgtctatatcaaacgaagagccaacattcagtcctattcccgtgatgcagactgaaattctgagccccctccgtgatcacgagaaccttaagaacctatgggtgaagattgacctggacctgttgtcaagagtgccaggccatagcagtcttcacgcggctcctgccaaacctgatcacaaagaaaccgccaccaagcccaaacggcagaccgctgtgacagccgtggagaaacccgctcccaagggaaaacgaaaacacaagcccatagaagtagccgaaaaaattccagaaaagaaacaacgtctggaagaagccacaacgatctgtttactgcccccatgtattagcccagctccccctcacaagccaccaaacacccgcgagaacaattcaagtcgcagagccaataggcgtaaggaggaaaagttatttccaccacccctgagtcctcttccagaggatcctccacggcgaagaaatgtatcagggaataacgggccattcgggcaggataagaacattgctatgactgggcagatcacatccacaaaacccaagcgtactgaagggaagttttgtgcaactttcaaaggcatcagtgagggcgataccccaaaaaaggcttcttctgcaactatcacagtgactaatactgcaatagcaactgccaccgtgaccgccaccgctattgtaaccaccaccgtgactgcaactgctaccgcaacagccaccacgaccactaccaccactactatctctaccataacatcaacaatcacaactggattgatggattcctctcacctggagatgacgtcatgggccgcattgccactactcagttctagttccactaacgtgcgtcgacccaagcttacctttgatgattctgtacacaatgctgattattatatgcaagaggccaagaaactgaaacataaggccgacgccttgttcgagaagtttggaaaggcagtgaactatgccgatgcagcactgtctttcactgaatgcggaaatgccatggaaagggatccgcttgaggccaagagtccgtatactatgtacagcgaaaccgtggagctgttgagatacgcaatgaggctgaagaacttcgcctctccgctggcatcagatggcgacaaaaaactggccgtactttgctacagatgcctatctttactatatcttaggatgttcaagttaaagaaagaccatgcaatgaagtacagtaggtcattgatggagtattttaagcagaacgcctctaaagtagcccaaattccgagcccgtgggtgagtaacggaaaaaacactccatctccagtgagtttaaacaatgtctcaccgatcaatgcaatggggaactgcaacaatggaccagtgaccatcccacaacggatccatcacatggcagcctcccatgtaaacatcactagcaacgtgctgcgcggttacgaacactgggacatggcggataagttaacaagggaaaataaagagttttttggggatctggatacacttatgggacctctgacacagcattcctcgatgaccaacctggtacggtatgtgcgccagggcctgtgttggctgagaatcgatgctcaccttcttta

SEQ ID NO: 66451 - DNA, 3837 bp, Artificial Sequence
  derived and/or modified sequence
atggacctgttcgacttcttcagagactgggacctggagcagcagtgccactacgagcaggacagaagcgccctgaagaagagagagtgggagagaagaaaccaggaggtgcagcaggaggacgacctgttcagcagcggcttcgacctgttcggcgagccctacaagaccaacaagggcgacgccctggccaacagagtgcagaacaccctgggcaactacgacgagatgaagaacctgctgaccaaccacagcaaccagaaccacctggtgggcatccccaagaacagcgtgccccagaaccccaacaacaagaacgagcccagcttcttccccgagcagaagaacagaatcatccccccccaccaggacaacacccaccccagcgcccccatgcccccccccagcgtggtgatcctgaacagcaccctgatccacagcaacagaaagagcaagcccgagtggagcagagacagccacaaccccagcaccgtgctggccagccaggccagcggccagcccaacaagatgcagaccctgacccaggaccagagccaggccaagctggaggacttcttcgtgtaccccgccgagcagccccagatcggcgaggtggaggagagcaaccccagcgccaaggaggacagcaaccccaacagcagcggcgaggacgccttcaaggagatcttccagagcaacagccccgaggagagcgagttcgccgtgcaggcccccggcagccccctggtggccagcagcctgctggcccccagcagcggcctgagcgtgcagaacttcccccccggcctgtactgcaagaccagcatgggccagcagaagcccaccgcctacgtgagacccatggacggccaggaccaggcccccgacatcagccccaccctgaagcccagcatcgagttcgagaacagcttcggcaacctgagcttcggcaccctgctggacggcaagcccagcgccgccagcagcaagaccaagctgcccaagttcaccatcctgcagaccagcgaggtgagcctgcccagcgaccccagctgcgtggaggagatcctgagagagagccagcacctgacccccggcttcaccctgcagaagtggaacgaccccaccaccagagccagcaccaagagcgtgagcttcaagagcatgctggaggacgacctgaagctgagcagcgacgaggacgacctggagcccgtgaagaccctgaccacccagtgcaccgccaccgagctgtaccaggccgtggagaaggccaagcccagaaacaaccccgtgaacccccccctggccaccccccagcccccccccgccgtgcaggccagcggcggcagcggcagcagcagcgagagcgagagcagcagcgagagcgacagcgacaccgagagcagcaccaccgacagcgagagcaacgaggcccccagagtggccacccccgagcccgagccccccagcaccaacaagtggcagctggacaagtggctgaacaaggtgaccagccagaacaagagcttcatctgcggccagaacgagacccccatggagaccatcagcctgcccccccccatcatccagcccatggaggtgcagatgaaggtgaagaccaacgccagccaggtgcccgccgagcccaaggagagacccctgctgagcctgatcagagagaaggccagacccagacccacccagaagatccccgagaccaaggccctgaagcacaagctgagcaccaccagcgagaccgtgagccagagaaccatcggcaagaagcagcccaagaaggtggagaagaacaccagcaccgacgagttcacctggcccaagcccaacatcaccagcagcacccccaaggagaaggagagcgtggagctgcacgacccccccagaggcagaaacaaggccaccgcccacaagcccgcccccagaaaggagcccagacccaacatccccctggcccccgagaagaagaagtacagaggccccggcaagatcgtgcccaagagcagagagttcatcgagaccgacagcagcaccagcgacagcaacaccgaccaggaggagaccctgcagatcaaggtgctgcccccctgcatcatcagcggcggcaacaccgccaagagcaaggagatctgcggcgccagcctgaccctgagcaccctgatgagcagcagcggcagcaacaacaacctgagcatcagcaacgaggagcccaccttcagccccatccccgtgatgcagaccgagatcctgagccccctgagagaccacgagaacctgaagaacctgtgggtgaagatcgacctggacctgctgagcagagtgcccggccacagcagcctgcacgccgcccccgccaagcccgaccacaaggagaccgccaccaagcccaagagacagaccgccgtgaccgccgtggagaagcccgcccccaagggcaagagaaagcacaagcccatcgaggtggccgagaagatccccgagaagaagcagagactggaggaggccaccaccatctgcctgctgcccccctgcatcagccccgcccccccccacaagccccccaacaccagagagaacaacagcagcagaagagccaacagaagaaaggaggagaagctgttccccccccccctgagccccctgcccgaggacccccccagaagaagaaacgtgagcggcaacaacggccccttcggccaggacaagaacatcgccatgaccggccagatcaccagcaccaagcccaagagaaccgagggcaagttctgcgccaccttcaagggcatcagcgtgaacgagggcgacacccccaagaaggccagcagcgccaccatcaccgtgaccaacaccgccatcgccaccgccaccgtgaccgccaccgccatcgtgaccaccaccgtgaccgccaccgccaccgccaccgccaccaccaccaccaccaccaccaccatcagcaccatcaccagcaccatcaccaccggcctgatggacagcagccacctggagatgaccagctgggccgccctgcccctgctgagcagcagcagcaccaacgtgagaagacccaagctgaccttcgacgacagcgtgcacaacgccgactactacatgcaggaggccaagaagctgaagcacaaggccgacgccctgttcgagaagttcggcaaggccgtgaactacgccgacgccgccctgagcttcaccgagtgcggcaacgccatggagagagaccccctggaggccaagagcccctacaccatgtacagcgagaccgtggagctgctgagatacgccatgagactgaagaacttcgccagccccctggccagcgacggcgacaagaagctggccgtgctgtgctacagatgcctgagcctgctgtacctgagaatgttcaagctgaagaaggaccacgccatgaagtacagcagaagcctgatggagtacttcaagcagaacgccagcaaggtggcccagatccccagcccctgggtgagcaacggcaagaacacccccagccccgtgagcctgaacaacgtgagccccatcaacgccatgggcaactgcaacaacggccccgtgaccatcccccagagaatccaccacatggccgccagccacgtgaacatcaccagcaacgtgctgagaggctacgagcactgggacatggccgacaagctgaccagagagaacaaggagttcttcggcgacctggacaccctgatgggccccctgacccagcacagcagcatgaccaacctggtgagatacgtgagacagggcctgtgctggctgagaatcgacgcccacctgctgtag

SEQ ID NO: 66452 - protein, 427 aa, Artificial Sequence
  derived and/or modified sequence
MDLFDFFRDWDLEQQCHYEQDRSALKKREWERRNQEVQQEDDLFSSGFDLFGEPYKTNKGDALANRVQNTLGNYDEMKNLLTNHSNQNHLVGIPKNSVPQNPNNKNEPSFFPEQKNRIIPPHQDNTHPSAPMPPPSVVILNSTLIHSNRKSKPEWSRDSHNPSTVLASQASGQPNKMQTLTQDQSQAKLEDFFVYPAEQPQIGEVEESNPSAKEDSNPNSSGEDAFKEIFQSNSPEESEFAVQAPGSPLVASSLLAPSSGLSVQNFPPGLYCKTSMGQQKPTAYVRPMDGQDQAPDISPTLKPSIEFENSFGNLSFGTLLDGKPSAASSKTKLPKFTILQTSEVSLPSDPSCVEEILRESQHLTPGFTLQKWNDPTTRASTKMLEDDLKLSSDEDDLEPVKTLTTQCTATELYQAVEKAKPRNNPVK

SEQ ID NO: 66453 - DNA, 1284 bp, Artificial Sequence
  derived and/or modified sequence
atggacctgtttgacttctttcgcgactgggacctggaacagcagtgccactatgaacaggataggtcagccctgaagaaaagagagtgggaacgccgcaatcaggaggtccagcaggaggatgacttgttttctagtggattcgacttgttcggagaaccttacaagaccaataagggagatgcactggcaaatagagtgcaaaatactctgggtaattacgacgaaatgaagaacctgttgacaaaccacagtaaccaaaatcacctggtaggaatcccaaaaaattcagtgccacaaaatcctaataacaagaatgagccttcatttttccccgaacaaaaaaaccgaattattcccccacaccaggataatacacacccatctgccccaatgccgccgccctcagtggtgattctgaactccaccctgatccattctaatcggaaatccaagcccgaatggtccagagactcacacaacccatccaccgtcctggccagccaggcgagtggccagcctaataaaatgcagactcttacacaagatcagtcccaggccaaactggaggattttttcgtatacccggccgagcagccccagattggcgaggtcgaggaatccaacccatcagccaaagaagattccaatcccaatagctcaggagaagacgcttttaaagaaatatttcagtccaattccccagaggaatcagagtttgctgtgcaggcgccagggtctcccctggtggcaagcagcctgctagccccctcatcagggctcagcgttcagaatttccctccgggcctgtactgtaagacctcaatgggtcagcagaaaccaaccgcctacgttaggcccatggacggacaggatcaggcgccagatattagccccactctgaagccgtccatagaattcgaaaactcttttggcaaccttagtttcgggactctgctggatggcaagccttccgccgcctccagtaaaaccaaactcccgaaatttaccatcctgcagacctctgaggtatcactaccctccgatccgagttgtgtcgaggagattcttcgtgaatctcagcacttaactcctgggtttactctgcagaaatggaatgatcccacaacccgggcctcgacaaaaatgctggaggacgacctgaagttgtcctccgatgaggatgatctggagccagtcaagaccttgactactcagtgcacagcgactgaattgtaccaggcagtcgagaaagccaaaccaaggaacaaccccgtcaaatag

SEQ ID NO: 66454 - DNA, 1284 bp, Artificial Sequence
  derived and/or modified sequence
atggacctgtttgacttcttccgggactgggacctggagcagcagtgccactatgagcaggacagaagtgccctgaagaagcgggagtgggagaggaggaaccaggaggtgcagcaggaggatgacctcttcagcagcggctttgacctgtttggagagccctacaagaccaacaagggagatgccctggccaacagagtgcagaacaccctgggcaactatgatgagatgaagaacctgctgaccaaccacagcaaccagaaccacctggtgggcatccccaagaacagcgtgccccagaaccccaacaacaagaatgagcccagcttcttccctgagcagaagaaccgcatcatccccccccaccaggacaacacccaccccagcgcccccatgcccccacccagcgtggtgatcctgaacagcaccctcatccacagcaacaggaagagcaagccagagtggagccgggacagccacaaccccagcacagtgctggccagccaggccagcggccagcccaacaagatgcagaccctgacccaggaccagagccaggccaagctggaggacttctttgtgtacccagctgagcagccccagatcggggaggtggaggagagcaaccccagcgccaaggaggacagcaaccccaacagcagtggagaagatgccttcaaggagatcttccagagcaacagccctgaggagagcgagtttgctgtgcaggcccctggcagccccctggtggccagcagcctgctggcccccagcagcggcctgtctgtgcagaacttccccccaggcctgtactgcaagacctccatgggccagcagaagcccacagcctacgtgcggcccatggatggccaggaccaggccccagacatcagccccaccctgaagcccagcattgaatttgagaacagctttggaaacctgagctttggcaccctgctggatggcaagcccagcgctgccagcagcaagaccaagctgcccaagttcaccatcctgcagaccagcgaggtgtccctgcccagcgaccccagctgtgtggaggagatcctgcgggagagccagcacctgaccccaggcttcaccctgcagaagtggaatgaccccaccacccgggccagcaccaagatgctggaggatgacctgaagctgagcagtgatgaagatgacctggagcctgtgaagaccctgaccacccagtgcacagccacagagctgtaccaggccgtggagaaggccaagcccaggaacaaccctgtgaagtag

SEQ ID NO: 66455 - DNA, 1488 bp, Artificial Sequence
  derived and/or modified sequence
ccgagaaccgccagcgagctgtgccgagagccgcgccgacccgctgcgatcagggacaggcgcccgcccgccgccgccgcctggccgctatggatctattcgactttttcagagactgggacttggagcagcagtgtcactatgaacaagaccgtagtgcacttaaaaaaagggaatgggagcggaggaatcaagaagtccagcaagaagacgatctcttttcttcaggctttgatctttttggggagccatacaagacaaacaaaggtgatgcacttgccaaccgagtccagaacacgcttggaaactatgatgaaatgaagaatttgctaactaaccattctaatcagaatcacctagtgggaattccaaagaattctgtgccccagaatcccaacaacaaaaatgaaccaagcttttttccagaacaaaagaacagaataattccacctcaccaggataatacccatccttcagcaccaatgcctccaccttctgttgtgatactgaattcaactctaatacacagcaacagaaaatcaaaacctgagtggtcacgtgatagtcataaccctagcactgtactggcaagccaggccagtggtcagccaaacaagatgcagactttgacacaggaccagtctcaagccaaactggaagacttctttgtctacccagctgaacagccccagattggagaagttgaagagtcaaacccatctgcaaaggaagacagtaaccctaattctagtggagaagatgctttcaaagaaatctttcaatccaattcaccggaagaatctgaattcgccgtgcaagcgcctgggtctcccctagtggcttcctctttattagctcctagcagtggcctttcagttcaaaacttcccaccagggctttactgcaaaacaagcatggggcagcaaaagccaactgcatacgtcagacccatggatggccaggaccaggcaccggacatctcaccaacactgaaaccttcaattgaatttgagaacagctttgggaatctgtcatttggaacactcttggatggaaaacccagtgcagccagttcaaagactaaactgccaaagttcaccatcctccaaacaagtgaagtaagccttcccagtgatccaagctgtgttgaagaaatcttgcgggaatcgcagcatctgaccccaggattcaccttacaaaagtggaatgacccaaccaccagagcttctacaaagatgcttgaggatgacctgaagctgagcagtgatgaagatgaccttgagcctgtgaagaccttgaccactcagtgcactgccactgagctctaccaggctgttgaaaaggcaaaacctaggaataatcctgtgaagtaagttattatttttattagttgcaaatgttaattttaacggactcgatgcatgtgaaaaaataaggtcataaaagagaccttggattttgagttaatctctattcatgacaatttaa

SEQ ID NO: 66456 - DNA, 1284 bp, Artificial Sequence
  derived and/or modified sequence
atggacctgttcgacttcttccgggactgggacctggagcagcagtgtcactacgagcaggacagatctgccctgaagaaacgcgagtgggagaggcgcaaccaagaggtccagcaggaggatgacttattctccagcggcttcgatttgtttggcgaaccgtacaaaaccaacaagggcgatgcactggcaaaccgcgtacagaataccctgggtaactacgacgagatgaagaatctcctgactaatcatagcaaccagaatcatttggtcggaatccccaagaactccgtgcctcaaaaccccaataacaaaaatgagccatctttctttccagaacagaaaaatcgtatcattccaccccaccaggataacacccacccaagcgctcccatgcctccaccaagtgtggttattttaaattctacattaatccactctaaccggaagagcaaaccagaatggagtagggattcacacaacccctcaacagtgttagcatcccaagcatccggacaacctaataaaatgcaaacattaactcaggatcaatctcaggccaaacttgaagatttcttcgtctaccctgctgagcagcctcaaatcggggaggtagaggagagtaacccctccgcaaaggaagatagtaatcccaacagcagcggtgaagacgcattcaaagaaatattccagagtaactccccagaggagtccgagtttgcagttcaggcccccgggtcaccccttgtagcatcaagcttgttggctccatcgagtggcctgtcagtgcaaaatttccctcctggcttgtattgtaagacaagcatgggccagcagaagcctaccgcttacgttcgacctatggatggccaagaccaggctcctgacataagtccaactctcaagcctagcatcgaattcgagaacagctttggtaacctaagcttcggtactctcctggatggcaagccatcggctgcttcctctaagacaaaactgcctaaattcaccatcctgcaaacgagcgaggtgagcctaccctccgacccttcttgcgtggaggagattctgcgtgagtcacaacatttgactcccgggttcaccctacagaagtggaacgatccaaccaccagagccagcacaaagatgctggaagacgacctgaagctgtcctcagacgaggatgatttggagcccgtgaagactctcacaacacagtgtacagcaaccgagctgtatcaagcggtcgagaaggccaagcccaggaacaacccagtcaaatag

SEQ ID NO: 66457 - DNA, 1284 bp, Artificial Sequence
  derived and/or modified sequence
atggacttgttcgattttttcagagactgggacttggaacagcagtgccactacgagcaggacagaagtgcattaaagaagcgggaatgggaacgccgaaaccaagaagtgcagcaggaagatgatctgttcagttcagggttcgacctgtttggcgagccttacaaaacgaataaaggtgatgcacttgcgaatcgcgtgcaaaacactttgggaaattacgatgagatgaaaaacctacttacgaaccattccaaccagaatcatctggtgggaatccccaaaaacagcgtgcctcaaaaccccaacaataagaatgaacccagtttttttccagaacagaaaaacaggattattcccccacaccaggacaacacccatcccagcgcccctatgccccctccatctgtggtcattctgaattctaccctaatccatagcaaccgcaagagcaagcccgagtggtctcgggatagtcataatcccagcacagtcctggcatcacaggcttcgggccagcccaataagatgcagactctgacccaggaccaatcccaagccaagcttgaggatttctttgtgtatccagccgaacaacctcaaattggtgaagtggaggaaagcaacccctctgcgaaggaagatagcaatcctaactcatccggagaggacgcttttaaggaaatttttcagagtaacagtcccgaggaaagcgagtttgctgtgcaggccccagggagccccctcgttgcttcaagcctgctggcaccctcctctgggctatccgttcaaaatttccctccaggtctgtactgtaagacctctatggggcagcagaaacccactgcgtatgtacgcccaatggatggtcaggatcaggccccagacattagtccaaccctcaaacctagcatcgagttcgaaaattcttttggaaatctgtcgtttggaacactgctggacggaaaaccatccgcggcaagcagcaagaccaagttgcccaagtttacaatcctccaaacaagtgaggtgagtctgcctagtgatccctcttgcgtggaggaaatactgagagaatcacagcatctgactcccggatttacactccagaagtggaacgatccgacaactcgcgcatccaccaagatgctggaggatgatctcaagctgagttccgatgaggatgacctagagccagtgaagacgctgaccacgcagtgcaccgcaaccgagctttaccaggccgtcgaaaaggccaaaccaaggaataacccggtcaagtag

SEQ ID NO: 66458 - DNA, 1284 bp, Artificial Sequence
  derived and/or modified sequence
atggacctgttcgacttcttcagagactgggacctggagcagcagtgccactacgagcaggacagaagcgccctgaagaagagagagtgggagagaagaaaccaggaggtgcagcaggaggacgacctgttcagcagcggcttcgacctgttcggcgagccctacaagaccaacaagggcgacgccctggccaacagagtgcagaacaccctgggcaactacgacgagatgaagaacctgctgaccaaccacagcaaccagaaccacctggtgggcatccccaagaacagcgtgccccagaaccccaacaacaagaacgagcccagcttcttccccgagcagaagaacagaatcatccccccccaccaggacaacacccaccccagcgcccccatgcccccccccagcgtggtgatcctgaacagcaccctgatccacagcaacagaaagagcaagcccgagtggagcagagacagccacaaccccagcaccgtgctggccagccaggccagcggccagcccaacaagatgcagaccctgacccaggaccagagccaggccaagctggaggacttcttcgtgtaccccgccgagcagccccagatcggcgaggtggaggagagcaaccccagcgccaaggaggacagcaaccccaacagcagcggcgaggacgccttcaaggagatcttccagagcaacagccccgaggagagcgagttcgccgtgcaggcccccggcagccccctggtggccagcagcctgctggcccccagcagcggcctgagcgtgcagaacttcccccccggcctgtactgcaagaccagcatgggccagcagaagcccaccgcctacgtgagacccatggacggccaggaccaggcccccgacatcagccccaccctgaagcccagcatcgagttcgagaacagcttcggcaacctgagcttcggcaccctgctggacggcaagcccagcgccgccagcagcaagaccaagctgcccaagttcaccatcctgcagaccagcgaggtgagcctgcccagcgaccccagctgcgtggaggagatcctgagagagagccagcacctgacccccggcttcaccctgcagaagtggaacgaccccaccaccagagccagcaccaagatgctggaggacgacctgaagctgagcagcgacgaggacgacctggagcccgtgaagaccctgaccacccagtgcaccgccaccgagctgtaccaggccgtggagaaggccaagcccagaaacaaccccgtgaagtag

SEQ ID NO: 66459 - protein, 519 aa, Artificial Sequence
  derived and/or modified sequence
MEWKLERTAPRRVRTEEEMLWESIMRVLSKDLKQKRSQDSANVLDSVNATYSDFKSNFAKRLSAEVPVASSPITTRWQQSQTRALSSDSFGEEQSTTYLPEASGSVLKTPPEKETLTLGSRKEQLKTPSKGISETSNSALHFCKAPHAMDRDWKESVASKGQKCLKQLFVTQNVVQQANGKMQLCEQSECVWKGCKDGVRDESFHLKSSGDINDSILQPEVKIHITGLRNDYYLNILDWSFQNLVAIALGSAVYIWNGENHNGIENIDLSLTCNYISSVSWIKEGTCLAVGTSEGEVQLWDVVTKKRLRNMLGHLSVVGALSWNHFILSSGSRLGRVYHHDVRVAQHHVGTLRHKQAVCALKWSPDGRLLSSGCSDGLLTIWPHDPGASAQGQPLKVITQSTAVKAMDWCPWQSGVLAIGGGMKDGRLHILDINAGKSIQTPSTNSQICSLIWLPKTKEIATGQGTPKNDVTVWTCPTVSRSGGFFGHRGRVLHLSLSPDQTRVFSAAADGTASVWNCY

SEQ ID NO: 66460 - DNA, 1560 bp, Artificial Sequence
  derived and/or modified sequence
atggagtggaagctggagagaaccgcccccagaagagtgagaaccgaggaggagatgctgtgggagagcatcatgagagtgctgagcaaggacctgaagcagaagagaagccaggacagcgccaacgtgctggacagcgtgaacgccacctacagcgacttcaagagcaacttcgccaagagactgagcgccgaggtgcccgtggccagcagccccatcaccaccagatggcagcagagccagaccagagccctgagcagcgacagcttcggcgaggagcagagcaccacctacctgcccgaggccagcggcagcgtgctgaagaccccccccgagaaggagaccctgaccctgggcagcagaaaggagcagctgaagacccccagcaagggcatcagcgagaccagcaacagcgccctgcacttctgcaaggccccccacgccatggacagagactggaaggagagcgtggccagcaagggccagaagtgcctgaagcagctgttcgtgacccagaacgtggtgcagcaggccaacggcaagatgcagctgtgcgagcagagcgagtgcgtgtggaagggctgcaaggacggcgtgagagacgagagcttccacctgaagagcagcggcgacatcaacgacagcatcctgcagcccgaggtgaagatccacatcaccggcctgagaaacgactactacctgaacatcctggactggagcttccagaacctggtggccatcgccctgggcagcgccgtgtacatctggaacggcgagaaccacaacggcatcgagaacatcgacctgagcctgacctgcaactacatcagcagcgtgagctggatcaaggagggcacctgcctggccgtgggcaccagcgagggcgaggtgcagctgtgggacgtggtgaccaagaagagactgagaaacatgctgggccacctgagcgtggtgggcgccctgagctggaaccacttcatcctgagcagcggcagcagactgggcagagtgtaccaccacgacgtgagagtggcccagcaccacgtgggcaccctgagacacaagcaggccgtgtgcgccctgaagtggagccccgacggcagactgctgagcagcggctgcagcgacggcctgctgaccatctggccccacgaccccggcgccagcgcccagggccagcccctgaaggtgatcacccagagcaccgccgtgaaggccatggactggtgcccctggcagagcggcgtgctggccatcggcggcggcatgaaggacggcagactgcacatcctggacatcaacgccggcaagagcatccagacccccagcaccaacagccagatctgcagcctgatctggctgcccaagaccaaggagatcgccaccggccagggcacccccaagaacgacgtgaccgtgtggacctgccccaccgtgagcagaagcggcggcttcttcggccacagaggcagagtgctgcacctgagcctgagccccgaccagaccagagtgttcagcgccgccgccgacggcaccgccagcgtgtggaactgctactag

SEQ ID NO: 66461 - DNA, 1560 bp, Artificial Sequence
  derived and/or modified sequence
atggaatggaagctcgagcgcaccgctcctcggagggtgcgcactgaagaagaaatgctctgggagtccattatgagggtgctaagcaaagatctcaagcaaaaacgctctcaggattccgcaaacgtacttgatagcgtaaacgcgacctactcagatttcaagtcaaactttgctaagcggttatctgccgaagtacctgtggcaagctcccctatcaccacaagatggcagcagagtcaaacccgagccctcagttctgatagctttggggaggagcagagtactacttacctacccgaagcatctgggtccgtacttaaaaccccaccggagaaggagacgcttaccctggggagcaggaaggagcagttgaagacaccaagtaaagggattagcgaaacaagtaattctgccctgcacttttgtaaggcaccacatgcgatggacagggattggaaggaaagcgttgcctcaaagggacaaaagtgcctcaaacagctgttcgtcactcagaacgtggtgcagcaagccaacggcaaaatgcagctatgcgagcagtccgagtgtgtttggaaaggctgtaaggacggagtgagagatgagtcttttcatttgaagtctagtggagacatcaacgacagcatcttacagcccgaagtgaaaatccacatcactggcttgcgaaatgattattatctgaatattctggactggtcctttcagaatctcgtcgctatagccctcggcagcgccgtttacatctggaatggtgaaaatcataatggaatagagaacatcgatctgagcctgacatgcaattacatttccagcgtttcatggattaaggaggggacctgcctcgctgttggcacatcagagggcgaagtacagctatgggacgttgtcacaaaaaagcgcctgcgtaatatgctgggccacttatccgtagtcggcgccctgtcctggaatcacttcattctgagcagcggaagtagactgggacgggtttatcatcatgacgtgcgcgtagcccagcatcatgttggcaccctgcgacataagcaggcggtatgtgcccttaagtggagccctgacggccgccttttgtcttccggatgctcggacgggctacttactatatggccacacgatccaggagcaagcgcgcagggacagccactgaaggtaatcacccaatctactgccgtaaaggccatggactggtgtccttggcagagtggtgtcctagctataggtgggggaatgaaggacgggcgattacatatcttagacattaacgctgggaagtctattcagactccttccaccaactcacagatttgctccctgatctggttgcccaagaccaaagaaattgcaacaggccaaggtaccccgaagaacgacgtcacagtctggacttgtccgaccgtaagtagaagtggcggctttttcgggcaccgcgggcgagtgctgcatctgtctttgagccctgatcagacacgcgtcttcagcgccgctgctgatggcactgcatcagtctggaattgttactag

SEQ ID NO: 66462 - DNA, 1560 bp, Artificial Sequence
  derived and/or modified sequence
atggagtggaagctggagaggacagcccccaggagagtgaggacagaggaggagatgctgtgggagagcatcatgagggtgctgagcaaggacctgaagcagaagaggagccaggacagcgccaacgtgctggacagcgtgaatgccacctacagcgacttcaagagcaactttgccaagaggctgtctgctgaggtgcctgtggccagcagccccatcaccacccgctggcagcagagccagacccgggccctgagcagtgacagctttggagaggagcagagcaccacctacctgcctgaggccagcggctctgtgctgaagaccccacctgagaaggagaccctgaccctgggcagcaggaaggagcagctgaagacccccagcaagggcatcagcgagaccagcaacagcgccctgcacttctgcaaggcccctcatgccatggaccgggactggaaggagagcgtggccagcaagggccagaagtgcctgaagcagctgtttgtgacccagaatgtggtgcagcaggccaacgggaagatgcagctgtgtgagcagagtgaatgtgtgtggaagggctgcaaggatggagtgagagatgagagcttccacctgaagagcagcggggacatcaatgacagcatcctgcagcctgaggtgaagatccacatcaccggcctgagaaatgactactacctgaacatcctggactggagcttccagaacctggtggccatcgccctgggcagcgctgtgtacatctggaatggagagaaccacaacggcattgaaaatattgacctgagcctgacctgcaactacatcagctctgtgtcctggatcaaggagggcacctgcctggccgtgggcaccagcgagggggaggtgcagctgtgggatgtggtgaccaagaagaggctgaggaacatgctgggccacctgtctgtggtgggcgccctgtcctggaaccacttcatcctgagcagcggcagccggctgggccgggtgtaccaccatgatgtgcgggtggcccagcaccacgtgggcaccctgcggcacaagcaggccgtgtgtgccctgaagtggagcccagatggccgcctgctgagcagcggctgcagtgatggcctgctgaccatctggccccatgaccccggggccagcgcccagggccagcccctgaaggtgatcacccagagcacagctgtgaaggccatggactggtgcccctggcagagcggcgtgctggccatcggcggcggcatgaaggatggccgcctgcacatcctggacatcaatgccggcaagagcatccagacccccagcaccaacagccagatctgcagcctcatctggctgcccaagaccaaggagatcgccaccggccagggcacccccaagaatgatgtgacagtgtggacctgccccaccgtgagccgcagcggcggcttcttcggccaccggggccgggtgctgcacctgagcctgagcccagaccagaccagggtcttctctgctgctgctgatggaacagcctctgtgtggaactgctactag

SEQ ID NO: 66463 - DNA, 1560 bp, Artificial Sequence
  derived and/or modified sequence
atggagtggaagctggagcggaccgccccccggcgggtgcggaccgaggaagaaatgctctgggaatccataatgcgagtgctgtcgaaggatttgaagcagaagagaagccaggactctgcaaatgtgctcgatagcgtcaatgctacttattcagacttcaagagtaactttgcaaaacgactgagcgctgaagtgcccgtagcaagcagtccaattaccactaggtggcagcagagccagactagggctctgtcctcggatagcttcggcgaggaacagagcacgacttacctgccagaggccagcggatcagtgctcaagactccaccagaaaaagagacactgacactcgggtccaggaaagaacagctgaaaacccccagcaaagggattagcgagaccagcaactccgcactgcacttttgtaaagctccacacgctatggacagagattggaaagagtctgtggcctcaaagggccaaaaatgcttgaagcagcttttcgtgacgcagaatgttgtgcagcaggcaaatgggaaaatgcagctctgcgaacagagcgaatgcgtttggaagggttgcaaagatggtgtgcgtgacgagtcattccatcttaagagcagcggggatattaacgatagtattttgcaacctgaggtgaagatccatatcactggactgaggaatgattattacctgaacattctcgattggagttttcaaaaccttgtagcaatcgcacttggatccgccgtttatatctggaacggcgaaaatcataatggaatcgagaatattgacctctcgctgacttgcaattacatctcatccgtgagctggataaaggagggaacctgtcttgcagtcggaacctctgagggagaggtgcagctttgggatgtcgtgacgaagaagaggctacgcaatatgctgggtcacctgtcagtggtcggcgccctgagttggaaccatttcatcctaagttccggtagccgcctcggacgggtgtaccaccatgatgttagggtcgcacagcatcacgttggcactctgagacacaagcaggcagtgtgtgcattaaagtggagtcccgatggtaggctgttaagcagtggctgtagcgacggcctcctgaccatttggccccatgacccaggcgctagcgcacagggccagcccctaaaagtcatcacacagtccaccgcggtcaaagctatggactggtgcccttggcagagcggtgtcctggcaatcggcggtggtatgaaagacggtcggctgcacatcttggacattaatgccggcaagtccatccagacacccagcacaaatagtcagatatgcagcttgatatggttacctaagaccaaggagatagctaccggccaagggaccccaaagaacgacgtgactgtgtggacctgtcccacagtcagcaggagtggggggttctttggacatagggggagagttctgcatctgagcttgtctcccgaccagacacgagtcttttccgctgccgccgatgggaccgcatctgtttggaattgttactag

SEQ ID NO: 66464 - DNA, 1560 bp, Artificial Sequence
  derived and/or modified sequence
atggagtggaagctcgaacggaccgcccctcgacgcgtgcgaaccgaggaggagatgctgtgggaatctataatgagggtgctgtctaaagacctgaaacagaagcgctcccaagacagtgccaacgtgttggattcagttaacgccacttacagcgattttaaatccaattttgccaagagattgtcagccgaggtgcccgtcgccagtagtcctattacaacccggtggcagcagagccaaacgcgagcactcagctccgattccttcggcgaggagcagtcgaccacttatctccctgaagccagtggttcagtactgaaaactccccctgaaaaagaaacactgactctcggtagccggaaggagcaactgaagaccccgtccaaggggatttctgagacatccaatagcgcgctgcacttctgcaaggcgcctcacgccatggaccgtgattggaaggaaagcgtggcctccaagggacaaaaatgtctaaagcagcttttcgttactcagaacgtggtgcagcaagcgaatgggaagatgcaactctgtgagcagagcgaatgtgtgtggaaggggtgtaaagacggagtccgagacgaatccttccaccttaagagttctggggatataaacgacagtatcctgcagcccgaggtgaaaattcatattacagggctccgcaatgattactacctgaatatcctggactggtcattccaaaatcttgtcgctattgcactggggtcggccgtatacatctggaatggcgagaatcataacggcattgagaacattgatctgtccctgacatgtaattatatctcaagcgtgtcttggatcaaagagggtacctgtcttgcggttggaacttctgagggcgaagtccaattatgggatgtagtcaccaaaaagaggctccgtaacatgctagggcacctatcggttgtaggggctctgagttggaaccactttatccttagctcgggctcccggctcggacgcgtctaccaccatgacgtgcgtgtggcgcagcaccatgtcggaacgctacgacataagcaggccgtgtgcgcccttaagtggagcccggacggacggcttctgtccagcggctgctcagatggccttctgaccatctggcctcatgaccccggagcgtctgcgcagggccaaccgctgaaggtaatcactcaaagcactgccgtgaaggctatggattggtgtccttggcagtccggcgtgttagccattggaggcggaatgaaggacggccgtctgcacattctcgatattaacgcgggaaagtctattcagacaccatccactaatagccagatctgcagtctcatctggctgcctaagacgaaggagattgcaactggacagggcaccccgaaaaacgacgttaccgtgtggacatgcccaacagtgtcacggagcggcggattctttggtcataggggacgggttcttcatcttagtctgtcaccagaccagacgcgcgtcttctcggcggcagctgacggcaccgcatctgtgtggaattgttattag

SEQ ID NO: 66465 - DNA, 3070 bp, Artificial Sequence
  derived and/or modified sequence
gcagcggcggtgggaggagtgggggacctggagggaggtggtgaaatagaatggtcctgggggacgggactccaggggtttgacgattaggcgtcaagactgacttagacctgggaagaaaaccagaggcagtcgagcagagaggccaaacgccaggcagggcgaagtcagccggagatggagtggaaactggagcgcaccgcgcctcggagggtccgcacggaagaggagatgctgtgggaaagtatcatgcgtgtgctctccaaagacttgaagcagaagagaagtcaagattccgccaacgtactcgattcagttaatgctacgtattctgactttaagagcaactttgcgaagaggctgtccgcagaggttcctgttgcgagtagccccattaccacaaggtggcagcaaagtcaaactagggctctgtcctctgattcctttggggaagagcagtcaaccacctacctcccagaagcttccggatcagtgctgaagacaccgcctgagaaagagaccttgactctaggatcccgcaaagaacaactgaagacccccagcaaaggaatttctgaaacaagtaactctgctctccatttttgcaaggcacctcatgcaatggacagagactggaaagaaagtgttgcctcaaaagggcagaaatgcctaaaacaactctttgtaacccagaacgtggttcagcaggctaatggaaaaatgcagctctgtgagcaatccgaatgtgtttggaaaggctgcaaagatggagtcagagatgaatccttccatcttaaaagttctggtgatataaacgattccatactccaaccagaggtgaagattcatattactggtcttcgaaatgactactatctgaatatcctagattggagttttcagaatcttgttgccatagccctgggctctgctgtatacatctggaatggggagaaccacaatgggattgaaaacatagacttaagtctcacttgtaactatatctcttctgtgtcctggataaaagagggaacttgcctggcagttggcaccagcgagggagaagtgcaattatgggatgtggtaactaaaaagcggctgagaaatatgcttggtcatttgtcagtagttggggctctgagctggaatcactttatcctcagcaggctggagttcagtggcgtgatctcagctcactgcaacctccacctcccgagtagctgggactacaggcgcccaccaccatgcctggtgggtcaagactggggcgtgtttatcatcacgatgttcgggtagcccagcatcatgttggaacacttcgccacaagcaagctgtgtgtgctctgaagtggtcaccggatggcaggctgctttccagcggctgcagtgatggactgctgacaatatggccccacgatccaggtgccagtgcacagggccaaccgctgaaagtcataacccagtctacggcagtcaaggccatggattggtgtccctggcagtctggggtccttgccattggaggaggaatgaaggatggacgcttacacatcttggatataaatgctgggaagagcatccagaccccaagcacaaactcacagatttgttccttaatctggctacctaagacaaaggagattgcaactggtcaaggtactcccaagaatgatgtgactgtgtggacctgtcccactgtgtccaggtcaggtgggttttttggccacaggggcagagtgctgcacctgtctttgagtccagaccagacccgggtgttttctgctgcagctgatgggacggcctctgtatggaattgctactagcacccagcccctctaggtttcagtttccttatttctgagtgaagatgatgatgttggctatgtcttctccatggggtttttatgagtatcaaacaagttgaaatactcttcttgatgtgaatgcctgttctcctgttcttcttttgcagattgctttacttgctctgcttcccagagatccgcttcttttcttctctgctttcttctttctgcccctcttcctccccctcctcttcttcctcccattcttacccctttctagagattcattttcactactttattcagaataacatctatagcaaagatttctacttctttcccgtatgacttttctccccagctccaaacctcatatttctgattgcctcaggatagttcccttttgagatactttcctgtctttagctcaatctcaacacattgaaaacacaactcattcacttgaaaaacacttactaaaatctcactatatgctaggcagtatgttaagcatgcatattgctctctctaaaaatcagttctgtaggaatccctttcccctcctgatggtctcatccttatcctggtctcccactcagggaacctcctgattattctgctctgtgcttcctcagttcaccctttgctctcttttcttttgcttcacctagtcacatcctgtgtgcctgacagccagtctgctgtaattgtcttagaactgatcctcttgactccacaccactgctaggttgaacatctaaaagtcctgtgctgatcctctcagtcccctgctcatcaactctcaaggacaacctattaccaaacacctttgacctcaacctctggagtcctcagcccaggacttgaagttaggagatctttttttgccttggctctgccataaatacaccctgtaaccttggatgtgttgcaacatctgcaaggataggaatttgatcactgctaaggttccttcaaacttgatcagttcgctgttctgtcttttgaatgttaattcacattcatctcctatattaagactttggctaagtcttgtgatttcttgccttattggagcttttcttctaatctgaattcttgcttctctctccttttcctttacacacccacacaagtcctaacctctccaggaagtgttttgaaatgatgttacctgggtttgagttcttggcattagcctgtatcatctatttggtattattatactattatagctgtttaaaaaaatcttttattactgtttg

SEQ ID NO: 66466 - DNA, 2591 bp, Artificial Sequence
  derived and/or modified sequence
agggaggtggtgaaatagaatggtcctgggggacgggactccaggggtttgacgattaggcgtcaagactgacttagacctgggaagaaaaccagaggcagtcgagcagagaggccaaacgccaggcagggcgaagtcagccggagatggagtggaaactggagcgcaccgcgcctcggagggtccgcacggaagaggagatgctgtgggaaagtatcatgcgtgtgctctccaaagacttgaagcagaagagaagtcaagattccgccaacgtactcgattcagttaatgctacgtattctgactttaagagcaactttgcgaagaggctgtccgcagaggttcctgttgcgagtagccccattaccacaaggtggcagcaaagtcaaactagggctctgtcctctgattcctttggggaagagcagtcaaccacctacctcccagaagcttccggatcagtgctgaagacaccgcctgagaaagagaccttgactctaggatcccgcaaagaacaactgaagacccccagcaaaggaatttctgaaacaagtaactctgctctccatttttgcaaggcacctcatgcaatggacagagactggaaagaaagtgttgcctcaaaagggcagaaatgcctaaaacaactctttgtaacccagaacgtggttcagcaggctaatggaaaaatgcagctctgtgagcaatccgaatgtgtttggaaaggctgcaaagatggagtcagagatgaatccttccatcttaaaagttctggtgatataaacgattccatactccaaccagaggtgaagattcatattactggtcttcgaaatgactactatctgaatatcctagattggagttttcagaatcttgttgccatagccctgggctctgctgtatacatctggaatggggagaaccacaatgggattgaaaacatagacttaagtctcacttgtaactatatctcttctgtgtcctggataaaagagggaacttgcctggcagttggcaccagcgagggagaagtgcaattatgggatgtggtaactaaaaagcggctgagaaatatgcttggtcatttgtcagtagttggggctctgagctggaatcactttatcctcagcagtgggtcaagactggggcgtgtttatcatcacgatgttcgggtagcccagcatcatgttggaacacttcgccacaagcaagctgtgtgtgctctgaagtggtcaccggatggcaggctgctttccagcggctgcagtgatggactgctgacaatatggccccacgatccaggtgccagtgcacagggccaaccgctgaaagtcataacccagtctacggcagtcaaggccatggattggtgtccctggcagtctggggtccttgccattggaggaggaatgaaggatggacgcttacacatcttggatataaatgctgggaagagcatccagaccccaagcacaaactcacagatttgttccttaatctggctacctaagacaaaggagattgcaactggtcaaggtactcccaagaatgatgtgactgtgtggacctgtcccactgtgtccaggtcaggtgggttttttggccacaggggcagagtgctgcacctgtctttgagtccagaccagacccgggtgttttctgctgcagctgatgggacggcctctgtatggaattgctactagcacccagcccctctaggtttcagtttccttatttctgagtgaagatgatgatgttggctatgtcttctccatggggtttttatgagtatcaaacaagttgaaatactcttcttgatgtgaatgcctgttctcctgttcttcttttgcagattgctttacttgctctgcttcccagagatccgcttcttttcttctctgctttcttctttctgcccctcttcctccccctcctcttcttcctcccattcttacccctttctagagattcattttcactactttattcagaataacatctatagcaaagatttctacttctttcccgtatgacttttctccccagctccaaacctcatatttctgattgcctcaggatagttcccttttgagatactttcctgtctttagctcaatctcaacacattgaaaacacaactcattcacttgaaaaacacttactaaaatctcactatatgctaggcagtatgttaagcatgcatattgctctctctaaaaatcagttctgtaggaatccctttcccctcctgatggtctcatccttatcctggtctcccactcagggaacctcctgattattctgctctgtgcttcctcagttcaccctttgctctcttttcttttgcttcacctagtcacatcctgtgtgcctgacagccagtctgctgtaattgtcttagaactgatcctcttgactccacaccactgctaggttgaacatctaaaagtcctgtgctgatcctctcagtcccctgctcatcaactctcaaggacaacctattaccaaacacctttgacctcaacctctggagtcctcagcccaggacttgaagttaggagatctttttttgccttggctctgccata

SEQ ID NO: 66467 - protein, 1020 aa, Artificial Sequence
  derived and/or modified sequence
MEELIWEQYTVTLQKDSKRGFGIAVSGGRDNPHFENGETSIVISDVLPGGPADGLLQENDRVVMVNGTPMEDVLHSFAVQQLRKSGKVAAIVVKRPRKVQVAALQASPPLDQDDRAFEVMDEFDGRSFRSGYSERSRLNSHGGRSRSWEDSPERGRPHERARSRERDLSRDRSRGRSLERGLDQDHARTRDRSRGRSLERGLDHDFGPSRDRDRDRSRGRSIDQDYERAYHRAYDPDYERAYSPEYRRGARHDARSRGPRSRSREHPHSRSPSPEPRGRPGPIGVLLMKSRANEEYGLRLGSQIFVKEMTRTGLATKDGNLHEGDIILKINGTVTENMSLTDARKLIEKSRGKLQLVVLRDSQQTLINIPSLNDSDSEIEDISEIESNRSFSPEERRHQYSDYDYHSSSEKLKERPSSREDTPSRLSRMGATPTPFKSTGDIAGTVVPETNKEPRYQEDPPAPQPKAAPRTFLRPSPEDEAIYGPNTKMVRFKKGDSVGLRLAGGNDVGIFVAGIQEGTSAEQEGLQEGDQILKVNTQDFRGLVREDAVLYLLEIPKGEMVTILAQSRADVYRDILACGRGDSFFIRSHFECEKETPQSLAFTRGEVFRVVDTLYDGKLGNWLAVRIGNELEKGLIPNKSRAEQMASVQNAQRDNAGDRADFWRMRGQRSGVKKNLRKSREDLTAVVSVSTKFPAYERVLLREAGFKRPVVLFGPIADIAMEKLANELPDWFQTAKTEPKDAGSEKSTGVVRLNTVRQIIEQDKHALLDVTPKAVDLLNYTQWFPIVIFFNPDSRQGVKTMRQRLNPTSNKSSRKLFDQANKLKKTCAHLFTATINLNSANDSWFGSLKDTIQHQQGEAVWVSEGKMEGMDDDPEDRMSYLTAMGADYLSCDSRLISDFEDTDGEGGAYTDNELDEPAEEPLVSSITRSSEPVQHEEIEIAQKHPDIYAVPIKTHKPDPGTPQHTSSRPPEPQKAPSRPYQDTRGSYGSDAEEEEYRQQLSEHSKRGYYGQSARYRDTEL

SEQ ID NO: 66468 - protein, 1157 aa, Artificial Sequence
  derived and/or modified sequence
MKTAQALHRMWIQAVKKLRRWKGRAPGMEELIWEQYTVTLQKDSKRGFGIAVSGGRDNPHFENGETSIVISDVLPGGPADGLLQENDRVVMVNGTPMEDVLHSFAVQQLRKSGKVAAIVVKRPRKVQVAALQASPPLDQDDRAFEVMDEFDGRSFRSGYSERSRLNSHGGRSRSWEDSPERGRPHERARSRERDLSRDRSRGRSLERGLDQDHARTRDRSRGRSLERGLDHDFGPSRDRDRDRSRGRSIDQDYERAYHRAYDPDYERAYSPEYRRGARHDARSRGPRSRSREHPHSRSPSPEPRGRPGPIGVLLMKSRANEEYGLRLGSQIFVKEMTRTGLATKDGNLHEGDIILKINGTVTENMSLTDARKLIEKSRGKLQLVVLRDSQQTLINIPSLNDSDSEIEDISEIESNRSFSPEERRHQYSDYDYHSSSEKLKERPSSREDTPSRLSRMGATPTPFKSTGDIAGTVVPETNKEPRYQEDPPAPQPKAAPRTFLRPSPEDEAIYGPNTKMVRFKKGDSVGLRLAGGNDVGIFVAGIQEGTSAEQEGLQEGDQILKVNTQDFRGLVREDAVLYLLEIPKGEMVTILAQSRADVYRDILACGRGDSFFIRSHFECEKETPQSLAFTRGEVFRVVDTLYDGKLGNWLAVRIGNELEKGLIPNKSRAEQMASVQNAQRDNAGDRADFWRMRGQRSGVKKNLRKSREDLTAVVSVSTKFPAYERVLLREAGFKRPVVLFGPIADIAMEKLANELPDWFQTAKTEPKDAGSEKSTGVVRLNTVRQIIEQDKHALLDVTPKAVDLLNYTQWFPIVIFFNPDSRQGVKTMRQRLNPTSNKSSRKLFDQANKLKKTCAHLFTATINLNSANDSWFGSLKDTIQHQQGEAVWVSEGKMEGMDDDPEDRMSYLTAMGADYLSCDSRLISDFEDTDGEGGAYTDNELDEPAEEPLVSSITRSSEPVQHEEAKTQNKEESYDFSKSYEYKSNPSAVAGNETPGASTKGYPPPVAAKPTFGRSILKPSTPIPPQEGEEVGESSEEQDNAPKSVLGKVKIFEKMDHKARLQRMQELQEAQNARIEIAQKHPDIYAVPIKTHKPDPGTPQHTSSRPPEPQKAPSRPYQDTRGSYGSDAEEEEYRQQLSEHSKRGYYGQSARYRDTEL

SEQ ID NO: 66469 - DNA, 3474 bp, Artificial Sequence
  derived and/or modified sequence
atgaagaccgcccaggccctgcacagaatgtggatccaggccgtgaagaagctgagaagatggaagggcagagcccccggcatggaggagctgatctgggagcagtacaccgtgaccctgcagaaggacagcaagagaggcttcggcatcgccgtgagcggcggcagagacaacccccacttcgagaacggcgagaccagcatcgtgatcagcgacgtgctgcccggcggccccgccgacggcctgctgcaggagaacgacagagtggtgatggtgaacggcacccccatggaggacgtgctgcacagcttcgccgtgcagcagctgagaaagagcggcaaggtggccgccatcgtggtgaagagacccagaaaggtgcaggtggccgccctgcaggccagcccccccctggaccaggacgacagagccttcgaggtgatggacgagttcgacggcagaagcttcagaagcggctacagcgagagaagcagactgaacagccacggcggcagaagcagaagctgggaggacagccccgagagaggcagaccccacgagagagccagaagcagagagagagacctgagcagagacagaagcagaggcagaagcctggagagaggcctggaccaggaccacgccagaaccagagacagaagcagaggcagaagcctggagagaggcctggaccacgacttcggccccagcagagacagagacagagacagaagcagaggcagaagcatcgaccaggactacgagagagcctaccacagagcctacgaccccgactacgagagagcctacagccccgagtacagaagaggcgccagacacgacgccagaagcagaggccccagaagcagaagcagagagcacccccacagcagaagccccagccccgagcccagaggcagacccggccccatcggcgtgctgctgatgaagagcagagccaacgaggagtacggcctgagactgggcagccagatcttcgtgaaggagatgaccagaaccggcctggccaccaaggacggcaacctgcacgagggcgacatcatcctgaagatcaacggcaccgtgaccgagaacatgagcctgaccgacgccagaaagctgatcgagaagagcagaggcaagctgcagctggtggtgctgagagacagccagcagaccctgatcaacatccccagcctgaacgacagcgacagcgagatcgaggacatcagcgagatcgagagcaacagaagcttcagccccgaggagagaagacaccagtacagcgactacgactaccacagcagcagcgagaagctgaaggagagacccagcagcagagaggacacccccagcagactgagcagaatgggcgccacccccacccccttcaagagcaccggcgacatcgccggcaccgtggtgcccgagaccaacaaggagcccagataccaggaggacccccccgccccccagcccaaggccgcccccagaaccttcctgagacccagccccgaggacgaggccatctacggccccaacaccaagatggtgagattcaagaagggcgacagcgtgggcctgagactggccggcggcaacgacgtgggcatcttcgtggccggcatccaggagggcaccagcgccgagcaggagggcctgcaggagggcgaccagatcctgaaggtgaacacccaggacttcagaggcctggtgagagaggacgccgtgctgtacctgctggagatccccaagggcgagatggtgaccatcctggcccagagcagagccgacgtgtacagagacatcctggcctgcggcagaggcgacagcttcttcatcagaagccacttcgagtgcgagaaggagaccccccagagcctggccttcaccagaggcgaggtgttcagagtggtggacaccctgtacgacggcaagctgggcaactggctggccgtgagaatcggcaacgagctggagaagggcctgatccccaacaagagcagagccgagcagatggccagcgtgcagaacgcccagagagacaacgccggcgacagagccgacttctggagaatgagaggccagagaagcggcgtgaagaagaacctgagaaagagcagagaggacctgaccgccgtggtgagcgtgagcaccaagttccccgcctacgagagagtgctgctgagagaggccggcttcaagagacccgtggtgctgttcggccccatcgccgacatcgccatggagaagctggccaacgagctgcccgactggttccagaccgccaagaccgagcccaaggacgccggcagcgagaagagcaccggcgtggtgagactgaacaccgtgagacagatcatcgagcaggacaagcacgccctgctggacgtgacccccaaggccgtggacctgctgaactacacccagtggttccccatcgtgatcttcttcaaccccgacagcagacagggcgtgaagaccatgagacagagactgaaccccaccagcaacaagagcagcagaaagctgttcgaccaggccaacaagctgaagaagacctgcgcccacctgttcaccgccaccatcaacctgaacagcgccaacgacagctggttcggcagcctgaaggacaccatccagcaccagcagggcgaggccgtgtgggtgagcgagggcaagatggagggcatggacgacgaccccgaggacagaatgagctacctgaccgccatgggcgccgactacctgagctgcgacagcagactgatcagcgacttcgaggacaccgacggcgagggcggcgcctacaccgacaacgagctggacgagcccgccgaggagcccctggtgagcagcatcaccagaagcagcgagcccgtgcagcacgaggaggccaagacccagaacaaggaggagagctacgacttcagcaagagctacgagtacaagagcaaccccagcgccgtggccggcaacgagacccccggcgccagcaccaagggctaccccccccccgtggccgccaagcccaccttcggcagaagcatcctgaagcccagcacccccatccccccccaggagggcgaggaggtgggcgagagcagcgaggagcaggacaacgcccccaagagcgtgctgggcaaggtgaagatcttcgagaagatggaccacaaggccagactgcagagaatgcaggagctgcaggaggcccagaacgccagaatcgagatcgcccagaagcaccccgacatctacgccgtgcccatcaagacccacaagcccgaccccggcaccccccagcacaccagcagcagaccccccgagccccagaaggcccccagcagaccctaccaggacaccagaggcagctacggcagcgacgccgaggaggaggagtacagacagcagctgagcgagcacagcaagagaggctactacggccagagcgccagatacagagacaccgagctgtag

SEQ ID NO: 66470 - DNA, 3474 bp, Artificial Sequence
  derived and/or modified sequence
atgaaaaccgcccaggcccttcatcggatgtggatacaagccgtaaaaaaactccgacgctggaagggcagagcccccggtatggaggaactgatttgggaacaatatacggtcacattgcagaaggatagtaagagaggttttggaattgccgttagtgggggaagggacaacccccattttgagaatggagagacatcgatagtgatcagcgatgttttaccaggagggcctgctgacggcctgctgcaagagaacgaccgcgttgtgatggttaacggaactcctatggaagacgttttgcacagttttgcagtgcaacagctccggaagtccggcaaggtagccgccatcgtggtgaagaggccacgcaaggtccaggtcgccgccctgcaggctagccccccactggatcaggatgatcgggcttttgaggttatggatgaatttgacgggaggtctttccgctctggatacagtgagcgaagtcggctgaacagtcacggcggaaggagtcgatcctgggaggatagcccggagcgtggcagacctcatgaacgcgctagatcacgtgagagggacctctctagggacagatcccgcgggcggtcccttgagcgggggctggaccaggatcacgctcgtacccgcgacaggtcacgaggtcgatctctggaaagaggcctagaccatgattttggtccatctagagacagagaccgtgatcggtcccgaggaaggtcaatcgatcaggattatgaaagagcataccaccgggcatatgatcctgactacgaacgggcttatagtccagagtatcgccggggcgctaggcacgatgcgaggtctagggggcctagatcccggagcagagagcaccctcacagcagatccccctctcccgagcctcgggggcgacctgggccaatcggcgtgctgctcatgaagtctagggccaatgaagaatacggccttaggctggggtcccagatcttcgtgaaggagatgacccgtacggggttggccacgaaggatggcaacctgcacgagggagatattattctgaaaatcaatggcacagtgaccgaaaacatgagtctgacagatgctcgcaaactcattgagaagagcagagggaaactgcaattggtggtgttgcgggacagtcaacagactctaatcaacatcccttccctgaacgattcagatagtgaaatcgaggacattagcgagattgagagtaatcgaagcttctccccagaagagcggcggcaccagtactccgactatgactaccactcaagctccgagaagctcaaggaacgcccctcctcacgcgaggacactcctagccgcctctcccggatgggcgccacacccaccccctttaagtcgacgggggacatcgcggggacagtggtgccagaaaccaacaaagaacctaggtaccaagaggaccctccagccccacaaccaaaggctgccccaaggacgtttttgcgaccctcacccgaggatgaagcgatttacggacctaataccaagatggtgcgctttaaaaagggagatagcgtagggctcagactggctggcggaaatgatgtggggatcttcgtggctggaatccaggagggtacgagcgccgaacaggagggcttgcaggaaggtgatcagatcctcaaggtgaatactcaggacttccggggtcttgtgcgggaagatgcagtcctataccttctagaaattcctaagggagaaatggtgaccattctcgcacagtcacgggctgatgtttatagggacatcctggcctgcggaaggggcgacagctttttcatccgctcccattttgagtgcgaaaaagaaacaccgcagtctctcgcttttacacgcggtgaagtgtttcgagtggtcgataccctctacgacgggaagttgggtaattggctggccgttcgcattggaaatgaactggagaaaggactgatcccaaacaaaagccgggccgagcagatggcatccgtgcagaatgctcaacgagataacgctggggatcgcgcggatttttggcgcatgcgggggcaacgtagcggagtgaaaaagaatctgcggaaatcccgggaggacctgacggccgtcgtgagcgtttccaccaagtttcccgcttacgagcgtgttcttctacgcgaagccgggtttaaacggccagtggtgttgttcggaccgattgcagacatcgctatggagaagctggccaacgaattgcccgactggtttcagaccgcaaagacggaaccaaaagacgccggaagtgaaaaaagtactggagtggtgcggctaaataccgtacgacaaatcatcgagcaggataagcacgccttactcgacgttacacccaaggctgtggacctcctgaattatactcaatggtttcccatagtcatttttttcaatcccgattctagacaaggagtgaagaccatgaggcagcggcttaaccccactagtaataagtccagcaggaagttatttgatcaggcaaataaacttaaaaaaacgtgtgcacatctttttaccgcaaccataaacttgaattctgctaatgattcctggtttggctcgctgaaggataccatacagcatcagcagggcgaagctgtatgggtttctgaaggtaagatggagggaatggacgacgacccggaggaccgaatgagctacctaaccgctatgggtgccgactacctgagttgtgacagcagattgatctcggacttcgaggataccgacggggagggaggagcttatactgacaacgagcttgacgaaccagccgaagagcctctcgtgagctcgattactcggagttctgagcccgtccagcatgaggaggctaagacacaaaacaaagaagaatcttacgatttcagcaaatcttacgaatacaagagcaaccccagcgcagtcgccgggaatgagacaccgggcgccagcactaaagggtacccacctccggtggccgctaagccaacattcggcagaagcatattaaaaccatcgaccccaatcccgcctcaagagggcgaggaagtaggggagagctctgaggagcaggataacgcccctaagtctgtcctggggaaggtcaagattttcgaaaaaatggatcacaaggcgcggctccagcgtatgcaagagctccaagaagcccagaatgcccggatcgaaatcgctcagaagcaccccgacatctacgccgtgcccattaaaacccacaaaccagaccccggtacccctcaacacacgagctcccggccacccgagcctcaaaaagccccctccagaccatatcaggacactcgcggcagttatggttcagacgccgaggaggaagagtatagacagcagctctcagagcatagcaagagaggctattatggacaatccgccagatatcgggatacagagctgtag

SEQ ID NO: 66471 - DNA, 3474 bp, Artificial Sequence
  derived and/or modified sequence
atgaagacagcccaggccctgcacaggatgtggatccaggccgtgaagaagctgcggcgctggaagggccgggcccctggcatggaggagctgatctgggagcagtacacagtgaccctgcagaaggacagcaagaggggcttcggcattgctgtgtctgggggccgggacaacccccactttgaaaatggagagaccagcatcgtcatcagtgatgtgctgcccggcggccctgcagatggcctgctgcaggagaatgacagagtggtgatggtgaatggcacccccatggaggatgtgctgcacagctttgctgtgcagcagctgaggaagagcggcaaggtggccgccatcgtggtgaagaggcccaggaaggtgcaggtggccgccctgcaggccagcccccccctggaccaggatgaccgggcctttgaggtgatggatgaatttgatggccgctccttccgcagcggctacagcgagaggagccggctgaacagccacggcggccgcagccgctcctgggaggacagccctgagcggggccggccccatgagcgggcccggagccgggagcgggacctgagccgggacaggagccggggccgcagcctggagcggggcctggaccaggaccacgcccggacccgggacaggagccggggccgcagcctggagcggggcctggaccatgactttggccccagccgggaccgggaccgggacaggagccggggccgcagcattgaccaggactatgagcgggcctaccaccgggcctatgaccctgactatgagcgggcctacagccctgagtaccgccgcggggcccggcatgatgcccggagccggggccccaggagccgcagccgggagcacccccacagccgcagccccagccctgagccccggggccggcccggccccatcggcgtgctgctgatgaagagccgggccaatgaggagtatggcctgcggctgggcagccagatctttgtgaaggagatgaccaggacaggcctggccaccaaggatggcaacctgcatgaaggagacatcatcctgaagatcaatggcaccgtgacagagaacatgagcctgacagatgccaggaagctgattgagaagagccggggcaagctgcagctggtggtgctgcgggacagccagcagaccctcatcaacatccccagcctgaatgacagcgacagcgagattgaggacatcagcgagattgagagcaacagaagcttcagccctgaggagaggaggcaccagtacagcgactatgactaccacagcagcagcgagaagctgaaggagcggcccagcagccgggaggacacccccagccggctgagcaggatgggcgccacccccacccccttcaagagcactggagacattgctggcaccgtggtgcctgagaccaacaaggagccccgctaccaggaggaccccccagccccccagcccaaggccgcccccaggaccttcctgcggcccagcccagaagatgaggccatctacggccccaacaccaagatggtgcgcttcaagaagggggacagcgtgggcctgcggctggccggcggcaatgatgtgggcatctttgtggccggcatccaggagggcaccagcgctgagcaggagggcctgcaggagggggaccagatcctgaaggtgaacacccaggacttccggggcctggtgagagaagatgctgtgctgtacctgctggagatccccaagggggagatggtgaccatcctggcccagagcagagcagatgtgtacagagacatcctggcctgtggccgcggggacagcttcttcatccgcagccactttgaatgtgagaaggagaccccccagagcctggccttcaccagaggagaggtgttccgggtggtggacaccctgtatgatggcaagctgggcaactggctggccgtgagaattggaaatgagctggagaagggcctcatccccaacaagagcagagctgagcagatggcctctgtgcagaatgcccagagggacaatgctggggacagagctgacttctggaggatgaggggccagaggtctggagtgaagaagaacctgaggaagagccgggaggacctgacagctgtggtgtctgtgtccaccaagtttcctgcctatgagcgggtgctgctgcgggaggccggcttcaagaggcctgtggtgctgtttggccccatcgctgacatcgccatggagaagctggccaatgagctgcctgactggttccagacagccaagacagagcccaaggatgctggcagcgagaagagcactggagtggtgcggctgaacacagtgcggcagatcatcgagcaggacaagcacgccctgctggatgtgacccccaaggctgtggacctgctgaactacacccagtggttccccatcgtcatcttcttcaacccagacagccggcagggcgtgaagaccatgaggcagaggctgaaccccaccagcaacaagagcagcaggaagctgtttgaccaggccaacaagctgaagaagacctgtgcccacctgttcaccgccaccatcaacctgaacagcgccaatgacagctggtttggcagcctgaaggacaccatccagcaccagcagggcgaggccgtgtgggtgtctgagggcaagatggagggcatggatgatgatcctgaggacaggatgagctacctgacagccatgggcgctgactacctgagctgtgacagccgcctcatcagtgactttgaggacacagatggagagggcggggcctacacagacaatgagctggatgagcctgctgaggagcccctggtgagcagcatcaccaggagcagcgagcctgtgcagcacgaggaggccaagacccagaacaaggaggagagctatgacttcagcaagagctatgagtacaagagcaaccccagcgctgtggccggaaatgagacccctggggccagcaccaagggctacccacctcctgtggccgccaagcccaccttcggccgcagcatcctgaagcccagcacccccatccccccccaggagggggaggaggtgggggagagcagcgaggagcaggacaatgcccccaagtctgtgctgggcaaggtgaagatctttgagaagatggaccacaaggcccggctgcagaggatgcaggagctgcaggaggcccagaatgccagaattgaaattgcccagaagcacccagacatctatgctgtgcccatcaagacccacaagccagaccccggcaccccccagcacaccagcagccggcccccagagccccagaaggcccccagccggccctaccaggacacccggggcagctatggcagtgatgctgaggaggaggagtaccggcagcagctgtctgagcacagcaagaggggctactacggccagagcgcccgctacagagacacagagctgtag

SEQ ID NO: 66472 - DNA, 3474 bp, Artificial Sequence
  derived and/or modified sequence
atgaagaccgcccaggccctgcaccggatgtggatccaggccgtgaaaaaactgcgaagatggaaggggcgcgcaccaggaatggaggagctgatctgggagcagtacactgtaacactccagaaggattctaaacgtggctttggtatcgcagtgtcaggcggccgagataacccacatttcgagaacggtgagacgtctatcgtcatcagcgatgttctgcccgggggacccgcggatggcctattgcaggaaaatgaccgagtcgtcatggtcaatggtactcctatggaagacgtcctccactcctttgctgtacaacagcttcgcaaaagcgggaaggtggccgccattgtggtgaaaagaccgcgaaaggtgcaagtggccgcactgcaggcttcacccccacttgaccaggatgacagggcttttgaagtgatggatgaattcgatggcagatcttttcgctctggttactccgaaagaagcagacttaattcccacgggggtagaagccggtcgtgggaggactcgcctgaaagaggcaggccccacgagagggctagaagccgggaaagggatctcagtcgtgacaggtctcgaggtcggtccttggaaagggggttagaccaggatcacgcccgcacccgcgatcggtctagaggacgcagtctggagcgaggtctggatcacgactttggacccagcagggacagggacagagataggtcccggggccgatccatcgaccaggactacgagagagcctatcatagagcttacgaccctgattatgaaagggcctactcgcccgagtatagaaggggagcacgccacgatgctaggtctcggggccccagatctagaagcagagagcacccccattcccgctcccctagcccagagccccgaggccgcccaggacccatcggcgtacttctaatgaaatcccgcgctaacgaggagtatggactgagactgggcagccagatcttcgtgaaggagatgacgaggactgggctggcgactaaggatggtaacttacatgaaggggatatcatcctcaaaatcaacggaacagtcaccgagaatatgtccctgacagacgcacgcaagttgatcgagaagagtagagggaagcttcagttggtagtcctgcgggattcacagcagacattaattaacattccatccctcaacgattctgactccgagatcgaagatattagcgagatcgagagcaaccgatcctttagcccagaagagcgacgccatcagtattctgattacgattaccatagttcatccgaaaagctgaaggagaggccttcctcccgggaagatacccccagcagactatcacgaatgggcgcaacacccaccccctttaagtcaactggagatatagccggtacggtcgtgcccgagaccaacaaagagccacggtaccaagaggaccctccagctcctcagcccaaagcagccccgcgaactttcctgcgcccgtcacccgaagacgaggctatctacggacctaacacaaaaatggtaagatttaagaaaggggattccgtgggtctcagacttgccggcggaaacgacgttggcatctttgttgccggcattcaggagggaacatctgcagagcaagaggggctgcaggaaggggaccagatactcaaggttaatacccaggactttcgtggcctggtcagagaagacgccgtgttgtatcttctcgaaataccaaaaggggagatggtgactatcctggcacagtcccgcgctgacgtttacagggacattctcgcctgtgggaggggcgactcttttttcatccgtagtcacttcgaatgcgagaaagagacgccacaaagtctggcttttactaggggagaagttttccgggttgtagacactctttacgatggcaaactgggtaactggctggctgtacggattggcaacgagctcgagaaagggctgataccaaacaagagcagggcagagcagatggccagtgttcagaacgcacagcgcgataatgccggcgatcgggccgacttttggcgcatgaggggacagcggtctggcgtgaagaagaatcttcgcaaaagtcgagaagatctgactgccgtggtctccgtaagcacgaagtttccggcttatgagcgcgtgctccttagggaagcaggctttaaacggcctgtggtgctgttcggcccgattgcagacattgccatggagaagttggctaacgagctacccgattggttccagactgccaagactgagccaaaagacgctgggagcgaaaagtctactggagtcgtgagactcaacactgtcaggcagattatcgagcaggataaacacgctttgctggatgtcacaccaaaggccgtcgatcttctgaactacacacagtggtttcccatcgtcatttttttcaacccagattcacgccagggagtgaagaccatgcggcaaagactcaaccctacttcgaataagagctccagaaagctgtttgatcaagccaataaactgaagaaaacatgtgcccatctgtttaccgcgactataaacctcaacagcgcgaacgactcgtggtttgggagcctaaaggacaccatccaacatcagcagggcgaagccgtatgggtgagcgaaggaaaaatggaaggtatggacgacgatccagaagaccgtatgtcatacctaacagcaatgggcgctgactacctcagttgcgattctagactgatatcggactttgaagacactgacggcgagggaggcgcttacaccgataacgagctggatgagcccgccgaagaacctctggttagttcgataactcggagctccgaacctgtccaacacgaggaggcaaaaactcagaacaaagaggaaagttatgatttttctaagagctatgaatacaagtctaatccgtcagcagtggccggaaacgagacccccggagccagtaccaagggctaccctcctcctgtcgccgccaaacccaccttcgggcgctcaatcctgaagccgtctactcctatccctccccaggaaggcgaggaggttggcgagtcttctgaggagcaggataatgcaccaaaaagcgtgctggggaaggtgaagatcttcgaaaaaatggatcataaggcccgcctgcaaaggatgcaggagcttcaggaggctcagaatgcccgcatagaaatcgcacagaagcaccccgatatttatgccgtcccaattaagacccacaagcctgatccaggcacaccccagcatacatcaagtagaccacccgaaccccaaaaagcgcccagcagaccttaccaagatacccggggaagctatggatcagatgccgaggaagaggaataccgccagcagttgagcgagcatagcaagcgagggtattatggccagtccgctcggtaccgagatactgagttgtag

SEQ ID NO: 66473 - DNA, 3474 bp, Artificial Sequence
  derived and/or modified sequence
atgaaaacagcgcaggcactgcaccgcatgtggattcaggcggtaaaaaaactgcggagatggaaaggcagggcacctggtatggaagagctcatctgggagcaatacactgtcacactacagaaagattcaaaaaggggattcggaatagccgtgtcagggggacgcgacaatcctcactttgaaaatggcgaaactagcattgttatctccgatgtgcttcctggagggccagcagatgggctgctgcaagagaacgaccgcgtggtgatggttaatggaacaccaatggaagacgtgctgcattcgtttgcagtgcagcagcttaggaaaagcggaaaagtggccgctatagtggtgaagcggcctagaaaagtgcaggtcgccgctctacaggccagccccccactggatcaggacgatcgcgcttttgaggtcatggatgaattcgatggaaggtccttcaggagcggctactcagagcggagtagactgaatagtcacggaggtagaagcaggtcgtgggaggactcacctgagcggggacggcctcatgagagagccaggagtcgcgaaagggacctcagcagggacaggtcgaggggacggtctctggaacggggactggaccaggaccacgctcgaacacgcgaccggtctcgaggacgctccctcgagcggggactggaccatgatttcgggccaagtcgggaccgagaccgagaccgttccagagggaggtccatcgaccaggattacgagagggcctaccatcgggcatatgatcctgattatgaaagagcgtattcccccgaatatcggaggggagcaagacacgacgcaaggtcgaggggtccacggtccagatcccgagaacatccgcacagtcgtagtcctagtcctgagccaagaggacgccctggacccattggagtcctgctaatgaagtctagggcaaacgaagaatatggtctgagactggggagccagattttcgtgaaagaaatgaccagaaccggcctggcaaccaaggatgggaatctccacgagggagatattatcttaaagatcaatggtaccgtgaccgagaacatgtcattaacggacgcacgcaaattaatcgagaagagcaggggtaaactccaactggttgtgctgcgagattcacagcagaccctgatcaacataccttctctcaacgatagcgactctgaaatcgaagacatcagcgagatagagagcaaccgtagcttctcgcccgaggagaggcggcaccagtattctgattatgattaccactcatcttctgagaagctcaaagagagaccctcatcgagggaagacaccccctcccggctgagcagaatgggtgccactccaacgccatttaaatctacaggcgacattgcaggtactgtcgtcccagagacgaacaaagagcccagatatcaggaggatccgccagcccctcagcctaaggctgcacctagaacattcctccgcccttccccagaggatgaagctatttacgggcctaacacaaagatggtccgcttcaagaagggtgactctgtgggacttcgtctggccggtggcaacgacgtaggtatattcgtggctggtattcaggaaggtactagtgcggagcaggagggcctgcaagagggcgaccaaatcttgaaggtcaacacacaggacttcaggggcctggttcgcgaagatgccgtgctgtatctgctggagatcccaaaaggtgaaatggtgaccatcctggctcaatccagggctgatgtgtatagagatattcttgcttgcgggcgaggcgactctttcttcataagatcccacttcgagtgcgagaaagagaccccacaatcactggccttcacacgcggtgaggtttttagagtcgtcgataccctgtacgatgggaaactgggaaactggctagctgtgagaatcgggaatgagctggagaagggtctgataccaaataagtctagggctgagcagatggccagcgtacagaatgcccagagagacaacgcaggtgacagagccgacttctggaggatgcgtggacaacgctccggtgtcaagaaaaacctgaggaaaagtagagaggacttgaccgccgtggtgagtgtttccaccaagtttcctgcatacgagagagtgttactccgagaagctgggtttaaaaggccagtggtgctatttggaccgattgcagacatcgcaatggagaagctggctaatgagctcccagattggtttcagactgctaaaacagagcccaaggatgctggctcagagaagagcactggggtcgtcagactcaacactgttcggcaaataattgaacaggataagcacgcgctgctcgacgttacgccaaaggccgttgaccttctgaactatactcagtggtttccgatagttatatttttcaacccagattctcggcagggagttaaaactatgaggcaacgtttaaatcccacttctaacaagtcatctcgcaaactatttgatcaggctaataaattaaagaagacctgcgctcacttattcacagctacaattaacctgaactcggcgaatgactcttggttcggcagcctgaaagatactatccagcatcagcagggcgaagccgtgtgggtgtcagagggcaaaatggaggggatggacgacgatcccgaagacagaatgtcatatctgaccgccatgggcgctgattatctatcttgcgattctcgcctgattagcgacttcgaggacacagacggagaagggggagcctataccgataatgagcttgacgagcctgctgaggagcctctagtgagttccatcacgcgttccagcgaacctgtgcaacacgaagaagcgaagacacagaacaaagaggagagttacgacttcagcaaaagctatgagtataagtcaaatccctccgccgtcgccggaaatgaaacaccaggagcatccacgaaagggtacccaccacccgtggcagcaaagccgacctttggacgttcaattttgaaaccatctacacctatccctcctcaggagggagaggaagtgggcgaatccagcgaagaacaggacaacgcccctaagtcagtattgggtaaggttaagatcttcgagaaaatggaccacaaagccaggcttcaaagaatgcaggaattgcaggaagcccagaatgcaaggatcgagatcgcacagaagcaccctgatatctacgcagtgcccattaagactcacaaaccagatccgggaacacctcagcacacatcaagtcgtcctcctgaaccccaaaaggcaccttccagaccataccaggatacccgcggatcctacggcagcgacgcagaggaggaagaatatcggcagcaactgtccgagcacagcaaacgcggatactatggacaatccgcgcgatacagagacacagagctttag

SEQ ID NO: 66474 - DNA, 4459 bp, Artificial Sequence
  derived and/or modified sequence
atatggatgtgtcactgtgtgagatgacaacaggatttgctggaaatgtgggccactattgtatccgccttacgtaaccacatggagtgatggaaatgggtgagcagcccggaatgtaggcggtggcctggcccatgcatctccagagaccatgaagactgctcaagccctacataggatgtggatccaggctgttaaaaagttgaggagatggaaaggccgtgccccaggcatggaagagctgatatgggaacagtacactgtgaccctacaaaaggattccaaaagaggatttggaattgcagtgtccggaggcagagacaacccccactttgaaaatggagaaacgtcaattgtcatttctgatgtgctcccgggtgggcctgctgatgggctgctccaagaaaatgacagagtggtcatggtcaatggcacccccatggaggatgtgcttcattcgtttgcagttcagcagctcagaaaaagtgggaaggtcgctgctattgtggtcaagaggccccggaaggtccaggtggccgcacttcaggccagccctcccctggatcaggatgaccgggcttttgaggtgatggacgagtttgatggcagaagtttccggagtggctacagcgagaggagccggctgaacagccatggggggcgcagccgcagctgggaggacagcccggaaagggggcgtccccatgagcgggcccggagccgggagcgggacctcagccgggaccggagccgtggccggagcctggagcggggcctggaccaagaccatgcgcgcacccgagaccgcagccgtggccggagcctggagcggggcctggaccacgactttgggccatcccgggaccgggaccgtgaccgcagccgcggccggagcattgaccaggactacgagcgagcctatcaccgggcctacgacccagactacgagcgggcctacagcccggagtacaggcgcggggcccgccacgatgcccgctctcggggaccccgaagccgcagccgcgagcacccgcactcacggagccccagccccgagcctagggggcggccggggcccatcggggtcctcctgatgaaaagcagagcgaacgaagagtatggtctccggcttgggagtcagatcttcgtaaaggaaatgacccgaacgggtctggcaactaaagatggcaaccttcacgaaggagacataattctcaagatcaatgggactgtaactgagaacatgtctttaacggatgctcgaaaattgatagaaaagtcaagaggaaaactacagctagtggtgttgagagacagccagcagaccctcatcaacatcccgtcattaaatgacagtgactcagaaatagaagatatttcagaaatagagtcaaaccgatcattttctccagaggagagacgtcatcagtattctgattatgattatcattcctcaagtgagaagctgaaggaaaggccaagttccagagaggacacgccgagcagattgtccaggatgggtgcgacacccactccctttaagtccacaggggatattgcaggcacagttgtcccagagaccaacaaggaacccagataccaagaggaccccccagctcctcaaccaaaagcagccccgagaacttttcttcgtcctagtcctgaagatgaagcaatatatggccctaataccaaaatggtaaggttcaagaagggagacagcgtgggcctccggttggctggtggcaatgatgtcgggatatttgttgctggcattcaagaagggacctcggcggagcaggagggccttcaagaaggagaccagattctgaaggtgaacacacaggatttcagaggattagtgcgggaggatgccgttctctacctgttagaaatccctaaaggtgaaatggtgaccattttagctcagagccgagccgatgtgtatagagacatcctggcttgtggcagaggggattcgttttttataagaagccactttgaatgtgagaaggaaactccacagagcctggccttcaccagaggggaggtcttccgagtggtagacacactgtatgacggcaagctgggcaactggctggctgtgaggattgggaacgagttggagaaaggcttaatccccaacaagagcagagctgaacaaatggccagtgttcaaaatgcccagagagacaacgctggggaccgggcagatttctggagaatgcgtggccagaggtctggggtgaagaagaacctgaggaaaagtcgggaagacctcacagctgttgtgtctgtcagcaccaagttcccagcttatgagagggttttgctgcgagaagctggtttcaagagacctgtggtcttattcggccccatagctgatatagcaatggaaaaattggctaatgagttacctgactggtttcaaactgctaaaacggaaccaaaagatgcaggatctgagaaatccactggagtggtccggttaaataccgtgaggcaaattattgaacaggataagcatgcactactggatgtgactccgaaagctgtggacctgttgaattacacccagtggttcccaattgtgatttttttcaacccagactccagacaaggtgtcaaaaccatgagacaaaggttaaatccaacgtccaacaaaagttctcgaaagttatttgatcaagccaacaagcttaaaaaaacgtgtgcacacctttttacagctacaatcaacctaaattcagccaatgatagctggtttggcagcttaaaggacactattcagcatcagcaaggagaagcggtttgggtctctgaaggaaagatggaagggatggatgatgaccccgaagaccgcatgtcctacttaaccgccatgggcgcggactatctgagttgcgacagccgcctcatcagtgactttgaagacacggacggtgaaggaggcgcctacactgacaatgagctggatgagccagccgaggagccgctggtgtcgtccatcacccgctcctcggagccggtgcagcacgaggaggccaaaacccagaacaaagaagaatcctatgacttctccaaatcctatgaatataagtcaaacccctctgccgttgctggtaatgaaactcctggggcatctaccaaaggttatcctcctcctgttgcagcaaaacctacctttgggcggtctatactgaagccctccactcccatccctcctcaagagggtgaggaggtgggagagagcagtgaggagcaagataatgctcccaaatcagtcctgggcaaagtcaaaatatttgagaagatggatcacaaggccaggttacagagaatgcaggagctccaggaagcacagaatgcaaggatcgaaattgcccagaagcatcctgatatctatgcagttccaatcaaaacgcacaagccagaccctggcacgccccagcacacgagttccagaccccctgagccacagaaagctccttccagaccttatcaggataccagaggaagttatggcagtgatgccgaggaggaggagtaccgccagcagctgtcagaacactccaagcgcggttactatggccagtctgcccgataccgggacacagaattatagatgtctgagcacggactctcccaggcctgcctgcatggcatcagactagccactcctgccaggccgccgggatggttcttctccagttagaatgcaccatggagacgtggtgggactccagctcgtgtgtcctcatggagaacccaggggacagctggtgcaaattcagaactgagggctctgtttgtgggactgggttagaggagtctgtggctttttgttcagaattaagcagaacactgcagtcagatcctgttacttgcttcagtggaccgaaatctgtattctgtttgcgtacttgtaatatgtatattaagaagcaataactatttttcctcattaatagctgccttcaaggactgtttcagtgtgagtcagaatgtgaaaaaggaataaaaaatactgttgggctcaaactaaattcaaagaagtactttattgcaactcttttaagtgccttggatgagaagtgtcttaaattttcttcctttgaagctttaggcagagccataatggactaaaacattttgactaagtttttataccagcttaatagctgtagttttccctgcactgtgtcatcttttcaaggcatttgtctttgtaatattttccataaatttggactgtctatatcataactatacttgatagtttggctataagtgctcaatagcttgaagcccaagaagttggtatcgaaatttgttgtttgtttaaacccaagtgctgcacaaaagcagatacttgaggaaaacactatttccaaaagcacatgtattgacaacagttttataatttaataaaaaggaatacattgcaatccgtaatttt

SEQ ID NO: 66475 - protein, 1221 aa, Artificial Sequence
  derived and/or modified sequence
MKTAQALHRMWIQAVKKLRRWKGRVSPSASSPLVFPNLSSWEGEGSKTILTAPGMEELIWEQYTVTLQKDSKRGFGIAVSGGRDNPHFENGETSIVISDVLPGGPADGLLQENDRVVMVNGTPMEDVLHSFAVQQLRKSGKVAAIVVKRPRKVQVAALQASPPLDQDDRAFEVMDEFDGRSFRSGYSERSRLNSHGGRSRSWEDSPERGRPHERARSRERDLSRDRSRGRSLERGLDQDHARTRDRSRGRSLERGLDHDFGPSRDRDRDRSRGRSIDQDYERAYHRAYDPDYERAYSPEYRRGARHDARSRGPRSRSREHPHSRSPSPEPRGRPGPIGVLLMKSRANEEYGLRLGSQIFVKEMTRTGLATKDGNLHEGDIILKINGTVTENMSLTDARKLIEKSRGKLQLVVLRDSQQTLINIPSLNDSDSEIEDISEIESNRSFSPEERRHQYSDYDYHSSSEKLKERPSSREDTPSRLSRMGATPTPFKSTGDIAGTVVPETNKEPRYQEDPPAPQPKAAPRTFLRPSPEDEAIYGPNTKMVRFKKGDSVGLRLAGGNDVGIFVAGIQEGTSAEQEGLQEGDQILKVNTQDFRGLVREDAVLYLLEIPKGEMVTILAQSRADVYRDILACGRGDSFFIRSHFECEKETPQSLAFTRGEVFRVVDTLYDGKLGNWLAVRIGNELEKGLIPNKSRAEQMASVQNAQRDNAGDRADFWRMRGQRSGVKKNLRKSREDLTAVVSVSTKFPAYERVLLREAGFKRPVVLFGPIADIAMEKLANELPDWFQTAKTEPKDAGSEKSTGVVRLNTVRQIIEQDKHALLDVTPKAVDLLNYTQWFPIVIFFNPDSRQGVKTMRQRLNPTSNKSSRKLFDQANKLKKTCAHLFTATINLNSANDSWFGSLKDTIQHQQGEAVWVSEGKMEGMDDDPEDRMSYLTAMGADYLSCDSRLISDFEDTDGEGGAYTDNELDEPAEEPLVSSITRSSEPVQHEESIRKPSPEPRAQMRRAASSDQLRDNSPPPAFKPEPPKAKTQNKEESYDFSKSYEYKSNPSAVAGNETPGASTKGYPPPVAAKPTFGRSILKPSTPIPPQEGEEVGESSEEQDNAPKSVLGKVKIFEKMDHKARLQRMQELQEAQNARIEIAQKHPDIYAVPIKTHKPDPGTPQHTSSRPPEPQKAPSRPYQDTRGSYGSDAEEEEYRQQLSEHSKRGYYGQSARYRDTEL

SEQ ID NO: 66476 - DNA, 3666 bp, Artificial Sequence
  derived and/or modified sequence
atgaagaccgcccaggccctgcacagaatgtggatccaggccgtgaagaagctgagaagatggaagggcagagtgagccccagcgccagcagccccctggtgttccccaacctgagcagctgggagggcgagggcagcaagaccatcctgaccgcccccggcatggaggagctgatctgggagcagtacaccgtgaccctgcagaaggacagcaagagaggcttcggcatcgccgtgagcggcggcagagacaacccccacttcgagaacggcgagaccagcatcgtgatcagcgacgtgctgcccggcggccccgccgacggcctgctgcaggagaacgacagagtggtgatggtgaacggcacccccatggaggacgtgctgcacagcttcgccgtgcagcagctgagaaagagcggcaaggtggccgccatcgtggtgaagagacccagaaaggtgcaggtggccgccctgcaggccagcccccccctggaccaggacgacagagccttcgaggtgatggacgagttcgacggcagaagcttcagaagcggctacagcgagagaagcagactgaacagccacggcggcagaagcagaagctgggaggacagccccgagagaggcagaccccacgagagagccagaagcagagagagagacctgagcagagacagaagcagaggcagaagcctggagagaggcctggaccaggaccacgccagaaccagagacagaagcagaggcagaagcctggagagaggcctggaccacgacttcggccccagcagagacagagacagagacagaagcagaggcagaagcatcgaccaggactacgagagagcctaccacagagcctacgaccccgactacgagagagcctacagccccgagtacagaagaggcgccagacacgacgccagaagcagaggccccagaagcagaagcagagagcacccccacagcagaagccccagccccgagcccagaggcagacccggccccatcggcgtgctgctgatgaagagcagagccaacgaggagtacggcctgagactgggcagccagatcttcgtgaaggagatgaccagaaccggcctggccaccaaggacggcaacctgcacgagggcgacatcatcctgaagatcaacggcaccgtgaccgagaacatgagcctgaccgacgccagaaagctgatcgagaagagcagaggcaagctgcagctggtggtgctgagagacagccagcagaccctgatcaacatccccagcctgaacgacagcgacagcgagatcgaggacatcagcgagatcgagagcaacagaagcttcagccccgaggagagaagacaccagtacagcgactacgactaccacagcagcagcgagaagctgaaggagagacccagcagcagagaggacacccccagcagactgagcagaatgggcgccacccccacccccttcaagagcaccggcgacatcgccggcaccgtggtgcccgagaccaacaaggagcccagataccaggaggacccccccgccccccagcccaaggccgcccccagaaccttcctgagacccagccccgaggacgaggccatctacggccccaacaccaagatggtgagattcaagaagggcgacagcgtgggcctgagactggccggcggcaacgacgtgggcatcttcgtggccggcatccaggagggcaccagcgccgagcaggagggcctgcaggagggcgaccagatcctgaaggtgaacacccaggacttcagaggcctggtgagagaggacgccgtgctgtacctgctggagatccccaagggcgagatggtgaccatcctggcccagagcagagccgacgtgtacagagacatcctggcctgcggcagaggcgacagcttcttcatcagaagccacttcgagtgcgagaaggagaccccccagagcctggccttcaccagaggcgaggtgttcagagtggtggacaccctgtacgacggcaagctgggcaactggctggccgtgagaatcggcaacgagctggagaagggcctgatccccaacaagagcagagccgagcagatggccagcgtgcagaacgcccagagagacaacgccggcgacagagccgacttctggagaatgagaggccagagaagcggcgtgaagaagaacctgagaaagagcagagaggacctgaccgccgtggtgagcgtgagcaccaagttccccgcctacgagagagtgctgctgagagaggccggcttcaagagacccgtggtgctgttcggccccatcgccgacatcgccatggagaagctggccaacgagctgcccgactggttccagaccgccaagaccgagcccaaggacgccggcagcgagaagagcaccggcgtggtgagactgaacaccgtgagacagatcatcgagcaggacaagcacgccctgctggacgtgacccccaaggccgtggacctgctgaactacacccagtggttccccatcgtgatcttcttcaaccccgacagcagacagggcgtgaagaccatgagacagagactgaaccccaccagcaacaagagcagcagaaagctgttcgaccaggccaacaagctgaagaagacctgcgcccacctgttcaccgccaccatcaacctgaacagcgccaacgacagctggttcggcagcctgaaggacaccatccagcaccagcagggcgaggccgtgtgggtgagcgagggcaagatggagggcatggacgacgaccccgaggacagaatgagctacctgaccgccatgggcgccgactacctgagctgcgacagcagactgatcagcgacttcgaggacaccgacggcgagggcggcgcctacaccgacaacgagctggacgagcccgccgaggagcccctggtgagcagcatcaccagaagcagcgagcccgtgcagcacgaggagagcatcagaaagcccagccccgagcccagagcccagatgagaagagccgccagcagcgaccagctgagagacaacagccccccccccgccttcaagcccgagccccccaaggccaagacccagaacaaggaggagagctacgacttcagcaagagctacgagtacaagagcaaccccagcgccgtggccggcaacgagacccccggcgccagcaccaagggctaccccccccccgtggccgccaagcccaccttcggcagaagcatcctgaagcccagcacccccatccccccccaggagggcgaggaggtgggcgagagcagcgaggagcaggacaacgcccccaagagcgtgctgggcaaggtgaagatcttcgagaagatggaccacaaggccagactgcagagaatgcaggagctgcaggaggcccagaacgccagaatcgagatcgcccagaagcaccccgacatctacgccgtgcccatcaagacccacaagcccgaccccggcaccccccagcacaccagcagcagaccccccgagccccagaaggcccccagcagaccctaccaggacaccagaggcagctacggcagcgacgccgaggaggaggagtacagacagcagctgagcgagcacagcaagagaggctactacggccagagcgccagatacagagacaccgagctgtag

SEQ ID NO: 66477 - DNA, 3666 bp, Artificial Sequence
  derived and/or modified sequence
atgaaaacagcccaggcattgcatcgaatgtggatccaagccgtaaaaaagttgcggcgctggaagggcagggttagcccaagcgccagctctcccctggtcttccctaacctcagctcttgggaaggagaaggaagtaagacaattctgactgctccggggatggaggaattgatatgggagcagtacaccgttactttgcagaaagactcaaaacggggctttggtatcgcagtgagcggagggagagacaaccctcatttcgaaaacggggagacgtctattgtcatttccgacgtcctgccaggtggacctgccgatggcctcctgcaagaaaacgacagggtggtcatggtgaacggcacccctatggaggatgtgctccatagctttgcagtgcaacaactgagaaaatccggcaaagtggctgcaatcgtggttaagcgcccccgtaaggttcaggtagcggcgcttcaggccagcccccctctggaccaggatgatcgcgccttcgaggtgatggatgaatttgatggacgctcctttcggtcgggatattccgagcggtctaggctaaatagccacggcgggcgaagccgcagttgggaagatagtccagagagagggagaccacacgagagagcccggagtcgcgagcgcgatttaagcagggatcgcagccgcggccgtagtcttgagagaggtctggaccaagatcatgcacgtacgcgtgatagatctcggggtcggagcctagagcgagggctggatcacgattttgggcctagccgggatcgagacagagacaggtctaggggacggtctattgatcaggattacgagcgggcttaccatagagcttatgatccggattatgaaagggcttactctcccgaatataggagaggggcaagacatgacgcaagatctaggggccctcgctctagatctagggagcaccctcattctagatccccgtctcccgagccacggggccgaccaggacccatcggggtgttacttatgaaatcccgggctaacgaggaatatgggctgcgactggggagtcagattttcgtgaaggagatgaccagaacaggcctcgcgactaaggatgggaatttgcacgagggcgatattatcctgaaaattaacggcactgtcaccgaaaatatgtccctcaccgatgctcggaaattgatagaaaaaagcagggggaagcttcagcttgtggtgctccgggacagtcagcagaccctcatcaacatcccctcattgaatgactcagattcagagatcgaagacatttctgaaatcgagtctaatcgctcattctccccggaagaacgcaggcaccagtacagcgattatgactatcatagtagctctgagaaacttaaggagaggcccagtagtcgcgaagataccccatctagactttctaggatgggcgccacaccaacaccgtttaagtcaaccggagacattgctgggacagtggttcccgaaaccaacaaggaacctaggtatcaggaggatcctcccgctccacaaccaaaggccgctcccagaacattccttcggcccagcccggaggatgaagcgatctacgggcccaacactaaaatggtgcggtttaagaaaggagactctgtggggctgaggctcgccggcgggaacgacgttggcatttttgtggccggaatccaggagggcacgtctgcagaacaggagggacttcaggaaggagatcaaattctgaaggtgaatactcaagacttcagagggttggtgagggaggatgctgtcctgtatctcctggagatcccgaagggagaaatggtgacaatccttgcacaatctcgggcggacgtttatcgggacattcttgcgtgcggcagaggggattcattctttatccgttcgcattttgagtgcgagaaagaaactcctcagtctcttgcgttcacacgaggcgaggtgtttcgcgtggtggacaccctgtacgacgggaagctgggcaattggcttgcggtaaggattggcaacgagctcgaaaaaggcctaattccgaacaagtcccgggccgagcagatggcttccgtgcagaacgcacagagggacaacgctggagatagggcagatttctggaggatgagaggtcaaagaagtggagtcaaaaagaatctgcgcaaatcccgggaagacctgacagcggtggtgagcgtctctacaaaattcccagcttacgagagggtcttactgcgagaggccggcttcaaacgccctgtcgtcctattcggccctattgcggacatcgccatggaaaaacttgccaacgagcttccagattggtttcagaccgccaaaaccgaaccaaaggacgcaggcagtgaaaaaagcacaggggtagtgaggctgaacacagtgcgacagatcatcgagcaagacaagcacgccctcttggacgtgacacctaaagcggtcgacctgttgaattacacccagtggtttcctatcgtaattttcttcaatccggactccagacagggtgtgaaaacgatgagacaacgtctgaaccccacaagcaataaaagtagtcggaagctcttcgatcaggcgaacaagttgaagaagacttgtgctcacttgttcaccgcaaccattaatctaaactctgccaatgattcatggttcgggtccctgaaggatacaatccagcatcagcagggcgaggcagtgtgggtctccgaaggtaaaatggaaggcatggatgatgacccagaagatagaatgtcctacctcacagcaatgggagcagactatttgtcttgtgatagtcgcctgatttctgactttgaggatactgacggagagggcggcgcctacactgacaacgagcttgatgagccagcagaggagccattagtgagttcgatcacgagatcatctgaacctgtccaacacgaagaaagcatccggaagccaagcccggagcccagggcacaaatgcggcgagccgcgtcgtcagaccagctgcgcgataactcccctccaccagcttttaaacccgagcctccaaaagcaaagacccagaacaaggaagaatcctatgatttctccaagagctatgaatataaaagcaacccgtcagccgttgcagggaacgagactccaggcgcctccactaaagggtaccccccgcccgttgctgctaaacctactttcggtcggagcatactgaagccgtctacgccaattcctccacaggaaggcgaagaagtcggtgagtcttccgaggagcaagacaacgcccctaagtccgttttgggaaaagtgaagatatttgagaaaatggaccataaggcacgcttacaacgcatgcaggagctccaggaagcgcagaacgccagaattgagatagcccagaaacaccctgacatctacgccgtgcccatcaagacccataagccggacccagggacaccccagcatacaagttcaagacctccggagccccagaaggcgccgtcccgtccctatcaggatacacgaggttcctacgggtcagacgcagaagaggaggagtaccgccagcagctgagcgagcacagcaagagaggttattacggccagtctgctcggtatcgggacacagagctctag

SEQ ID NO: 66478 - DNA, 3666 bp, Artificial Sequence
  derived and/or modified sequence
atgaagacagcccaggccctgcacaggatgtggatccaggccgtgaagaagctgcggcgctggaagggccgggtgagccccagcgccagcagccccctggtgttccccaacctgagctcctgggagggggagggcagcaagaccatcctgacagcccctggcatggaggagctgatctgggagcagtacacagtgaccctgcagaaggacagcaagaggggctttggaattgctgtgtctgggggccgggacaacccccactttgaaaatggagagaccagcatcgtcatcagtgatgtgctgcccggcggccctgcagatggcctgctgcaggagaatgacagagtggtgatggtgaatggcacccccatggaggatgtgctgcacagctttgctgtgcagcagctgaggaagagcggcaaggtggccgccatcgtggtgaagaggcccaggaaggtgcaggtggccgccctgcaggccagcccccccctggaccaggatgaccgggcctttgaggtgatggatgaatttgatggccgctccttccgcagcggctacagcgagaggagccggctgaacagccatggaggccgcagccgctcctgggaggacagccctgagcggggccggccccatgagcgggcccggagccgggagcgggacctgagccgggacaggagccggggccgcagcctggagcggggcctggaccaggaccacgcccggacccgggacaggagccggggccgcagcctggagcggggcctggaccatgactttggccccagccgggaccgggaccgggacaggagccggggccgcagcattgaccaggactatgaaagagcctaccaccgggcctatgaccctgactatgaaagagcctacagccctgagtacagaagaggagcccggcatgatgcccggagccggggccccaggagccgcagccgggagcacccccacagccgcagccccagccctgagccccggggccggcccggccccatcggcgtgctgctgatgaagagccgggccaatgaggagtatggcctgcggctgggcagccagatctttgtgaaggagatgaccaggacaggcctggccaccaaggatggcaacctgcacgagggggacatcatcctgaagatcaatggaacagtgacagagaacatgagcctgacagatgccaggaagctgattgagaagagccggggcaagctgcagctggtggtgctgcgggacagccagcagaccctcatcaacatccccagcctgaatgacagcgacagcgagattgaggacatcagcgagattgagagcaacagaagcttcagccctgaggagcggcggcaccagtacagcgactatgactaccacagcagcagcgagaagctgaaggagcggcccagcagccgggaggacacccccagccggctgagcaggatgggcgccacccccacccccttcaagagcactggagacattgctggcaccgtggtgcctgagaccaacaaggagccccgctaccaggaggaccccccagccccccagcccaaggccgcccccaggaccttcctgcggcccagcccagaagatgaggccatctacggccccaacaccaagatggtgcgcttcaagaagggggacagcgtgggcctgcggctggccggcggcaatgatgtgggcatctttgtggccggcatccaggagggcaccagcgctgagcaggagggcctgcaggagggggaccagatcctgaaggtgaacacccaggacttccggggcctggtgcgggaggatgctgtgctgtacctgctggagatccccaagggggagatggtgaccatcctggcccagagcagagcagatgtgtacagagacatcctggcctgtggccgcggggacagcttcttcatccgcagccactttgaatgtgagaaggagaccccccagagcctggccttcaccagaggagaggtgttccgggtggtggacaccctgtatgatggcaagctgggcaactggctggccgtgagaattggaaatgagctggagaagggcctcatccccaacaagagcagagctgagcagatggcctctgtgcagaatgcccagagggacaatgctggggacagagctgacttctggaggatgaggggccagaggtctggagtgaagaagaacctgaggaagagccgggaggacctgacagctgtggtgtctgtgtccaccaagtttcctgcctatgaaagagtgctgctgcgggaggccggcttcaagaggcctgtggtgctgtttggccccatcgctgacatcgccatggagaagctggccaatgagctgcctgactggttccagacagccaagacagagcccaaggatgctggcagcgagaagagcactggagtggtgcggctgaacacagtgcggcagatcatcgagcaggacaagcacgccctgctggatgtgacccccaaggctgtggacctgctgaactacacccagtggttccccatcgtcatcttcttcaacccagacagccggcagggcgtgaagaccatgaggcagaggctgaaccccaccagcaacaagagcagcaggaagctgtttgaccaggccaacaagctgaagaagacctgtgcccacctgttcaccgccaccatcaacctgaacagcgccaatgacagctggtttggcagcctgaaggacaccatccagcaccagcagggcgaggccgtgtgggtgtctgagggcaagatggagggcatggatgatgatcctgaggacaggatgagctacctgacagccatgggcgctgactacctgagctgtgacagccgcctcatcagtgactttgaggacacagatggagagggcggggcctacacagacaatgagctggatgagcctgctgaggagcccctggtgagcagcatcaccaggagcagcgagcctgtgcagcacgaggagagcatcaggaagcccagccctgagccccgggcccagatgagaagagctgccagcagtgaccagctgcgggacaacagccccccaccagccttcaagccagagccccccaaggccaagacccagaacaaggaggagagctatgacttcagcaagagctatgagtacaagagcaaccccagcgctgtggccggaaatgagacccctggggccagcaccaagggctacccacctcctgtggccgccaagcccaccttcggccgcagcatcctgaagcccagcacccccatccccccccaggagggggaggaggtgggggagagcagcgaggagcaggacaatgcccccaagtctgtgctgggcaaggtgaagatctttgagaagatggaccacaaggcccggctgcagaggatgcaggagctgcaggaggcccagaatgccagaattgaaattgcccagaagcacccagacatctatgctgtgcccatcaagacccacaagccagaccccggcaccccccagcacaccagcagccggcccccagagccccagaaggcccccagccggccctaccaggacacccggggcagctatggcagtgatgctgaggaggaggagtaccggcagcagctgtctgagcacagcaagaggggctactacggccagagcgcccgctacagagacacagagctgtag

SEQ ID NO: 66479 - DNA, 3666 bp, Artificial Sequence
  derived and/or modified sequence
atgaagaccgcccaggccctgcaccggatgtggatccaggccgtgaagaaactgaggagatggaaaggtagggtgtcgcctagtgcatcctcccccctggtgttcccaaacctgtcaagctgggagggagaggggagcaaaactatcttgacagcccctggcatggaagagctcatttgggaacagtacactgttaccttgcagaaggacagtaagcggggatttggtattgctgtgtctggcggaagagacaatccacatttcgaaaatggagagacctctatcgttataagtgacgtgctgcccggggggcccgccgatggcctgcttcaggagaatgatagggtggtgatggttaatggcacccctatggaggatgtcctgcactcgtttgcagtgcagcagttgcgcaagtcaggaaaggtggccgcaatagtggtgaagcggccaaggaaagtgcaagtggccgcacttcaggcttcgcctcccctggaccaggatgacagagcattcgaggttatggatgaatttgacggcaggagtttccggagtggttattcagaacgctcccgtctaaacagccacggcggcaggagccggtcctgggaggattccccagagcgaggcaggcctcatgaacgagccaggtccagggaacgggacctgagccgagaccggtctcgcgggcgcagtctggagcgcggcctggaccaagatcatgccaggactcgtgatcgctcaagaggtcgcagtctggaacgcgggctggaccacgattttggacccagcagagaccgcgaccgggaccgtagtaggggccgcagcatcgatcaagattacgaacgggcctaccatcgggcttatgacccagactacgagagggcatactctccggaataccgtcggggcgctcgacatgacgccaggtctcgcggaccaagaagcagatccagggagcacccacactctcgaagcccgagccctgagcccaggggccgtcctggacccattggggtgctcttgatgaaatctcgcgccaacgaggaatacggcctacggctgggttcacaaatctttgtcaaagagatgacacgcacgggcctggccactaaggatggtaaccttcatgagggcgacatcatccttaagattaatggcaccgtgaccgaaaacatgtccctgaccgacgcccgtaagctcattgagaaaagtcggggtaagttgcagctagtcgtccttagggattcgcagcagacactgattaacatcccttctctcaacgactctgatagtgagatagaggatatctcagaaatcgagtcaaaccgcagctttagccctgaggaaaggaggcatcagtactctgactatgattatcacagttctagtgaaaagttgaaggagcggccttcctcacgggaagataccccatcacgactgtctcgcatgggggccactccaacccctttcaaatcaaccggggatatcgctgggacagttgtccctgaaaccaataaagagccgcgttatcaggaagatccacccgcaccccagcccaaggctgcaccacggactttcttgcgaccttcccctgaggacgaagccatatatggccccaataccaagatggtgagatttaaaaaaggcgattctgtgggactcaggcttgccggcgggaatgatgtgggcatcttcgtggcgggaatacaagaaggaacttccgcggagcaggagggactgcaagagggagatcagatactgaaggtcaatactcaggatttccgcgggttggtgagagaggatgccgtcctttatttgcttgagatacctaagggagagatggttacaatcctcgcccagtctagagcagacgtctaccgcgacatcctggcttgcggccgaggagactcttttttcatcaggtctcattttgaatgcgaaaaggaaactccccaatccctagctttcacccgaggtgaggtattcagagtagtcgataccctgtacgatggaaagctgggtaactggcttgccgtacgaattggtaacgaattagagaagggactgataccaaataaaagccgagcggagcaaatggcttctgttcagaacgcgcagagagacaacgctggagatagagcagatttctggaggatgcggggccagagatcgggcgtaaaaaaaaatctgagaaagtcccgagaagaccttacggctgtggtctcagtatcaacaaagttccctgcctatgagcgcgtcctcttacgcgaagccggcttcaagaggcccgtggtgctgttcggccctatcgcggacatagccatggagaaacttgcaaacgaactgccagactggtttcagacggcgaagaccgagcctaaggacgccggatcagagaaatccactggggtcgttcgtttgaatactgtcagacaaataatcgagcaagataaacatgccctgctggacgtgaccccaaaagccgtagacctgctcaactacacacagtggtttcccatcgtgattttcttcaatcctgattccaggcagggagtgaaaactatgcggcagcgattaaatcccactagcaacaagtcatccagaaagctgtttgaccaagcaaacaaactcaagaagacatgtgcgcatctgtttacagcgacaatcaatcttaacagcgctaatgactcctggtttggatcccttaaagacacaattcaacaccagcagggcgaagccgtttgggtatccgagggcaaaatggaggggatggatgacgaccctgaggaccgcatgtcatatcttaccgccatgggggctgactatctgtcatgcgacagtcgcctgattagcgactttgaagacacagacggggaaggaggcgcctacacggacaacgaactggacgaaccggccgaggaacccctcgtatcttccatcacccggtctagcgaacccgtacagcatgaggagtccatccggaagcctagtcccgagccccgggcccaaatgcgaagggccgcaagctctgatcagcttcgcgataacagtcccccccccgcatttaagcctgaacctccaaaggcaaagactcagaataaagaagagtcttacgacttcagtaaatcttacgagtataaatctaacccttcggcagtggctggaaacgaaacaccaggagcgagcacgaaaggatatcctcctcctgtcgcagccaagcctacctttggacgctctatccttaaacctagcactccaatcccaccacaggagggtgaagaagtcggagaaagctctgaggagcaggacaatgcacctaagtcggtgctagggaaagtaaaaattttcgagaagatggatcacaaggctagactgcagcggatgcaagaactgcaagaagcacagaacgcccgcatcgagatcgctcaaaaacatcctgatatttatgctgtgccaatcaagacgcacaagccggatccaggtactcctcagcacacaagtagcagacccccagaaccccagaaagcaccatccaggccctaccaagacaccagaggatcttatgggtccgacgcagaggaagaggaatacaggcagcaattgagcgaacatagcaaaagggggtactacggtcagagcgcgcgataccgcgacaccgagctttag

SEQ ID NO: 66480 - DNA, 3666 bp, Artificial Sequence
  derived and/or modified sequence
atgaagacagctcaggccttacaccgtatgtggattcaggcggtgaaaaaactccggcgatggaaggggcgagtctcccctagtgcttcttcccctctcgtgtttcccaacctgtccagttgggaaggagaggggtccaaaacaattcttacagcgcctggcatggaggagctcatctgggagcaatacaccgtgaccctccagaaggattccaaacgcggattcggcattgccgtgtccggaggacgcgacaatccgcactttgagaatggtgaaacttcaatcgtgattagcgatgtgctcccaggcggacctgcagacggcctgcttcaagagaacgaccgggtagttatggtgaatggcaccccgatggaggatgttctgcatagcttcgctgtccagcagctgcgtaagagcggaaaggtcgctgctatcgtggtaaagaggcctcggaaagtccaggtggcggcactgcaggcctctccccctctggatcaggacgatcgggcttttgaagtgatggacgagtttgacggacggtccttccgttccgggtactcggaaaggtctcgtttgaactcccatggcggtcggagtagaagctgggaggactcgccagaacgaggcagaccccatgaaagagccaggtcacgcgagcgtgatctctcacgtgatcgatcgcgcggtcggtcccttgagcggggtctcgatcaagaccacgcacgtaccagagatcggtcccgcggacgaagcctggagaggggtctggatcatgacttcggccctagcagggatagagatagagatagaagcaggggccgatcgatagaccaggattatgaaagggcctaccatcgagcctatgatcccgactatgagagggcttattctcccgaataccgaagaggggcaaggcacgatgccagatcccgcggacctcgctctcggtccagagagcatccccactctagatctcccagccctgagccaagggggagacctgggccaatcggtgtgctgctcatgaaaagcagggctaacgaagaatatggtcttcggctgggctcccagatattcgtcaaagaaatgacacgaaccggtctggctacaaaagacggcaatctccacgaaggagacatcatcctgaagatcaatgggactgtgaccgagaacatgagcctgacggacgccagaaagttaattgaaaagtcccgcggtaaactgcagcttgtggtgctgcgtgattcacagcagaccctcataaacatcccatccctgaacgacagtgattcagaaattgaagacatttcggagatagagtcaaaccgtagtttttcacccgaagagcggcgacatcagtatagtgactacgactaccattcctcctccgaaaagttaaaagaaagaccctcctccagagaagatacccctagccggctgtccaggatgggcgctacacccacacccttcaaatcgactggcgacatcgcgggaaccgtagtaccggaaactaataaggagccacggtaccaggaagaccctccagcaccgcagccaaaagcagctcccaggacgttcctgcgcccttcaccagaggatgaagccatctatggtcccaataccaagatggtgagattcaagaagggggattctgtaggcctgagactggcaggaggcaacgatgtgggaatctttgttgccggaatccaggagggcacgtccgcggaacaggaaggtctgcaagaaggagatcagatccttaaagtgaacacccaggattttagaggtctggtgcgggaagatgccgtcctttacctgcttgaaattccaaagggcgaaatggttaccattcttgctcaaagtcgagctgacgtttacagagatatcttggcctgcggccgtggggattcgttcttcattcggtcccatttcgagtgcgagaaggagactccacaaagtctggccttcacccgcggtgaggtgttccgcgtggttgatactttatatgatggaaagttaggcaactggctggccgtgagaatcggcaacgagctcgaaaagggtctgattcctaataagagcagggcggagcagatggcttccgtacagaacgcccagcgagataacgcaggagatcgcgctgatttttggagaatgcggggtcagaggtccggggtgaagaagaatttgagaaagtcgcgggaggacctgacggccgtcgtttctgtgtccacgaaattccccgcttatgagcgtgttctactgcgggaagcaggattcaagcgccctgtagtgctgtttggccctatcgcagatattgctatggaaaaactcgcaaatgagctcccagattggttccaaactgctaagaccgaaccaaaggatgcgggatctgaaaaatcgacaggtgtggtgagactgaacacagtcaggcaaattatcgagcaggataaacacgctttgctcgatgtaaccccgaaagctgtggacctgctgaactacactcagtggtttccaatagttattttttttaatcccgactcaagacaaggtgttaagacaatgagacagcgcctgaatcctaccagcaacaaaagctccagaaagttgtttgaccaggccaacaagctcaaaaagacatgtgcacaccttttcaccgctactattaacctcaattctgctaacgacagttggttcggcagcctcaaggacaccatacaacatcagcaaggcgaagcggtttgggtctccgaagggaagatggagggcatggatgacgatcctgaagacaggatgagctacctgaccgcaatgggcgctgactaccttagttgtgattcccgtcttattagcgacttcgaagatacggacggtgagggcggtgcttatacagacaatgagctcgacgaacctgcggaagagcctttggtttcgtctatcaccaggtcttcggagcctgttcagcacgaggagtctattcgcaagccctcccccgagcctcgtgcgcagatgaggagagctgcctcctccgaccagttacgagataactctcccccacctgcatttaagccggaacccccaaaagccaagacgcagaataaggaggaaagctatgacttctccaagagttatgagtataaatctaaccctagcgccgtggctgggaacgagactcctggggcaagcaccaagggataccccccaccggtagcagcaaaacctactttcgggagatcaatcctgaagccaagcacccccataccacctcaggagggcgaggaagtcggggagagttctgaagaacaggacaatgctcccaaatctgtattagggaaggtgaaaatattcgaaaaaatggaccataaagcaaggttgcagagaatgcaagagttgcaggaagcccagaacgcaagaattgagattgcccaaaagcatccagacatctatgctgtacccattaaaacccacaaacccgaccctggaacgcctcagcatacgtcatccaggcccccagagccgcagaaggcaccaagcagaccctaccaggacacccgcggaagttatggtagcgacgcagaagaggaggagtataggcagcagctctccgagcatagcaaaaggggctattacggacagtctgcaaggtaccgggacaccgagttatag

SEQ ID NO: 66481 - DNA, 4500 bp, Artificial Sequence
  derived and/or modified sequence
atgaagactgctcaagccctacataggatgtggatccaggctgttaaaaagttgaggagatggaaaggccgtgtgagtccctctgcaagctctccccttgttttccccaacctttcttcatgggaaggggagggaagcaaaaccattctcacagccccaggcatggaagagctgatatgggaacagtacactgtgaccctacaaaaggattccaaaagaggatttggaattgcagtgtccggaggcagagacaacccccactttgaaaatggagaaacgtcaattgtcatttctgatgtgctcccgggtgggcctgctgatgggctgctccaagaaaatgacagagtggtcatggtcaatggcacccccatggaggatgtgcttcattcgtttgcagttcagcagctcagaaaaagtgggaaggtcgctgctattgtggtcaagaggccccggaaggtccaggtggccgcacttcaggccagccctcccctggatcaggatgaccgggcttttgaggtgatggacgagtttgatggcagaagtttccggagtggctacagcgagaggagccggctgaacagccatggggggcgcagccgcagctgggaggacagcccggaaagggggcgtccccatgagcgggcccggagccgggagcgggacctcagccgggaccggagccgtggccggagcctggagcggggcctggaccaagaccatgcgcgcacccgagaccgcagccgtggccggagcctggagcggggcctggaccacgactttgggccatcccgggaccgggaccgtgaccgcagccgcggccggagcattgaccaggactacgagcgagcctatcaccgggcctacgacccagactacgagcgggcctacagcccggagtacaggcgcggggcccgccacgatgcccgctctcggggaccccgaagccgcagccgcgagcacccgcactcacggagccccagccccgagcctagggggcggccggggcccatcggggtcctcctgatgaaaagcagagcgaacgaagagtatggtctccggcttgggagtcagatcttcgtaaaggaaatgacccgaacgggtctggcaactaaagatggcaaccttcacgaaggagacataattctcaagatcaatgggactgtaactgagaacatgtctttaacggatgctcgaaaattgatagaaaagtcaagaggaaaactacagctagtggtgttgagagacagccagcagaccctcatcaacatcccgtcattaaatgacagtgactcagaaatagaagatatttcagaaatagagtcaaaccgatcattttctccagaggagagacgtcatcagtattctgattatgattatcattcctcaagtgagaagctgaaggaaaggccaagttccagagaggacacgccgagcagattgtccaggatgggtgcgacacccactccctttaagtccacaggggatattgcaggcacagttgtcccagagaccaacaaggaacccagataccaagaggaccccccagctcctcaaccaaaagcagccccgagaacttttcttcgtcctagtcctgaagatgaagcaatatatggccctaataccaaaatggtaaggttcaagaagggagacagcgtgggcctccggttggctggtggcaatgatgtcgggatatttgttgctggcattcaagaagggacctcggcggagcaggagggccttcaagaaggagaccagattctgaaggtgaacacacaggatttcagaggattagtgcgggaggatgccgttctctacctgttagaaatccctaaaggtgaaatggtgaccattttagctcagagccgagccgatgtgtatagagacatcctggcttgtggcagaggggattcgttttttataagaagccactttgaatgtgagaaggaaactccacagagcctggccttcaccagaggggaggtcttccgagtggtagacacactgtatgacggcaagctgggcaactggctggctgtgaggattgggaacgagttggagaaaggcttaatccccaacaagagcagagctgaacaaatggccagtgttcaaaatgcccagagagacaacgctggggaccgggcagatttctggagaatgcgtggccagaggtctggggtgaagaagaacctgaggaaaagtcgggaagacctcacagctgttgtgtctgtcagcaccaagttcccagcttatgagagggttttgctgcgagaagctggtttcaagagacctgtggtcttattcggccccatagctgatatagcaatggaaaaattggctaatgagttacctgactggtttcaaactgctaaaacggaaccaaaagatgcaggatctgagaaatccactggagtggtccggttaaataccgtgaggcaaattattgaacaggataagcatgcactactggatgtgactccgaaagctgtggacctgttgaattacacccagtggttcccaattgtgatttttttcaacccagactccagacaaggtgtcaaaaccatgagacaaaggttaaatccaacgtccaacaaaagttctcgaaagttatttgatcaagccaacaagcttaaaaaaacgtgtgcacacctttttacagctacaatcaacctaaattcagccaatgatagctggtttggcagcttaaaggacactattcagcatcagcaaggagaagcggtttgggtctctgaaggaaagatggaagggatggatgatgaccccgaagaccgcatgtcctacttaaccgccatgggcgcggactatctgagttgcgacagccgcctcatcagtgactttgaagacacggacggtgaaggaggcgcctacactgacaatgagctggatgagccagccgaggagccgctggtgtcgtccatcacccgctcctcggagccggtgcagcacgaggagagcataaggaaacccagcccagagccacgagctcagatgaggagggctgctagcagcgatcaacttagggacaatagcccgcccccagcattcaagccagagccgcccaaggccaaaacccagaacaaagaagaatcctatgacttctccaaatcctatgaatataagtcaaacccctctgccgttgctggtaatgaaactcctggggcatctaccaaaggttatcctcctcctgttgcagcaaaacctacctttgggcggtctatactgaagccctccactcccatccctcctcaagagggtgaggaggtgggagagagcagtgaggagcaagataatgctcccaaatcagtcctgggcaaagtcaaaatatttgagaagatggatcacaaggccaggttacagagaatgcaggagctccaggaagcacagaatgcaaggatcgaaattgcccagaagcatcctgatatctatgcagttccaatcaaaacgcacaagccagaccctggcacgccccagcacacgagttccagaccccctgagccacagaaagctccttccagaccttatcaggataccagaggaagttatggcagtgatgccgaggaggaggagtaccgccagcagctgtcagaacactccaagcgcggttactatggccagtctgcccgataccgggacacagaattatagatgtctgagcacggactctcccaggcctgcctgcatggcatcagactagccactcctgccaggccgccgggatggttcttctccagttagaatgcaccatggagacgtggtgggactccagctcgtgtgtcctcatggagaacccaggggacagctggtgcaaattcagaactgagggctctgtttgtgggactgggttagaggagtctgtggctttttgttcagaattaagcagaacactgcagtcagatcctgttacttgcttcagtggaccgaaatctgtattctgtttgcgtacttgtaatatgtatattaagaagcaataactatttttcctcattaatagctgccttcaaggactgtttcagtgtgagtcagaatgtgaaaaaggaataaaaaatactgttgggctcaaactaaattcaaagaagtactttattgcaactcttttaagtgccttggatgagaagtgtcttaaattttcttcctttgaagctttaggcagagccataatggactaaaacattttgactaagtttttataccagcttaatagctgtagttttccctgcactgtgtcatcttttcaaggcatttgtctttgtaatattttccataaatttggactgtctatatcataactatacttgatagtttggctataagtgctcaatagcttgaagcccaagaagttggtatcgaaatttgttgtttgtttaaacccaagtgctgcacaaaagcagatacttgaggaaaacactatttccaaaagcacatgtattgacaacagttttataatttaataaaaaggaatacattgcaatccgtaatttt

SEQ ID NO: 66482 - protein, 108 aa, Artificial Sequence
  derived and/or modified sequence
MASLSRPSLPSCLCSFLLLLLLQVSSSYADPFYWVSPGVLVLLAVLPVLLLQITVGLIFLCLQYRLRGKLRAEIENLHRTFESFGVLGPQVKEPKKTGQFLEELRNPF

SEQ ID NO: 66483 - DNA, 327 bp, Artificial Sequence
  derived and/or modified sequence
atggcttctctatcccggcctagcctaccgtcctgcctctgctcatttctgttactgttgctgttgcaggtgagtagtagctacgcggatcccttctactgggtctctccaggggtactggtcctgcttgccgtgcttccggttctattgttacagattacggttggtttgatttttctgtgtctgcagtacaggctccgaggcaagctcagggcagagatcgaaaaccttcaccgcacctttgaatcatttggtgtcctcgggccccaggtgaaggaaccgaagaagactggccagtttctggaagagctcaggaatcctttctag

SEQ ID NO: 66484 - DNA, 327 bp, Artificial Sequence
  derived and/or modified sequence
atggccagcctgagccggcccagcctgcccagctgcctgtgcagcttcctgctgctgctgctgctgcaggtgagcagcagctatgctgaccccttctactgggtgtccccaggagtgctggtgctgctggccgtgctgcctgtgctgctgctgcagatcaccgtgggcctcatcttcctgtgcctgcagtaccgcctgcggggcaagctgcgggcagaaattgagaacctgcacaggacctttgagagctttggagtgctgggcccccaggtgaaggagcccaagaagacaggccagttcctggaggagctgaggaaccccttctag

SEQ ID NO: 66485 - DNA, 327 bp, Artificial Sequence
  derived and/or modified sequence
atggcaagcttatcaagaccctctctgcccagctgcctctgctccttcctcctcctcctcctcctccaagtgtcttccagctatgcagatcctttctactgggtgagccctggagtgctggttctcctcgcggtgctgcctgtgctcctcctgcagatcactgttggcctcatcttcctctgcctgcagtacagactgagaggaaaacttcgagcagagatagagaatctccaccggacttttgagtcctttggtgttctaggaccccaggttaaggaaccaaaaaagacagggcaattccttgaagagctacgaaatcccttctga

SEQ ID NO: 66486 - DNA, 327 bp, Artificial Sequence
  derived and/or modified sequence
atggccagcctgagccggcccagcctgcccagctgcctgtgcagctttctgctgcttctattactgcaggtgagcagcagctacgctgacccattctattgggtgtcacctggcgtgctcgtgctccttgcagtcttgccagttctcctgctacaaatcaccgttggtcttatttttctctgtctgcagtatcggctgcgtgggaaacttcgggccgagatcgaaaatctgcatcggacattcgaaagctttggtgtgctgggtccacaagtcaaggagccaaagaaaacaggccagttcctggaagagctccgtaaccctttctag

SEQ ID NO: 66487 - DNA, 327 bp, Artificial Sequence
  derived and/or modified sequence
atggccagcctaagtagaccttccttgccgagttgtctgtgctcgtttctgttattactgctgctccaggtgtcctccagctacgctgatcctttttactgggtctcaccaggcgtgcttgtgctcctggccgtgctgcccgtcttgctgttacagattaccgtgggactgattttcctgtgcttgcagtaccgacttcgtgggaagcttagggcggaaatcgagaaccttcatcgaacctttgaatcttttggagtactggggccacaggtgaaagaacctaaaaaaaccggccaattcctggaagagctaagaaatcctttttag

SEQ ID NO: 66488 - DNA, 327 bp, Artificial Sequence
  derived and/or modified sequence
atggccagcctgagcagacccagcctgcccagctgcctgtgcagcttcctgctgctgctgctgctgcaggtgagcagcagctacgccgaccccttctactgggtgagccccggcgtgctggtgctgctggccgtgctgcccgtgctgctgctgcagatcaccgtgggcctgatcttcctgtgcctgcagtacagactgagaggcaagctgagagccgagatcgagaacctgcacagaaccttcgagagcttcggcgtgctgggcccccaggtgaaggagcccaagaagaccggccagttcctggaggagctgagaaaccccttctag

SEQ ID NO: 66489 - protein, 413 aa, Artificial Sequence
  derived and/or modified sequence
MENMLLWLIFFTPGWTLIDGSEMEWDFMWHLRKVPRIVSERTFHLTSPAFEADAKMMVNTVCGIECQKELPTPSLSELEDYLSYETVFENGTRTLTRVKVQDLVLEPTQNITTKGVSVRRKRQVYGTDSRFSILDKRFLTNFPFSTAVKLSTGCSGILISPQHVLTAAHCVHDGKDYVKGSKKLRVGLLKMRNKSGGKKRRGSKRSRREASGGDQREGTREHLRERAKGGRRRKKSGRGQRIAEGRPSFQWTRVKNTHIPKGWARGGMGDATLDYDYALLELKRAHKKKYMELGISPTIKKMPGGMIHFSGFDNDRADQLVYRFCSVSDESNDLLYQYCDAESGSTGSGVYLRLKDPDKKNWKRKIIAVYSGHQWVDVHGVQKDYNVAVRITPLKYAQICLWIHGNDANCAYG

SEQ ID NO: 66490 - DNA, 1242 bp, Artificial Sequence
  derived and/or modified sequence
atggaaaatatgttgctttggctcattttcttcacccccggatggactctgatcgacgggtccgagatggagtgggattttatgtggcatctgagaaaggtgcccaggattgtcagtgaaagaacgtttcatctgacctccccagcctttgaggccgatgcaaagatgatggtgaataccgtgtgcggtatcgagtgccagaaagagctccccacacccagcctatccgaactcgaggattatctatcttatgaaacagtttttgaaaacggaacaagaacactaacacgagttaaggtgcaggatcttgtcctggagccgacgcagaacataaccaccaagggagtgtccgtgcgacgcaagagacaggtgtacggcactgattcaagattctccatcctagacaagcggtttctcaccaacttcccctttagcacggcggtcaaactaagcacaggttgttccgggatactcatctcgccccagcatgtgctcacggcggcacactgcgtccacgatggaaaggactacgtcaagggttctaaaaaattgcgtgttggtcttttaaagatgcgaaataaatccggaggaaaaaagcgcagggggtcgaagcgctcaaggcgcgaggctagtgggggagatcaacgcgagggtacacgtgagcacctccgagaaagagcaaaggggggaagacggaggaagaagtccgggagaggccaacggattgcagaaggcaggccttctttccaatggacgcgcgtgaagaacactcacatccctaagggctgggcgcgaggtgggatgggggacgctacacttgattacgattatgctctgttagagctcaaacgggcacataaaaaaaagtatatggaattagggatttcgcccactatcaagaagatgccaggcggtatgatccacttctccgggttcgacaacgatagggctgatcagttggtctacaggttttgctcagtgtcggacgaatctaacgacctgctgtatcagtattgcgatgcagagtccggcagtaccggctccggcgtgtatctgagactgaaggacccagataagaaaaactggaagaggaaaatcatagctgtgtactccgggcaccagtgggtggatgtgcatggcgtgcagaaagactataacgtggcagtacgcataactcccctcaaatatgctcagatttgcctgtggattcatggaaatgacgcaaactgcgcctacggatag

SEQ ID NO: 66491 - DNA, 1242 bp, Artificial Sequence
  derived and/or modified sequence
atggaaaacatgctcctttggctgatcttcttcactccaggatggactttaattgacggcagcgaaatggagtgggatttcatgtggcatctgcggaaagtacccagaattgtaagtgaacgcactttccatttgacaagtccagccttcgaagccgacgctaagatgatggtcaataccgtgtgcgggattgaatgccagaaggaactgccgaccccgagtctaagtgaactggaagattatttgtcctatgagacagtgttcgagaacggcacccgaacattaaccagggtgaaggtccaggatcttgtacttgaacctacgcagaacatcacaactaagggtgtttccgtacgcagaaagcggcaagtctatggaacagactcccgttttagtatcctcgataagcggttcctgacgaattttcccttcagtaccgctgtgaaactctccaccggttgctccggaatcctgatatctccacaacacgtattgacagcagctcattgcgtgcacgatgggaaggattacgttaaggggagcaagaaactcagggttggactcctcaagatgcgaaacaaatctggcggaaagaaacgcagagggtctaaacggtcccggagggaagcctctggaggggaccagagagaaggaactcgggaacacttgcgggagagggccaagggcggtcggcgtcggaaaaaatcgggcaggggccagcgtatagccgaagggagaccctcctttcagtggactagagttaaaaacacacatattccaaagggctgggcacgcggaggaatgggagatgctactctggactacgattacgcactgctggaacttaagcgcgctcacaagaaaaagtacatggaacttgggattagccccacgatcaagaagatgccgggagggatgatacacttttccgggttcgacaacgatagggccgatcagctcgtgtaccgattttgtagcgtttctgacgagtctaacgacctgctgtatcaatactgtgacgccgagagtggaagtaccggtagtggagtgtatctcagactcaaagatcccgacaaaaaaaattggaagagaaagataatcgccgtctatagcgggcaccagtgggtagatgttcacggggttcagaaagactacaatgtcgctgttcggatcaccccgcttaaatacgcccagatctgcctatggatccacggtaatgacgccaactgtgcctacgggtag

SEQ ID NO: 66492 - DNA, 1242 bp, Artificial Sequence
  derived and/or modified sequence
atggagaacatgctgctctggctaatattctttacccctggatggacactaattgacggcagcgagatggagtgggactttatgtggcacctgcgaaaagtgcctcgcattgtcagcgagagaacctttcaccttacttctcccgcttttgaagcagacgcaaagatgatggtgaataccgtctgcggaatagaatgccagaaggagcttccgaccccttcactctctgaactcgaggactatttgtcttacgagaccgtgtttgaaaatggtacaagaacattaacgagggttaaagtgcaagacctcgtgctggagccaacccagaacattacaaccaaaggagttagcgtgagacgcaagaggcaagtgtatggaacagactcacgattttctatccttgacaaacgattcctgacgaattttccgttttctactgctgtgaaactttcaaccggctgctccggtattcttatatcaccccagcacgtgttgaccgccgcccactgcgttcacgacggcaaagattatgttaaagggtcaaaaaagctgcgcgtgggactgctgaagatgaggaacaaatctggtggcaaaaagagaagagggtccaaaaggagtcgtcgggaggcttccgggggagatcagcgtgaaggaactcgggaacacctccgagaacgtgccaaagggggccgaaggaggaaaaagtcaggaaggggacagcgaattgctgaaggtaggccatcctttcagtggacacgggtgaagaacacacatattccaaaggggtgggcacgtggggggatgggggatgcaactttggactacgattacgctctgcttgaactgaaacgggctcataagaagaaatacatggagctggggatctcacccactattaaaaaaatgcccgggggcatgatacatttcagcggcttcgataacgatcgagcagaccagctggtgtaccgcttctgttcagtgagcgacgaatcaaatgaccttctgtatcaatactgcgacgctgaatcaggctctacagggtcaggtgtatatctccgcctgaaggatcccgacaaaaagaattggaagaggaaaattatcgctgtgtattcaggacaccaatgggtcgatgttcatggcgtgcagaaagattataatgtggccgtgagaatcaccccactgaagtacgcgcagatttgtctctggattcatgggaatgatgctaactgtgcatacggatag

SEQ ID NO: 66493 - DNA, 1242 bp, Artificial Sequence
  derived and/or modified sequence
atggagaatatgttgctgtggcttatattttttacgcccggttggaccctgatagacggatctgaaatggagtgggactttatgtggcacctgaggaaagtgcctagaatcgtcagcgaacgcacgtttcatctgacatctccggcttttgaggctgatgcaaagatgatggttaacacggtctgtggaatagaatgccagaaggaattacccacgccctctttgtctgagcttgaagactatctttcgtatgagaccgttttcgaaaacggcacgcgaacccttacgagggtgaaagtccaagacttggtgttagaacccacacagaacatcacaaccaagggggtatccgtgagaagaaaacgacaagtttacgggacggattctcgttttagtatactcgacaaaaggttcttgacaaatttccctttctcaacagccgtgaagctttcaactggctgcagcgggattctgatctctccccagcacgtgctgaccgccgcccactgcgtgcacgacgggaaagactacgtgaaaggatctaagaagttaagggttggcctcctgaagatgaggaacaaatccggtggaaagaagagacgtggatctaagcggagtcggcgcgaagcatcaggtggagaccagcgggaaggcacccgtgagcacttaagggagcgcgctaaaggtggacgccgacggaagaagagtggtagagggcagaggatagccgagggacgcccgagttttcagtggacaagggttaaaaacacacacatacccaaggggtgggccagggggggcatgggagacgctacactggactatgactatgcactcctggagctcaagcgagcgcacaaaaagaaatacatggaacttggcatctccccaacaattaaaaagatgccaggcgggatgattcacttctccggatttgacaatgatagggctgaccagctcgtctaccggttttgcagcgtgtccgacgagtctaatgacctgctctatcagtactgcgacgcggaatcaggctctactggcagcggggtgtacctgcggctgaaagaccctgacaagaaaaattggaaaaggaaaattatcgccgtctactccggtcaccagtgggttgatgtacacggcgtacaaaaggattacaacgtggccgtccgaatcacacctctgaagtacgcccagatttgtctctggattcacggaaatgatgcaaactgtgcatacggctag

SEQ ID NO: 66494 - DNA, 1242 bp, Artificial Sequence
  derived and/or modified sequence
atggaaaatatgctattgtggctgatcttctttacccctggttggacgctgatcgacggctctgaaatggaatgggatttcatgtggcacctgaggaaagtgcctaggatcgtttcagagcgaacgtttcatctcacctctcctgctttcgaagccgacgctaaaatgatggtcaatacagtctgtgggatagaatgccaaaaggagttacccaccccaagtctctcggagcttgaggactatctttcgtacgagacagtattcgagaatggaacccgaactcttaccagagtcaaagtgcaagacctcgtgctggagccaacccagaacattacaaccaaaggagttagcgtgagacgcaagaggcaagtgtatggaacagactcacgattttctatccttgacaaacgattcctgacgaattttccgttttctactgctgtgaaactttcaaccggctgctccggtattcttatatcaccccagcacgtgttgaccgccgcccactgcgttcacgacggcaaagattatgttaaagggtcaaaaaagctgcgcgtgggactgctgaagatgaggaacaaatctggtggcaaaaagagaaggggcagtaaacggtcccgtcgggaagcaagcggaggcgatcaaagagaaggaaccagagaacatttacgagagcgggcaaagggggggcggaggaggaaaaaatccggacgaggccagagaattgcagaaggacgccctagcttccagtggactcgggtgaagaacacacatattccaaagggatgggcccgtgggggaatgggcgatgcgacccttgattatgattatgcactgttggaactaaaacgggcacataagaaaaagtatatggaactgggcatcagtcccactatcaaaaaaatgcctggtggaatgatacacttcagcggtttcgataacgacagggctgatcagctagtgtataggttttgctccgtttccgatgagtctaacgatctcctgtaccaatattgtgatgccgagtcgggctcaactggcagtggcgtctacctacgcctcaaggatccagacaaaaaaaattggaagagaaaaataatagcagtgtatagcgggcaccagtgggttgatgtacatggagtgcaaaaagactacaacgtcgcggtgaggatcacccccctgaagtatgcccaaatttgtctctggatccatggtaacgacgccaattgtgcttacggctag

SEQ ID NO: 66495 - DNA, 1242 bp, Artificial Sequence
  derived and/or modified sequence
atggagaacatgttactgtggcttatttttttcaccccaggctggacactcatcgacggctcagagatggaatgggattttatgtggcacctacggaaggtaccaagaatcgttagtgaacgtacgttccacttgacctcccccgcattcgaagccgatgcaaagatgatggtgaatactgtgtgcggaattgagtgccagaaggagcttccaaccccctcccttagcgaactcgaagactacttgtcttatgaaacagtttttgaaaacggcaccaggactctgacccgggtgaaggtgcaagatctggtgctcgagcctacacagaacatcactactaagggggtctcggtgcggagaaaaaggcaggtgtacgggacagacagccgatttagcattttagacaaacgatttttgacaaattttccattcagtaccgccgttaagctgtcaaccgggtgcagcggaattctcataagcccacaacacgttctgaccgcagctcattgcgtccacgatgggaaagactatgttaagggctcaaagaagttgagggtaggcctcttaaagatgcgcaacaaatcgggaggcaaaaaacggagaggttctaaacggtccaggcgtgaggcaagcggaggtgatcaaagggaggggacccgagagcatctgcgggagagagccaaaggtggacggcgcagaaagaagtccggacgagggcagagaatagctgaggggagacctagttttcagtggaccagggttaagaacacgcacatcccaaaaggctgggcgcgcggtggcatgggcgacgcgactctagactatgattatgctctgttggaattgaagcgtgcccataaaaaaaagtacatggagttaggcatatcacctacgattaaaaagatgcccggaggaatgatacactttagcgggtttgacaatgatcgcgcggatcaactggtctacaggttttgcagcgtgagtgacgaatcaaatgatttactttatcagtattgcgacgccgaatctgggagtacaggaagcggcgtgtatctccgactgaaagatcccgacaaaaagaactggaaaagaaagatcattgcggtctattctggccatcagtgggtggatgtgcacggcgtccagaaggactataatgtggcagtaagaataacacccctcaaatacgcacagatttgcttatggattcatgggaatgacgcaaactgcgcttacgggtag

SEQ ID NO: 66496 - DNA, 2604 bp, Artificial Sequence
  derived and/or modified sequence
atcgccccctttcccctcccatctcccggccgtggtgcggcgcagctctctccccctccgcagtctcagtggcgagctctgggtgctgtggcccggccttggcggggcggcctccggctcaggctggctgagaggctcccagctgcagcgtccccgcccgcctcctcgggagctctgatctcagctgacagtgccctcggggaccaaacaagcctggcagggtctcactttgttgcccaggctggagttcagtgccatgatcatggtttactgcagccttgacctcctgggttcaagcgatcctgctgagtagctgggactacaggacaaaattagaagatcaaaatggaaaatatgctgctttggttgatatttttcacccctgggtggaccctcattgatggatctgaaatggaatgggattttatgtggcacttgagaaaggtaccccggattgtcagtgaaaggactttccatctcaccagccccgcatttgaggcagatgctaagatgatggtaaatacagtgtgtggcatcgaatgccagaaagaactcccaactcccagcctttctgaattggaggattatctttcctatgagactgtctttgagaatggcacccgaaccttaaccagggtgaaagttcaagatttggttcttgagccgactcaaaatatcaccacaaagggagtatctgttaggagaaagagacaggtgtatggcaccgacagcaggttcagcatcttggacaaaaggttcttaaccaatttccctttcagcacagctgtgaagctttccacgggctgtagtggcattctcatttcccctcagcatgttctaactgctgcccactgtgttcatgatggaaaggactatgtcaaagggagtaaaaagctaagggtagggttgttgaagatgaggaataaaagtggaggcaagaaacgtcgaggttctaagaggagcaggagagaagctagtggtggtgaccaaagagagggtaccagagagcatctgcgggagagagcgaagggtgggagaagaagaaaaaaatctggccggggtcagaggattgccgaagggaggccttcctttcagtggacccgggtcaagaatacccacattccgaagggctgggcacgaggaggcatgggggacgctaccttggactatgactatgctcttctggagctgaagcgtgctcacaaaaagaaatacatggaacttggaatcagcccaacgatcaagaaaatgcctggtggaatgatccacttctcaggatttgataacgatagggctgatcagttggtctatcggttttgcagtgtgtccgacgaatccaatgatctcctttaccaatactgcgatgctgagtcgggctccaccggttcgggggtctatctgcgtctgaaagatccagacaaaaagaattggaagcgcaaaatcattgcggtctactcagggcaccagtgggtggatgtccacggggttcagaaggactacaacgttgctgttcgcatcactcccctaaaatacgcccagatttgcctctggattcacgggaacgatgccaattgtgcttacggctaacagagacctgaaacagggcggtgtatcatctaaatcacagagaaaaccagctctgcttaccgtagtgagatcacttcataggttatgcctggacttgaactctgtcaatagcatttcaacatttttcaaaatcaggagattttcgtccatttaaaaaatgtataggtgcagatattgaaactaggtgggcacttcaatgccaagtatatactcttctttacatggtgatgagtttcatttgtagaaaaattttgttgccttcttaaaaattagacacactttaaaccttcaaacaggtattataaataacatgtgactccttaatggacttattctcagggtcctactctaagaagaatctaataggatgctggttgtgtattaaatgtgaaattgcatagataaaggtagatggtaaagcaattagtatcagaatagagacagaaagttacaacacagtttgtactactctgagatggatccattcagctcatgccctcaatgtttatattgtgttatctgttgggtctgggacatttagtttagtttttttgaagaattacaaatcagaagaaaaagcaagcattataaacaaaactaataactgttttactgctttaagaaataacaattacaatgtgtattatttaaaaatgggagaaatagtttgttctatgaaataaacctagtttagaaatagggaagctgagacattttaagatctcaagtttttatttaactaatactcaaaatatggacttttcatgtatgcatagggaagacacttcacaaattatgaatgatcatgtgttgaaagccacattattttatgctatacattctatgtatgaggtgctacatttttaggacaaagaattctgtaatctttttcaagaaagagtctttttctccttgacaaaatccagcttttgtatgaggactatagggtgaattctctgattagtaattttagatatgtcctttcctaaaaatgaataaaatttatgaatatgactt

SEQ ID NO: 66497 - DNA, 1242 bp, Artificial Sequence
  derived and/or modified sequence
atggagaacatgctgctgtggctgatcttcttcacccccggctggaccctgatcgacggcagcgagatggagtgggacttcatgtggcacctgagaaaggtgcccagaatcgtgagcgagagaaccttccacctgaccagccccgccttcgaggccgacgccaagatgatggtgaacaccgtgtgcggcatcgagtgccagaaggagctgcccacccccagcctgagcgagctggaggactacctgagctacgagaccgtgttcgagaacggcaccagaaccctgaccagagtgaaggtgcaggacctggtgctggagcccacccagaacatcaccaccaagggcgtgagcgtgagaagaaagagacaggtgtacggcaccgacagcagattcagcatcctggacaagagattcctgaccaacttccccttcagcaccgccgtgaagctgagcaccggctgcagcggcatcctgatcagcccccagcacgtgctgaccgccgcccactgcgtgcacgacggcaaggactacgtgaagggcagcaagaagctgagagtgggcctgctgaagatgagaaacaagagcggcggcaagaagagaagaggcagcaagagaagcagaagagaggccagcggcggcgaccagagagagggcaccagagagcacctgagagagagagccaagggcggcagaagaagaaagaagagcggcagaggccagagaatcgccgagggcagacccagcttccagtggaccagagtgaagaacacccacatccccaagggctgggccagaggcggcatgggcgacgccaccctggactacgactacgccctgctggagctgaagagagcccacaagaagaagtacatggagctgggcatcagccccaccatcaagaagatgcccggcggcatgatccacttcagcggcttcgacaacgacagagccgaccagctggtgtacagattctgcagcgtgagcgacgagagcaacgacctgctgtaccagtactgcgacgccgagagcggcagcaccggcagcggcgtgtacctgagactgaaggaccccgacaagaagaactggaagagaaagatcatcgccgtgtacagcggccaccagtgggtggacgtgcacggcgtgcagaaggactacaacgtggccgtgagaatcacccccctgaagtacgcccagatctgcctgtggatccacggcaacgacgccaactgcgcctacggctag

SEQ ID NO: 66498 - DNA, 1242 bp, Artificial Sequence
  derived and/or modified sequence
atggagaatatgctgctgtggctgatctttttcacgcccggctggacactgatcgatggctccgaaatggagtgggacttcatgtggcaccttcggaaagttccaagaatagtttctgaaagaacgttccatttaacatctccagcctttgaagctgacgctaagatgatggtgaatacggtgtgcggaatagagtgtcagaaagagcttccgacaccaagcctgtcagagctggaagattacctaagttacgaaacagtgtttgagaacggaaccagaacacttacccgagtgaaggtgcaagacctagtactggaacctactcagaatatcaccacaaagggcgtatctgtgagaagaaagcggcaggtctatgggaccgattctcggttttccatcctggacaagcgcttccttactaattttccattctccacagcagtaaaattgagtaccggatgttccggcatattgattagccctcaacatgtattgacagccgcacattgcgtccatgacggaaaagattatgtcaagggatccaaaaaactccgcgtgggactattgaaaatgagaaacaagagtggcggaaagaaacggcgtggctctaaaagaagcagacgcgaagccagcgggggagatcagagagagggaactagagagcatctgcgggaaagagcaaagggcgggagacggcggaaaaaaagtggtcgcgggcagcggatcgctgagggaagaccaagcttccagtggacaagagtgaagaacacccacatacccaaagggtgggccaggggcgggatgggcgatgccacactggattacgactacgccctgctggagcttaagcgcgcacataagaaaaaatatatggaactggggattagtcccaccattaaaaaaatgccggggggcatgattcactttagtggcttcgataacgatagagccgaccagctggtttatcgcttttgctctgtatctgatgaatctaacgatctcctttaccagtactgtgacgccgagtcaggttcaactggatcgggtgtttatcttaggctgaaggatccagataaaaaaaattggaagaggaagatcatcgccgtgtactcaggtcatcaatgggtggatgtgcacggtgtgcagaaggattacaatgtggccgtcaggattacacctctaaaatacgctcagatttgcctgtggatacatggaaatgatgcgaattgcgcatatggctag

SEQ ID NO: 66499 - DNA, 1242 bp, Artificial Sequence
  derived and/or modified sequence
atggagaatatgttattgtggcttatcttttttacgccgggctggactctgattgatgggtccgaaatggaatgggattttatgtggcacctgagaaaggtgcctcggattgtgagcgaacgcacattccacctgacatctcctgcctttgaggccgatgccaagatgatggttaacacagtatgtggaattgaatgtcagaaggaactgcctactccctctttaagtgagttggaggattacctctcctacgagaccgtgttcgagaacggcacgcggacattaacccgcgtcaaggtgcaggatttagtgctggagccaacccagaatattactacaaagggtgtctctgttaggcgtaaaagacaggtgtatggaaccgatagccgatttagtatcctggacaaaagattcctaaccaacttcccattttccactgcggtgaagctctctaccggctgttctggcatcttaattagcccccagcacgttctcactgccgcacattgtgtccatgacgggaaagattatgtgaaagggtccaaaaaacttcgcgtgggcttactgaaaatgaggaataagtctggcggtaaaaaaaggcgcggatccaagcggtcccggcgtgaggcatcaggcggggaccagcgagaaggcacacgggaacatttgcgtgagagagctaaagggggtaggaggcgtaagaagagcggacgcggccagagaatcgctgagggtaggcccagtttccagtggaccagagtgaagaatacacacattccgaaaggatgggcgaggggaggcatgggcgacgcaaccctcgattatgactacgcactcctcgagctaaaacgagcgcacaaaaaaaaatacatggagctgggcatcagccccaccatcaagaaaatgccagggggtatgattcacttttcaggatttgacaatgatcgggccgatcagcttgtgtaccgcttctgttccgtttctgacgagtctaacgatctgctctatcagtattgcgacgcggagagcggaagtactgggagcggagtgtatttacgactgaaggaccctgacaagaagaattggaaacgcaagatcatcgccgtatatagtgggcatcagtgggtcgatgtgcacggagttcaaaaagattataacgtcgcagtgcgaattacgcccctcaagtacgcgcagatctgtctgtggatacatgggaatgacgcgaactgcgcatacggatag

SEQ ID NO: 66500 - DNA, 2440 bp, Artificial Sequence
  derived and/or modified sequence
tctcagtggcgagctctgggtgctgtggcccggccttggcggggcggcctccggctcaggctggctgagaggctcccagctgcagcgtccccgcccgcctcctcgggagctctgatctcagctgacagtgccctcggggaccaaacaagcctggcaggacaaaattagaagatcaaaatggaaaatatgctgctttggttgatatttttcacccctgggtggaccctcattgatggatctgaaatggaatgggattttatgtggcacttgagaaaggtaccccggattgtcagtgaaaggactttccatctcaccagccccgcatttgaggcagatgctaagatgatggtaaatacagtgtgtggcatcgaatgccagaaagaactcccaactcccagcctttctgaattggaggattatctttcctatgagactgtctttgagaatggcacccgaaccttaaccagggtgaaagttcaagatttggttcttgagccgactcaaaatatcaccacaaagggagtatctgttaggagaaagagacaggtgtatggcaccgacagcaggttcagcatcttggacaaaaggttcttaaccaatttccctttcagcacagctgtgaagctttccacgggctgtagtggcattctcatttcccctcagcatgttctaactgctgcccactgtgttcatgatggaaaggactatgtcaaagggagtaaaaagctaagggtagggttgttgaagatgaggaataaaagtggaggcaagaaacgtcgaggttctaagaggagcaggagagaagctagtggtggtgaccaaagagagggtaccagagagcatctgcgggagagagcgaagggtgggagaagaagaaaaaaatctggccggggtcagaggattgccgaagggaggccttcctttcagtggacccgggtcaagaatacccacattccgaagggctgggcacgaggaggcatgggggacgctaccttggactatgactatgctcttctggagctgaagcgtgctcacaaaaagaaatacatggaacttggaatcagcccaacgatcaagaaaatgcctggtggaatgatccacttctcaggatttgataacgatagggctgatcagttggtctatcggttttgcagtgtgtccgacgaatccaatgatctcctttaccaatactgcgatgctgagtcgggctccaccggttcgggggtctatctgcgtctgaaagatccagacaaaaagaattggaagcgcaaaatcattgcggtctactcagggcaccagtgggtggatgtccacggggttcagaaggactacaacgttgctgttcgcatcactcccctaaaatacgcccagatttgcctctggattcacgggaacgatgccaattgtgcttacggctaacagagacctgaaacagggcggtgtatcatctaaatcacagagaaaaccagctctgcttaccgtagtgagatcacttcataggttatgcctggacttgaactctgtcaatagcatttcaacatttttcaaaatcaggagattttcgtccatttaaaaaatgtataggtgcagatattgaaactaggtgggcacttcaatgccaagtatatactcttctttacatggtgatgagtttcatttgtagaaaaattttgttgccttcttaaaaattagacacactttaaaccttcaaacaggtattataaataacatgtgactccttaatggacttattctcagggtcctactctaagaagaatctaataggatgctggttgtgtattaaatgtgaaattgcatagataaaggtagatggtaaagcaattagtatcagaatagagacagaaagttacaacacagtttgtactactctgagatggatccattcagctcatgccctcaatgtttatattgtgttatctgttgggtctgggacatttagtttagtttttttgaagaattacaaatcagaagaaaaagcaagcattataaacaaaactaataactgttttactgctttaagaaataacaattacaatgtgtattatttaaaaatgggagaaatagtttgttctatgaaataaacctagtttagaaatagggaagctgagacattttaagatctcaagtttttatttaactaatactcaaaatatggacttttcatgtatgcatagggaagacacttcacaaattatgaatgatcatgtgttgaaagccacattattttatgctatacattctatgtatgaggtgctacatttttaggacaaagaattctgtaatctttttcaagaaagagtctttttctccttgacaaaatccagcttttgtatgaggactatagggtgaattctctgattagtaattttagatatgtcctttcctaaaaatgaataaaatttatgaatatgacttaaaa

SEQ ID NO: 66501 - DNA, 1242 bp, Artificial Sequence
  derived and/or modified sequence
atggagaacatgctgctgtggctgatcttcttcaccccaggctggaccctgattgatggcagcgagatggagtgggacttcatgtggcacctgaggaaggtgcccagaattgtgtctgagaggaccttccacctgaccagccctgcctttgaagcagatgccaagatgatggtgaacacagtgtgtggcatcgagtgccagaaggagctgcccacccccagcctgtctgagctggaggactacctgtcctatgagaccgtgtttgaaaatggcaccaggaccctgaccagggtgaaggtgcaggacctggtgctggagcccacccagaacatcaccaccaagggcgtgtctgtgcggaggaagaggcaggtgtatggaacagacagccgcttcagcatcctggacaagcgcttcctgaccaacttccccttcagcacagctgtgaagctgagcacaggctgcagcggcatcctgatcagcccccagcacgtgctgacagctgcccactgtgtgcatgatggcaaggactatgtgaagggcagcaagaagctgcgggtgggcctgctgaagatgaggaacaagagcggcggcaagaagaggcggggcagcaagaggagcagaagagaggccagcggcggggaccagcgggagggcacccgggagcacctgcgggagcgggccaagggcggcagaagaaggaagaagagcggccggggccagagaattgctgagggccggcccagcttccagtggaccagggtgaagaacacccacatccccaagggctgggcccggggcggcatgggagatgccaccctggactatgactatgccctgctggagctgaagagggcccacaagaagaagtacatggagctgggcatcagccccaccatcaagaagatgcctgggggcatgatccacttcagcggctttgacaatgacagagctgaccagctggtgtaccgcttctgcagcgtgtctgatgagagcaatgacctgctgtaccagtactgtgatgctgagagcggcagcacaggcagcggcgtgtacctgcggctgaaggaccctgacaagaagaactggaagaggaagatcatcgctgtgtacagcggccaccagtgggtggatgtgcatggagtgcagaaggactacaacgtggccgtgcgcatcacccccctgaagtatgcccagatctgcctgtggatccacggcaatgatgccaactgtgcctacggctag

SEQ ID NO: 66502 - DNA, 1242 bp, Artificial Sequence
  derived and/or modified sequence
atggagaacatgctgctgtggctgatcttcttcacccccggctggacactgattgatgggagtgaaatggagtgggatttcatgtggcatctgcgcaaggtgccaagaatcgtttccgagcgaacatttcatttaacaagcccggccttcgaggcagatgcgaaaatgatggtgaatacagtctgcggaatcgagtgccagaaggagttgccaaccccctcccttagtgaactggaggattacctctcttatgagactgtctttgagaacggaaccagaacactcaccagggtgaaggtgcaggacctagtgttggagcccacccaaaacatcacgaccaagggggtgtccgtgcggaggaaaagacaggtttacgggactgacagcagattttccatactggataaacggtttctgacgaactttccatttagtacagctgttaagctttctacagggtgtagcggaatcctcatctcaccccagcacgtattgacagccgcccactgcgttcacgacggtaaagactatgttaagggctctaaaaagctcagagtgggcctcctaaaaatgcggaacaagagtgggggtaaaaagcgcagagggagtaagagatctcggagagaggccagcggcggagatcagagagaaggaacgcgtgaacacctgcgtgaacgggctaagggagggcggcgccgaaagaagtctggccgtggtcagcggatcgccgaaggtcgcccttctttccaatggacccgcgtcaagaatactcacatccctaaagggtgggccagaggcgggatgggagacgccactctggactacgactacgccttactcgaattaaaacgcgctcacaagaaaaagtacatggaactcggcatatcgccaactatcaagaaaatgccagggggaatgatacactttagcgggtttgataacgacagagccgaccagttggtctatcgtttttgcagtgtctctgatgagagcaatgacctgctgtatcagtactgtgatgccgagagcggctctactgggagtggagtgtatttaagacttaaagatcctgataaaaagaattggaagaggaaaattattgctgtctactccggacaccagtgggtagatgtccacggggtacagaaagactataacgtagccgtacggattacacctctcaagtacgcgcaaatttgcctgtggatacacggcaatgacgcaaattgtgcatatgggtag

SEQ ID NO: 66503 - DNA, 1242 bp, Artificial Sequence
  derived and/or modified sequence
atggagaacatgctgctgtggctgatcttcttcacccccggctggacgctcatagacggaagcgaaatggagtgggatttcatgtggcacctgaggaaggtacccaggatcgtgtccgagcgcacattccacctcactagcccggcgttcgaagcagacgcaaaaatgatggtcaacactgtttgcggaattgagtgccaaaaggagttaccgacgccctccctgtcagaattggaagattatctgagttacgagaccgttttcgagaatggcacaaggactctcacacgcgtgaaggtccaagatctggtgctggaaccaacccagaacattaccactaaaggtgtgtcggtgaggagaaaaaggcaggtatatggaacagattccaggttttcgatccttgacaaacgattcctgaccaactttccattttctacggcagtgaagttgtccactggctgctccgggattctgattagcccacagcacgtgctcactgcagcacactgcgttcacgatggaaaagattatgtaaagggctccaaaaaacttcgcgtaggattgctaaaaatgcgcaacaaatcggggggaaagaagcgccgggggtccaagagaagtcgacgggaagccagcgggggagaccagcgagagggaactcgggagcacctgcgagagagggccaagggggggcggaggaggaaaaaatcaggacggggccagcgcatagccgaggggcgcccgagttttcagtggacccgagtgaagaacacccacatccctaaaggatgggcacgggggggcatgggggacgccaccctggactatgattacgctttgctggagttaaagagagcacataagaaaaagtatatggaactcggaatatcgcctaccataaaaaaaatgccaggaggcatgattcatttctcaggattcgataatgatagagctgaccagcttgtttatcgattttgcagcgtgagcgacgaaagtaacgacctactgtaccagtactgtgatgcagagtctggtagtactggatcgggcgtgtacctgcggctgaaggatcctgataaaaaaaattggaaaaggaagattatcgccgtctattcaggacaccagtgggtggacgtccacggagtgcagaaagattacaatgtggccgttcgaatcacccccctgaaatatgcccagatctgtctgtggattcacggcaacgatgccaactgtgcctatggctag

SEQ ID NO: 66504 - RNA, 1242 nt, Artificial Sequence
  derived and/or modified sequence
auggagaacaugcugcucuggcuaauauucuuuaccccuggauggacacuaauugacggcagcgagauggagugggacuuuauguggcaccugcgaaaagugccucgcauugucagcgagagaaccuuucaccuuacuucucccgcuuuugaagcagacgcaaagaugauggugaauaccgucugcggaauagaaugccagaaggagcuuccgaccccuucacucucugaacucgaggacuauuugucuuacgagaccguguuugaaaaugguacaagaacauuaacgaggguuaaagugcaagaccucgugcuggagccaacccagaacauuacaaccaaaggaguuagcgugagacgcaagaggcaaguguauggaacagacucacgauuuucuauccuugacaaacgauuccugacgaauuuuccguuuucuacugcugugaaacuuucaaccggcugcuccgguauucuuauaucaccccagcacguguugaccgccgcccacugcguucacgacggcaaagauuauguuaaagggucaaaaaagcugcgcgugggacugcugaagaugaggaacaaaucugguggcaaaaagagaagaggguccaaaaggagucgucgggaggcuuccgggggagaucagcgugaaggaacucgggaacaccuccgagaacgugccaaagggggccgaaggaggaaaaagucaggaaggggacagcgaauugcugaagguaggccauccuuucaguggacacgggugaagaacacacauauuccaaaggggugggcacguggggggaugggggaugcaacuuuggacuacgauuacgcucugcuugaacugaaacgggcucauaagaagaaauacauggagcuggggaucucacccacuauuaaaaaaaugcccgggggcaugauacauuucagcggcuucgauaacgaucgagcagaccagcugguguaccgcuucuguucagugagcgacgaaucaaaugaccuucuguaucaauacugcgacgcugaaucaggcucuacagggucagguguauaucuccgccugaaggaucccgacaaaaagaauuggaagaggaaaauuaucgcuguguauucaggacaccaaugggucgauguucauggcgugcagaaagauuauaauguggccgugagaaucaccccacugaaguacgcgcagauuugucucuggauucaugggaaugaugcuaacugugcauacggauag

SEQ ID NO: 66505 - RNA, 1242 nt, Artificial Sequence
  derived and/or modified sequence
auggagaauauguugcuguggcuuauauuuuuuacgcccgguuggacccugauagacggaucugaaauggagugggacuuuauguggcaccugaggaaagugccuagaaucgucagcgaacgcacguuucaucugacaucuccggcuuuugaggcugaugcaaagaugaugguuaacacggucuguggaauagaaugccagaaggaauuacccacgcccucuuugucugagcuugaagacuaucuuucguaugagaccguuuucgaaaacggcacgcgaacccuuacgagggugaaaguccaagacuugguguuagaacccacacagaacaucacaaccaaggggguauccgugagaagaaaacgacaaguuuacgggacggauucucguuuuaguauacucgacaaaagguucuugacaaauuucccuuucucaacagccgugaagcuuucaacuggcugcagcgggauucugaucucuccccagcacgugcugaccgccgcccacugcgugcacgacgggaaagacuacgugaaaggaucuaagaaguuaaggguuggccuccugaagaugaggaacaaauccgguggaaagaagagacguggaucuaagcggagucggcgcgaagcaucagguggagaccagcgggaaggcacccgugagcacuuaagggagcgcgcuaaagguggacgccgacggaagaagagugguagagggcagaggauagccgagggacgcccgaguuuucaguggacaaggguuaaaaacacacacauacccaaggggugggccagggggggcaugggagacgcuacacuggacuaugacuaugcacuccuggagcucaagcgagcgcacaaaaagaaauacauggaacuuggcaucuccccaacaauuaaaaagaugccaggcgggaugauucacuucuccggauuugacaaugauagggcugaccagcucgucuaccgguuuugcagcguguccgacgagucuaaugaccugcucuaucaguacugcgacgcggaaucaggcucuacuggcagcgggguguaccugcggcugaaagacccugacaagaaaaauuggaaaaggaaaauuaucgccgucuacuccggucaccaguggguugauguacacggcguacaaaaggauuacaacguggccguccgaaucacaccucugaaguacgcccagauuugucucuggauucacggaaaugaugcaaacugugcauacggcuag

SEQ ID NO: 66506 - RNA, 1242 nt, Artificial Sequence
  derived and/or modified sequence
auggaaaauaugcuauuguggcugaucuucuuuaccccugguuggacgcugaucgacggcucugaaauggaaugggauuucauguggcaccugaggaaagugccuaggaucguuucagagcgaacguuucaucucaccucuccugcuuucgaagccgacgcuaaaaugauggucaauacagucugugggauagaaugccaaaaggaguuacccaccccaagucucucggagcuugaggacuaucuuucguacgagacaguauucgagaauggaacccgaacucuuaccagagucaaagugcaagaccucgugcuggagccaacccagaacauuacaaccaaaggaguuagcgugagacgcaagaggcaaguguauggaacagacucacgauuuucuauccuugacaaacgauuccugacgaauuuuccguuuucuacugcugugaaacuuucaaccggcugcuccgguauucuuauaucaccccagcacguguugaccgccgcccacugcguucacgacggcaaagauuauguuaaagggucaaaaaagcugcgcgugggacugcugaagaugaggaacaaaucugguggcaaaaagagaaggggcaguaaacggucccgucgggaagcaagcggaggcgaucaaagagaaggaaccagagaacauuuacgagagcgggcaaagggggggcggaggaggaaaaaauccggacgaggccagagaauugcagaaggacgcccuagcuuccaguggacucgggugaagaacacacauauuccaaagggaugggcccgugggggaaugggcgaugcgacccuugauuaugauuaugcacuguuggaacuaaaacgggcacauaagaaaaaguauauggaacugggcaucagucccacuaucaaaaaaaugccugguggaaugauacacuucagcgguuucgauaacgacagggcugaucagcuaguguauagguuuugcuccguuuccgaugagucuaacgaucuccuguaccaauauugugaugccgagucgggcucaacuggcaguggcgucuaccuacgccucaaggauccagacaaaaaaaauuggaagagaaaaauaauagcaguguauagcgggcaccaguggguugauguacauggagugcaaaaagacuacaacgucgcggugaggaucaccccccugaaguaugcccaaauuugucucuggauccaugguaacgacgccaauugugcuuacggcuag

SEQ ID NO: 66507 - RNA, 1242 nt, Artificial Sequence
  derived and/or modified sequence
auggagaacauguuacuguggcuuauuuuuuucaccccaggcuggacacucaucgacggcucagagauggaaugggauuuuauguggcaccuacggaagguaccaagaaucguuagugaacguacguuccacuugaccucccccgcauucgaagccgaugcaaagaugauggugaauacugugugcggaauugagugccagaaggagcuuccaacccccucccuuagcgaacucgaagacuacuugucuuaugaaacaguuuuugaaaacggcaccaggacucugacccgggugaaggugcaagaucuggugcucgagccuacacagaacaucacuacuaagggggucucggugcggagaaaaaggcagguguacgggacagacagccgauuuagcauuuuagacaaacgauuuuugacaaauuuuccauucaguaccgccguuaagcugucaaccgggugcagcggaauucucauaagcccacaacacguucugaccgcagcucauugcguccacgaugggaaagacuauguuaagggcucaaagaaguugaggguaggccucuuaaagaugcgcaacaaaucgggaggcaaaaaacggagagguucuaaacgguccaggcgugaggcaagcggaggugaucaaagggaggggacccgagagcaucugcgggagagagccaaagguggacggcgcagaaagaaguccggacgagggcagagaauagcugaggggagaccuaguuuucaguggaccaggguuaagaacacgcacaucccaaaaggcugggcgcgcgguggcaugggcgacgcgacucuagacuaugauuaugcucuguuggaauugaagcgugcccauaaaaaaaaguacauggaguuaggcauaucaccuacgauuaaaaagaugcccggaggaaugauacacuuuagcggguuugacaaugaucgcgcggaucaacuggucuacagguuuugcagcgugagugacgaaucaaaugauuuacuuuaucaguauugcgacgccgaaucugggaguacaggaagcggcguguaucuccgacugaaagaucccgacaaaaagaacuggaaaagaaagaucauugcggucuauucuggccaucaguggguggaugugcacggcguccagaaggacuauaauguggcaguaagaauaacaccccucaaauacgcacagauuugcuuauggauucaugggaaugacgcaaacugcgcuuacggguag

SEQ ID NO: 66508 - protein, 570 aa, Artificial Sequence
  derived and/or modified sequence
MPLYGRARDHVTHPSILGTRPGRPMAGPITAAVPEKICNGAFCSCSGAFPLDPNNPSLGPLPSISHLNLRTQIAMDRMKKIKRQLSMTLRGGRGIDKTNGAPEQIGLDESGGGGGSDPGEAPTRAAPGELRSARGPLSSAPEIVHEDLKMGSDGESDQASATSSDEVQSPVRVRMRNHPPRKISTEDINKRLSLPADIRLPEGYLEKLTLNSPIFDKPLSRRLRRVSLSEIGFGKLETYIKLDKLGEGTYATVYKGKSKLTDNLVALKEIRLEHEEGAPCTAIREVSLLKDLKHANIVTLHDIIHTEKSLTLVFEYLDKDLKQYLDDCGNIINMHNVKLFLFQLLRGLAYCHRQKVLHRDLKPQNLLINERGELKLADFGLARAKSIPTKTYSNEVVTLWYRPPDILLGSTDYSTQIDMWGVGCIFYEMATGRPLFPGSTVEEQLHFIFRILGTPTEETWPGILSNEEFKTYNYPKYRAEALLSHAPRLDSDGADLLTKLLQFEGRNRISAEDAMKHPFFLSLGERIHKLPDTTSIFALKEIQLQKEASLRSSSMPDSGRPAFRVVDTEF

SEQ ID NO: 66509 - protein, 601 aa, Artificial Sequence
  derived and/or modified sequence
MRGARRARRLGRWLFGPGIRRHSAIRPLCAASRREHSDSSRRQRVRGHRPQRPSSWPAERDAASASATAAAAASSSSAGGGPGPATMAEVARAPPPIAMDRMKKIKRQLSMTLRGGRGIDKTNGAPEQIGLDESGGGGGSDPGEAPTRAAPGELRSARGPLSSAPEIVHEDLKMGSDGESDQASATSSDEVQSPVRVRMRNHPPRKISTEDINKRLSLPADIRLPEGYLEKLTLNSPIFDKPLSRRLRRVSLSEIGFGKLETYIKLDKLGEGTYATVYKGKSKLTDNLVALKEIRLEHEEGAPCTAIREVSLLKDLKHANIVTLHDIIHTEKSLTLVFEYLDKDLKQYLDDCGNIINMHNVKLFLFQLLRGLAYCHRQKVLHRDLKPQNLLINERGELKLADFGLARAKSIPTKTYSNEVVTLWYRPPDILLGSTDYSTQIDMWGVGCIFYEMATGRPLFPGSTVEEQLHFIFRILGTPTEETWPGILSNEEFKTYNYPKYRAEALLSHAPRSLCPCGRLDSDGADLLTKLLQFEGRNRISAEDAMKHPFFLSLGERIHKLPDTTSIFALKEIQLQKEASLRSSSMPDSGRPAFRVVDTEF

SEQ ID NO: 66510 - DNA, 1713 bp, Artificial Sequence
  derived and/or modified sequence
atgcccctgtacggcagagccagagaccacgtgacccaccccagcatcctgggcaccagacccggcagacccatggccggccccatcaccgccgccgtgcccgagaagatctgcaacggcgccttctgcagctgcagcggcgccttccccctggaccccaacaaccccagcctgggccccctgcccagcatcagccacctgaacctgagaacccagatcgccatggacagaatgaagaagatcaagagacagctgagcatgaccctgagaggcggcagaggcatcgacaagaccaacggcgcccccgagcagatcggcctggacgagagcggcggcggcggcggcagcgaccccggcgaggcccccaccagagccgcccccggcgagctgagaagcgccagaggccccctgagcagcgcccccgagatcgtgcacgaggacctgaagatgggcagcgacggcgagagcgaccaggccagcgccaccagcagcgacgaggtgcagagccccgtgagagtgagaatgagaaaccacccccccagaaagatcagcaccgaggacatcaacaagagactgagcctgcccgccgacatcagactgcccgagggctacctggagaagctgaccctgaacagccccatcttcgacaagcccctgagcagaagactgagaagagtgagcctgagcgagatcggcttcggcaagctggagacctacatcaagctggacaagctgggcgagggcacctacgccaccgtgtacaagggcaagagcaagctgaccgacaacctggtggccctgaaggagatcagactggagcacgaggagggcgccccctgcaccgccatcagagaggtgagcctgctgaaggacctgaagcacgccaacatcgtgaccctgcacgacatcatccacaccgagaagagcctgaccctggtgttcgagtacctggacaaggacctgaagcagtacctggacgactgcggcaacatcatcaacatgcacaacgtgaagctgttcctgttccagctgctgagaggcctggcctactgccacagacagaaggtgctgcacagagacctgaagccccagaacctgctgatcaacgagagaggcgagctgaagctggccgacttcggcctggccagagccaagagcatccccaccaagacctacagcaacgaggtggtgaccctgtggtacagaccccccgacatcctgctgggcagcaccgactacagcacccagatcgacatgtggggcgtgggctgcatcttctacgagatggccaccggcagacccctgttccccggcagcaccgtggaggagcagctgcacttcatcttcagaatcctgggcacccccaccgaggagacctggcccggcatcctgagcaacgaggagttcaagacctacaactaccccaagtacagagccgaggccctgctgagccacgcccccagactggacagcgacggcgccgacctgctgaccaagctgctgcagttcgagggcagaaacagaatcagcgccgaggacgccatgaagcaccccttcttcctgagcctgggcgagagaatccacaagctgcccgacaccaccagcatcttcgccctgaaggagatccagctgcagaaggaggccagcctgagaagcagcagcatgcccgacagcggcagacccgccttcagagtggtggacaccgagttctag

SEQ ID NO: 66511 - DNA, 3016 bp, Artificial Sequence
  derived and/or modified sequence
tagagaagtcaggaagagggtccctgtggccacagggaatagtctgccttggcctttgagggtggtgctaggggaactatgccactctatggccgtgctcgagaccatgtcacccatccttcaattctgggcacacgccctggccgacccatggctgggcccatcactgcagctgtacctgagaagatctgcaatggagccttctgctcctgcagtggggcttttcccctagatcccaacaatccatcgttagggcccttgccctcaatcagccacctaaatctgagaactcagatcgccatggatcggatgaagaagatcaaacggcagctgtcaatgacactccgaggtggccgaggcatagacaagaccaatggtgcccctgagcagataggcctggatgagagtggtggtggtggcggcagtgaccctggagaggcccccacacgtgctgctcctggggaacttcgttctgcacggggcccactcagctctgcaccagagattgtgcacgaggacttgaagatggggtctgatggggagagtgaccaggcttcagccacgtcctcggatgaggtgcagtctccagtgagagtgcgtatgcgcaaccatcccccacgcaagatctccactgaggacatcaacaagcgcctatcactaccagctgacatccggctgcctgagggctacctggagaagctgaccctcaatagccccatctttgacaagcccctcagccgccgcctccgtcgtgtcagcctatctgagattggctttgggaaactggagacctacattaagctggacaaactgggcgagggtacctatgccaccgtctacaaaggcaaaagcaagctcacagacaaccttgtggcactcaaggagatcagactggaacatgaagagggggcaccctgcaccgccatccgggaagtgtccctgctcaaggacctcaaacacgccaacatcgttacgctacatgacattatccacacggagaagtccctcacccttgtctttgagtacctggacaaggacctgaagcagtacctggatgactgtgggaacatcatcaacatgcacaacgtgaaactgttcctgttccagctgctccgtggcctggcctactgccaccggcagaaggtgctacaccgagacctcaagccccagaacctgctcatcaacgagaggggagagctcaagctggctgactttggcctggcccgagccaagtcaatcccaacaaagacatactccaatgaggtggtgacactgtggtaccggccccctgacatcctgcttgggtccacggactactccactcagattgacatgtggggtgtgggctgcatcttctatgagatggccacaggccgtcccctctttccgggctccacggtggaggaacagctacacttcatcttccgtatcttaggaaccccaactgaggagacgtggccaggcatcctgtccaacgaggagttcaagacatacaactaccccaagtaccgagccgaggcccttttgagccacgcaccccgacttgatagcgacggggccgacctcctcaccaagctgttgcagtttgagggtcgaaatcggatctccgcagaggatgccatgaaacatccattcttcctcagtctgggggagcggatccacaaacttcctgacactacttccatatttgcactaaaggagattcagctacaaaaggaggccagccttcggtcttcgtcgatgcctgactcaggcaggccagctttccgcgtggtggacaccgagttctaagccacagaccgaggccccagcaggcagcggctggagggatgccacacccctcacagggcagcccccaactacatcttccctgcttactctctgcctacctgcctgagccatgttcacctgcccacttgtcccctgctgcctgcccaaacaccccaccattggcctgtcaacccacccattggcctgtctgctgggtgctaacaaagctctcatcactccttcacttggtctgtctgtctctgtcttggtagttgccggtggacagcatggccgtgccagcctcccacactgaggccaggtctaccccccatcataccagcccccaggaccactaccccacggccagccaggggtccagagctagcccaggctggggatctcgactcagacaagatggtgacaatgccttgagtctgaggcatcctctgcctgctttcctgcctgccccacctgcctcatattgtgtgggcctttttttgtttgtttcattcattgtttttttttttttaattattttaaatgagatttttgttttttttaaatgcaatatctctgtatacagactggctgggccccaccccctgcgtgtggccctcccacagtattttgtgcaatgaagccctgctcccagcctttcagagacagggacacagcccctatttggaaccctgatcatcaccagaccctgggattggctatgggaaagcatgccacagccactcgccttcctacccccgcccgccatccccagttgcagggggatctggggactaccagagactctgggaaatggacaaggtggggggccccactctttctctcctgcagtcccgtagctggggcctccttccttctcagggtctccccagcccagtccccttgctcccatcccactcggtgctgttgggtaggggccctgccaggaactgaccagctcagcgaggagccataatgtgcatatgtgcacaagcagggttgggggaggggggtgtgaggggttgtgcccaggtgttgccccctatctcctggggagggtgaggcagggcagggacagtctccagggtcagtccctggatgggtggttacctccccttcctccaccctaagccctggggccctgaaatggggtgggagggcaggggtgggagccctcctagtgggtttggggggttgggttcctgaatgcaccataatcgctgtatgaaatattaaaaagtctaaagtg

SEQ ID NO: 66512 - DNA, 2022 bp, Artificial Sequence
  derived and/or modified sequence
gatgagtgctagagaagtcaggaagagggtccctgtggccacagggaatagtctgccttggcctttgagggtggtgctaggggaactatgccactctatggccgtgctcgagaccatgtcacccatccttcaattctgggcacacgccctggccgacccatggctgggcccatcactgcagctgtacctgagaagatctgcaatggagccttctgctcctgcagtggggcttttcccctagatcccaacaatccatcgttagggcccttgccctcaatcagccacctaaatctgagaactcagatcgccatggatcggatgaagaagatcaaacggcagctgtcaatgacactccgaggtggccgaggcatagacaagaccaatggtgcccctgagcagataggcctggatgagagtggtggtggtggcggcagtgaccctggagaggcccccacacgtgctgctcctggggaacttcgttctgcacggggcccactcagctctgcaccagagattgtgcacgaggacttgaagatggggtctgatggggagagtgaccaggcttcagccacgtcctcggatgaggtgcagtctccagtgagagtgcgtatgcgcaaccatcccccacgcaagatctccactgaggacatcaacaagcgcctatcactaccagctgacatccggctgcctgagggctacctggagaagctgaccctcaatagccccatctttgacaagcccctcagccgccgcctccgtcgtgtcagcctatctgagattggctttgggaaactggagacctacattaagctggacaaactgggcgagggtacctatgccaccgtctacaaaggcaaaagcaagctcacagacaaccttgtggcactcaaggagatcagactggaacatgaagagggggcaccctgcaccgccatccgggaagtgtccctgctcaaggacctcaaacacgccaacatcgttacgctacatgacattatccacacggagaagtccctcacccttgtctttgagtacctggacaaggacctgaagcagtacctggatgactgtgggaacatcatcaacatgcacaacgtgaaactgttcctgttccagctgctccgtggcctggcctactgccaccggcagaaggtgctacaccgagacctcaagccccagaacctgctcatcaacgagaggggagagctcaagctggctgactttggcctggcccgagccaagtcaatcccaacaaagacatactccaatgaggtggtgacactgtggtaccggccccctgacatcctgcttgggtccacggactactccactcagattgacatgtggggtgtgggctgcatcttctatgagatggccacaggccgtcccctctttccgggctccacggtggaggaacagctacacttcatcttccgtatcttaggaaccccaactgaggagacgtggccaggcatcctgtccaacgaggagttcaagacatacaactaccccaagtaccgagccgaggcccttttgagccacgcaccccgacttgatagcgacggggccgacctcctcaccaagctgttgcagtttgagggtcgaaatcggatctccgcagaggatgccatgaaacatccattcttcctcagtctgggggagcggatccacaaacttcctgacactacttccatatttgcactaaaggagattcagctacaaaaggaggccagccttcggtcttcgtcgatgcctgactcaggcaggccagctttccgcgtggtggacaccgagttctaagccacagaccgaggccccagcaggcagcggctggagggatgccacacccctcacagggcagcccccaactacatcttccctgcttactctctgcctacctgcctgagccatgttcacctgcccacttgtcccctgctgcctgcccaaacaccccaccattggcctgtcaacccacccattggcctgtctgctgggtgctaacaaagctctcatcactccttc

SEQ ID NO: 66513 - DNA, 1713 bp, Artificial Sequence
  derived and/or modified sequence
atgcctctctatgggagggcacgtgaccacgtgactcatccttctatccttggaactagaccaggtcgcccgatggccggacctattaccgcggcggttcccgaaaagatttgtaacggcgctttttgtagttgttccggagccttccccctggacccaaacaatcctagcctggggccccttcctagtataagccacttgaacctccgcactcagatagcgatggacaggatgaaaaaaatcaagcggcaattgtctatgacccttcggggcggccggggaatcgacaagaccaacggggcccccgagcagatcggcctcgacgaaagcggcggagggggaggtagcgatcctggagaggcacctactcgagctgcgccaggcgaactgcggagtgcgcgtggacccctgtcatcagctcccgagattgttcacgaagatttgaaaatgggcagcgacggcgagtccgaccaggcctccgccacctccagcgacgaagtacagtcaccagtaagggtccggatgaggaaccatccacccaggaagatctcaacagaggatataaataagcgactatctctgcccgcagatataaggttgccggaaggatatttggaaaagctcacacttaactctcccatcttcgataagccattaagcagacgcttaaggagggtttctctgtcagagattggctttgggaagttggagacttatataaaacttgacaaactcggcgagggcacatatgccacagtgtataagggcaagagcaaattgacagataatctcgtggctctcaaggagatccgtctcgaacacgaagaaggggcaccatgtactgcaatcagagaggtttccctgctgaaggacctgaagcacgcaaatattgtgactctccacgacatcattcacaccgaaaaatctctgacacttgtgtttgagtacttagacaaggacctgaagcagtaccttgacgactgtggaaacatcatcaatatgcacaatgtgaaactcttcttatttcaattattgaggggattggcatattgccaccgacagaaggtgctacatcgggatctaaaaccgcagaaccttcttattaatgagcgaggggaactgaagttagccgactttgggttagccagagccaaaagcataccaacgaaaacatatagtaatgaggtcgtcaccttgtggtaccgcccccccgatatcttactcggatcgacagactactccacgcagattgatatgtggggtgttggttgcatcttttatgagatggccaccggcagacctctgtttcctggcagtacggtggaggagcagctacatttcatatttaggattcttggcactcccactgaggaaacttggcccggaatcttatcaaacgaggagttcaaaacctacaattatcccaaatacagggctgaagctctactgagccatgccccccggcttgactcggacggcgctgatcttctgactaaacttctgcagttcgaagggaggaataggatatcggcagaagatgcaatgaagcaccccttctttctgtccctaggagagcgcatccataaactcccggacacaactagcatattcgcacttaaggaaattcagctgcagaaagaagcctccctgagaagctcctccatgcctgatagcgggcgccctgccttccgcgtggtagacaccgaattctag

SEQ ID NO: 66514 - DNA, 1713 bp, Artificial Sequence
  derived and/or modified sequence
atgcccctgtatggccgggcccgggaccacgtgacccaccccagcatcctgggcaccaggcctggccggcccatggccggccccatcacagctgctgtgcctgagaagatctgcaatggagccttctgcagctgcagcggggccttccccctggaccccaacaaccccagcctgggccccctgcccagcatcagccacctgaacctgcggacccagatcgccatggacaggatgaagaagatcaagaggcagctgtccatgaccctgcggggcggccggggcatcgacaagaccaatggagcccctgagcagatcggcctggatgagagcggcggcggcggcggcagtgaccccggggaggcccccaccagggctgcccctggagagctgcggagcgcccggggccccctgagcagcgcccctgagatcgtgcatgaggacctgaagatgggcagtgatggagagagtgaccaggccagcgccaccagcagtgatgaggtgcagagccctgtgcgggtgaggatgaggaaccacccccccaggaagatcagcacagaggacatcaacaagaggctgagcctgcctgctgacatccggctgcctgagggctacctggagaagctgaccctgaacagccccatctttgacaagcccctgagccggcggctgcggcgggtgtccctgtctgaaattggatttgggaagctggagacctacatcaagctggacaagctgggggagggcacctacgccaccgtgtacaagggcaagagcaagctgacagacaacctggtggccctgaaggagatccggctggagcacgaggagggcgccccctgcacagccatccgggaggtgtccctgctgaaggacctgaagcacgccaacatcgtgaccctgcatgacatcatccacacagagaagagcctgaccctggtgtttgagtacctggacaaggacctgaagcagtacctggatgactgtggcaacatcatcaacatgcacaacgtgaagctgttcctgttccagctgctgcggggcctggcctactgccaccggcagaaggtgctgcaccgggacctgaagccccagaacctgctgatcaatgaaagaggagagctgaagctggccgactttggcctggcccgggccaagagcatccccaccaagacctacagcaatgaggtggtgaccctgtggtacagacctccagacatcctgctgggcagcacagactacagcacccagattgacatgtggggcgtgggctgcatcttctatgagatggccaccggccggcccctcttccctggcagcacagtggaggagcagctgcacttcatcttccgcatcctgggcacccccacagaggagacctggccaggcatcctgagcaatgaggagttcaagacctacaactaccccaagtacagagctgaggccctgctgagccacgccccccggctggacagtgatggagctgacctgctgaccaagctgctgcagtttgagggcaggaaccgcatctctgcagaagatgccatgaagcaccccttcttcctgagcctgggggagcgcatccacaagctgcctgacaccaccagcatctttgccctgaaggagatccagctgcagaaggaggccagcctgcggagcagctccatgccagacagcggccgcccagccttccgggtggtggacacagagttctag

SEQ ID NO: 66515 - DNA, 1713 bp, Artificial Sequence
  derived and/or modified sequence
atgcccctgtacggccgggcccgggaccacgtgacccaccccagcatactcggcacaagacccgggaggcccatggccggccccattacagctgcagtgccagaaaagatttgcaatggcgctttctgctcttgtagtggggctttccctctcgatcccaataaccccagcctagggcctctgcccagcatcagccatttaaatcttagaacccaaattgctatggaccggatgaagaagattaagcgccagctgtctatgaccctgcgcggaggacgaggaattgataagactaacggagcccccgagcagattgggctggatgagagcggaggcggcggcggatccgaccccggcgaggccccgacaagagcagcgcccggcgagctacgtagtgccagaggccctctttccagcgctccagagattgtccacgaggacctgaaaatgggaagtgatggagaatctgatcaagcgtcagccacctcatccgacgaagtgcagtcaccagttcgggtgcgaatgcggaaccaccccccacggaaaataagcacagaggacatcaataaaagactaagtcttcccgcggatatccggctcccagaaggatatctagaaaagctgactctgaattctccaatattcgacaagcctctatcaaggcgcctgcgccgcgtgtcactatccgagataggttttggcaaattggagacttacatcaagctggataaactcggtgaaggaacctacgccaccgtttataagggcaaatcaaagctcaccgacaacctcgtcgccctgaaagaaatacgcctggaacacgaggagggcgctccttgcaccgcgattagagaggtctctctccttaaggatctgaaacacgccaatatcgtaacgctacacgatatcatccatacagaaaaatcactgacattggtatttgaatacttagacaaagacctgaagcagtatctggatgattgtgggaacatcataaacatgcacaacgtgaagctgtttttattccagttgttacgcggactggcgtactgtcatagacagaaagtccttcaccgtgacctaaagccacagaacctactgattaacgaacggggggagctaaaattggccgatttcggtttggccagggctaagagcatacctacgaaaacatactctaacgaagtggtgacgctttggtatcggcctccagatatcttgcttggatcgactgactactccacacagatcgatatgtggggggtagggtgcattttctacgaaatggctactggaagaccactcttccccggttctactgtcgaggagcagttgcatttcatcttcagaatactgggaactcctactgaggagacttggccaggcatcctgtccaatgaggagttcaagacgtataattaccctaagtaccgggcagaagccctcctatcccacgcaccccggttggactccgatggggccgaccttctgacaaagctcctgcagtttgagggaagaaataggattagtgctgaagatgccatgaaacatcccttttttctatccctcggcgaaaggatacataaactgccagatactaccagcattttcgctttgaaagaaattcagctccagaaagaggcaagcctgaggagttcttcgatgccggactcgggacgcccagccttcagagtggtcgatacagagttctag

SEQ ID NO: 66516 - DNA, 1713 bp, Artificial Sequence
  derived and/or modified sequence
atgccactatacggtagggctcgggatcatgtgacacatcctagtatcctgggaacacggccaggaaggcccatggctggtcctattactgcagccgtgccagagaaaatttgtaacggggctttctgttcttgttctggggctttccccctcgaccctaataatccaagcctgggccctctcccatctatttcccacctgaaccttaggacacagatagctatggaccggatgaaaaaaatcaagcgacagctgtcaatgaccctgcgaggcggaagggggattgataagacaaacggcgctcccgaacaaatcggtctggatgaatccggaggaggcggtggcagcgatcccggagaggccccaacacgtgccgcaccaggcgagctccggagtgccagaggaccactgtcctccgcgccagagatcgttcacgaggacctgaagatggggtcagatggcgagtctgatcaagccagcgccacgagctcagatgaagtgcagagtcctgttagagtgcggatgaggaatcatccccctcggaagatcagcaccgaagacattaataagcgcctgagccttcctgcagacatccggctgcccgagggatacctggagaaattaaccttgaattcaccaatattcgataagccacttagtcggaggctacgacgagtgtccttaagtgaaatcggatttggcaagctggaaacttatataaaactggataaattgggtgagggaacctacgccaccgtgtacaaggggaagagtaagctgacagataatttggtggccttgaaggaaatccgactcgaacatgaggaaggcgcaccctgcaccgcgatccgcgaggtgagcctcctcaaagacctgaagcatgcgaacatcgtcaccctccacgatatcatccacacagagaagagcctgacattggtatttgagtacctggacaaagatttgaagcaatacctggatgactgtggtaatattattaatatgcacaacgttaagctattcttattccagctcttaagggggctggcatattgccaccgtcaaaaggtactgcatcgggatctgaagccgcagaatttactgattaacgaacgtggggagctgaagcttgccgacttcggactcgcaagagctaagagtataccaaccaaaacttactcgaacgaagtcgttacgctgtggtacaggcctcctgatatcctgctaggttccaccgattacagcacccagatcgatatgtggggggtgggttgtattttttacgaaatggccaccggccgacccctgttccctggaagcacggtagaagagcagctgcacttcatttttcgaattttgggaacccccactgaggagacttggcccggtatactgtccaacgaggaattcaagacatataactacccaaaatatcgtgctgaagccctgctgagccatgcccctcggttagactccgatggcgctgacctgctgacaaagctgctgcagtttgagggtcgtaatcggatctccgctgaagatgccatgaaacaccctttctttctgtcattgggcgaacgcatccacaagctgcccgacactacatcaatttttgctctgaaggagatccagctacaaaaggaggctagccttagatcctcaagcatgcccgactcaggcagacccgcatttcgggtcgtggatacagagttttag

SEQ ID NO: 66517 - protein, 423 aa, Artificial Sequence
  derived and/or modified sequence
MVFAFWKVFLILSCLAGQVSVVQVTIPDGFVNVTVGSNVTLICIYTTTVASREQLSIQWSFFHKKEMEPISHSSCLSTEGMEEKAVSQCLKMTHARDARGRCSWTSEIYFSQGGQAVAIGQFKDRITGSNDPGNASITISHMQPADSGIYICDVNNPPDFLGQNQGILNVSVLVKPSKPLCSVQGRPETGHTISLSCLSALGTPSPVYYWHKLEGRDIVPVKENFNPTTGILVIGNLTNFEQGYYQCTAINRLGNSSCEIDLTSSHPEVGIIVGALIGSLVGAAIIISVVCFARNKAKAKAKERNSKTIAELEPMTKINPRGESEAMPREDATQLEVTLPSSIHETGPDTIQEPDYEPKPTQEPAPEPAPGSEPMAVPDLDIELELEPETQSELEPEPEPEPESEPGVVVEPLSEDEKGVVKA

SEQ ID NO: 66518 - DNA, 1272 bp, Artificial Sequence
  derived and/or modified sequence
atggtgttcgccttctggaaggtgttcctgatcctgagctgcctggccggccaggtgagcgtggtgcaggtgaccatccccgacggcttcgtgaacgtgaccgtgggcagcaacgtgaccctgatctgcatctacaccaccaccgtggccagcagagagcagctgagcatccagtggagcttcttccacaagaaggagatggagcccatcagccacagcagctgcctgagcaccgagggcatggaggagaaggccgtgagccagtgcctgaagatgacccacgccagagacgccagaggcagatgcagctggaccagcgagatctacttcagccagggcggccaggccgtggccatcggccagttcaaggacagaatcaccggcagcaacgaccccggcaacgccagcatcaccatcagccacatgcagcccgccgacagcggcatctacatctgcgacgtgaacaacccccccgacttcctgggccagaaccagggcatcctgaacgtgagcgtgctggtgaagcccagcaagcccctgtgcagcgtgcagggcagacccgagaccggccacaccatcagcctgagctgcctgagcgccctgggcacccccagccccgtgtactactggcacaagctggagggcagagacatcgtgcccgtgaaggagaacttcaaccccaccaccggcatcctggtgatcggcaacctgaccaacttcgagcagggctactaccagtgcaccgccatcaacagactgggcaacagcagctgcgagatcgacctgaccagcagccaccccgaggtgggcatcatcgtgggcgccctgatcggcagcctggtgggcgccgccatcatcatcagcgtggtgtgcttcgccagaaacaaggccaaggccaaggccaaggagagaaacagcaagaccatcgccgagctggagcccatgaccaagatcaaccccagaggcgagagcgaggccatgcccagagaggacgccacccagctggaggtgaccctgcccagcagcatccacgagaccggccccgacaccatccaggagcccgactacgagcccaagcccacccaggagcccgcccccgagcccgcccccggcagcgagcccatggccgtgcccgacctggacatcgagctggagctggagcccgagacccagagcgagctggagcccgagcccgagcccgagcccgagagcgagcccggcgtggtggtggagcccctgagcgaggacgagaagggcgtggtgaaggcctag

SEQ ID NO: 66519 - DNA, 1272 bp, Artificial Sequence
  derived and/or modified sequence
atggtcttcgcattctggaaagtgtttctgatcctctcctgcctggcaggacaagtaagtgtggtgcaggtgactattcccgacggctttgtgaacgtgacagtcggtagcaatgttactctgatctgtatttacaccaccaccgtggcatctcgagagcagctgagcatccagtggtctttcttccataaaaaggagatggagccaatatctcacagtagctgtctgtctactgagggaatggaggagaaagctgtctcccagtgtttgaaaatgacacacgcaagggatgcaagaggacggtgctcttggacctccgagatctatttttctcagggcgggcaggctgttgcaattggccaatttaaggaccgcatcacaggcagtaacgaccccgggaatgcctccatcacaatttcccatatgcagccggccgattcgggcatctacatctgcgatgtcaataatccgcctgattttctgggacagaaccagggcatcctaaatgtgtccgtgctggttaaaccttccaagccactttgttctgtacagggacggcccgaaacgggccatactattagtcttagttgtttgagcgcgttggggactccatcacctgtatattactggcataaactcgaagggagggacatagtgccagttaaagaaaatttcaaccccacgactggcattcttgtgattggcaatttaacaaactttgagcaagggtattaccagtgcacggcgatcaaccggctcggcaattctagctgcgagatcgatctaacaagctcacaccccgaagttggtataattgtgggggcgctgattgggtcgctggtaggggctgccatcatcatttcggtggtgtgtttcgcgcgaaacaaagccaaggcgaaagctaaagaaaggaatagcaaaaccattgccgagctggagccaatgactaaaatcaaccctcggggcgagagcgaagctatgcctcgcgaggatgccacacagcttgaggtgactctaccatcatctattcatgaaacaggacccgataccatccaagaacctgattacgaacccaagccgactcaggagccagcacctgaaccagctcccggaagcgagcctatggccgtgcctgatctcgacatcgaactcgaactggagccggagacacaatcagagctggaacctgaaccggaacccgagccagaatccgaaccgggcgtggtggtagagcccttgtccgaggacgagaaaggtgtggtgaaggcgtag

SEQ ID NO: 66520 - DNA, 1272 bp, Artificial Sequence
  derived and/or modified sequence
atggtgtttgccttctggaaggtgttcctgatcctgagctgcctggccggccaggtgtctgtggtgcaggtgaccatcccagatggctttgtgaatgtgacagtgggcagcaatgtgaccctcatctgcatctacaccaccaccgtggccagccgggagcagctgagcatccagtggagcttcttccacaagaaggagatggagcccatcagccacagcagctgcctgagcacagagggcatggaggagaaggctgtgtcccagtgcctgaagatgacccacgccagagatgcccggggccgctgctcctggaccagcgagatctacttcagccagggcggccaggccgtggccatcggccagttcaaggaccgcatcaccggcagcaatgaccctggaaatgccagcatcaccatcagccacatgcagcctgctgacagcggcatctacatctgtgatgtgaacaaccccccagacttcctgggccagaaccagggcatcctgaatgtgtctgtgctggtgaagcccagcaagcccctgtgcagcgtgcagggccggcctgagaccggccacaccatcagcctgagctgcctgagcgccctgggcacccccagccctgtgtactactggcacaagctggagggccgggacatcgtgcctgtgaaggagaacttcaaccccaccaccggcatcctggtgattggcaacctgaccaactttgagcagggctactaccagtgcacagccatcaaccggctgggcaacagcagctgtgaaattgacctgaccagcagccaccctgaggtgggcatcatcgtgggcgccctgattggcagcctggtgggcgccgccatcatcatctctgtggtgtgctttgccaggaacaaggccaaggccaaggccaaggagaggaacagcaagaccatcgccgagctggagcccatgaccaagatcaaccccagaggagagagcgaggccatgccccgggaggatgccacccagctggaggtgaccctgcccagcagcatccacgagaccggccctgacaccatccaggagccagactatgagcccaagcccacccaggagcccgcccctgagcccgcccctggcagcgagcccatggctgtgcctgacctggacatcgagctggagctggagcctgagacccagagcgagctggagcctgagcctgagcctgagcctgagagcgagcccggggtggtggtggagcccctgtctgaagatgagaagggcgtggtgaaggcctag

SEQ ID NO: 66521 - DNA, 1272 bp, Artificial Sequence
  derived and/or modified sequence
atggtgttcgccttctggaaggtgttcctgatcctgagctgcctggccggacaagtgtctgtggttcaggttactataccggacgggttcgtgaatgtcactgtgggctcaaatgtgaccctgatatgcatatacactacgaccgttgcctcccgggaacagctgagtatccaatggtcattttttcataagaaagagatggagccaataagccactccagttgcctaagcactgaagggatggaagaaaaggccgtaagccagtgccttaaaatgacccacgcccgggacgctagggggagatgttcctggactagcgagatttacttctctcagggggggcaggccgttgctatcggacaattcaaggaccggataactggctcaaatgatcccgggaacgccagcattaccatctcccatatgcagcctgcagactcaggaatctacatttgtgatgtgaacaatccaccagactttctgggtcagaatcaagggattctcaatgtgagcgtactggtaaaacccagtaagccactgtgttcggttcaagggcggcccgaaaccgggcatactatcagtctgagttgcttatccgcattggggaccccaagcccagtatattattggcacaagctggagggtagagacatcgtccccgtcaaggagaactttaatcctacgaccggtattctggtcattggcaatctaactaatttcgaacaggggtactatcagtgtactgccattaataggctgggcaactcctcctgtgaaattgacctgacctccagtcatcccgaggttggaattatcgttggtgccctgatcggcagcctggtgggggcagccatcataatctccgtggtttgctttgcacggaataaagccaaggctaaggctaaagagcgcaattcaaaaactattgctgaactggagccaatgacgaagataaaccccagaggagaatctgaagccatgccccgcgaagatgctacacaactggaggtgacactcccctcctctattcatgagacgggcccggacactatccaggagcctgattacgaaccaaaaccgacacaggaacccgcgccggagcctgcaccgggatcggaacctatggcagtgccagatctagatattgagcttgaattggaacccgagacccaaagtgagctcgagcctgaacctgagccagaaccagagtccgaaccaggagtggtggtggagcctctgagcgaggacgaaaagggcgtggtcaaggcatag

SEQ ID NO: 66522 - DNA, 1272 bp, Artificial Sequence
  derived and/or modified sequence
atggtgttcgcgttctggaaagtctttttgattcttagctgcctggctggccaggttagcgtggtacaggtcaccattcccgacggttttgtcaacgtgacagtcggtagcaatgtaaccctcatctgtatttacaccaccactgtcgcttcaagagaacagctgagtattcagtggtcattttttcacaaaaaggagatggagcctatctcccatagctcttgcctttcaacagagggaatggaggagaaggcggtatctcaatgtctgaaaatgactcacgctagggacgccagaggtcgatgctcttggacaagcgagatttacttcagtcagggaggtcaggccgtggccattggccagtttaaggataggataacgggaagcaacgatcccggtaatgcttctatcacaatttcacacatgcaaccggctgacagcggaatttacatctgtgatgtgaataacccaccggatttcctgggacagaatcagggaatccttaatgtgagtgtgctggttaaaccaagcaagccactttgcagcgttcagggaagacctgaaaccggacatactatcagcttgagttgcctctccgccctcggtacaccttctccggtttattactggcacaaactcgaaggcagagacattgtgccggtcaaggaaaacttcaatccaaccaccggtatactggttattggtaatttgactaactttgaacaggggtactatcagtgcaccgcgatcaacaggttggggaactcctcctgcgaaatcgatctgacgagttcgcaccccgaggtcgggatcatcgtcggagccctgatcggatccctcgtaggagccgcaataattattagcgtagtgtgcttcgcgaggaataaggcgaaggccaaagctaaggagcgaaattccaagaccatcgctgagctggaacctatgactaaaattaatcccaggggtgagagtgaagcaatgcctcgtgaagacgccacgcagttggaagtcaccctacctagcagcattcatgaaacgggacctgacacgatccaggaacctgattatgagccaaaacccacacaggagcctgcgccagaacctgcaccgggatctgaaccgatggcggtgcctgatctcgacattgagttggagctggaacccgagactcaatcagagctggagcctgagccagagcccgaacctgagagcgaacctggtgtggtagtcgagccactttcagaggacgagaaaggagtcgttaaggcgtag

SEQ ID NO: 66523 - DNA, 3236 bp, Artificial Sequence
  derived and/or modified sequence
aaagtctatacgcaataagtaagcccaaagaggcatgtttgcttggcgatgcccagcagataagccaggcaaacctcggtgtgatcgaagaagccaatttgagactcagcctagtccaggcaagctactggcacctgctgctctcaactaacctccacacaatggtgttcgcattttggaaggtctttctgatcctaagctgccttgcaggtcaggttagtgtggtgcaagtgaccatcccagacggtttcgtgaacgtgactgttggatctaatgtcactctcatctgcatctacaccaccactgtggcctcccgagaacagctttccatccagtggtctttcttccataagaaggagatggagccaatttctcacagctcgtgcctcagtactgagggtatggaggaaaaggcagtcagtcagtgtctaaaaatgacgcacgcaagagacgctcggggaagatgtagctggacctctgagatttacttttctcaaggtggacaagctgtagccatcgggcaatttaaagatcgaattacagggtccaacgatccaggtaatgcatctatcactatctcgcatatgcagccagcagacagtggaatttacatctgcgatgttaacaaccccccagactttctcggccaaaaccaaggcatcctcaacgtcagtgtgttagtgaaaccttctaagcccctttgtagcgttcaaggaagaccagaaactggccacactatttccctttcctgtctctctgcgcttggaacaccttcccctgtgtactactggcataaacttgagggaagagacatcgtgccagtgaaagaaaacttcaacccaaccaccgggattttggtcattggaaatctgacaaattttgaacaaggttattaccagtgtactgccatcaacagacttggcaatagttcctgcgaaatcgatctcacttcttcacatccagaagttggaatcattgttggggccttgattggtagcctggtaggtgccgccatcatcatctctgttgtgtgcttcgcaaggaataaggcaaaagcaaaggcaaaagaaagaaattctaagaccatcgcggaacttgagccaatgacaaagataaacccaaggggagaaagcgaagcaatgccaagagaagacgctacccaactagaagtaactctaccatcttccattcatgagactggccctgataccatccaagaaccagactatgagccaaagcctactcaggagcctgccccagagcctgccccaggatcagagcctatggcagtgcctgaccttgacatcgagctggagctggagccagaaacgcagtcggaattggagccagagccagagccagagccagagtcagagcctggggttgtagttgagcccttaagtgaagatgaaaagggagtggttaaggcataggctggtggcctaagtacagcattaatcattaaggaacccattactgccatttggaattcaaataacctaaccaacctccacctcctccttccattttgaccaaccttcttctaacaaggtgctcattcctactatgaatccagaataaacacgccaagataacagctaaatcagcaagggttcctgtattaccaatatagaatactaacaattttactaacacgtaagcataacaaatgacagggcaagtgatttctaacttagttgagttttgcaacagtacctgtgttgttatttcagaaaatattatttctctctttttaactactctttttttttattttagacagagtcttgctccgtcgcgcaggctgtgatcgtagtggtgcgatctcggctcactgcaacctccgctccctgggttcaagcgattctcctgcctgagcctcctgagtagctgggactacaggcacgtgccaccacgcccggctaattttttgtatttttagtagagatggggtttcacgttgttagccaggatggtctccatctcctgacctcatgatccgcccaccttggcctcccaaaatgctgggattacaggcatgagccactgcgcccggcctctttttagctactcttatgttccacatgcacatatgacaaggtggcattaattagattcaatattatttctaggaatagttcctcattcatttttatattgaccactaagaaaataattcatcagcattatctcatagattggaaaattttctccaaatacaatagaggagaatatgtaaagggtatacattaattggtacgtagcatttaaaatcaggtcttataattaatgcttcattcctcatattagatttcccaagaaatcaccctggtatccaatatctgagcatggcaaatttaaaaaataacacaatttcttgcctgtaaccctagcactttgggaggccgaggcaggtggatcacctgaggtcaggagttcgagaccagcctggccaacatggcgaaaccccttctctactaaaaatacaaaaattagctgggcgtggtagtgcatgcctgtaatcccagctacttgggaggctgaggcaggagaatcgcttgaacccaggaggtggaggttgcagtgagccgagattgtgccactgcactccaacctgggtgacagagtgagattccatctgaaaaacaaaaacaaaaacagaaaacaaacaaacaaaaaacaaaaaatccccacaactttgtcaaataatgtacaggcaaacactttcaaatataatttccttcagtgaatacaaaatgttgatatcataggtgatgtacaatttagttttgaatgagttattatgttatcactgtgtctgatgttatctactttgaaaggcagtccagaaaagtgttctaagtgaactcttaagatctattttagataatttcaactaattaaataacctgttttactgcctgtacattccacattaataaagcgataccaatcttatatgaatgctaatattactaaaatgcactgatatcacttcttcttcccctgttgaaaagctttctcatgatcatatttcacccacatctcaccttgaagaaacttacaggtagacttaccttttcacttgtggaattaatcatatttaaatcttactttaaggctcaataaataatactcataatgtctcattttagtgactcctaaggctagtccttttataaacaactttttctgacatagcatttatgtataataaaccagacatttaaagtgta

SEQ ID NO: 66524 - protein, 356 aa, Artificial Sequence
  derived and/or modified sequence
MLPRWELALYLLASLGFHFYSFYEVYKVSREHEEELDQEFELETDTLFGGLKKDATDFEWSFWMEWGKQWLVWLLLGHMVVSQMATLLARKMQQQEHDSLKASLCVLALGLGRLLCWWWLAELMAHLMYMHAIYSSIPLLETVSCWTLGGLALAQVLFFYVKYLVLFGVPALLMRLDGLTPPALPRCVSTMFSFTGMWRYFDVGLHNFLIRYVYIPVGGSQHGLLGTLFSTAMTFAFVSYWHGGYDYLWCWAALNWLGVTVENGVRRLVETPCIQDSLARYFSPQARRRFHAALASCSTSMLILSNLVFLGGNEVGKTYWNRIFIQGWPWVTLSVLGFLYCYSHVGIAWAQTYATD

SEQ ID NO: 66525 - DNA, 552 bp, Artificial Sequence
  derived and/or modified sequence
atgcgactggacggactgacaccaccggctctacctcgctgcgtgtcaactatgttttcatttacgggaatgtggcgttacttcgatgtcggcctgcataattttttaatccgctacgtctatatccctgtcggaggatctcagcacggccttttggggactctgtttagcaccgctatgacattcgcttttgtgtcatactggcatggcgggtacgattatctttggtgctgggcggccctgaactggttaggggttacagtggagaacggagtcagaaggctagtcgaaactccctgcatccaggatagcctggcccgttacttcagtcctcaagccagaagacggttccacgctgctctcgcctcctgttctaccagtatgctcattttatccaacctggtcttcttgggaggaaatgaggtggggaaaacatactggaacagaatctttatccagggctggccctgggtgactttgtccgtcctgggtttcctttattgctatagtcacgtcggtatcgcctgggctcagacatatgcaacggactag

SEQ ID NO: 66526 - DNA, 1071 bp, Artificial Sequence
  derived and/or modified sequence
atgttgccaaggtgggaactcgctctctatctactggcttcactcggcttccatttctactctttctacgaggtgtataaagtttcaagggagcacgaagaagaactggatcaggagtttgagcttgagactgacacactcttcgggggcctcaaaaaagacgccacagacttcgaatggtctttttggatggaatggggaaagcaatggctcgtatggttgttactgggccatatggttgtttcccaaatggcgactctgttggccaggaagatgcagcagcaggagcacgacagcttaaaggcctctctgtgtgtcctggcactggggctgggcaggttactgtgctggtggtggctcgcagaactgatggcccatctcatgtatatgcacgcaatttactccagcatccccctcttggagactgtgagttgctggacactcggcggcttggctctggctcaggttctcttcttctacgtcaagtaccttgttctcttcggcgtccccgcgctgttgatgaggctggatggtctgacgccacccgctctcccccggtgtgtgtcaacgatgttcagtttcaccgggatgtggaggtactttgatgtcggattgcataatttcctgatccggtacgtatacatcccggtcggtggctctcagcatggcctcctgggaactctgttttccacggcgatgactttcgcattcgtaagttactggcacggtggatatgattacctgtggtgctgggcagccctgaattggctgggtgttaccgtggagaacggcgtgaggcgcttggtggaaacgccgtgtatacaggattccttggcccgctattttagcccacaggcccggaggagattccacgcagccctcgcctcttgctctacatctatgctgatcctcagtaacctggtgtttctcggaggcaacgaagttggtaagacttactggaaccggatcttcatccaaggttggccctgggtgaccctctccgtcttaggatttctctactgctatagccacgtggggatcgcctgggcccaaacctacgctacggattag

SEQ ID NO: 66527 - DNA, 2714 bp, Artificial Sequence
  derived and/or modified sequence
aaagtagaaaaaccttgtggttcttttggagtgaaagccttgtaataggccccttggggcatgctggggctcatttctagacagtgaggcgtgatgagcaggagagatgaagaaaatctgcttctcttgcaaagtaattccttcatgagacttcattaaaagggtcttcaggaggactggcgttagcccaggtgctctttttctacgtgaagtacttggtgctctttggcgtgcctgctctgctcatgcgcctggatggactcactccacccgccctcccccgctgcgtgagcaccatgttcagtttcaccgggatgtggaggtattttgatgttggactgcataatttcttaatcaggtatgtgtacattccagtgggcgggtcccagcatggcctgctggggacactgttttccacggcgatgacatttgcatttgtgagctactggcatggcggctacgactacctctggtgctgggcagcgctcaactggctgggagtcactgtggagaatggagtccggaggctggtggagactccctgcatccaggacagtctggcccgatacttctccccacaagctcgccgtcgattccacgctgcccttgcttcttgttccacctcgatgctgatcctgtccaacctggtatttcttgggggcaatgaggttgggaaaacctactggaataggatcttcatacaaggctggccttgggtgaccctctctgtcctgggattcctgtactgctactcccacgtgggcattgcctgggcccagacctacgccacggactaatgctgttgggcccaggccagtccttgttgctggcctccaaggcaaatagtgcttcaccctgacctctcactccaggacagcctctaagggatttgatctgctcatcttcagttgaatgccctcactccaagactggatgctggatctcatagaaaattcacagccagacaatcttctaatctggagtctttgagatcttctaccccaactcatcattttcctattgaggaaacgggtccagggcagtcgtgtgtcttacccagctacacagggtgacattttggtctagaacctagtctcatgagccctttgcattctttccccttaagcaagaatagaatgtagtggaaatttattgattgagacacagaaatcctgattagtgataggcctgtcttctgggcaatatttctaaaatatttgagtgacattgatgtttaagtgacctccttcatcacatcctgcagtatctccagaagcagcactagggtttgagtttcatacttcagcccctctgtaggaatgagaccaagccacagctgtcttttgaattacgtagtcgaagaagacggtagcagccctgtagcattctaaggcatctatacccaaggagtcctgtgatttgagcttcagcagggtgatctacatttgggtgcttgtttctgagatttgcagagaagtataacatggtagttcctctaccttacagttaatcgtttcttaataaagaagcagaatttagaaaccacaggatagtgtacccacagatgggtgttatcaaggccagtcatgaggatggtgtcctggagtcttgtccaccctctccatacaagtctcaaaagtcatcctcctactcagtgattcacgtttagtggtttatattattaaggtttgattcaaacagagccttttctgtcctgtagataatctacatgtttgtagaattattttgaatatgtttgaggaaaatgtttaaaatctaaatatactcacataacttgattattcactcctctgaaaagatgctggataggctaccaaagttcccaagtggtagataattcagaagacttgtttgaatttggattttttttttttttggagtggggaagggtataaaggaggcttaaaatttgaatccataatatatctaattacaggagaatttacaacatctcaagtacgtaaattaagttgtcattgagtgaaaggttcacttggacctagtgctgcctcctgtttattacatagcatggcccttatgtcttgagttgaggttatcatctcaatgaggcttaagctcctagagtacaggaccattttgttgattgtctttcttcatagcttctctgcttggcaaagagatgggagggggccagatactgactacctggggtaggcacattatgtgttaaagcaagacagaggccagagaggggcaggtagacctgcatagcagcagcctcagcagctgtcttggtaaaggagagagagagacatggggccagtaattccggggtgctcagaagttttaggagggaatgagcctcagggaggagtgagcacctaaatgaacgcagtaaaccttcatggaccaacagtgattgaggatttgtgggcagccagagggagtctgactgaagtttacttggaaagaaagggcttgctaagaaaaaagggagtaaaaatgatgatagggaagtgtctaatgtatgtgcacatataagtaatacaaaagttttgagctcttccaagtataccatttatatacaaacaaataggtttattcattcattaaactactttggaagcgtcagtggatatatttgaaagtggtaatcctgaatctcttttaaactattatatgattcataatggttctcaggaattaataaatgattactgtgtttagctctg

SEQ ID NO: 66528 - DNA, 3164 bp, Artificial Sequence
  derived and/or modified sequence
ctcttggctcaggcttggaggcctccgagcagcaacatcgtcccaattataccccgttggagcatcttcagatcttccactcttttcacaacgcaatcaaaatcttcgtacccattttgcagtagtgatctctaaactctcagcgtaggcatcgggaaccttcgtgccaaggagccatgctgccccgatgggaactggcactttacctacttgcctcactaggcttccacttctattccttctatgaagtttacaaagtctccagagaacacgaagaggagctggaccaggaatttgagctggagactgacactttatttggaggattaaagaaggatgcgaccgactttgagtggagcttctggatggaatgggggaagcagtggctggtgtggcttctccttggccacatggtagtgtctcaaatggccacactgctggcaagaaagatgcagcagcaggagcatgactccctgaaggccagcctgtgtgtcctggccctggggctgggccgccttctttgctggtggtggctggccgagctgatggctcacctgatgtacatgcatgccatctacagcagcatccccctcctggagactgtctcttgttggaccttaggaggactggcgttagcccaggtgctctttttctacgtgaagtacttggtgctctttggcgtgcctgctctgctcatgcgcctggatggactcactccacccgccctcccccgctgcgtgagcaccatgttcagtttcaccgggatgtggaggtattttgatgttggactgcataatttcttaatcaggtatgtgtacattccagtgggcgggtcccagcatggcctgctggggacactgttttccacggcgatgacatttgcatttgtgagctactggcatggcggctacgactacctctggtgctgggcagcgctcaactggctgggagtcactgtggagaatggagtccggaggctggtggagactccctgcatccaggacagtctggcccgatacttctccccacaagctcgccgtcgattccacgctgcccttgcttcttgttccacctcgatgctgatcctgtccaacctggtatttcttgggggcaatgaggttgggaaaacctactggaataggatcttcatacaaggctggccttgggtgaccctctctgtcctgggattcctgtactgctactcccacgtgggcattgcctgggcccagacctacgccacggactaatgctgttgggcccaggccagtccttgttgctggcctccaaggcaaatagtgcttcaccctgacctctcactccaggacagcctctaagggatttgatctgctcatcttcagttgaatgccctcactccaagactggatgctggatctcatagaaaattcacagccagacaatcttctaatctggagtctttgagatcttctaccccaactcatcattttcctattgaggaaacgggtccagggcagtcgtgtgtcttacccagctacacagggtgacattttggtctagaacctagtctcatgagccctttgcattctttccccttaagcaagaatagaatgtagtggaaatttattgattgagacacagaaatcctgattagtgataggcctgtcttctgggcaatatttctaaaatatttgagtgacattgatgtttaagtgacctccttcatcacatcctgcagtatctccagaagcagcactagggtttgagtttcatacttcagcccctctgtaggaatgagaccaagccacagctgtcttttgaattacgtagtcgaagaagacggtagcagccctgtagcattctaaggcatctatacccaaggagtcctgtgatttgagcttcagcagggtgatctacatttgggtgcttgtttctgagatttgcagagaagtataacatggtagttcctctaccttacagttaatcgtttcttaataaagaagcagaatttagaaaccacaggatagtgtacccacagatgggtgttatcaaggccagtcatgaggatggtgtcctggagtcttgtccaccctctccatacaagtctcaaaagtcatcctcctactcagtgattcacgtttagtggtttatattattaaggtttgattcaaacagagccttttctgtcctgtagataatctacatgtttgtagaattattttgaatatgtttgaggaaaatgtttaaaatctaaatatactcacataacttgattattcactcctctgaaaagatgctggataggctaccaaagttcccaagtggtagataattcagaagacttgtttgaatttggattttttttttttttggagtggggaagggtataaaggaggcttaaaatttgaatccataatatatctaattacaggagaatttacaacatctcaagtacgtaaattaagttgtcattgagtgaaaggttcacttggacctagtgctgcctcctgtttattacatagcatggcccttatgtcttgagttgaggttatcatctcaatgaggcttaagctcctagagtacaggaccattttgttgattgtctttcttcatagcttctctgcttggcaaagagatgggagggggccagatactgactacctggggtaggcacattatgtgttaaagcaagacagaggccagagaggggcaggtagacctgcatagcagcagcctcagcagctgtcttggtaaaggagagagagagacatggggccagtaattccggggtgctcagaagttttaggagggaatgagcctcagggaggagtgagcacctaaatgaacgcagtaaaccttcatggaccaacagtgattgaggatttgtgggcagccagagggagtctgactgaagtttacttggaaagaaagggcttgctaagaaaaaagggagtaaaaatgatgatagggaagtgtctaatgtatgtgcacatataagtaatacaaaagttttgagctcttccaagtataccatttatatacaaacaaataggtttattcattcattaaactactttggaagcgtcagtggatatatttgaaagtggtaatcctgaatctcttttaaactattatatgattcataatggttctcaggaattaataaatgattactgtgtttagctctg

SEQ ID NO: 66529 - DNA, 552 bp, Artificial Sequence
  derived and/or modified sequence
atgaggctggatggcctgaccccaccagccctgccccgctgtgtgtccaccatgttctccttcaccggcatgtggagatactttgatgtgggcctgcacaacttcctgatccgctacgtgtacatccctgtgggcggcagccagcacggcctgctgggcaccctcttcagcacagccatgacctttgcctttgtgtcctactggcatggaggctatgactacctgtggtgctgggccgccctgaactggctgggcgtgacagtggagaatggagtgcggcggctggtggagaccccctgcatccaggacagcctggcccgctacttcagcccccaggcccggcggcgcttccacgccgccctggccagctgcagcacctccatgctgatcctgagcaacctggtgttcctgggcggcaatgaggtgggcaagacctactggaaccgcatcttcatccagggctggccctgggtgaccctgtctgtgctgggcttcctgtactgctacagccacgtgggcatcgcctgggcccagacctacgccacagactag

SEQ ID NO: 66530 - DNA, 1071 bp, Artificial Sequence
  derived and/or modified sequence
atgctgccccgctgggagctggccctgtacctgctggccagcctgggcttccacttctacagcttctatgaggtgtacaaggtgtcccgggagcacgaggaggagctggaccaggagtttgagctggagacagacaccctgtttggaggcctgaagaaggatgccacagactttgagtggagcttctggatggagtggggcaagcagtggctggtgtggctgctgctgggccacatggtggtgtcccagatggccaccctgctggccaggaagatgcagcagcaggagcatgacagcctgaaggccagcctgtgtgtgctggccctgggcctgggccgcctgctgtgctggtggtggctggccgagctgatggcccacctgatgtacatgcacgccatctacagcagcatccccctgctggagaccgtgtcctgctggaccctgggcggcctggccctggcccaggtgctcttcttctacgtgaagtacctggtgctgtttggagtgcctgccctgctgatgaggctggatggcctgaccccaccagccctgccccgctgtgtgtccaccatgttctccttcaccggcatgtggagatactttgatgtgggcctgcacaacttcctgatccgctacgtgtacatccctgtgggcggcagccagcacggcctgctgggcaccctcttcagcacagccatgacctttgcctttgtgtcctactggcacggcggctatgactacctgtggtgctgggccgccctgaactggctgggcgtgacagtggagaatggagtgcggcggctggtggagaccccctgcatccaggacagcctggcccgctacttcagcccccaggcccggcggcgcttccacgccgccctggccagctgcagcacctccatgctgatcctgagcaacctggtgttcctgggcggcaatgaggtgggcaagacctactggaaccgcatcttcatccagggctggccctgggtgaccctgtctgtgctgggcttcctgtactgctacagccacgtgggcatcgcctgggcccagacctacgccacagactag

SEQ ID NO: 66531 - DNA, 552 bp, Artificial Sequence
  derived and/or modified sequence
atgcggctggacggcctgaccccccccgccctgccccggtgcgtgtccacaatgttcagttttaccggcatgtggcggtatttcgacgtcgggttgcacaattttcttatacggtacgtgtatataccagttggcggcagtcaacacggccttttgggaactctcttctccacagcaatgacgttcgcgttcgtcagctactggcacggcggctacgactacctgtggtgctgggcagccctgaattggttaggagttacggtggagaacggtgtgaggcgccttgtcgaaacaccgtgtattcaggacagcctggcaaggtacttctcacctcaagcacggcgccggttccatgcggcgcttgccagctgcagcacttctatgttgattctgtctaaccttgtctttctggggggtaatgaggtcgggaagacatactggaatcgcatctttattcagggctggccctgggtgactctgagcgtcctcgggttcctgtactgctactctcatgtggggatcgcctgggcgcagacctatgcgaccgactag

SEQ ID NO: 66532 - DNA, 1071 bp, Artificial Sequence
  derived and/or modified sequence
atgctgccccggtgggagctggccctgtacctgctggccagcctgggcttccatttctattccttctacgaggtgtataaagttagcagagagcatgaggaagagttagatcaggaattcgagctggagaccgacacactgtttggaggtctcaaaaaggatgctactgattttgagtggagcttttggatggaatgggggaagcaatggctggtctggcttcttcttggccacatggtggttagccagatggccacattgttggcaagaaagatgcaacagcaagagcacgacagccttaaagcatctttgtgcgtgttggcacttggcttgggaagactgttgtgttggtggtggctcgctgaactgatggcgcatctgatgtatatgcacgctatttacagctccatccctctgctcgagactgtctcgtgctggacgctaggaggactggctttagcgcaagtcctgtttttctatgtgaaataccttgttctatttggggtccctgcccttctgatgcggcttgacggcctaactcctcctgccctgccccgctgtgtgagcacaatgttctcctttacaggcatgtggcgatacttcgatgtgggcttgcacaatttcctcattcgctacgtctacatcccggtcggaggttctcagcacggactgttgggaaccctgttctcaacagcaatgaccttcgcatttgtatcttactggcacgggggttacgactacttgtggtgctgggctgctctcaattggctgggggttaccgtcgagaacggagtgcgaaggctggtagaaacaccctgtatccaagactctttggctaggtacttttccccccaggccagaagacgcttccatgctgctctcgcatcctgttccacatccatgttaattctgagtaatctggtctttttggggggtaacgaagtgggtaaaacatactggaaccggatctttatccaaggctggccttgggtcacactgtcggtgctagggttcttgtattgctactcccatgtcgggatcgcctgggctcagacctatgccacggattag

SEQ ID NO: 66533 - DNA, 552 bp, Artificial Sequence
  derived and/or modified sequence
atgaggctcgacggattaaccccaccagcactcccacggtgcgtgtcaaccatgttttctttcaccggcatgtggaggtacttcgacgtaggacttcataactttctgatcaggtacgtctatattcccgtcggagggtcccaacacggcctccttggaaccctgttctcgactgctatgacatttgccttcgttagctattggcacggcggatacgattatctgtggtgctgggctgccctgaactggctgggggtgacagtcgaaaacggcgtgcggaggctggtagaaacaccttgcatccaggactctctagccaggtacttttcaccccaggctagaaggagattccacgctgctttggccagctgttcaacatcaatgcttatcctgagcaacctcgtattcctcgggggaaacgaagtggggaagacctactggaataggatctttattcagggctggccttgggtaactctctctgtgctcggtttcctctactgttatagccatgtaggcattgcttgggctcagacttacgctacagactag

SEQ ID NO: 66534 - DNA, 1071 bp, Artificial Sequence
  derived and/or modified sequence
atgctaccaagatgggaactggccctgtatctgctggcttcactgggcttccatttttattctttttacgaggtatacaaagtgagtagagaacatgaggaggaattggaccaggagtttgagctcgagaccgacacactgttcggcggactcaaaaaagatgccactgacttcgagtggtccttctggatggaatggggaaaacaatggttggtatggctgctcctcggtcacatggtcgtgagtcagatggctacactgctggcccgaaagatgcagcagcaggagcacgattcactgaaagcttccctgtgtgtgttggcccttgggcttggcaggcttctgtgctggtggtggctggcagaactgatggcccacctcatgtatatgcatgccatctacagcagcatccctttgctggagactgtatcctgctggaccctgggaggactggccctggcgcaggtcttgttcttctacgtgaaatatttggtactgtttggcgttcccgctctgcttatgcgcctagacggtttaaccccccctgccttacccaggtgcgtcagcaccatgttctcttttactgggatgtggcgatattttgacgtcggcctccacaattttctaatacgctatgtctacatcccggtggggggttctcaacacggacttctcggaacactgttcagtacggctatgaccttcgcctttgtttcctactggcatggaggctacgactacctgtggtgctgggctgccctgaactggctgggagtaaccgtggaaaatggagtaagaaggttagttgaaacgccttgcatccaggactcactcgctcgctacttcagccctcaggcacgtcgcagatttcatgctgcactggcgtcttgttcaacatctatgctcatattgagtaacctagtctttctgggcggaaacgaagtagggaagacatattggaatcgaatcttcatacaggggtggccttgggttaccttatcggtactgggctttctttattgctactcccacgtcggaatcgcatgggcccagacctacgcaacggattag

SEQ ID NO: 66535 - DNA, 552 bp, Artificial Sequence
  derived and/or modified sequence
atgagactggacggcctgaccccccccgccctgcccagatgcgtgagcaccatgttcagcttcaccggcatgtggagatacttcgacgtgggcctgcacaacttcctgatcagatacgtgtacatccccgtgggcggcagccagcacggcctgctgggcaccctgttcagcaccgccatgaccttcgccttcgtgagctactggcacggcggctacgactacctgtggtgctgggccgccctgaactggctgggcgtgaccgtggagaacggcgtgagaagactggtggagaccccctgcatccaggacagcctggccagatacttcagcccccaggccagaagaagattccacgccgccctggccagctgcagcaccagcatgctgatcctgagcaacctggtgttcctgggcggcaacgaggtgggcaagacctactggaacagaatcttcatccagggctggccctgggtgaccctgagcgtgctgggcttcctgtactgctacagccacgtgggcatcgcctgggcccagacctacgccaccgactag

SEQ ID NO: 66536 - DNA, 1071 bp, Artificial Sequence
  derived and/or modified sequence
atgctgcccagatgggagctggccctgtacctgctggccagcctgggcttccacttctacagcttctacgaggtgtacaaggtgagcagagagcacgaggaggagctggaccaggagttcgagctggagaccgacaccctgttcggcggcctgaagaaggacgccaccgacttcgagtggagcttctggatggagtggggcaagcagtggctggtgtggctgctgctgggccacatggtggtgagccagatggccaccctgctggccagaaagatgcagcagcaggagcacgacagcctgaaggccagcctgtgcgtgctggccctgggcctgggcagactgctgtgctggtggtggctggccgagctgatggcccacctgatgtacatgcacgccatctacagcagcatccccctgctggagaccgtgagctgctggaccctgggcggcctggccctggcccaggtgctgttcttctacgtgaagtacctggtgctgttcggcgtgcccgccctgctgatgagactggacggcctgaccccccccgccctgcccagatgcgtgagcaccatgttcagcttcaccggcatgtggagatacttcgacgtgggcctgcacaacttcctgatcagatacgtgtacatccccgtgggcggcagccagcacggcctgctgggcaccctgttcagcaccgccatgaccttcgccttcgtgagctactggcacggcggctacgactacctgtggtgctgggccgccctgaactggctgggcgtgaccgtggagaacggcgtgagaagactggtggagaccccctgcatccaggacagcctggccagatacttcagcccccaggccagaagaagattccacgccgccctggccagctgcagcaccagcatgctgatcctgagcaacctggtgttcctgggcggcaacgaggtgggcaagacctactggaacagaatcttcatccagggctggccctgggtgaccctgagcgtgctgggcttcctgtactgctacagccacgtgggcatcgcctgggcccagacctacgccaccgactag

SEQ ID NO: 66537 - protein, 493 aa, Artificial Sequence
  derived and/or modified sequence
MLPRWELALYLLASLGFHFYSFYEVYKVSREHEEELDQEFELETDTLFGGLKKDATDFEWSFWMEWGKQWLVWLLLGHMVVSQMATLLARKHRPWILMLYGMWACWCVLGTPGVAMVLLHTTISFCVAQFRSQLLTWLCSLLLLSTLRLQGVEEVKRRWYKTENEYYLLQFTLTVRCLYYTSFSLELCWQQLPAASTSYSFPWMLAYVFYYPVLHNGPILSFSEFIKQMQQQEHDSLKASLCVLALGLGRLLCWWWLAELMAHLMYMHAIYSSIPLLETVSCWTLGGLALAQVLFFYVKYLVLFGVPALLMRLDGLTPPALPRCVSTMFSFTGMWRYFDVGLHNFLIRYVYIPVGGSQHGLLGTLFSTAMTFAFVSYWHGGYDYLWCWAALNWLGVTVENGVRRLVETPCIQDSLARYFSPQARRRFHAALASCSTSMLILSNLVFLGGNEVGKTYWNRIFIQGWPWVTLSVLGFLYCYSHVGIAWAQTYATD

SEQ ID NO: 66538 - protein, 448 aa, Artificial Sequence
  derived and/or modified sequence
MKFTKSPEDATDFEWSFWMEWGKQWLVWLLLGHMVVSQMATLLARKHRPWILMLYGMWACWCVLGTPGVAMVLLHTTISFCVAQFRSQLLTWLCSLLLLSTLRLQGVEEVKRRWYKTENEYYLLQFTLTVRCLYYTSFSLELCWQQLPAASTSYSFPWMLAYVFYYPVLHNGPILSFSEFIKQMQQQEHDSLKASLCVLALGLGRLLCWWWLAELMAHLMYMHAIYSSIPLLETVSCWTLGGLALAQVLFFYVKYLVLFGVPALLMRLDGLTPPALPRCVSTMFSFTGMWRYFDVGLHNFLIRYVYIPVGGSQHGLLGTLFSTAMTFAFVSYWHGGYDYLWCWAALNWLGVTVENGVRRLVETPCIQDSLARYFSPQARRRFHAALASCSTSMLILSNLVFLGGNEVGKTYWNRIFIQGWPWVTLSVLGFLYCYSHVGIAWAQTYATD

SEQ ID NO: 66539 - DNA, 1482 bp, Artificial Sequence
  derived and/or modified sequence
atgttgccaagatgggagcttgccctctatctgctcgcctctctgggattccacttctactctttctatgaggtctacaaggtcagcagagaacacgaagaggagttagaccaggagttcgagctggaaacagataccctgtttgggggactgaaaaaagacgctactgacttcgaatggtccttttggatggagtggggcaagcagtggctggtttggctgcttctcggccacatggtggttagtcagatggccaccctactggcaagaaagcatagaccttggatcctgatgctctacgggatgtgggcctgctggtgtgtgctgggcactcccggagtcgccatggtcctgctgcacacaaccattagtttttgtgttgcgcagttccgaagccagctcctgacctggttgtgtagcctcttattactgagcacgttgcgcctgcagggggtggaggaagtgaaacggaggtggtacaaaaccgaaaacgaatattatctgcttcagtttactctaactgttaggtgcttgtactataccagcttttccctggagctgtgctggcagcagctgcctgctgcctctaccagctacagcttcccgtggatgttggcctacgtattttactatcccgtgttgcataatggacctattttgtctttttccgagtttatcaaacagatgcagcaacaggagcacgactccctgaaggcctcactgtgtgtgctcgcactcggattgggccgccttttgtgctggtggtggctggcagagttaatggcacacctaatgtacatgcatgccatatactccagcatcccgctcttggaaactgtgtcctgttggactctaggaggccttgcccttgctcaggttctctttttctacgtgaagtacctcgtattattcggggtgcctgccctcctcatgaggctcgatggcctaaccccaccagcattgccaagatgtgtatctacaatgttctcgttcactggaatgtggcgttatttcgatgtggggctccacaatttcctgatcaggtacgtgtatattcccgttggcgggtcccagcacggactcctggggaccctgttttctacggccatgacctttgcttttgttagctattggcacggtgggtacgactacctttggtgctgggctgccctgaattggctgggtgtgactgtggagaatggagttcgccggctggtcgagaccccttgtattcaggatagtctcgcacggtacttcagcccgcaggcgcgaagacggttccacgctgcgctggctagctgctctacctccatgctgattttgagtaacctggtattcttggggggaaacgaggttggcaagacttactggaatcgcatatttatccaaggatggccctgggtgaccctgagcgtgcttggtttcctttattgttacagtcatgtcggcattgcctgggcccagacctatgcaaccgattag

SEQ ID NO: 66540 - DNA, 1347 bp, Artificial Sequence
  derived and/or modified sequence
atgaagttcacaaagagccctgaggatgcaactgattttgaatggtctttttggatggaatggggcaaacagtggttggtttggttgctgttgggccacatggtcgtgtctcagatggccacacttcttgcccggaagcacagaccatggatcttgatgctgtacggaatgtgggcctgctggtgtgtgctgggaacacctggtgtggccatggtgctcctgcacacgactattagcttttgcgtggcccagttccgtagtcagctgctgacatggctctgtagcttattactgctgtccacccttcggttgcagggagtggaggaggtaaaacgtcgctggtacaaaacggagaatgagtattacctcctccagtttacattaactgtgcgatgtctctactataccagcttctcccttgagctgtgttggcagcaactccccgccgcatccacctcgtatagctttccttggatgctcgcatatgtgttttattatccggttctgcataacgggccaattctctccttctctgaattcatcaaacagatgcagcagcaggaacatgactcactgaaagcatccctatgtgtgctagccctgggcctggggcggcttctgtgctggtggtggctggccgagctcatggcccacttgatgtacatgcacgctatatactcatctattcccctgctggaaaccgtctcatgttggaccctcggtggactcgcactagctcaagtcctgttcttttacgtcaaatatcttgtgctgttcggggttcctgcgcttttaatgcggctcgacggcctgacccctcctgccctgcctcggtgcgtgtcgaccatgttcagtttcactgggatgtggcgatacttcgacgtgggtctgcataatttcttgatcaggtacgtttacatcccagtaggagggtcacaacacggcctgttgggaactctgttcagtactgccatgacattcgctttcgtaagctactggcacggaggctacgattacctctggtgttgggccgctctgaattggctgggtgtaaccgtggaaaatggggttaggagattggtcgagactccttgcattcaggactctctagcacggtatttcagcccacaagcacggcggcgttttcatgcggcacttgcatcatgctcgaccagtatgctgattctcagtaatctggtctttctgggcggcaacgaggtcggaaaaacatactggaacagaatattcattcaagggtggccatgggttaccctgtcagtcttgggcttcctgtattgctactcccacgttggcattgcctgggcccagacctatgctaccgattag

SEQ ID NO: 66541 - DNA, 1482 bp, Artificial Sequence
  derived and/or modified sequence
atgctgcctcggtgggagttagccctctacctcctagcatccctgggttttcacttttattccttctatgaggtgtacaaggtgtctcgggaacacgaggaggaactggatcaggagtttgaactggagacagatactctgttcggcgggttgaagaaggatgctacagacttcgagtggagcttctggatggagtggggtaaacagtggctggtgtggcttcttttggggcacatggtggttagccagatggctacacttctggcaagaaagcacaggccatggatcctgatgctgtatggcatgtgggcatgctggtgcgtcttagggacgcctggggtcgcaatggtattactgcacacaaccatctcattctgcgtggcgcagttcaggtcacaattgctgacttggctctgttctctgctgttgttatcaacgctacggctccagggcgtcgaagaagtgaagaggcgctggtacaagacagaaaacgagtattatttgttacaattcaccctcacggtgcgctgcctgtactacacaagtttctctctggagttgtgctggcagcagcttcccgcggcctcaacttcctactccttcccgtggatgttggcgtatgtgttctattatccagtcctgcacaacggacccatattgtctttttcagagttcattaagcaaatgcagcagcaggagcacgattctctgaaagccagcctctgtgttcttgccctgggcctggggaggctgctgtgttggtggtggcttgccgagcttatggctcacttgatgtatatgcacgcgatatactcctccatcccactgctagaaactgtgtcctgttggacactgggtggccttgcgttggcacaggtactgtttttctatgtcaagtatttggtgctgtttggtgttcctgccctgctcatgcgactggacgggctgacacccccagccttaccccgttgcgtatctaccatgttcagtttcacaggcatgtggcgatacttcgacgtgggtctccacaacttcctgatccgatacgtatacatcccagttgggggaagtcagcacgggctgctgggtaccctgtttagcactgcaatgacatttgcgtttgtgagctactggcacggaggctacgattacttgtggtgctgggccgcacttaactggctgggagttaccgtggaaaacggagttcgtcggctggtggaaacaccctgtattcaggacagtctagcccgatacttcagtccacaggcgcggcgaagatttcacgctgccttagcctcctgcagcacctctatgctgatcctttcgaatttggtatttctcggtgggaatgaggttggcaaaacttattggaaccgcatttttatccagggatggccttgggtcaccttgtccgtgcttggatttctctactgttattctcacgtgggcatagcatgggcccagacctatgccaccgattag

SEQ ID NO: 66542 - DNA, 1482 bp, Artificial Sequence
  derived and/or modified sequence
atgctacccaggtgggagctggccctgtacctgctcgccagcctaggatttcatttctactccttctatgaggtctacaaggtctcccgtgagcatgaggaggagctcgaccaggagtttgagcttgagactgacacgttattcggtggcctcaagaaggacgcaaccgattttgaatggagtttttggatggagtgggggaagcagtggctggtgtggttactgcttggacatatggtcgtctcccagatggccactctgctcgcgaggaaacaccgcccttggatacttatgctctacgggatgtgggcatgttggtgcgtcctgggtacacccggcgttgccatggtgctcttgcataccacgatatcattttgtgtggcccagtttcgatctcaactcctcacttggctctgtagcctactcttattatctacgctgcggctccaaggcgttgaggaggtgaagaggcgatggtacaaaacagagaacgaatattatttgctccaattcacattgactgtgaggtgtctttactacacatctttctcgctggagctctgctggcagcagcttcccgcagccagtacttcttactcattcccttggatgcttgcctacgttttttactatcctgtcctgcataatggccccatcttaagcttctccgagtttattaaacagatgcaacagcaggaacacgatagcctcaaggcgtcgctgtgtgtcctggctcttggacttggcaggcttttatgctggtggtggttggctgagctcatggcacacctgatgtacatgcatgctatctacagcagcatccctctgctggagaccgtgagttgttggaccctcgggggcctcgctctggcacaggtactgtttttttatgtgaagtatctcgtgctgtttggcgttccagcactactgatgaggctggacggtctgactccccccgccctccccagatgtgtgtcaacaatgttttcttttactggaatgtggagatatttcgacgttgggctccacaactttctgatccgttatgtgtacatccctgtgggtggctcacagcacggccttttgggcactctgttttcaactgccatgacatttgcattcgtgtcctactggcacggaggatatgactatctctggtgctgggcagccctcaattggctcggtgtgacagtggagaatggggtgcggaggcttgttgagacaccctgtatacaggactctttagcgcggtacttctctcctcaggcccgaaggcggttccatgcggcactggccagctgctccacctcgatgctcattctcagtaaccttgtctttctcggagggaatgaggtcggcaagacatactggaaccgcatctttattcaaggctggccttgggtgacactctccgtgcttggctttctgtattgctactctcatgtaggaatcgcatgggcacaaacatacgcgactgactag

SEQ ID NO: 66543 - DNA, 1583 bp, Artificial Sequence
  derived and/or modified sequence
gtgctcggaggacgcgcgctgcgctgctcctccaaagggcagctccgggggaaagagggtggcgtcccggggaagcccgcagccgccgccgatgtcgctgggactcggaagtgccgaaagaggggtgttgggaactcgcggcgcgcgtgaacgttgccgtcgccgccgcccgggacagcccggaggatgcgaccgactttgagtggagcttctggatggaatgggggaagcagtggctggtgtggcttctccttggccacatggtagtgtctcaaatggccacactgctggcaagaaagcacagaccctggattctcatgctctatgggatgtgggcctgctggtgtgtgctggggacccctggtgtggctatggttttgctccataccaccatctctttctgcgtggcccagttccggtctcagctcctgacgtggctctgttctctcctcctcctctccacactgaggctgcagggtgtggaagaagttaagagaaggtggtacaagacagaaaacgagtactacctgctgcagttcacgctgaccgttcgctgcctgtactacaccagcttcagcctggagctctgctggcagcagctgcctgctgcatcgacctcctactcctttccctggatgctggcctatgtcttttattatccagtcttacacaatgggcccatcctcagcttctcggagttcatcaaacagatgcagcagcaggagcatgactccctgaaggccagcctgtgtgtcctggccctggggctgggccgccttctttgctggtggtggctggccgagctgatggctcacctgatgtacatgcatgccatctacagcagcatccccctcctggagactgtctcttgttggaccttaggaggactggcgttagcccaggtgctctttttctacgtgaagtacttggtgctctttggcgtgcctgctctgctcatgcgcctggatggactcactccacccgccctcccccgctgcgtgagcaccatgttcagtttcaccgggatgtggaggtattttgatgttggactgcataatttcttaatcaggtatgtgtacattccagtgggcgggtcccagcatggcctgctggggacactgttttccacggcgatgacatttgcatttgtgagctactggcatggcggctacgactacctctggtgctgggcagcgctcaactggctgggagtcactgtggagaatggagtccggaggctggtggagactccctgcatccaggacagtctggcccgatacttctccccacaagctcgccgtcgattccacgctgcccttgcttcttgttccacctcgatgctgatcctgtccaacctggtatttcttgggggcaatgaggttgggaaaacctactggaataggatcttcatacaaggctggccttgggtgaccctctctgtcctgggattcctgtactgctactcccacgtgggcattgcctgggcccagacctacgccacggactaatgctgttgggcccaggccagtccttgttgctggcctccaaggcaaatagtgcttcaccctgacctctcactccag

SEQ ID NO: 66544 - DNA, 1482 bp, Artificial Sequence
  derived and/or modified sequence
atgctgccccgctgggagctggccctgtacctgctggccagcctgggcttccacttctacagcttctatgaggtgtacaaggtgtcccgggagcacgaggaggagctggaccaggagtttgagctggagacagacaccctgtttggaggcctgaagaaggatgccacagactttgagtggagcttctggatggagtggggcaagcagtggctggtgtggctgctgctgggccacatggtggtgtcccagatggccaccctgctggccaggaagcaccggccctggatcctgatgctgtatggcatgtgggcctgctggtgtgtgctgggcaccccaggagtggccatggtgctgctgcacaccaccatctccttctgtgtggcccagttccgcagccagctgctgacctggctgtgcagcctgctgctgctgagcaccctgcggctgcagggcgtggaggaggtgaagaggcgctggtacaagacagaaaatgagtactacctgctgcagttcaccctgactgtgcgctgcctgtactacaccagcttcagcctggagctgtgctggcagcagctgcctgctgccagcaccagctacagcttcccctggatgctggcctacgtgttctactaccctgtgctgcacaacggccccatcctgtccttcagcgagttcatcaagcagatgcagcagcaggagcatgacagcctgaaggccagcctgtgtgtgctggccctgggcctgggccgcctgctgtgctggtggtggctggccgagctgatggcccacctgatgtacatgcacgccatctacagcagcatccccctgctggagaccgtgtcctgctggaccctgggcggcctggccctggcccaggtgctcttcttctacgtgaagtacctggtgctgtttggagtgcctgccctgctgatgaggctggatggcctgaccccaccagccctgccccgctgtgtgtccaccatgttctccttcaccggcatgtggagatactttgatgtgggcctgcacaacttcctgatccgctacgtgtacatccctgtgggcggcagccagcacggcctgctgggcaccctcttcagcacagccatgacctttgcctttgtgtcctactggcatggaggctatgactacctgtggtgctgggccgccctgaactggctgggcgtgacagtggagaatggagtgcggcggctggtggagaccccctgcatccaggacagcctggcccgctacttcagcccccaggcccggcggcgcttccacgccgccctggccagctgcagcacctccatgctgatcctgagcaacctggtgttcctgggcggcaatgaggtgggcaagacctactggaaccgcatcttcatccagggctggccctgggtgaccctgtctgtgctgggcttcctgtactgctacagccacgtgggcatcgcctgggcccagacctacgccacagactag

SEQ ID NO: 66545 - DNA, 1347 bp, Artificial Sequence
  derived and/or modified sequence
atgaagttcaccaagagcccagaagatgccacagactttgagtggagcttctggatggagtggggcaagcagtggctggtgtggctgctgctgggccacatggtggtgtcccagatggccaccctgctggccaggaagcaccggccctggatcctgatgctgtatggcatgtgggcctgctggtgtgtgctgggcaccccaggagtggccatggtgctgctgcacaccaccatctccttctgtgtggcccagttccgcagccagctgctgacctggctgtgcagcctgctgctgctgagcaccctgcggctgcagggcgtggaggaggtgaagaggcgctggtacaagacagaaaatgagtactacctgctgcagttcaccctgactgtgcgctgcctgtactacaccagcttcagcctggagctgtgctggcagcagctgcctgctgccagcaccagctacagcttcccctggatgctggcctacgtgttctactaccctgtgctgcacaacggccccatcctgtccttcagcgagttcatcaagcagatgcagcagcaggagcatgacagcctgaaggccagcctgtgtgtgctggccctgggcctgggccgcctgctgtgctggtggtggctggccgagctgatggcccacctgatgtacatgcacgccatctacagcagcatccccctgctggagaccgtgtcctgctggaccctgggcggcctggccctggcccaggtgctcttcttctacgtgaagtacctggtgctgtttggagtgcctgccctgctgatgaggctggatggcctgaccccaccagccctgccccgctgtgtgtccaccatgttctccttcaccggcatgtggagatactttgatgtgggcctgcacaacttcctgatccgctacgtgtacatccctgtgggcggcagccagcacggcctgctgggcaccctcttcagcacagccatgacctttgcctttgtgtcctactggcacggcggctatgactacctgtggtgctgggccgccctgaactggctgggcgtgacagtggagaatggagtgcggcggctggtggagaccccctgcatccaggacagcctggcccgctacttcagcccccaggcccggcggcgcttccacgccgccctggccagctgcagcacctccatgctgatcctgagcaacctggtgttcctgggcggcaatgaggtgggcaagacctactggaaccgcatcttcatccagggctggccctgggtgaccctgtctgtgctgggcttcctgtactgctacagccacgtgggcatcgcctgggcccagacctacgccacagactag

SEQ ID NO: 66546 - DNA, 1482 bp, Artificial Sequence
  derived and/or modified sequence
atgctgccccggtgggagctggccctgtacctgctggccagcctgggttttcacttctacagtttctacgaagtttataaagtcagcagggagcatgaggaagagctggaccaggagttcgaattggaaacagatactctgtttggagggctaaagaaggatgctactgactttgaatggtctttctggatggagtggggcaagcagtggctcgtttggctgctgctaggccacatggtggtgtcccagatggccacacttttggctcgaaagcatcgtccatggatactgatgctgtatgggatgtgggcatgctggtgtgtgctcggcacacccggcgtagcaatggttcttcttcacacaacaatttccttctgtgtggctcagttcaggagccagctgctgacttggctgtgttcacttctgctgctgagcaccctgcgcctccagggagttgaggaagtcaaaaggcgctggtacaagaccgaaaacgaatattacttactgcagtttacccttacagtgaggtgcctgtattacacctccttctccctcgaactttgttggcagcagcttcctgcagccagcacgtcttactcttttccgtggatgcttgcatatgtcttctactatcccgtgcttcacaacggaccaattctgagcttctctgagttcatcaagcaaatgcagcagcaggaacacgactctctgaaagccagtctgtgcgtccttgccctcgggctcggtcgcctgctttgctggtggtggttggccgagctcatggctcatttaatgtatatgcacgccatctacagttctatacctctcctcgagacagtttcttgctggactctggggggcttggccctcgcccaagtgctattcttctatgttaagtatctggtactgttcggagttccagcactcctcatgcgcttggatggcctgacccccccggctttgcctcgctgcgtctcgacaatgttttcattcacaggaatgtggcgatacttcgacgtaggcttacacaacttcttgattagatacgtctacattcctgtgggagggtcccagcacggcctcctgggtaccctgttcagtacggctatgactttcgcattcgtgagctactggcatggcggatatgactatctctggtgttgggccgccttgaattggctaggtgtaacggtggagaacggagtgcgtcgcctggtagagaccccgtgtatccaagacagtttggcccgttacttctcaccgcaagcccgcagaagattccacgctgctcttgcatcttgcagcacgtccatgttgattctcagcaatttggtgtttctgggcggaaacgaggttggaaagacctattggaacagaatattcattcaagggtggccatgggtaaccctgagcgttctggggtttctttactgttacagtcatgtggggattgcttgggcccagacgtacgctaccgactag

SEQ ID NO: 66547 - DNA, 1347 bp, Artificial Sequence
  derived and/or modified sequence
atgaagttcaccaagagccccgaggacgccaccgacttcgagtggtccttttggatggagtggggaaagcagtggttagtctggttgctgctgggacacatggtggtgtcccaaatggccacactgctggctagaaaacatcgaccgtggatcctcatgctttatggaatgtgggcctgctggtgtgtcctgggaaccccaggggtggccatggtcctgctgcacactaccatctccttctgcgtagctcaatttagatctcagcttctcacttggctgtgttccctgctgttgctgagtaccctgcgattacagggcgtcgaggaggtcaaacgacgatggtacaaaactgagaatgagtattatttactacagttcacactgactgtgagatgtctttattataccagcttcagcctcgagttatgctggcagcagctacctgccgcctctacgtcctacagctttccctggatgctcgcatatgttttttactacccagtgctgcataacggacctattctgagtttctcagagtttattaaacagatgcaacaacaggagcatgactccctgaaggcctctctatgcgtgctggccttgggtctgggaaggctgctgtgctggtggtggctggccgaactcatggcacacttaatgtatatgcacgccatctacagttccattccccttctggagacagtgtcttgctggactttgggcgggctcgctttagctcaggtgctgttcttctatgtcaagtatctcgtcctctttggcgtgcctgccttactgatgaggctcgacggcctgacacccccggccctgccccggtgcgttagcacaatgttttctttcacaggaatgtggcggtacttcgacgtaggcctacacaacttcctgattcgttatgtgtacatacctgtcggaggaagccagcatggactgctcggaacactgtttagcaccgcgatgacattcgcatttgtatcttactggcacggtggttacgattacctctggtgctgggctgcccttaactggttgggtgtgaccgtcgagaatggagtgcgaaggctggtagagacaccatgcatccaagatagtttggctcggtactttagtccccaagctcgcagacgctttcatgctgcactcgcgagttgcagtacatcgatgctgattttgtcgaatctggtcttcctgggaggtaatgaggtcggcaagacttactggaatcggattttcatccagggctggccatgggtgactttgagcgtgctggggtttctgtattgttactcacacgttggcattgcttgggcacagacatacgctactgactag

SEQ ID NO: 66548 - DNA, 1482 bp, Artificial Sequence
  derived and/or modified sequence
atgctgccccggtgggagctggccctgtacctgctggccagcctgggtttccatttctattccttctacgaggtttataaggtgtcccgtgagcacgaggaggaactggatcaggaattcgaactggagacagataccctgtttggtggacttaaaaaagacgcaaccgacttcgaatggtctttctggatggaatgggggaagcagtggctagtctggctcctgctcgggcatatggtggtctcacagatggctacactgctcgcccgcaagcaccgaccctggatcctgatgttgtatggcatgtgggcctgttggtgcgttctgggaactcctggagtcgccatggttttgttacacaccacgatctcgttctgcgtggcccaatttcgatcacaactcttgacatggctctgcagcctgctgctgctctctaccctccggctgcaaggggttgaggaagttaaacggagatggtacaagactgagaacgagtattacctgctgcagttcactcttactgttcgctgtctctactatacatctttttcattggaactgtgttggcaacagcttcctgcggcctcaacttcatatagtttcccctggatgttggcttatgtgttctactacccggtgctacacaatggccccattctgtcgttctcagaattcattaagcagatgcaacagcaggagcacgattcccttaaagcttccctgtgcgtgctggctttgggactggggagacttctgtgctggtggtggctcgctgagctgatggcccacctgatgtacatgcatgccatctactcttccattccactgttggagaccgtgagctgctggacccttggtggcctcgccctggcccaggtgctgttcttttatgtgaagtaccttgtactttttggcgtgccagctctccttatgaggctggacggactgacgcctccggcattgccacggtgtgtgtcgaccatgttttccttcacaggaatgtggcgatacttcgatgttgggttgcacaacttcctcattagatacgtgtacatccccgttgggggctcgcagcacggcctcctcgggacactgttttccaccgccatgacttttgcgtttgtttcttattggcacggcggatacgattatctgtggtgttgggccgccttgaattggctgggagtaaccgtggagaacggagtgcggagacttgtggagacgccttgtatccaagactcactcgcccgctacttcagtcctcaagcgcgcaggcggttccacgccgcacttgcttcctgtagcacttccatgctaatacttagtaaccttgttttcctgggggggaatgaagtgggaaaaacctattggaaccggattttcatccaaggatggccgtgggttaccctgagtgtccttggattcctgtactgctactcccacgtcggcattgcctgggctcagacctatgctaccgattag

SEQ ID NO: 66549 - DNA, 1482 bp, Artificial Sequence
  derived and/or modified sequence
atgctgccccggtgggagctggccctgtacctgctggccagcctgggctttcacttctactccttttacgaggtatacaaagtgtccagagaacatgaagaggagcttgaccaggagttcgagctggaaactgacacactgtttggtgggttaaagaaagacgcaactgactttgagtggagtttctggatggaatggggaaagcagtggctagtttggcttcttttggggcatatggttgtgagccagatggctacccttctggctcgcaagcatcgcccatggattctcatgctatacggtatgtgggcgtgctggtgtgtgctcggcacaccaggtgtcgcaatggtgctcctgcacacaacgatctccttctgcgtcgcacaattccgttctcagttgctcacatggctgtgttccctgctactcctctccactttacgccttcagggagtggaagaagtcaaaagaagatggtacaaaacagagaatgagtattacctcctccagttcaccttgactgtgagatgcctctattacacttcattttcactggagctgtgttggcagcaactccccgccgcaagcacatcatactcctttccttggatgcttgcctacgtcttttattaccctgtactgcacaacgggcctatcctgtccttctctgaattcatcaagcaaatgcaacaacaggaacacgattctctgaaagcctctttatgcgtgctggcccttggtttgggcagacttctctgttggtggtggttagctgagctgatggcccatctgatgtatatgcatgccatctactcctctattcctctgctggagaccgtcagctgttggacgctcggaggactggctttggcacaggtgctgttcttttacgtgaagtatctcgtgctgtttggggttccagctttgctcatgagattggacggtctgaccccaccagccctgccaaggtgtgtgagcacaatgtttagtttcaccggtatgtggagatattttgatgtgggactgcataattttcttataaggtacgtgtatatcccagtcggtggaagccagcatggcctgcttggcaccttatttagtacagctatgacttttgcatttgtgtcgtattggcacggaggctatgattacctctggtgctgggctgccctcaactggctcggggtgacagtggagaacggtgtgaggaggctcgttgaaacaccctgcattcaagacagcctcgcgaggtatttctctccacaggcccgccgaagattccatgccgctctcgcatcatgcagcactagtatgttgatcctatccaacctggtatttttgggtgggaacgaggtgggcaagacttactggaatcgtattttcattcaggggtggccctgggtgaccctttctgtcttggggtttctctactgttactcccatgtcggcatcgcatgggcacagacgtacgcaacggattag

SEQ ID NO: 66550 - DNA, 1482 bp, Artificial Sequence
  derived and/or modified sequence
atgctgccgagatgggaattagctctgtatcttttagcatctctaggattccacttctactctttctatgaagtctacaaggtgtcacgagaacatgaggaggaactcgatcaggagttcgaactggaaaccgacaccttatttggaggattaaaaaaagatgccactgattttgaatggagcttctggatggagtggggaaaacaatggctggtttggctactgctcggtcatatggtcgtgagccagatggccacgcttttggctagaaaacatcggccatggatccttatgctgtatgggatgtgggcctgctggtgcgtgttaggcactccgggagtcgccatggtcctgctgcataccacgattagtttctgcgtcgcccagtttcgctcccaactgcttacttggctttgcagcctgctgctactgagtaccctccggctccagggagtcgaggaggtaaaacggaggtggtacaagacagagaacgaatactatctgttgcaattcaccctcacagtgcggtgtctgtactatacctctttttcgcttgaactctgttggcagcaattaccagcggcatcgaccagttattcttttccttggatgttagcgtatgtgttctactatcccgtcctccacaacggacccatcctgtctttctcagagttcatcaagcagatgcaacagcaggaacacgattccctgaaggccagtctgtgtgtcttagcactgggccttggacggctgctctgttggtggtggctggcagagctgatggctcacttaatgtacatgcatgctatttactcttctattcctctgcttgaaaccgtgtcctgttggacattaggtggactggctctggcacaggtgctatttttctatgtgaagtaccttgtcctatttggggtacccgctttgctcatgaggcttgatggcctgacaccgccagccctgcctcgttgcgtatctactatgttttcattcactggcatgtggcgatacttcgacgtgggattgcataactttttgatccgctatgtctatattccggttggtgggtcccagcatggtcttctcgggacacttttcagtactgccatgaccttcgcattcgtgtcttattggcatggtggatatgattacctgtggtgctgggctgcgctgaactggctgggcgtcaccgtggagaacggcgtgagacgtctggtagaaacaccatgcattcaggacagccttgccaggtatttcagtccccaagcaagacggaggttccacgcagcattggcttcctgttctacatcaatgctcatcctatctaacctcgtctttttgggtggcaatgaggttggaaagacctattggaatcgtatttttatccagggatggccatgggtcaccctgtctgtgttgggatttctctattgctacagccatgtcggcatcgcatgggcccagacatatgccaccgattag

SEQ ID NO: 66551 - DNA, 1347 bp, Artificial Sequence
  derived and/or modified sequence
atgaagtttacaaaatcacccgaggatgccactgacttcgaatggagcttttggatggagtggggtaagcagtggttggtgtggctgctcttgggtcacatggttgtctcccaaatggccacactgctggctagaaagcaccgcccttggattctgatgctgtacggtatgtgggcgtgttggtgcgtgctcgggacgccaggtgtcgcaatggtgctgttgcatactacaatttccttctgtgtggctcagttccgttcccagctgctgacttggttgtgttccctcctgttgctttccacgcttagactgcaaggcgtggaggaggtcaagaggcgatggtacaagacggaaaacgaatactatctccttcagttcactctgaccgttcggtgcctttattatacttcgttttccctagaactgtgctggcagcagcttcccgctgcatctacctcttatagttttccatggatgctagcctatgtattctactatccagtactgcacaacggcccaatactgtctttctctgagttcataaagcagatgcagcagcaggaacacgactctctcaaagcaagcctctgtgtgttggcattagggttggggcgactgctgtgctggtggtggctggccgaattgatggcacacctcatgtacatgcacgctatatactccagtataccactgctggaaactgtatcatgctggaccctgggcggtctggcgctggcccaagtcttatttttttatgtcaagtacttggttctcttcggagttccagctcttctgatgaggctggatgggctcacacccccagcgctgccgaggtgcgtatcaacaatgttctctttcacagggatgtggcgctatttcgacgtgggtctgcacaactttctgattcggtatgtgtacattcccgtaggaggcagccagcatggactgctgggcacgctgttctctacagccatgactttcgcctttgtgtcctactggcatggcggatatgactatctctggtgttgggcagccctgaactggcttggggtcacggttgaaaacggggtccggcgactggtcgagaccccgtgcatacaagattcactcgcacggtatttttcaccgcaagctcgaaggagatttcatgccgcattggcgagctgcagcactagtatgctgattttaagcaatctcgtcttcttgggagggaatgaggttggtaaaacatattggaacaggatctttatacagggttggccctgggttactctctctgtgctggggttcctgtactgctactctcatgtggggatcgcttgggcacagacctacgcgactgactag

SEQ ID NO: 66552 - DNA, 1482 bp, Artificial Sequence
  derived and/or modified sequence
atgctgcctcgttgggagttagcactctacctgctggcatccttggggttccacttttacagtttctatgaagtttacaaggtgtctagggagcatgaggaggaattggatcaggaatttgaattggagactgatactctgttcggcggattgaaaaaggatgctacagatttcgagtggtccttttggatggagtgggggaagcaatggctggtttggctgctgttgggccacatggtggtgtcccagatggccacacttctggccagaaagcaccgcccatggatcctgatgctttacggaatgtgggcgtgctggtgcgttcttggcacccctggggttgctatggttttactgcacactacgatcagtttctgtgttgcccagtttcgcagtcagcttttaacatggctgtgctcgttgcttctcctgtctaccttgcggctgcagggagtcgaggaggtgaaacggcgatggtataaaactgagaacgaatactatcttctgcagtttactctgactgtgcgctgtctgtactacacgtccttttccttggagctctgctggcaacaactgcctgctgcctccacaagctacagcttcccatggatgctagcttacgtgttctactacccggttctacataatggcccaatcctcagcttttccgagttcatcaagcagatgcagcagcaggaacatgattccttaaaggcttcactctgtgtcctggcattgggccttggcagactgttgtgctggtggtggctggcagaactgatggcacatctcatgtacatgcatgccatctactcttcgatccctctgctggaaaccgtgagctgctggacgctggggggactcgcccttgctcaagtactttttttctatgttaaataccttgtcctgttcggagtccctgccctgctcatgcgccttgacggacttacaccccctgctcttcccagatgcgtctccaccatgttttccttcacagggatgtggcgatactttgacgttggactgcacaattttttgatccgttacgtctacatacccgtcggcggttcccagcacggtttgttgggaacattgttctccacagccatgacatttgccttcgtttcctattggcacgggggatatgactacctgtggtgttgggcagctctgaattggctgggagttacagtagaaaacggcgtacgtcggctggtggagacgccttgtatacaggattctctggcccgttacttttctccccaggcccgaagacggttccacgctgcactggcttcctgttccacttcaatgctgatactgtcgaacctggtcttcttaggtggcaacgaggtcggcaagacttactggaatagaatctttatccagggatggccttgggtgacactcagcgtattgggatttctttactgctacagtcatgtaggaattgcatgggcacagacctacgccaccgattag

SEQ ID NO: 66553 - DNA, 1482 bp, Artificial Sequence
  derived and/or modified sequence
atgttgccaaggtgggagctggctctgtatctcctggcgtctctcggatttcatttttatagcttttacgaggtctataaagtcagcagggaacatgaggaggagctggatcaagagttcgaactagagactgacacattatttggcggtctgaaaaaagacgccaccgatttcgaatggagcttttggatggaatggggaaagcagtggctcgtctggctgctcctcggtcatatggttgtgagccagatggcaacattgcttgcaaggaagcacagaccatggatcttgatgctctacggcatgtgggcttgctggtgcgtattggggacaccaggagtggctatggtacttctgcacacaactattagcttctgcgtggcccaatttcgttctcagttgctgacatggctctgtagtctgcttctgctcagtacacttcgcctgcagggcgtagaggaagttaagcgaagatggtacaagacagaaaatgagtattatctcctacagtttaccctcactgtacggtgcctctactacacttccttcagcctggagctgtgttggcagcaactgcctgctgctagcaccagttattcttttccttggatgctagcctacgtattttactatccagtcctccacaatggtcccatactctcgttctccgagtttattaagcagatgcagcagcaggaacacgattccctgaaggcctccttgtgcgtcctcgccctcggcctcgggaggctcctgtgttggtggtggctggccgagctgatggcacacctcatgtatatgcacgctatctattctagcatccccctacttgaaactgtgtcttgctggaccctcggcggactagcgctcgcccaagtcttgttcttttacgttaagtacctagtactgtttggagtgccagcccttctgatgaggctggacggactcaccccgccagctctgcccagatgtgtgtccaccatgttcagttttacagggatgtggaggtactttgatgtaggtctgcataacttcctgattaggtacgtgtacatacctgtggggggtagccaacatggcttgcttgggaccctgttttctactgcgatgacttttgcattcgtgtcttactggcacgggggatatgattatttgtggtgttgggcggctttaaattggcttggtgtgaccgtcgaaaacggagtgcgtagactggtggaaacaccctgcatccaggactctctggcacgatacttcagcccccaggccagaagaaggtttcatgcagcactggcctcgtgcagcaccagtatgctgatcctgtcaaaccttgtgtttctgggtggaaacgaagtgggcaagacttactggaacagaatcttcatacagggttggccatgggtcactctgtccgttctcgggttcttatattgttattcccacgtcggaattgcatgggctcaaacctacgcaacggactag

SEQ ID NO: 66554 - DNA, 1482 bp, Artificial Sequence
  derived and/or modified sequence
atgctgcccagatgggagctggccctgtacctgctggccagcctgggcttccacttctacagcttctacgaggtgtacaaggtgagcagagagcacgaggaggagctggaccaggagttcgagctggagaccgacaccctgttcggcggcctgaagaaggacgccaccgacttcgagtggagcttctggatggagtggggcaagcagtggctggtgtggctgctgctgggccacatggtggtgagccagatggccaccctgctggccagaaagcacagaccctggatcctgatgctgtacggcatgtgggcctgctggtgcgtgctgggcacccccggcgtggccatggtgctgctgcacaccaccatcagcttctgcgtggcccagttcagaagccagctgctgacctggctgtgcagcctgctgctgctgagcaccctgagactgcagggcgtggaggaggtgaagagaagatggtacaagaccgagaacgagtactacctgctgcagttcaccctgaccgtgagatgcctgtactacaccagcttcagcctggagctgtgctggcagcagctgcccgccgccagcaccagctacagcttcccctggatgctggcctacgtgttctactaccccgtgctgcacaacggccccatcctgagcttcagcgagttcatcaagcagatgcagcagcaggagcacgacagcctgaaggccagcctgtgcgtgctggccctgggcctgggcagactgctgtgctggtggtggctggccgagctgatggcccacctgatgtacatgcacgccatctacagcagcatccccctgctggagaccgtgagctgctggaccctgggcggcctggccctggcccaggtgctgttcttctacgtgaagtacctggtgctgttcggcgtgcccgccctgctgatgagactggacggcctgaccccccccgccctgcccagatgcgtgagcaccatgttcagcttcaccggcatgtggagatacttcgacgtgggcctgcacaacttcctgatcagatacgtgtacatccccgtgggcggcagccagcacggcctgctgggcaccctgttcagcaccgccatgaccttcgccttcgtgagctactggcacggcggctacgactacctgtggtgctgggccgccctgaactggctgggcgtgaccgtggagaacggcgtgagaagactggtggagaccccctgcatccaggacagcctggccagatacttcagcccccaggccagaagaagattccacgccgccctggccagctgcagcaccagcatgctgatcctgagcaacctggtgttcctgggcggcaacgaggtgggcaagacctactggaacagaatcttcatccagggctggccctgggtgaccctgagcgtgctgggcttcctgtactgctacagccacgtgggcatcgcctgggcccagacctacgccaccgactag

SEQ ID NO: 66555 - DNA, 1347 bp, Artificial Sequence
  derived and/or modified sequence
atgaagttcaccaagagccccgaggacgccaccgacttcgagtggagcttctggatggagtggggcaagcagtggctggtgtggctgctgctgggccacatggtggtgagccagatggccaccctgctggccagaaagcacagaccctggatcctgatgctgtacggcatgtgggcctgctggtgcgtgctgggcacccccggcgtggccatggtgctgctgcacaccaccatcagcttctgcgtggcccagttcagaagccagctgctgacctggctgtgcagcctgctgctgctgagcaccctgagactgcagggcgtggaggaggtgaagagaagatggtacaagaccgagaacgagtactacctgctgcagttcaccctgaccgtgagatgcctgtactacaccagcttcagcctggagctgtgctggcagcagctgcccgccgccagcaccagctacagcttcccctggatgctggcctacgtgttctactaccccgtgctgcacaacggccccatcctgagcttcagcgagttcatcaagcagatgcagcagcaggagcacgacagcctgaaggccagcctgtgcgtgctggccctgggcctgggcagactgctgtgctggtggtggctggccgagctgatggcccacctgatgtacatgcacgccatctacagcagcatccccctgctggagaccgtgagctgctggaccctgggcggcctggccctggcccaggtgctgttcttctacgtgaagtacctggtgctgttcggcgtgcccgccctgctgatgagactggacggcctgaccccccccgccctgcccagatgcgtgagcaccatgttcagcttcaccggcatgtggagatacttcgacgtgggcctgcacaacttcctgatcagatacgtgtacatccccgtgggcggcagccagcacggcctgctgggcaccctgttcagcaccgccatgaccttcgccttcgtgagctactggcacggcggctacgactacctgtggtgctgggccgccctgaactggctgggcgtgaccgtggagaacggcgtgagaagactggtggagaccccctgcatccaggacagcctggccagatacttcagcccccaggccagaagaagattccacgccgccctggccagctgcagcaccagcatgctgatcctgagcaacctggtgttcctgggcggcaacgaggtgggcaagacctactggaacagaatcttcatccagggctggccctgggtgaccctgagcgtgctgggcttcctgtactgctacagccacgtgggcatcgcctgggcccagacctacgccaccgactag

SEQ ID NO: 66556 - protein, 1447 aa, Artificial Sequence
  derived and/or modified sequence
MGLRPGIFLLELLLLLGQGTPQIHTSPRKSTLEGQLWPETLKNSPFPCNPNKLGVNMPSKSVHSLKPSDIKFVAAIGNLEIPPDPGTGDLEKQDWTERPQQVCMGVMTVLSDIIRYFSPSVPMPVCHTGKRVIPHDGAEDLWIQAQELVRNMKENLQLDFQFDWKLINVFFSNASQCYLCPSAQQAPSLSTVLLSQNGLAAGGVDELMGVLDYLQQEVPRAFVNLVDLSEVAEVSRQYHGTWLSPAPEPCNCSEETTRLAKVVMQWSYQEAWNSLLASSRYSEQESFTVVFQPFFYETTPSLHSEDPRLQDSTTLAWHLWNRMMEPAGEKDEPLSVKHGRPMKCPSQESPYLFSYRNSNYLTRLQKPQDKLEVREGAEIRCPDKDPSDTVPTSVHRLKPADINVIGALGDSLTAGNGAGSTPGNVLDVLTQYRGLSWSVGGDENIGTVTTLANILREFNPSLKGFSVGTGKETSPNAFLNQAVAGGRAEDLPVQARRLVDLMKNDTRIHFQEDWKIITLFIGGNDLCDFCNDLVPRAFVNLVTVLEIVNLRELYQEKKVYCPRMILRSLCPCVLKFDDNSTELATLIEFNKKFQEKTHQLIESGRYDTREDFTVVVQPFFENVDMPKTSEGLPDNSFFAPDCFHFSSKSHSRAASALWNNMLEPVGQKTTRHKFENKINITCPNQVQPFLRTYKNSMQGHGTWLPCRDRAPSALHPTSVHALRPADIQVVAALGDSLTAGNGIGSKPDDLPDVTTQYRGLSYSAGGDGSLENVTTLPNILREFNRNLTGYAVGTGDANDTNAFLNQAVPGAKAEDLMSQVQTLMQKMKDDHRVNFHEDWKVITVLIGGSDLCDYCTDSNLYSAANFVHHLRNALDVLHREVPRVLVNLVDFLNPTIMRQVFLGNPDKCPVQQASVLCNCVLTLRENSQELARLEAFSRAYRSSMRELVGSGRYDTQEDFSVVLQPFFQNIQLPVLADGLPDTSFFAPDCIHPNQKFHSQLARALWTNMLEPLGSKTETLDLRAEMPITCPTQNEPFLRTPRNSNYTYPIKPAIENWGSDFLCTEWKASNSVPTSVHQLRPADIKVVAALGDSLTTAVGARPNNSSDLPTSWRGLSWSIGGDGNLETHTTLPNILKKFNPYLLGFSTSTWEGTAGLNVAAEGARARDMPAQAWDLVERMKNSPDINLEKDWKLVTLFIGVNDLCHYCENPEAHLATEYVQHIQQALDILSEELPRAFVNVVEVMELASLYQGQGGKCAMLAAQNNCTCLRHSQSSLEKQELKKVNWNLQHGISSFSYWHQYTQREDFAVVVQPFFQNTLTPLNERGDTDLTFFSEDCFHFSDRGHAEMAIALWNNMLEPVGRKTTSNNFTHSRAKLKCPSPESPYLYTLRNSRLLPDQAEEAPEVLYWAVPVAAGVGLVVGIIGTVVWRCRRGGRREDPPMSLRTVAL

SEQ ID NO: 66557 - DNA, 4344 bp, Artificial Sequence
  derived and/or modified sequence
atgggactacgacctggaatattcctgcttgagctgttgctccttttgggacagggcaccccgcagattcacacttccccaaggaagtccactctcgagggacagctttggcccgagactcttaaaaattctccttttccgtgcaatcctaataagctgggagtgaacatgccctccaaatcggtacactctctcaaacctagcgatatcaagtttgtggccgctatcggcaatctcgaaattccaccagaccctggaacaggcgacctggagaagcaggactggaccgaaaggccccagcaggtctgtatgggagtgatgactgtgttgtcagacattattcgctatttctcaccctcggtgcccatgcccgtttgccatactggcaaacgggtgattccacatgatggggccgaggatctgtggatacaggctcaggagctcgtgcgcaacatgaaagagaatcttcagctcgacttccagtttgactggaaacttattaatgtgttctttagcaacgcgagtcagtgttacctttgcccctctgcccagcaggccccatcactgtccactgtactgctgtcccagaacgggctggcagccggaggcgtggacgagcttatgggcgtcctggattatcttcagcaggaggttccccgggcttttgtaaacctggtggacctctccgaagttgcggaagtgagtcgtcagtaccacggaacctggctttcccctgcgccagagccgtgcaactgcagtgaggaaactactaggctcgcaaaggttgtgatgcagtggtcctatcaggaagcttggaacagtttgctggcttcctctcggtacagcgaacaagagtcatttacggtggtgttccaaccatttttttacgagaccacccctagtctccatagtgaggatccacggctccaggatagcaccacactcgcttggcacctgtggaatcgcatgatggagccagcaggcgagaaagatgaacctctttctgtcaaacatggaaggccaatgaagtgtccttctcaggagtctccttacctgttctcatatagaaattcaaactatctcaccaggctgcaaaaaccgcaggataaactggaggtccgcgaaggcgctgagatccgctgtccagacaaggacccatctgacaccgttcctacgtccgtccacagactcaaacctgccgacatcaatgtaataggtgccctcggcgattctttgacagctgggaatggagccggaagcacccctgggaacgtcctcgatgtgttgacgcagtatcgtggcttgtcctggtcagtcggtggtgatgagaatatcggcaccgtcaccaccttagccaatatcctgagggagttcaaccctagtctcaagggcttttccgtgggaactgggaaggagacgtccccaaacgccttcctaaatcaggccgtcgccgggggccgtgctgaagatctgccagtccaagccaggcgcctggtggatttgatgaagaatgatactcgcattcacttccaggaggattggaaaattatcacgctgtttataggaggcaacgatttgtgtgacttttgtaatgacttggtcccacgcgccttcgttaacctcgtcaccgtgctggaaattgtcaatctcagagagctgtaccaagaaaagaaggtgtactgtccccggatgatactgagaagtctctgcccatgcgtcctgaaattcgacgataattccacggaacttgcaactctaatcgagtttaataagaagtttcaggagaagactcatcagctgatcgaatccggccgctacgacacacgggaggacttcactgtggtagtgcagcccttttttgaaaacgtggatatgcctaagacttctgagggactccctgataattcgtttttcgcgcctgactgcttccacttttcttctaagtctcatagccgagcggcttccgccctgtggaataatatgctcgaaccggtcggacagaagacaacaaggcacaagtttgagaataagatcaacatcacctgccccaaccaggtgcagccctttctgcggacttacaagaattcaatgcagggccacgggacatggttgccctgccgagaccgcgcccccagtgctctgcaccctacgagtgttcatgcactccgaccagctgacatccaggttgtggctgcactgggcgattccctgacagctggtaacggtatcgggtcgaaaccagacgatctacctgacgtcacaacccagtacaggggcctgtcatacagtgctggaggggacgggagcctggaaaatgtaactacacttcctaacatcttaagggaattcaatagaaatctgaccggctacgccgtgggcaccggggatgctaatgacactaatgccttcttgaatcaggcagtacctggagcaaaggcagaggacctgatgtcccaggtgcagactctgatgcagaagatgaaggatgatcacagggttaactttcacgaggactggaaggttatcacggttctgattggcgggtccgatttatgcgattactgtacggatagtaatctctattctgccgccaactttgtccaccatctccgcaacgcgctggatgtcctgcaccgggaagtcccgcgggttctcgtgaaccttgtggactttctcaacccaacaattatgaggcaggtcttcttagggaatcccgacaagtgccctgtccagcaggcctctgtcctctgtaactgcgttctgacattaagggaaaattctcaggagctggcgcgacttgaggcattctccagggcctacagaagttccatgcgggagctcgtaggtagcggtagatacgacacacaggaagactttagcgtcgtcctgcagcccttcttccagaacatccaattaccggtgctcgccgatgggctacccgacacaagcttctttgcgccagactgcattcaccctaatcagaagtttcactctcagcttgcgagagccctctggacaaacatgttggaacccctggggagtaaaacagagaccttggatctgagagccgaaatgcctataacatgccccacacaaaacgagcctttcttgaggactccccgcaattcaaactacacctaccccattaagcctgccattgaaaactgggggagtgattttctttgtactgagtggaaggcctctaattcagtaccgacttccgtccatcaattgaggcccgccgatataaaggtagtggccgctctaggggactcactcactacagccgtaggcgcccggccaaacaactcctctgatctccctaccagttggaggggactgagctggtcaatcggaggcgatggcaacttggaaacccacaccacgctgccaaatatcttgaagaaattcaacccgtacctgctgggattcagcacaagcacatgggaagggactgctggtctgaatgtggcagcggagggagctagagcccgcgatatgccagcccaggcctgggatttagtggaaagaatgaaaaactctccagatataaacctcgagaaggactggaagcttgtcactctgttcatcggcgtgaatgatttatgccattattgcgagaatccagaggcgcacctggcaacagaatacgtccagcatatccaacaggcccttgacattctgtccgaggaacttcccagggcttttgtcaatgttgtggaggtgatggaattagcatcactgtatcaggggcagggggggaagtgtgctatgctggctgcgcaaaataattgtacctgtctgaggcattcccagtcttctctggagaagcaggagctaaaaaaagttaactggaatctacagcacggaatcagttcctttagctactggcaccagtatacacaacgggaggattttgccgtcgttgtgcagccatttttccaaaacaccctcacgccacttaacgagcggggcgatacagaccttacatttttttccgaggactgtttccacttctcagatcgaggacatgccgagatggcaatcgccctgtggaataatatgctggagcccgtgggtaggaaaaccacaagtaataacttcacacactctcgcgccaaactcaaatgcccatccccagagagcccgtatctgtatacactgcgcaatagtcgcctcttgcccgatcaggccgaagaagccccggaggtgttgtattgggccgtgccagtcgcggcaggcgtgggtctcgtggttggtataattggaactgtggtttggaggtgtaggagggggggccgacgcgaggacccaccgatgtccctccggacagtggccttatag

SEQ ID NO: 66558 - DNA, 4344 bp, Artificial Sequence
  derived and/or modified sequence
atgggcctgcggcccggcatcttcctgctggagctgctgctgctgctgggccagggcaccccccagatccacaccagccccaggaagagcaccctggagggccagctgtggccagagaccctgaagaacagccccttcccctgcaaccccaacaagctgggcgtgaacatgcccagcaagtctgtgcacagcctgaagcccagcgacatcaagtttgtggccgccatcggcaacctggagatccccccagaccccggcactggagacctggagaagcaggactggacagagcggccccagcaggtgtgcatgggcgtgatgacagtgctgagtgacatcatccgctacttcagccccagcgtgcccatgcctgtgtgccacacaggcaagagggtcatcccccatgatggagctgaggacctgtggatccaggcccaggagctggtgaggaacatgaaggagaacctgcagctggacttccagtttgactggaagctgatcaacgtgttcttcagcaatgccagccagtgctacctgtgccccagcgcccagcaggcccccagcctgagcacagtgctgctgagccagaatggcctggccgccggcggcgtggatgagctgatgggcgtgctggactacctgcagcaggaggtgccccgggcctttgtgaacctggtggacctgtctgaggtggccgaggtgtcccggcagtaccacggcacctggctgagccctgcccctgagccctgcaactgcagcgaggagaccacccggctggccaaggtggtgatgcagtggagctaccaggaggcctggaacagcctgctggccagcagccgctacagcgagcaggagagcttcaccgtggtgttccagcccttcttctatgagaccacccccagcctgcacagcgaggacccccggctgcaggacagcaccaccctggcctggcacctgtggaacaggatgatggagcctgctggggagaaggatgagcccctgtctgtgaagcacggccggcccatgaagtgccccagccaggagagcccctacctgttctcctacagaaacagcaactacctgacccggctgcagaagccccaggacaagctggaggtgcgggagggcgctgagatccgctgcccagacaaggaccccagcgacacagtgcccacctctgtgcaccggctgaagccagctgacatcaacgtgattggagccctgggggacagcctgacagctggaaatggagctggcagcaccccaggaaatgtgctggatgtgctgacccagtaccggggcctgtcctggagcgtgggcggagatgaaaatattggaacagtgaccaccctggccaacatcctgcgggagttcaaccccagcctgaagggcttctctgtgggcaccgggaaggagaccagccccaatgccttcctgaaccaggccgtggccggcggccgggcagaggacctgcctgtgcaggcccggcggctggtggacctgatgaagaatgacacccgcatccacttccaggaggactggaagatcatcaccctcttcatcggcggcaatgacctgtgtgacttctgcaatgacctggtgccccgggcctttgtgaacctggtgacagtgctggagatcgtgaacctgcgggagctgtaccaggagaagaaggtgtactgccccaggatgatcctgcggagcctgtgcccctgtgtgctgaagtttgatgacaacagcacagagctggccaccctgattgagttcaacaagaagttccaggagaagacccaccagctgattgaaagtggccgctatgacacccgggaggacttcaccgtggtggtgcagcccttctttgaaaatgtggacatgcccaagaccagcgagggcctgcctgacaacagcttctttgccccagactgcttccacttcagcagcaagagccacagcagagctgccagcgccctgtggaacaacatgctggagcctgtgggccagaagaccaccaggcacaagtttgagaacaagatcaacatcacctgccccaaccaggtgcagcccttcctgcggacctacaagaacagcatgcagggccacggcacctggctgccctgccgggaccgggcccccagcgccctgcaccccacctctgtgcacgccctgcggcctgctgacatccaggtggtggccgccctgggggacagcctgacagctggaaatggaattggcagcaagccagatgacctgcctgatgtgaccacccagtaccggggcctgagctacagcgctggaggagatggcagcctggagaatgtgaccaccctgcccaacatcctgcgggagttcaacagaaacctgaccggctatgctgtgggcactggagatgccaatgacaccaatgccttcctgaaccaggccgtgcctggggccaaggccgaggacctgatgagccaggtgcagaccctgatgcagaagatgaaggatgaccaccgggtgaacttccacgaggactggaaggtgatcaccgtgctgattggaggcagtgacctgtgtgactactgcacagacagcaacctgtacagcgctgccaactttgtgcaccacctgagaaatgccctggatgtgctgcaccgggaggtgccccgggtgctggtgaacctggtggacttcctgaaccccaccatcatgaggcaggtgttcctgggcaacccagacaagtgccctgtgcagcaggcctctgtgctgtgcaactgtgtgctgaccctgcgggagaacagccaggagctggcccggctggaggccttcagccgggcctaccgcagctccatgagggagctggtgggcagcggccgctatgacacccaggaggacttctctgtggtgctgcagcccttcttccagaacatccagctgcctgtgctggctgatggcctgcctgacaccagcttctttgccccagactgcatccaccccaaccagaagttccacagccagctggcccgggccctgtggaccaacatgctggagcccctgggcagcaagacagagaccctggacctgcgggcagagatgcccatcacctgccccacccagaatgagcccttcctgcggaccccaagaaacagcaactacacctaccccatcaagccagccatcgagaactggggcagtgacttcctgtgcacagagtggaaggccagcaacagcgtgcccacctctgtgcaccagctgcggcctgctgacatcaaggtggtggccgccctgggggacagcctgaccacagctgtgggcgcccggcccaacaacagcagtgacctgcccacctcctggaggggcctgtcctggagcattggaggagatggcaacctggagacccacaccaccctgcccaacatcctgaagaagttcaacccctacctgctgggcttcagcaccagcacctgggagggcacagctggcctgaatgtggccgctgagggcgcccgggcccgggacatgcctgcccaggcctgggacctggtggagaggatgaagaacagcccagacatcaacctggagaaggactggaagctggtgaccctcttcatcggcgtgaatgacctgtgccactactgtgaaaatcctgaggcccacctggccacagaatatgtgcagcacatccagcaggccctggacatcctgtctgaggagctgccccgggcctttgtgaatgtggtggaggtgatggagctggccagcctgtaccagggccagggcggcaaatgtgccatgctggccgcccagaacaactgcacctgcctgcggcacagccagagcagcctggagaagcaggagctgaagaaggtgaactggaacctgcagcacggcatcagcagcttctcctactggcaccagtacacccagcgggaggactttgctgtggtggtgcagcccttcttccagaacaccctgacccccctgaatgaaagaggagacacagacctgaccttcttcagcgaggactgcttccacttcagtgaccggggccatgctgagatggccatcgccctgtggaacaacatgctggagcctgtgggcaggaagaccaccagcaacaacttcacccacagccgggccaagctgaagtgccccagccctgagagcccctacctgtacaccctgaggaacagccggctgctgcctgaccaggccgaggaggcccctgaggtgctgtactgggccgtgcctgtggccgccggcgtgggcctggtggtgggcatcatcggcaccgtggtgtggcgctgccggcggggcggccggcgggaggacccccccatgagcctgaggacagtggccctgtag

SEQ ID NO: 66559 - DNA, 4344 bp, Artificial Sequence
  derived and/or modified sequence
atgggcctgcggcccggcatcttcctgctggagctgctgctgctgcttggtcagggcacgccacagatccacacgagtccgaggaaaagcacactcgagggtcagttgtggccagagacccttaaaaacagtccatttccatgtaatcccaataaactgggggttaatatgccgtcaaagagcgtgcactctctgaagccttccgacatcaaatttgtagccgctattggcaacttagagatcccacctgaccctgggaccggtgacctggaaaaacaagattggacagagaggcctcagcaggtgtgcatgggcgttatgaccgtgctgagcgatattattcgatacttcagcccaagcgtgcctatgcccgtgtgccatactggcaaacgtgttattccacacgatggggccgaggacctgtggattcaggcccaggaactggtaagaaatatgaaggagaacttacagctagattttcagtttgactggaagctgatcaatgtgttttttagtaatgcctcacaatgttatctttgtccttcggctcagcaggctccatccctgtctactgtgctcctctcacaaaacgggttggccgctggcggagttgacgagttgatgggcgtcctagactacctgcagcaggaggtgcctagagctttcgtcaacctggtcgacctaagcgaagtcgcagaggtgtcgcgccagtatcacggtacatggctgtcaccagctcccgagccttgtaactgtagcgaggaaactacacgactggcaaaggttgttatgcagtggtcctatcaggaggcatggaacagtttacttgcctccagccgttattccgagcaggagtcattcacagtagttttccagcctttcttttacgaaaccacaccgtcattacactccgaagatcctagattacaggattccacaaccctcgcttggcacttatggaaccgcatgatggagccagctggagagaaggacgagccattatctgtgaagcatggccgtcccatgaaatgtcctagccaggaaagcccctatttgtttagctataggaattcaaactacctcaccagattgcagaagccccaggataaactcgaagttagggaaggcgcagaaattcgctgtccagacaaggacccatctgatacagttcctacaagtgttcaccgcctgaaacccgctgatattaacgtcatcggggccttgggtgactccctcactgcagggaacggcgcaggatctaccccggggaatgttttggacgtgctcacccagtaccgaggcctgagctggagtgtgggcggagatgagaacattggcaccgtgaccacgttggccaatattctgcgcgagtttaatccttcccttaaaggttttagtgtaggtaccggaaaagaaacatctcctaacgctttcttgaatcaggccgtcgccgggggtagagccgaggatctgcctgtgcaggcacgacggctcgtggatctcatgaagaatgatactcgcatacactttcaggaggattggaagataattaccttattcatcggaggaaacgacctctgcgacttctgcaacgacctggtgccccgcgcgtttgtgaacctggtgaccgtgctggagatcgttaatctgcgcgaactttatcaagagaagaaagtctattgccctcggatgatactgcgcagcctatgcccctgcgtgctcaagttcgacgacaactctaccgagctggctaccttgatcgaatttaacaaaaaattccaggaaaagactcaccagctgatcgagtctggccggtatgatacaagagaagacttcacggtggtcgtgcagcccttcttcgaaaatgtggacatgcctaagacatctgaagggttgccggacaactcattcttcgcaccagactgctttcacttttcttccaagtctcacagccgagctgcgagcgcgctctggaacaacatgttggaacctgtgggccagaaaacaactcgccataagtttgagaacaagatcaacattacctgtccaaatcaagtacaacccttccttcgaacctacaagaacagcatgcaaggccatggtacctggcttccatgtcgggatcgcgctccttcagccttacacccaacctctgtccacgccttaaggccggcagacattcaagtggtcgccgctctcggagattccctgaccgctgggaacgggataggttcaaagccagacgatttaccagatgtgactactcagtacaggggactgtcgtactcagccgggggagatggttccctggaaaacgtgaccacactccctaatattctgcgggaattcaatcgcaacttgaccggatacgctgtcggaacaggggatgctaatgatacgaatgcttttttgaaccaggctgtacctggtgcgaaggccgaagatctgatgtcacaggtccagacgctcatgcaaaagatgaaggacgaccaccgcgtgaatttccacgaagactggaaagtgatcactgtcctgatcgggggatctgacctttgcgattattgcaccgattcaaacctgtactctgctgcgaattttgtccaccacctgcgcaatgcccttgatgtcctgcatagagaggtcccccgcgttctggtgaacctcgtcgattttcttaatccaacaataatgagacaggtgttcctggggaacccagacaagtgccctgtgcagcaagccagtgtcttgtgcaactgcgtcctgaccttaagagagaactcgcaagaactcgccagactggaagcctttagcagggcgtacagatcaagcatgagagaactggttggcagtggccgatacgatactcaggaagatttctccgtagtcctacagccgttcttccagaatatccaactacctgttctggctgacgggctgccagatacctctttctttgctcccgattgcatccaccccaatcagaagtttcactcacaacttgcgagggccctttggacaaacatgctcgagccactgggctctaagactgaaacgcttgatctcagagccgaaatgcctatcacctgtccaacccagaacgagccctttctgcgcacccccaggaattctaattacacctatcctatcaaacccgcgatcgaaaactggggcagtgactttctgtgtaccgagtggaaggcgagtaattctgtgccaacctccgtgcaccagcttcgacctgcagatattaaggtagtcgcggctctgggagatagcttgaccacagctgtgggagcccggcccaacaactcgagcgatctgccaacatcctggcggggactttcctggtctatcggtggcgatgggaacctggagacgcatactaccttgcctaacatactgaagaagtttaacccatacctgcttggctttagcaccagcacctgggaagggactgctggcctgaacgttgcagccgaaggagcccgagccagggacatgcctgctcaggcgtgggacttagtggagcgcatgaagaactcaccagacataaacctggaaaaggactggaagctggttactctgttcatcggtgtcaatgacctgtgtcactactgtgaaaaccctgaggctcacctggcaaccgaatacgtgcaacatatccagcaggctctcgatattcttagtgaagaacttccacgagctttcgtcaatgtggtggaggtgatggagttggctagcctgtatcaaggccagggcgggaagtgcgctatgctcgccgcgcagaacaactgtacctgtctgcggcatagtcagtccagcctggagaagcaggagctgaaaaaagtaaactggaatctccagcatgggatctcaagtttttcctactggcatcagtacactcagagagaggactttgctgtggtggtacagccattcttccaaaacactctcacacctctgaacgagagaggtgacacagacctaactttcttttctgaagactgtttccacttctctgatagagggcacgctgagatggctatcgctctgtggaacaatatgcttgagcccgttgggcgcaaaacgacatcgaacaatttcactcactccagggccaaactgaagtgtccctctccagaatcaccatatctctatacgctcaggaactctagactcctacccgaccaggcagaagaggcccctgaagtgctttactgggctgtacccgtcgctgccggcgtcggcctggtcgtgggcattatcggtactgtggtgtggcgatgcaggcggggagggagacgtgaagatcctcctatgtcgcttagaactgtggcgctctag

SEQ ID NO: 66560 - DNA, 5115 bp, Artificial Sequence
  derived and/or modified sequence
ggagcagctcttccagaggcccgagtcacctggagcattctggcatggggctgcggccaggcattttcctcctggagctgctgctgcttctggggcaagggacccctcagatccatacctctcctagaaagagtacattggaagggcagctatggccagagaccctgaagaattctccattcccatgcaacccaaataaattaggagtgaatatgccttctaaatcagttcactctctgaagccttctgatattaaatttgtggcagccattggcaatctggaaattcctccagacccagggacgggcgatctggagaagcaagactggactgaaaggccacagcaggtgtgcatgggagtgatgacagtcctttcagacatcatcagatatttcagtccttctgttccaatgcctgtgtgccacactggaaagagagtcataccccacgatggtgctgaagacttgtggattcaggctcaagaactggtgagaaacatgaaagagaacctgcaacttgactttcaatttgactggaagctcatcaatgtgttcttcagtaatgcaagccagtgttacctgtgcccctctgctcaacaggcaccctcacttagcacggttctcctctcacagaatgggcttgcggcgggcggcgtggatgagctgatgggggtgctggactacctgcagcaggaggtccccagagcatttgtaaacctggtggacctctctgaggttgcagaggtctctcgtcagtatcacggcacttggctcagccctgcaccagagccctgtaattgctcagaggagaccacccggctggccaaggtggtgatgcagtggtcttatcaggaagcctggaacagcctcctggcctccagcaggtacagtgagcaggagtccttcaccgtggttttccagcctttcttctatgagaccaccccatctctacactcggaggacccccgactccaggattctaccacgctggcctggcatctctggaataggatgatggagccagcaggagagaaagatgagccattgagtgtaaaacacgggaggccaatgaagtgtccctctcaggagagcccctatctgttcagctacagaaacagcaactacctgaccagactgcagaaaccccaagacaagcttgaggtaagagaaggagcggaaatcagatgtcctgacaaagacccctccgatacggttcccacctcagttcataggctgaagccggctgacatcaacgtaattggagccctgggtgactctctcacggcaggcaatggggccgggtccacacctgggaacgtcttggacgtcttgactcagtaccgaggcctgtcctggagcgtcggcggagatgagaacatcggcaccgttaccaccctggcgaacatcctccgggaattcaacccttccctgaagggcttctctgttggcactgggaaagaaaccagtcctaatgccttcttaaaccaggctgtggcaggaggccgagctgaggatctacctgtccaggccaggaggctggtggacctgatgaagaatgacacgaggatacactttcaggaagactggaagataataaccctgtttataggcggcaatgacctctgtgatttctgcaatgatctggttcctcgggcatttgtgaacctggtgacggtgcttgagatcgtcaacctgagggagctgtaccaggagaaaaaagtctactgcccaaggatgatcctcaggtctctgtgtccctgtgtcctgaagtttgatgataactcaacagaacttgctaccctcatcgaattcaacaagaagtttcaggagaagacccaccaactgattgagagtgggcgatatgacacaagggaagattttactgtggttgtgcagccgttctttgaaaacgtggacatgccaaagacctcggaaggattgcctgacaactctttcttcgctcctgactgtttccacttcagcagcaagtctcactcccgagcagccagtgctctctggaacaatatgctggagcctgttggccagaagacgactcgtcataagtttgaaaacaagatcaatatcacatgtccgaaccaggtccagccgtttctgaggacctacaagaacagcatgcagggtcatgggacctggctgccatgcagggacagagccccttctgccttgcaccctacctcagtgcatgccctgagacctgcagacatccaagttgtggctgctctgggggattctctgaccgctggcaatggaattggctccaaaccagacgacctccccgatgtcaccacacagtatcggggactgtcatacagtgcaggaggggacggctccctggagaatgtgaccaccttacctaatatccttcgggagtttaacagaaacctcacaggctacgccgtgggcacgggtgatgccaatgacacgaatgcattcctcaatcaagctgttcccggagcaaaggctgaggatcttatgagccaagtccaaactctgatgcagaagatgaaagatgatcatagagtaaatttccatgaagactggaaggtcatcacagtgctgatcggaggcagcgatttatgtgactactgcacagattcgaatctgtattctgcagccaactttgttcaccatctccgcaatgccttggacgtcctgcatagagaggtgcccagagtcctggtcaacctcgtggacttcctgaaccccactatcatgcggcaggtgttcctgggaaacccagacaagtgcccagtgcagcaggccagcgttttgtgtaactgcgttctgaccctgcgggagaactcccaagagctagccaggctggaggccttcagccgagcctaccggagcagcatgcgcgagctggtggggtcaggccgctatgacacgcaggaggacttctctgtggtgctgcagcccttcttccagaacatccagctccctgtcctggcggatgggctcccagatacgtccttctttgccccagactgcatccacccaaatcagaaattccactcccagctggccagagccctttggaccaatatgcttgaaccacttggaagcaaaacagagaccctggacctgagagcagagatgcccatcacctgtcccactcagaatgagcccttcctgagaacccctcggaatagtaactacacgtaccccatcaagccagccattgagaactggggcagtgacttcctgtgtacagagtggaaggcttccaatagtgttccaacctctgtccaccagctccgaccagcagacatcaaagtggtggccgccctgggtgactctctgactacagcagtgggagctcgaccaaacaactccagtgacctacccacatcttggaggggactctcttggagcattggaggggatgggaacttggagactcacaccacactgcccaacattctgaagaagttcaacccttacctccttggcttctctaccagcacctgggaggggacagcaggactaaatgtggcagcggaaggggccagagctagggacatgccagcccaggcctgggacctggtagagcgaatgaaaaacagccccgacatcaacctggagaaagactggaagctggtcacactcttcattggggtcaacgacttgtgtcattactgtgagaatccggaggcccacttggccacggaatatgttcagcacatccaacaggccctggacatcctctctgaggagctcccaagggctttcgtcaacgtggtggaggtcatggagctggctagcctgtaccagggccaaggcgggaaatgtgccatgctggcagctcagaacaactgcacttgcctcagacactcgcaaagctccctggagaagcaagaactgaagaaagtgaactggaacctccagcatggcatctccagtttctcctactggcaccaatacacacagcgtgaggactttgcggttgtggtgcagcctttcttccaaaacacactcaccccactgaacgagagaggggacactgacctcaccttcttctccgaggactgttttcacttctcagaccgcgggcatgccgagatggccatcgcactctggaacaacatgctggaaccagtgggccgcaagactacctccaacaacttcacccacagccgagccaaactcaagtgcccctctcctgagagcccttacctctacaccctgcggaacagccgattgctcccagaccaggctgaagaagcccccgaggtgctctactgggctgtcccagtggcagcgggagtcggccttgtggtgggcatcatcgggacagtggtctggaggtgcaggagaggtggccggagggaagatcctccaatgagcctgcgcactgtggccctctaggcccgggggtgggtcctcaccctaaactccctatagccactctcttcaccgccctctgccccagccactcccggccaccaggacatgcttcaatgcctggtgccataggaagcccaggggacagtcacaacttcttggggcctgggcttcttccaggcctatgctcctggaatggatacatttaaataaagtccaaagctattttattcctgggtttgcctgcgtgaagcactcaccttccatctcttgtgcagcccaggtgtgggagctgccactttttgtggcctgcctccagcagggctgcccaagccacgaccaaccagagcccaaactgcctgccaccacgagcatatcctcaagtcaccaaacccactatttcaaaggcagaaaaaatgctggtcaccaggtggtggctggaattttggagctggctggttgccattcagtccaatccaacacatacctattaagcaactgttttgtatccaggacaatgcgaagcactgaggtgcctcctaggctgtgcatgtcgcagcctggcagagaggtcaaactccttcaataaccaagaagccacgtgatgatgtgtaactactagggcatcagtaggtaaatgtgtctgattgttttaaagaatagaaagggttcttcggggaaagtttcttgggggagagcaaccttcacatgtcattttgggaaaaggaataaaaaatgattgggacacaaa

SEQ ID NO: 66561 - DNA, 4344 bp, Artificial Sequence
  derived and/or modified sequence
atggggctgcgtccgggaatatttctgcttgagctgctcttgcttctgggtcaaggaacaccacagatccatacaagcccacggaagtctacgctggaagggcagctttggccagaaactttgaagaattcaccattcccttgcaaccccaacaagcttggcgtgaatatgccgtctaagtcggtgcactccctaaagccgagcgatatcaagtttgtggctgccatcggaaatctggaaatcccaccagaccctggtacaggtgacctcgagaaacaggattggaccgaaaggcctcagcaggtgtgcatgggtgtcatgacagtgctgagtgacattatccggtacttctccccctccgtgccgatgcctgtgtgccacactgggaaacgagtcattccgcacgatggggcagaggatctgtggatccaagctcaagagcttgtgcgtaatatgaaggagaacctgcagctggattttcaatttgattggaaattgatcaatgtcttttttagcaacgcctcccaatgttacctgtgtccctcagctcagcaggcgcctagcctctccaccgttcttctgtcacagaacggccttgcggcaggaggggtcgatgagctgatgggagttctggactacctgcaacaagaggtgcctcgggcatttgttaacctggtcgacttatccgaggttgctgaggtgtcaaggcagtatcatggaacctggcttagtcctgccccagaaccttgcaattgttccgaggagacgacaagactggctaaagttgtcatgcagtggtcctatcaggaagcttggaactccctgctggcttcctctcggtattctgagcaggaatcgtttacagtggtgtttcagccttttttctatgagaccacgccctcactgcatagcgaggatcctaggctccaggattcaacgaccctcgcttggcacctttggaataggatgatggagccagcaggagagaaggacgagccactctccgtgaagcatggaagaccgatgaagtgtccttcacaggagtcaccgtacctgtttagctatcgaaattccaactatctaacccgtctccagaaacctcaagataaactcgaagtccgggagggagctgagatccgatgtcccgataaggatccttcagatacagtaccaacctcagtgcatcggttgaagcccgcagacatcaatgtcatcggcgctctcggagactcgttaaccgcaggtaatggcgcaggatctacacctggcaacgtgctcgatgtgcttacacagtacaggggactgagttggtctgttggcggagatgaaaatatcggcacagtgacgacgcttgctaacatactgagagagtttaatccttctctgaagggtttctctgttggcactggcaaagagacttccccaaatgcttttctgaatcaggccgtggctggcggacgggcagaggatcttccagttcaggcaaggcgactagtagacctgatgaagaacgacactaggattcacttccaagaagattggaagatcattactctgtttatcgggggtaacgacctgtgtgatttctgtaacgacttggttccccgtgcattcgtgaatctggtgacagttctcgagatcgtgaatttacgggagttgtatcaggaaaaaaaggtctactgcccacgcatgattctgcggagcctgtgcccatgcgtattgaagtttgatgataattccaccgaactggccacgctcattgaatttaataagaaattccaagagaagacgcaccaactgatcgaatccggacgatatgacacccgggaggatttcactgtggttgtacagcccttcttcgagaatgtcgatatgcccaaaacatctgaaggtctcccggacaacagtttcttcgcacccgattgttttcacttttctagcaaatctcactcacgcgctgcctctgctctatggaacaatatgctcgagccagtcggtcaaaagaccacccggcacaaattcgaaaataagattaacataacttgtccaaatcaggtacagccattcctcaggacgtacaagaacagcatgcaagggcatggaacctggctgccttgccgagacagagcgccttctgcccttcatcccacaagcgtgcacgccttgcgccctgctgatattcaggtggttgctgccctgggcgattccctgaccgctggcaacggcatcggatcaaaaccagacgacctaccagacgtgaccacacagtatcgcggtctgtcatattccgcagggggtgatggttctctggaaaacgtgacaacactgcctaatatccttagggaatttaatcgcaatctgaccggatacgctgtgggaacaggtgatgccaatgacacaaatgccttcctaaaccaggccgtgcccggagccaaagctgaggatcttatgtcacaggtacagaccctgatgcagaaaatgaaggacgatcatcgcgtgaatttccatgaagattggaaagttattaccgtgctaatagggggatcggacctctgtgattattgcactgattctaacctgtattcagcggcaaattttgttcatcatctgcgaaacgccctggacgttctgcacagggaagtccctcgggtactggtgaacctggtagatttcttaaatccaaccatcatgaggcaggtatttcttggaaatcctgataagtgtcctgtgcaacaggctagcgtcctgtgcaattgtgtgctgacactgagggagaactctcaagagctggctcggctggaagccttttcccgcgcatatagaagtagcatgcgagaactggtgggctcgggtcgttatgatactcaagaggacttctctgtggtgctccagccctttttccagaacatacagctgcctgttctggcagatgggcttcctgatacctctttctttgcccctgattgcatacacccaaatcagaagttccactctcagctggcccgagccctgtggactaacatgctggagcctctgggttcaaaaactgaaacgctggacctacgcgctgagatgcccatcacttgcccgacgcaaaacgagcccttcctgaggactccaaggaacagtaattacacctacccaatcaaacctgccattgaaaattggggaagtgactttttgtgtacggagtggaaggcctccaactctgtgcccaccagtgtacaccagctgcggccagcagacattaaagtggtggcagccctcggagattccctgaccaccgctgtgggcgcacgccctaacaactcatctgatctgcccactagctggcgagggctgtcctggtctatcggcggagatggaaaccttgaaacgcacacgacgttacctaacattcttaaaaagttcaatccttacctgctaggcttcagcacatctacttgggagggcacagctgggctcaacgtcgccgctgagggggcaagggctcgagatatgccggctcaagcatgggatcttgttgaacgaatgaagaatagtccagacataaatcttgaaaaagactggaagctcgtcactcttttcatcggcgtgaatgatctgtgtcattactgcgaaaacccagaggctcatctcgctaccgagtatgtgcaacatatccagcaggccttagatattctgagtgaggaacttccaagggccttcgttaacgtggtcgaagtaatggagctagcatctctctaccaaggccagggtgggaagtgcgctatgctcgctgctcagaacaattgcacgtgcctgaggcatagccagagctcactggaaaagcaggagttgaaaaaggttaactggaacttgcagcacggcatctcctcattttcatattggcatcagtacactcagcgggaggattttgccgttgtggtgcagccttttttccagaacactctgaccccattgaatgagcgaggcgacaccgacctcaccttcttttctgaggactgttttcacttctctgaccggggtcatgctgagatggctattgcactgtggaataacatgctagagcctgtggggcgtaagaccacttccaacaatttcactcactcacgcgctaaactcaagtgtccatcccccgagagtccctacctgtataccctaaggaactcgaggcttcttccggaccaagccgaagaagcccctgaggtgctgtattgggctgtgccggtggccgctggcgtcggcctagtcgtaggcatcataggcaccgtggtgtggcggtgtcgtcgaggtggcaggcgtgaggaccctcccatgagcttacgcactgtggccctctag

SEQ ID NO: 66562 - DNA, 4344 bp, Artificial Sequence
  derived and/or modified sequence
atgggcctgagacccggcatcttcctgctggagctgctgctgctgctgggccagggcaccccccagatccacaccagccccagaaagagcaccctggagggccagctgtggcccgagaccctgaagaacagccccttcccctgcaaccccaacaagctgggcgtgaacatgcccagcaagagcgtgcacagcctgaagcccagcgacatcaagttcgtggccgccatcggcaacctggagatcccccccgaccccggcaccggcgacctggagaagcaggactggaccgagagaccccagcaggtgtgcatgggcgtgatgaccgtgctgagcgacatcatcagatacttcagccccagcgtgcccatgcccgtgtgccacaccggcaagagagtgatcccccacgacggcgccgaggacctgtggatccaggcccaggagctggtgagaaacatgaaggagaacctgcagctggacttccagttcgactggaagctgatcaacgtgttcttcagcaacgccagccagtgctacctgtgccccagcgcccagcaggcccccagcctgagcaccgtgctgctgagccagaacggcctggccgccggcggcgtggacgagctgatgggcgtgctggactacctgcagcaggaggtgcccagagccttcgtgaacctggtggacctgagcgaggtggccgaggtgagcagacagtaccacggcacctggctgagccccgcccccgagccctgcaactgcagcgaggagaccaccagactggccaaggtggtgatgcagtggagctaccaggaggcctggaacagcctgctggccagcagcagatacagcgagcaggagagcttcaccgtggtgttccagcccttcttctacgagaccacccccagcctgcacagcgaggaccccagactgcaggacagcaccaccctggcctggcacctgtggaacagaatgatggagcccgccggcgagaaggacgagcccctgagcgtgaagcacggcagacccatgaagtgccccagccaggagagcccctacctgttcagctacagaaacagcaactacctgaccagactgcagaagccccaggacaagctggaggtgagagagggcgccgagatcagatgccccgacaaggaccccagcgacaccgtgcccaccagcgtgcacagactgaagcccgccgacatcaacgtgatcggcgccctgggcgacagcctgaccgccggcaacggcgccggcagcacccccggcaacgtgctggacgtgctgacccagtacagaggcctgagctggagcgtgggcggcgacgagaacatcggcaccgtgaccaccctggccaacatcctgagagagttcaaccccagcctgaagggcttcagcgtgggcaccggcaaggagaccagccccaacgccttcctgaaccaggccgtggccggcggcagagccgaggacctgcccgtgcaggccagaagactggtggacctgatgaagaacgacaccagaatccacttccaggaggactggaagatcatcaccctgttcatcggcggcaacgacctgtgcgacttctgcaacgacctggtgcccagagccttcgtgaacctggtgaccgtgctggagatcgtgaacctgagagagctgtaccaggagaagaaggtgtactgccccagaatgatcctgagaagcctgtgcccctgcgtgctgaagttcgacgacaacagcaccgagctggccaccctgatcgagttcaacaagaagttccaggagaagacccaccagctgatcgagagcggcagatacgacaccagagaggacttcaccgtggtggtgcagcccttcttcgagaacgtggacatgcccaagaccagcgagggcctgcccgacaacagcttcttcgcccccgactgcttccacttcagcagcaagagccacagcagagccgccagcgccctgtggaacaacatgctggagcccgtgggccagaagaccaccagacacaagttcgagaacaagatcaacatcacctgccccaaccaggtgcagcccttcctgagaacctacaagaacagcatgcagggccacggcacctggctgccctgcagagacagagcccccagcgccctgcaccccaccagcgtgcacgccctgagacccgccgacatccaggtggtggccgccctgggcgacagcctgaccgccggcaacggcatcggcagcaagcccgacgacctgcccgacgtgaccacccagtacagaggcctgagctacagcgccggcggcgacggcagcctggagaacgtgaccaccctgcccaacatcctgagagagttcaacagaaacctgaccggctacgccgtgggcaccggcgacgccaacgacaccaacgccttcctgaaccaggccgtgcccggcgccaaggccgaggacctgatgagccaggtgcagaccctgatgcagaagatgaaggacgaccacagagtgaacttccacgaggactggaaggtgatcaccgtgctgatcggcggcagcgacctgtgcgactactgcaccgacagcaacctgtacagcgccgccaacttcgtgcaccacctgagaaacgccctggacgtgctgcacagagaggtgcccagagtgctggtgaacctggtggacttcctgaaccccaccatcatgagacaggtgttcctgggcaaccccgacaagtgccccgtgcagcaggccagcgtgctgtgcaactgcgtgctgaccctgagagagaacagccaggagctggccagactggaggccttcagcagagcctacagaagcagcatgagagagctggtgggcagcggcagatacgacacccaggaggacttcagcgtggtgctgcagcccttcttccagaacatccagctgcccgtgctggccgacggcctgcccgacaccagcttcttcgcccccgactgcatccaccccaaccagaagttccacagccagctggccagagccctgtggaccaacatgctggagcccctgggcagcaagaccgagaccctggacctgagagccgagatgcccatcacctgccccacccagaacgagcccttcctgagaacccccagaaacagcaactacacctaccccatcaagcccgccatcgagaactggggcagcgacttcctgtgcaccgagtggaaggccagcaacagcgtgcccaccagcgtgcaccagctgagacccgccgacatcaaggtggtggccgccctgggcgacagcctgaccaccgccgtgggcgccagacccaacaacagcagcgacctgcccaccagctggagaggcctgagctggagcatcggcggcgacggcaacctggagacccacaccaccctgcccaacatcctgaagaagttcaacccctacctgctgggcttcagcaccagcacctgggagggcaccgccggcctgaacgtggccgccgagggcgccagagccagagacatgcccgcccaggcctgggacctggtggagagaatgaagaacagccccgacatcaacctggagaaggactggaagctggtgaccctgttcatcggcgtgaacgacctgtgccactactgcgagaaccccgaggcccacctggccaccgagtacgtgcagcacatccagcaggccctggacatcctgagcgaggagctgcccagagccttcgtgaacgtggtggaggtgatggagctggccagcctgtaccagggccagggcggcaagtgcgccatgctggccgcccagaacaactgcacctgcctgagacacagccagagcagcctggagaagcaggagctgaagaaggtgaactggaacctgcagcacggcatcagcagcttcagctactggcaccagtacacccagagagaggacttcgccgtggtggtgcagcccttcttccagaacaccctgacccccctgaacgagagaggcgacaccgacctgaccttcttcagcgaggactgcttccacttcagcgacagaggccacgccgagatggccatcgccctgtggaacaacatgctggagcccgtgggcagaaagaccaccagcaacaacttcacccacagcagagccaagctgaagtgccccagccccgagagcccctacctgtacaccctgagaaacagcagactgctgcccgaccaggccgaggaggcccccgaggtgctgtactgggccgtgcccgtggccgccggcgtgggcctggtggtgggcatcatcggcaccgtggtgtggagatgcagaagaggcggcagaagagaggacccccccatgagcctgagaaccgtggccctgtag

SEQ ID NO: 66563 - protein, 494 aa, Artificial Sequence
  derived and/or modified sequence
MSLGLGSAERGVLGTRGARERCRRRRPGQPGEHEEELDQEFELETDTLFGGLKKDATDFEWSFWMEWGKQWLVWLLLGHMVVSQMATLLARKHRPWILMLYGMWACWCVLGTPGVAMVLLHTTISFCVAQFRSQLLTWLCSLLLLSTLRLQGVEEVKRRWYKTENEYYLLQFTLTVRCLYYTSFSLELCWQQLPAASTSYSFPWMLAYVFYYPVLHNGPILSFSEFIKQMQQQEHDSLKASLCVLALGLGRLLCWWWLAELMAHLMYMHAIYSSIPLLETVSCWTLGGLALAQVLFFYVKYLVLFGVPALLMRLDGLTPPALPRCVSTMFSFTGMWRYFDVGLHNFLIRYVYIPVGGSQHGLLGTLFSTAMTFAFVSYWHGGYDYLWCWAALNWLGVTVENGVRRLVETPCIQDSLARYFSPQARRRFHAALASCSTSMLILSNLVFLGGNEVGKTYWNRIFIQGWPWVTLSVLGFLYCYSHVGIAWAQTYATD

SEQ ID NO: 66564 - DNA, 1485 bp, Artificial Sequence
  derived and/or modified sequence
atgagcctcgggctgggctcggcagagcgcggagtactgggaacaaggggggctcgggaacgttgcaggcgtagaaggccaggacagcccggagaacacgaggaggagctggatcaagaattcgaactcgaaaccgacaccttgtttggcggcctgaagaaggacgctacagattttgaatggtcgttttggatggagtggggaaagcagtggcttgtttggctgctcttaggacacatggtggtgtcccagatggccaccttactcgccagaaaacacaggccttggatcttgatgctttatggaatgtgggcctgctggtgcgttctgggcactcctggcgtagccatggttctgctacacacgacaatcagcttctgcgttgcccagtttcggagccagctgttgacatggctatgcagcctgcttttactcagtacactgagactgcaaggcgtagaagaggttaagagacgctggtataaaacagagaacgaatactacctgctgcagtttacactgacagtgcggtgcctgtactataccagcttctccctcgagctgtgctggcagcagctgcctgctgcaagcacttcttatagttttccatggatgctcgcctatgtattttactaccccgtgcttcataacggtcctatcttatcttttagcgaatttatcaagcagatgcaacagcaggaacacgactccctaaaggcatctctctgcgtcctggcgcttggcctaggaagactgctatgctggtggtggctggccgagttgatggcccacctcatgtatatgcacgccatatattcctccatccctctcctcgagacggtgagctgctggaccctggggggcttggctctggcccaggtgctctttttctacgtgaagtacctggtgctcttcggagtgcctgccctgctaatgaggctcgatggtctgacgcctcctgcgcttcccagatgcgtgtccactatgttctcctttactgggatgtggcggtattttgatgttggcttgcacaactttctgattcgctatgtgtacatcccagtgggcggttcccagcacggtctgttaggaactctctttagcactgctatgacctttgcgtttgtttcctattggcacgggggatatgactatctgtggtgttgggctgcactgaattggttgggggtcacagtggagaacggcgttcggagactggtggaaaccccatgtatccaggattctctggctcgctatttcagtccgcaggctcgaaggcggttccatgcggctcttgcctcatgttccacaagcatgcttatactttctaacctggtcttcctaggcgggaatgaagtgggtaagacctactggaatcgaatcttcattcagggttggccttgggtgactctttcagtcctgggcttcctctactgttactcacatgtgggcattgcctgggcacagacatatgctacagattag

SEQ ID NO: 66565 - DNA, 1639 bp, Artificial Sequence
  derived and/or modified sequence
aaagggcagctccgggggaaagagggtggcgtcccggggaagcccgcagccgccgccgatgtcgctgggactcggaagtgccgaaagaggggtgttgggaactcgcggcgcgcgtgaacgttgccgtcgccgccgcccgggacagcccggagaaactctcagcgtaggcatcgggaaccttcgtgccaaggagccatgctgccccgatgggaactggcactttacctacttgcctcactaggcttccacttctattccttctatgaagtttacaaagtctccagaggatgcgaccgactttgagtggagcttctggatggaatgggggaagcagtggctggtgtggcttctccttggccacatggtagtgtctcaaatggccacactgctggcaagaaagcacagaccctggattctcatgctctatgggatgtgggcctgctggtgtgtgctggggacccctggtgtggctatggttttgctccataccaccatctctttctgcgtggcccagttccggtctcagctcctgacgtggctctgttctctcctcctcctctccacactgaggctgcagggtgtggaagaagttaagagaaggtggtacaagacagaaaacgagtactacctgctgcagttcacgctgaccgttcgctgcctgtactacaccagcttcagcctggagctctgctggcagcagctgcctgctgcatcgacctcctactcctttccctggatgctggcctatgtcttttattatccagtcttacacaatgggcccatcctcagcttctcggagttcatcaaacagatgcagcagcaggagcatgactccctgaaggccagcctgtgtgtcctggccctggggctgggccgccttctttgctggtggtggctggccgagctgatggctcacctgatgtacatgcatgccatctacagcagcatccccctcctggagactgtctcttgttggaccttaggaggactggcgttagcccaggtgctctttttctacgtgaagtacttggtgctctttggcgtgcctgctctgctcatgcgcctggatggactcactccacccgccctcccccgctgcgtgagcaccatgttcagtttcaccgggatgtggaggtattttgatgttggactgcataatttcttaatcaggtatgtgtacattccagtgggcgggtcccagcatggcctgctggggacactgttttccacggcgatgacatttgcatttgtgagctactggcatggcggctacgactacctctggtgctgggcagcgctcaactggctgggagtcactgtggagaatggagtccggaggctggtggagactccctgcatccaggacagtctggcccgatacttctccccacaagctcgccgtcgattccacgctgcccttgcttcttgttccacctcgatgctgatcctgtccaacctggtatttcttgggggcaatgaggttgggaaaacctactggaataggatcttcatacaaggctggccttgggtgaccctctctgtcctgggattcctgtactgctactcccacgtgggcattgcctgggcccagacctacgccacggactaatgctgttgggcccaggccagtccttgttgc

SEQ ID NO: 66566 - DNA, 3507 bp, Artificial Sequence
  derived and/or modified sequence
acggcggcaggggcgtgctcggaggacgcgcgctgcgctgctcctccaaagggcagctccgggggaaagagggtggcgtcccggggaagcccgcagccgccgccgatgtcgctgggactcggaagtgccgaaagaggggtgttgggaactcgcggcgcgcgtgaacgttgccgtcgccgccgcccgggacagcccggagaacacgaagaggagctggaccaggaatttgagctggagactgacactttatttggaggattaaagaaggatgcgaccgactttgagtggagcttctggatggaatgggggaagcagtggctggtgtggcttctccttggccacatggtagtgtctcaaatggccacactgctggcaagaaagcacagaccctggattctcatgctctatgggatgtgggcctgctggtgtgtgctggggacccctggtgtggctatggttttgctccataccaccatctctttctgcgtggcccagttccggtctcagctcctgacgtggctctgttctctcctcctcctctccacactgaggctgcagggtgtggaagaagttaagagaaggtggtacaagacagaaaacgagtactacctgctgcagttcacgctgaccgttcgctgcctgtactacaccagcttcagcctggagctctgctggcagcagctgcctgctgcatcgacctcctactcctttccctggatgctggcctatgtcttttattatccagtcttacacaatgggcccatcctcagcttctcggagttcatcaaacagatgcagcagcaggagcatgactccctgaaggccagcctgtgtgtcctggccctggggctgggccgccttctttgctggtggtggctggccgagctgatggctcacctgatgtacatgcatgccatctacagcagcatccccctcctggagactgtctcttgttggaccttaggaggactggcgttagcccaggtgctctttttctacgtgaagtacttggtgctctttggcgtgcctgctctgctcatgcgcctggatggactcactccacccgccctcccccgctgcgtgagcaccatgttcagtttcaccgggatgtggaggtattttgatgttggactgcataatttcttaatcaggtatgtgtacattccagtgggcgggtcccagcatggcctgctggggacactgttttccacggcgatgacatttgcatttgtgagctactggcatggcggctacgactacctctggtgctgggcagcgctcaactggctgggagtcactgtggagaatggagtccggaggctggtggagactccctgcatccaggacagtctggcccgatacttctccccacaagctcgccgtcgattccacgctgcccttgcttcttgttccacctcgatgctgatcctgtccaacctggtatttcttgggggcaatgaggttgggaaaacctactggaataggatcttcatacaaggctggccttgggtgaccctctctgtcctgggattcctgtactgctactcccacgtgggcattgcctgggcccagacctacgccacggactaatgctgttgggcccaggccagtccttgttgctggcctccaaggcaaatagtgcttcaccctgacctctcactccaggacagcctctaagggatttgatctgctcatcttcagttgaatgccctcactccaagactggatgctggatctcatagaaaattcacagccagacaatcttctaatctggagtctttgagatcttctaccccaactcatcattttcctattgaggaaacgggtccagggcagtcgtgtgtcttacccagctacacagggtgacattttggtctagaacctagtctcatgagccctttgcattctttccccttaagcaagaatagaatgtagtggaaatttattgattgagacacagaaatcctgattagtgataggcctgtcttctgggcaatatttctaaaatatttgagtgacattgatgtttaagtgacctccttcatcacatcctgcagtatctccagaagcagcactagggtttgagtttcatacttcagcccctctgtaggaatgagaccaagccacagctgtcttttgaattacgtagtcgaagaagacggtagcagccctgtagcattctaaggcatctatacccaaggagtcctgtgatttgagcttcagcagggtgatctacatttgggtgcttgtttctgagatttgcagagaagtataacatggtagttcctctaccttacagttaatcgtttcttaataaagaagcagaatttagaaaccacaggatagtgtacccacagatgggtgttatcaaggccagtcatgaggatggtgtcctggagtcttgtccaccctctccatacaagtctcaaaagtcatcctcctactcagtgattcacgtttagtggtttatattattaaggtttgattcaaacagagccttttctgtcctgtagataatctacatgtttgtagaattattttgaatatgtttgaggaaaatgtttaaaatctaaatatactcacataacttgattattcactcctctgaaaagatgctggataggctaccaaagttcccaagtggtagataattcagaagacttgtttgaatttggattttttttttttttggagtggggaagggtataaaggaggcttaaaatttgaatccataatatatctaattacaggagaatttacaacatctcaagtacgtaaattaagttgtcattgagtgaaaggttcacttggacctagtgctgcctcctgtttattacatagcatggcccttatgtcttgagttgaggttatcatctcaatgaggcttaagctcctagagtacaggaccattttgttgattgtctttcttcatagcttctctgcttggcaaagagatgggagggggccagatactgactacctggggtaggcacattatgtgttaaagcaagacagaggccagagaggggcaggtagacctgcatagcagcagcctcagcagctgtcttggtaaaggagagagagagacatggggccagtaattccggggtgctcagaagttttaggagggaatgagcctcagggaggagtgagcacctaaatgaacgcagtaaaccttcatggaccaacagtgattgaggatttgtgggcagccagagggagtctgactgaagtttacttggaaagaaagggcttgctaagaaaaaagggagtaaaaatgatgatagggaagtgtctaatgtatgtgcacatataagtaatacaaaagttttgagctcttccaagtataccatttatatacaaacaaataggtttattcattcattaaactactttggaagcgtcagtggatatatttgaaagtggtaatcctgaatctcttttaaactattatatgattcataatggttctcaggaattaataaatgattactgtgtttagctctg

SEQ ID NO: 66567 - DNA, 1485 bp, Artificial Sequence
  derived and/or modified sequence
atgagcctgggcctgggcagcgctgagcggggcgtgctgggcaccaggggggcccgggagcgctgcagaagaagaagacctggccagcccggggagcacgaggaggagctggaccaggagtttgagctggagacagacaccctgtttggaggcctgaagaaggatgccacagactttgagtggagcttctggatggagtggggcaagcagtggctggtgtggctgctgctgggccacatggtggtgtcccagatggccaccctgctggccaggaagcaccggccctggatcctgatgctgtatggcatgtgggcctgctggtgtgtgctgggcaccccaggagtggccatggtgctgctgcacaccaccatctccttctgtgtggcccagttccgcagccagctgctgacctggctgtgcagcctgctgctgctgagcaccctgcggctgcagggcgtggaggaggtgaagaggcgctggtacaagacagaaaatgagtactacctgctgcagttcaccctgactgtgcgctgcctgtactacaccagcttcagcctggagctgtgctggcagcagctgcctgctgccagcaccagctacagcttcccctggatgctggcctacgtgttctactaccctgtgctgcacaacggccccatcctgtccttcagcgagttcatcaagcagatgcagcagcaggagcatgacagcctgaaggccagcctgtgtgtgctggccctgggcctgggccgcctgctgtgctggtggtggctggccgagctgatggcccacctgatgtacatgcacgccatctacagcagcatccccctgctggagaccgtgtcctgctggaccctgggcggcctggccctggcccaggtgctcttcttctacgtgaagtacctggtgctgtttggagtgcctgccctgctgatgaggctggatggcctgaccccaccagccctgccccgctgtgtgtccaccatgttctccttcaccggcatgtggagatactttgatgtgggcctgcacaacttcctgatccgctacgtgtacatccctgtgggcggcagccagcacggcctgctgggcaccctcttcagcacagccatgacctttgcctttgtgtcctactggcacggcggctatgactacctgtggtgctgggccgccctgaactggctgggcgtgacagtggagaatggagtgcggcggctggtggagaccccctgcatccaggacagcctggcccgctacttcagcccccaggcccggcggcgcttccacgccgccctggccagctgcagcacctccatgctgatcctgagcaacctggtgttcctgggcggcaatgaggtgggcaagacctactggaaccgcatcttcatccagggctggccctgggtgaccctgtctgtgctgggcttcctgtactgctacagccacgtgggcatcgcctgggcccagacctacgccacagactag

SEQ ID NO: 66568 - DNA, 1485 bp, Artificial Sequence
  derived and/or modified sequence
atgagcctgggcctgggcagcgccgagcggggcgtgctgggcacccggggggccagagagcgctgcaggagacgccgaccgggccagcccggcgaacacgaagaggaattggatcaggagtttgaactggaaactgataccttattcgggggcctgaagaaggatgcgactgatttcgagtggagcttttggatggaatggggcaaacaatggctagtatggttgctactcggacatatggtagtcagtcaaatggcgaccttattagcccgaaagcaccggccatggattctcatgttgtacggtatgtgggcttgctggtgcgttctcggaacgccaggggtcgcgatggtgctgttgcacaccacaattagtttctgcgtagcccagttcagatcccagctgttaacttggctctgcagcctcctcctgctgtcgacgttaagacttcagggggtggaggaggttaagcggcgctggtataagactgagaacgagtactacctgctacagttcaccctgactgttcgctgtctctattacacctctttctccctggaactatgctggcaacagttgcccgcagctagcacgtcatacagcttcccctggatgttggcttatgttttctattatcctgtgttgcataacggcccgatcctttccttttctgagttcatcaagcagatgcagcagcaggagcacgattccttaaaagcctctctgtgtgtactcgcccttggattgggacgtctcctgtgttggtggtggctagccgaattgatggcacacctgatgtacatgcatgccatctattcttcaatccctctgttggagaccgtctcgtgttggacactgggcggtctcgcattggcccaagtgctcttcttttacgtaaagtatctggttctcttcggcgtgcccgctctccttatgaggcttgacggcttaacaccaccagcccttccgaggtgtgtgagtacaatgtttagttttaccggtatgtggagatacttcgatgtgggcttgcacaacttcctcataagatacgtgtacatccctgtcggcggttctcagcacgggctgctgggtactctgttcagcaccgccatgacattcgccttcgtatcttactggcacggcggctatgactacttgtggtgttgggcggcactgaactggctgggagtgacggtcgaaaacggagtaaggaggttagtggagacaccgtgtatacaagactctctggcccggtacttttctccccaagctcgccgaagattccacgctgccctcgccagctgttccacctcaatgctgattttatccaatctagtgtttctcggcggtaacgaggtgggcaagacctattggaatcgcatcttcatccaaggttggccctgggtaactctgagcgtactcggatttctctactgctactcccacgtgggaatcgcctgggcccagacgtacgctacggactag

SEQ ID NO: 66569 - DNA, 1485 bp, Artificial Sequence
  derived and/or modified sequence
atgagcctgggcctgggatcagctgagcggggagtactgggaactaggggcgctcgcgaaaggtgtcggcgtcgcagacccggacagccgggagaacacgaggaagaactggatcaggagtttgagttagaaactgatacattgtttgggggtttgaaaaaagacgcgaccgactttgagtggagtttttggatggaatgggggaagcagtggctggtgtggttattacttggacacatggtagtcagccagatggccactctcctagctagaaaacacagaccatggatcctgatgctctacggcatgtgggcctgctggtgcgtcctcggtaccccaggagtggcgatggtgttactccacacgactattagcttttgcgtggcccagtttcggtctcaactgctgacatggctgtgctcactgttactgctctcaaccctcaggctgcaaggtgtcgaagaagttaaaaggaggtggtataaaactgaaaacgagtattatctgctacaattcactctgaccgttaggtgtctttattacacgtctttttcactggaattatgttggcagcagctacctgccgcatccaccagctattcattcccatggatgcttgcctacgttttctattatcctgtcttgcataacgggcctattctgagtttctcagaattcatcaaacagatgcagcagcaggaacacgattccttgaaagcaagcctatgcgtgttggcgctcgggttaggcaggctgctatgttggtggtggctggctgagttgatggctcacctgatgtatatgcacgctatctattcttccatcccactgctggagaccgtgtcttgttggacactgggaggattggcactggctcaggtgctcttcttttacgtcaaatacctcgttctgttcggggtgcccgcacttctcatgagattggacggactgaccccgcctgctcttccccgttgtgtgtccaccatgttctcatttactggcatgtggagatactttgacgttggccttcataactttttgattcggtatgtgtatatcccagtcgggggatcccagcatggtctgctcgggacactattctctactgcaatgactttcgccttcgtttcttattggcacggagggtacgattatctatggtgctgggccgcactgaactggctgggcgttaccgtggaaaatggggtgcgtaggctagtggaaactccctgtatccaggattctttggctagatacttctcgccacaggcacgtcgccgattccatgctgctctcgcttcctgttccacatctatgctgatattgtcaaatctagtgtttctgggaggcaatgaagtaggcaagacgtactggaacagaatttttatccaggggtggccctgggtgactttatctgttttagggttcctgtattgttactcacatgtgggaatcgcttgggcacaaacatatgcaacggattag

SEQ ID NO: 66570 - DNA, 1485 bp, Artificial Sequence
  derived and/or modified sequence
atgagcctgggcctgggcagcgccgagagaggcgtgctgggcaccagaggcgccagagagagatgcagaagaagaagacccggccagcccggcgagcacgaggaggagctggaccaggagttcgagctggagaccgacaccctgttcggcggcctgaagaaggacgccaccgacttcgagtggagcttctggatggagtggggcaagcagtggctggtgtggctgctgctgggccacatggtggtgagccagatggccaccctgctggccagaaagcacagaccctggatcctgatgctgtacggcatgtgggcctgctggtgcgtgctgggcacccccggcgtggccatggtgctgctgcacaccaccatcagcttctgcgtggcccagttcagaagccagctgctgacctggctgtgcagcctgctgctgctgagcaccctgagactgcagggcgtggaggaggtgaagagaagatggtacaagaccgagaacgagtactacctgctgcagttcaccctgaccgtgagatgcctgtactacaccagcttcagcctggagctgtgctggcagcagctgcccgccgccagcaccagctacagcttcccctggatgctggcctacgtgttctactaccccgtgctgcacaacggccccatcctgagcttcagcgagttcatcaagcagatgcagcagcaggagcacgacagcctgaaggccagcctgtgcgtgctggccctgggcctgggcagactgctgtgctggtggtggctggccgagctgatggcccacctgatgtacatgcacgccatctacagcagcatccccctgctggagaccgtgagctgctggaccctgggcggcctggccctggcccaggtgctgttcttctacgtgaagtacctggtgctgttcggcgtgcccgccctgctgatgagactggacggcctgaccccccccgccctgcccagatgcgtgagcaccatgttcagcttcaccggcatgtggagatacttcgacgtgggcctgcacaacttcctgatcagatacgtgtacatccccgtgggcggcagccagcacggcctgctgggcaccctgttcagcaccgccatgaccttcgccttcgtgagctactggcacggcggctacgactacctgtggtgctgggccgccctgaactggctgggcgtgaccgtggagaacggcgtgagaagactggtggagaccccctgcatccaggacagcctggccagatacttcagcccccaggccagaagaagattccacgccgccctggccagctgcagcaccagcatgctgatcctgagcaacctggtgttcctgggcggcaacgaggtgggcaagacctactggaacagaatcttcatccagggctggccctgggtgaccctgagcgtgctgggcttcctgtactgctacagccacgtgggcatcgcctgggcccagacctacgccaccgactag

SEQ ID NO: 66571 - protein, 183 aa, Artificial Sequence
  derived and/or modified sequence
MRLDGLTPPALPRCVSTMFSFTGMWRYFDVGLHNFLIRYVYIPVGGSQHGLLGTLFSTAMTFAFVSYWHGGYDYLWCWAALNWLGVTVENGVRRLVETPCIQDSLARYFSPQARRRFHAALASCSTSMLILSNLVFLGGNEVGKTYWNRIFIQGWPWVTLSVLGFLYCYSHVGIAWAQTYATD

SEQ ID NO: 66572 - protein, 428 aa, Artificial Sequence
  derived and/or modified sequence
MLPRWELALYLLASLGFHFYSFYEVYKVSREHEEELDQEFELETDTLFGGLKKDATDFEWSFWMEWGKQWLVWLLLGHMVVSQMATLLARKRRWYKTENEYYLLQFTLTVRCLYYTSFSLELCWQQLPAASTSYSFPWMLAYVFYYPVLHNGPILSFSEFIKQMQQQEHDSLKASLCVLALGLGRLLCWWWLAELMAHLMYMHAIYSSIPLLETVSCWTLGGLALAQVLFFYVKYLVLFGVPALLMRLDGLTPPALPRCVSTMFSFTGMWRYFDVGLHNFLIRYVYIPVGGSQHGLLGTLFSTAMTFAFVSYWHGGYDYLWCWAALNWLGVTVENGVRRLVETPCIQDSLARYFSPQARRRFHAALASCSTSMLILSNLVFLGGNEVGKTYWNRIFIQGWPWVTLSVLGFLYCYSHVGIAWAQTYATD

SEQ ID NO: 66573 - DNA, 624 bp, Artificial Sequence
  derived and/or modified sequence
atggagtggggcaaacaatggttggtgtggctgttgctaggtcacatggtggtcagtcagatggccaccctgttggcaaggaaacggcgttggtataaaaccgagaatgaatactaccttctgcagtttacccttaccgttagatgtctatactacacttcttttagccttgagctctgctggcagcagctgcctgccgcatctactagttatagcttcccatggatgcttgcatatgtgttctattaccccgtgctccacaacggccctattctcagtttcagcgagttcattaagcagatgcagcaacaggagcacgatagcctgaaagcctccttatgtgtgcttgcgctaggcctcggaaggctgttatgctggtggtggctggcagagctgatggcccatctaatgtacatgcatgccatctattcatcgatccctctgttggaaacggtttcatgctggacgctcggggggctcgcactggctcaggtgctcttcttttacgtgaaatacctggtgctgtttggagtcccagctctcctgatgaggctggacgggttgactccacccgccctgccgagatgcgtctctaccatgttttccttcaccggaatgtggtag

SEQ ID NO: 66574 - DNA, 1287 bp, Artificial Sequence
  derived and/or modified sequence
atgctgcctcgctgggagctggccctgtatcttctcgcctctctggggttccatttttacagcttctatgaggtgtacaaagtttcccgcgagcatgaggaagaattagatcaggagttcgaattggagacagacacactctttggcggactgaaaaaagatgccacagacttcgagtggagcttttggatggagtggggtaaacagtggcttgtgtggcttctcctcggccacatggtcgtgagccaaatggctacactgctggcgcgaaagaggcgatggtacaaaaccgaaaacgaatactacctgttgcagttcactctgaccgtgcgctgcctctactacaccagcttcagtctggagctctgttggcagcagctgcctgcagccagcactagttatagttttccgtggatgcttgcttatgtgttctactacccagtgctgcataatggccccatcttgagcttctcagaatttataaaacagatgcagcagcaagagcacgatagcctgaaggcctccctctgcgtactggccttgggcctaggcagattgctgtgttggtggtggttagccgagctgatggcccatcttatgtacatgcacgctatctactcttccatccctcttctcgagactgtgtcttgttggactctaggtggcctggcgctcgcacaggtgctgttcttttatgttaaatatctcgtgctctttggcgtccccgccctgctgatgaggctcgatgggcttaccccaccagcacttcctcgatgcgtctcaaccatgttctcattcacagggatgtggagatattttgacgtggggctgcacaatttcctgattagatacgtgtacatccctgtaggagggtcgcagcatggcctcctcggaacgcttttctccaccgcaatgacatttgccttcgtaagttattggcacgggggctacgactatctctggtgttgggcagccctgaattggttgggggtcactgtggagaacggtgtacgccggcttgtggaaaccccgtgtatccaggactccctggccagatacttttctccccaagcccggcgccgtttccatgccgctttagcttcatgttcaacttcaatgttgatcttatcaaatctggtgttcttaggaggcaatgaggtcggcaagacgtattggaaccgaattttcatccaaggatggccctgggtgactctctctgttctaggatttttgtactgttattcccatgtgggcattgcttgggctcaaacatatgcgaccgactag

SEQ ID NO: 66575 - DNA, 721 bp, Artificial Sequence
  derived and/or modified sequence
aacacgaagaggagctggaccaggaatttgagctggagactgacactttatttggaggattaaagaaggatgcgaccgactttgagtggagcttctggatggaatgggggaagcagtggctggtgtggcttctccttggccacatggtagtgtctcaaatggccacactgctggcaagaaagagaaggtggtacaagacagaaaacgagtactacctgctgcagttcacgctgaccgttcgctgcctgtactacaccagcttcagcctggagctctgctggcagcagctgcctgctgcatcgacctcctactcctttccctggatgctggcctatgtcttttattatccagtcttacacaatgggcccatcctcagcttctcggagttcatcaaacagatgcagcagcaggagcatgactccctgaaggccagcctgtgtgtcctggccctggggctgggccgccttctttgctggtggtggctggccgagctgatggctcacctgatgtacatgcatgccatctacagcagcatccccctcctggagactgtctcttgttggaccttaggaggactggcgttagcccaggtgctctttttctacgtgaagtacttggtgctctttggcgtgcctgctctgctcatgcgcctggatggactcactccacccgccctcccccgctgcgtgagcaccatgttcagtttcaccgggatgtggag

SEQ ID NO: 66576 - DNA, 624 bp, Artificial Sequence
  derived and/or modified sequence
atggagtggggcaagcagtggctggtgtggctgctgctgggccacatggtggtgtcccagatggccaccctgctggccaggaagaggcgctggtacaagacagaaaatgagtactacctgctgcagttcaccctgactgtgcgctgcctgtactacaccagcttcagcctggagctgtgctggcagcagctgcctgctgccagcaccagctacagcttcccctggatgctggcctacgtgttctactaccctgtgctgcacaacggccccatcctgtccttcagcgagttcatcaagcagatgcagcagcaggagcatgacagcctgaaggccagcctgtgtgtgctggccctgggcctgggccgcctgctgtgctggtggtggctggccgagctgatggcccacctgatgtacatgcacgccatctacagcagcatccccctgctggagaccgtgtcctgctggaccctgggcggcctggccctggcccaggtgctcttcttctacgtgaagtacctggtgctgtttggagtgcctgccctgctgatgaggctggatggcctgaccccaccagccctgccccgctgtgtgtccaccatgttctccttcaccggcatgtggtag

SEQ ID NO: 66577 - DNA, 1287 bp, Artificial Sequence
  derived and/or modified sequence
atgctgccccgctgggagctggccctgtacctgctggccagcctgggcttccacttctacagcttctatgaggtgtacaaggtgtcccgggagcacgaggaggagctggaccaggagtttgagctggagacagacaccctgtttggaggcctgaagaaggatgccacagactttgagtggagcttctggatggagtggggcaagcagtggctggtgtggctgctgctgggccacatggtggtgtcccagatggccaccctgctggccaggaagaggcgctggtacaagacagaaaatgagtactacctgctgcagttcaccctgactgtgcgctgcctgtactacaccagcttcagcctggagctgtgctggcagcagctgcctgctgccagcaccagctacagcttcccctggatgctggcctacgtgttctactaccctgtgctgcacaacggccccatcctgtccttcagcgagttcatcaagcagatgcagcagcaggagcatgacagcctgaaggccagcctgtgtgtgctggccctgggcctgggccgcctgctgtgctggtggtggctggccgagctgatggcccacctgatgtacatgcacgccatctacagcagcatccccctgctggagaccgtgtcctgctggaccctgggcggcctggccctggcccaggtgctcttcttctacgtgaagtacctggtgctgtttggagtgcctgccctgctgatgaggctggatggcctgaccccaccagccctgccccgctgtgtgtccaccatgttctccttcaccggcatgtggagatactttgatgtgggcctgcacaacttcctgatccgctacgtgtacatccctgtgggcggcagccagcacggcctgctgggcaccctcttcagcacagccatgacctttgcctttgtgtcctactggcacggcggctatgactacctgtggtgctgggccgccctgaactggctgggcgtgacagtggagaatggagtgcggcggctggtggagaccccctgcatccaggacagcctggcccgctacttcagcccccaggcccggcggcgcttccacgccgccctggccagctgcagcacctccatgctgatcctgagcaacctggtgttcctgggcggcaatgaggtgggcaagacctactggaaccgcatcttcatccagggctggccctgggtgaccctgtctgtgctgggcttcctgtactgctacagccacgtgggcatcgcctgggcccagacctacgccacagactag

SEQ ID NO: 66578 - DNA, 624 bp, Artificial Sequence
  derived and/or modified sequence
atggagtggggcaagcagtggctggtgtggctgctgctgggccacatggtggtgtcgcagatggctactttattggctcggaagagaaggtggtacaagaccgagaacgaatactacttgctccagttcacactcacagttagatgtctgtactatacttcctttagtctggagttgtgctggcagcaactgcccgccgcatccacctcctatagtttcccctggatgcttgcatacgtgttctactaccccgtcttgcacaacggcccaatcttgtctttttccgagttcattaaacaaatgcaacagcaggagcatgattcactgaaggcaagtctgtgcgtgttggcgttggggttgggccgtctactttgttggtggtggctggccgagttaatggcccatcttatgtacatgcacgccatctattccagcatcccactgctggaaactgtgagctgttggactttgggcggtctggcgctcgcccaggtattgttcttctacgtgaaatatttggtgctcttcggcgtccccgcactcctgatgcgcctggatggattgacgcctcccgctttacccagatgcgtgtccaccatgttttccttcactggtatgtggtag

SEQ ID NO: 66579 - DNA, 1287 bp, Artificial Sequence
  derived and/or modified sequence
atgctgccccggtgggagctggccctgtacctgctggccagcctgggctttcatttctacagcttttatgaagtttacaaagtgtctcgcgagcatgaggaagagttggaccaggaatttgagcttgagacggacactctgttcggcggtctcaagaaggatgccaccgacttcgagtggtccttctggatggagtggggcaagcagtggctcgtatggctgctgcttggccacatggtggtgagccaaatggcaactctgctagcaaggaaacgtcgctggtataagactgagaacgagtactacttactccagttcactctgaccgtaaggtgcttgtattacacctcattcagtcttgaactttgctggcaacagctgccagccgcttctacgtcctatagcttcccctggatgcttgcttatgtattctactatccggtcctccacaacggtcctatcctcagtttttctgagtttataaagcagatgcagcagcaggagcacgatagtctcaaagcatccttgtgcgtgttagcgctgggtctggggcgccttctgtgttggtggtggttagccgagctgatggcacacttgatgtatatgcatgccatatacagttccataccactactcgaaacagtcagctgctggaccctcggcggactggccctggctcaagtcctgtttttttatgtgaagtaccttgtgctgtttggggtgcctgcattactgatgagactggatggcctcactcccccagctctgcctagatgcgtatccacgatgttcagttttacaggcatgtggcggtactttgatgttggactgcacaacttccttattcggtacgtatacatccctgtcggtggcagtcagcatggactccttggcaccttgttcagcactgccatgactttcgcgtttgtgtcatactggcacggaggatatgattacttgtggtgctgggcggccctgaactggcttggtgtgaccgtggaaaatggagtgcgcaggttggtggagacaccctgtattcaggactctctagcaaggtactttagcccccaagctagaaggcgcttccacgccgctctggcaagctgctcaacctccatgctcattctgtctaaccttgtcttcttgggcggtaacgaggttggtaagacatactggaataggattttcatccaaggctggccgtgggttaccctgagcgtattaggatttttatattgttactcacacgtgggaattgcttgggcacagacttatgctactgactag

SEQ ID NO: 66580 - DNA, 624 bp, Artificial Sequence
  derived and/or modified sequence
atggaatggggtaagcagtggcttgtatggctgctattagggcacatggtggtgtcacaaatggccactctgctcgccagaaaacgcaggtggtacaaaacagagaatgagtattatctgcttcagtttacactgaccgtgcgatgtctgtactacactagcttctccctggagctatgctggcagcagctgcccgctgcgtccacaagctactcctttccctggatgttggcatatgttttctattacccagttcttcacaacggccctatcctgtcatttagtgaatttattaagcaaatgcaacagcaagagcacgattcactcaaagcctccctgtgcgtgctggctctgggcctcggtcgactgctctgttggtggtggctggctgagctgatggcacacctcatgtacatgcatgctatttattcatctatccctttgcttgagactgtgtcatgctggactctcggaggcctggctttggctcaggtgctgttcttttatgtgaaatatttagtgctatttggagtgcctgcattacttatgcgcctggacgggctgaccccgcctgccttgcccaggtgcgtgtcaaccatgttcagcttcactggcatgtggtag

SEQ ID NO: 66581 - DNA, 1287 bp, Artificial Sequence
  derived and/or modified sequence
atgttgcctcgctgggaacttgccctctatttgttggccagtttgggatttcatttctacagtttctacgaagtgtacaaagtttcgcgagaacacgaagaggaactggaccaggagttcgaacttgagaccgatacgcttttcgggggactgaagaaggatgcgaccgacttcgagtggtctttttggatggaatgggggaaacagtggttggtctggctgcttctcggccacatggtcgtgagtcagatggctacacttctcgccagaaaacggagatggtacaaaaccgagaatgaatactaccttttacagttcaccctgacggttcgctgcctgtattatacatcattcagccttgagttgtgctggcagcagcttccagcggcatctacttcttactcattcccgtggatgcttgcctatgtgttctactacccagtcctgcataatggtcctattctctcattctccgaatttatcaagcagatgcagcagcaggagcacgactcattgaaagcctcactatgcgtcctggccctgggcttgggtagactgctgtgctggtggtggcttgctgaactcatggctcacttaatgtacatgcatgctatctactcttcaattcctctgttagagacggtatcttgctggactctcgggggtctggctctcgcacaggtcttatttttctatgtgaaatatctagttctctttggcgtcccagcgctactgatgagattagacgggctgacccctcccgctcttcccaggtgcgtatcaaccatgttcagctttacgggaatgtggaggtactttgacgttggcctgcataactttctgattcgatacgtctatattcctgtcggcggatcgcagcatggccttctcgggaccctgttcagcactgcaatgacatttgccttcgtgtcctactggcatggtggctacgactacctttggtgctgggcagccctgaactggttaggcgtgacagttgaaaacggagtgaggagactcgtggaaaccccgtgcatccaggactctttggcccgttattttagcccccaggccaggcgtaggttccatgccgctctagccagctgctcaacttccatgttgatactgtctaaccttgtcttcctggggggaaatgaggtgggaaaaacatattggaaccgtatcttcatccagggttggccttgggtcacattgagcgtgcttggattcctttactgctactcccacgtgggtattgcttgggcccagacatatgctacggactag

SEQ ID NO: 66582 - DNA, 624 bp, Artificial Sequence
  derived and/or modified sequence
atggagtggggcaagcagtggctggtgtggctgctgctgggccacatggtggtgagccagatggccaccctgctggccagaaagagaagatggtacaagaccgagaacgagtactacctgctgcagttcaccctgaccgtgagatgcctgtactacaccagcttcagcctggagctgtgctggcagcagctgcccgccgccagcaccagctacagcttcccctggatgctggcctacgtgttctactaccccgtgctgcacaacggccccatcctgagcttcagcgagttcatcaagcagatgcagcagcaggagcacgacagcctgaaggccagcctgtgcgtgctggccctgggcctgggcagactgctgtgctggtggtggctggccgagctgatggcccacctgatgtacatgcacgccatctacagcagcatccccctgctggagaccgtgagctgctggaccctgggcggcctggccctggcccaggtgctgttcttctacgtgaagtacctggtgctgttcggcgtgcccgccctgctgatgagactggacggcctgaccccccccgccctgcccagatgcgtgagcaccatgttcagcttcaccggcatgtggtag

SEQ ID NO: 66583 - DNA, 1287 bp, Artificial Sequence
  derived and/or modified sequence
atgctgcccagatgggagctggccctgtacctgctggccagcctgggcttccacttctacagcttctacgaggtgtacaaggtgagcagagagcacgaggaggagctggaccaggagttcgagctggagaccgacaccctgttcggcggcctgaagaaggacgccaccgacttcgagtggagcttctggatggagtggggcaagcagtggctggtgtggctgctgctgggccacatggtggtgagccagatggccaccctgctggccagaaagagaagatggtacaagaccgagaacgagtactacctgctgcagttcaccctgaccgtgagatgcctgtactacaccagcttcagcctggagctgtgctggcagcagctgcccgccgccagcaccagctacagcttcccctggatgctggcctacgtgttctactaccccgtgctgcacaacggccccatcctgagcttcagcgagttcatcaagcagatgcagcagcaggagcacgacagcctgaaggccagcctgtgcgtgctggccctgggcctgggcagactgctgtgctggtggtggctggccgagctgatggcccacctgatgtacatgcacgccatctacagcagcatccccctgctggagaccgtgagctgctggaccctgggcggcctggccctggcccaggtgctgttcttctacgtgaagtacctggtgctgttcggcgtgcccgccctgctgatgagactggacggcctgaccccccccgccctgcccagatgcgtgagcaccatgttcagcttcaccggcatgtggagatacttcgacgtgggcctgcacaacttcctgatcagatacgtgtacatccccgtgggcggcagccagcacggcctgctgggcaccctgttcagcaccgccatgaccttcgccttcgtgagctactggcacggcggctacgactacctgtggtgctgggccgccctgaactggctgggcgtgaccgtggagaacggcgtgagaagactggtggagaccccctgcatccaggacagcctggccagatacttcagcccccaggccagaagaagattccacgccgccctggccagctgcagcaccagcatgctgatcctgagcaacctggtgttcctgggcggcaacgaggtgggcaagacctactggaacagaatcttcatccagggctggccctgggtgaccctgagcgtgctgggcttcctgtactgctacagccacgtgggcatcgcctgggcccagacctacgccaccgactag

SEQ ID NO: 66584 - protein, 952 aa, Artificial Sequence
  derived and/or modified sequence
MKFKRRHQAFPSFFKMKVSLPSDPSCVEEILRESQHLTPGFTLQKWNDPTTRASTKSVSFKSMLEDDLKLSSDEDDLEPVKTLTTQCTATELYQAVEKAKPRNNPVNPPLATPQPPPAVQASGGSGSSSESESSSESDSDTESSTTDSESNEAPRVATPEPEPPSTNKWQLDKWLNKVTSQNKSFICGQNETPMETISLPPPIIQPMEVQMKVKTNASQVPAEPKERPLLSLIREKARPRPTQKIPETKALKHKLSTTSETVSQRTIGKKQPKKVEKNTSTDEFTWPKPNITSSTPKEKESVELHDPPRGRNKATAHKPAPRKEPRPNIPLAPEKKKYRGPGKIVPKSREFIETDSSTSDSNTDQEETLQIKVLPPCIISGGNTAKSKEICGASLTLSTLMSSSGSNNNLSISNEEPTFSPIPVMQTEILSPLRDHENLKNLWVKIDLDLLSRVPGHSSLHAAPAKPDHKETATKPKRQTAVTAVEKPAPKGKRKHKPIEVAEKIPEKKQRLEEATTICLLPPCISPAPPHKPPNTRENNSSRRANRRKEEKLFPPPLSPLPEDPPRRRNVSGNNGPFGQDKNIAMTGQITSTKPKRTEGKFCATFKGISVNEGDTPKKASSATITVTNTAIATATVTATAIVTTTVTATATATATTTTTTTTISTITSTITTGLMDSSHLEMTSWAALPLLSSSSTNVRRPKLTFDDSVHNADYYMQEAKKLKHKADALFEKFGKAVNYADAALSFTECGNAMERDPLEAKSPYTMYSETVELLRYAMRLKNFASPLASDGDKKLAVLCYRCLSLLYLRMFKLKKDHAMKYSRSLMEYFKQNASKVAQIPSPWVSNGKNTPSPVSLNNVSPINAMGNCNNGPVTIPQRIHHMAASHVNITSNVLRGYEHWDMADKLTRENKEFFGDLDTLMGPLTQHSSMTNLVRYVRQGLCWLRIDAHLL

SEQ ID NO: 66585 - DNA, 2859 bp, Artificial Sequence
  derived and/or modified sequence
atgaaatttaagaggcgccatcaggcttttccaagcttctttaaaatgaaagtcagcctgcccagcgacccgagttgcgtggaggagatccttcgggaaagccagcacttgaccccaggcttcactttgcagaagtggaacgaccccacaacccgggccagtacaaaaagtgtttcctttaagtctatgttagaggacgatctcaaactgtcgtcagacgaggatgatctggaaccagtcaagactttaacaacgcagtgtaccgcaaccgagctgtatcaggcagtggaaaaagctaagcccaggaacaaccccgttaacccccccttggccactccccagcccccaccggccgtacaggcctccgggggctcaggatcatcaagcgaaagcgaatcttccagcgagagtgacagcgatacagagtctagcacaaccgactcggagagtaatgaggctccccgagttgctacaccagaaccagaacctccctctaccaacaagtggcagttggacaagtggctgaacaaggtaacatcccagaacaaatctttcatttgcggccagaatgagacgccgatggaaacaatttctctgccccctcctataatacagccaatggaggttcagatgaaagttaagaccaatgccagccaagtaccggcagagcccaaggaacggccactgctctcactgatcagggagaaggcccgccccagacccactcaaaagatcccagagaccaaggcactcaagcacaaactgtcgacgacctccgaaaccgtgtctcagcgcacaattggaaagaaacagccgaagaaggtggaaaagaacaccagcaccgacgagttcacatggcccaagccaaatataacgagtagcaccccaaaagagaaagaaagcgtagagctgcatgatccccctcgtggccgaaacaaagcaaccgcgcataaacccgcacctaggaaggaaccaagacctaatatccctctggcaccagagaaaaagaagtacaggggacctggaaaaatcgttccgaaaagcagggagttcatcgagaccgattcgtccacatccgacagcaacaccgaccaagaagagacattgcagattaaggtactccccccatgcatcatttctggtggtaacaccgctaagtcaaaggagatctgcggagcaagcctgactttatccactcttatgtcctcgagcggctctaataataatttaagtatttcaaacgaagagcccaccttcagccccatccccgtgatgcagacggagatcctgtcgcccctgcgagatcatgagaacctcaaaaatctatgggtgaagatcgatctggacctactaagtagagtgcccggccattcctcactgcacgcagccccagccaaacccgatcacaaggaaactgctacaaaaccaaaaaggcaaactgccgtcactgctgtggaaaagcctgccccaaaaggaaaacgcaagcataagcctatcgaggtggccgagaagattcccgagaagaaacagcggctcgaagaggcaacgaccatttgcctcttgccaccttgtatatcccctgccccgcctcataaacctccaaacacgcgtgaaaacaacagcagtagaagagccaaccggcgcaaagaggagaagctctttcccccccccctttcccccttaccagaagaccccccccgcaggcgcaatgtttccggtaacaatggcccttttgggcaggataaaaacatcgcgatgacggggcagataacaagtaccaagccgaaacggactgaaggaaaattttgtgcgactttcaaaggtatcagcgtcaacgagggtgatacacccaagaaagcttcctctgcaacaatcactgtcacaaatacagccatcgccacagctacggtaacagctacagcaatagttactactacagtcaccgcaacagctacagcgacagctaccacaactacgactacaactacaatcagtacaatcacatcgacaattactacaggcttgatggattcttcccatcttgaaatgacttcttgggccgctctgcctctgctaagcagctccagcaccaatgtgcgccggcccaagctgactttcgatgattccgttcataacgccgattattacatgcaggaagccaagaagctgaagcataaggcagacgctctgttcgaaaagttcggcaaggcggtgaattatgctgacgctgccctgagtttcactgagtgcggcaatgcaatggagagagatcccctggaggcgaagtccccctatactatgtattcagagaccgttgaactactgcgctatgcaatgcgcctcaagaatttcgcatcacctttggccagcgacggtgataaaaaattagccgttttgtgctacagatgtctctctctcctgtacttgcggatgtttaaacttaagaaagatcacgccatgaaatacagtcggtccctcatggagtactttaaacagaatgctagcaaggtcgcccagatcccttcaccatgggtatccaacgggaagaataccccttcaccagtgtccctgaacaacgtgagtcccataaatgcaatgggcaattgtaataatgggccagtcactattccacagcgcatccaccatatggcagcctctcatgtaaacatcacgagcaatgttctccgaggctacgaacattgggacatggcagacaaactgacaagagagaacaaggaattttttggcgaccttgacacattaatggggcccctcacccagcatagctcgatgacaaacctggtgagatatgtgagacagggcttgtgctggttgaggattgatgcccacttgctctag

SEQ ID NO: 66586 - DNA, 2859 bp, Artificial Sequence
  derived and/or modified sequence
atgaagttcaagagaagacaccaggccttccccagcttcttcaagatgaaggtgtccctgcccagcgaccccagctgtgtggaggagatcctgcgggagagccagcacctgaccccaggcttcaccctgcagaagtggaatgaccccaccacccgggccagcaccaagtctgtgtccttcaagtccatgctggaggatgacctgaagctgagcagtgatgaagatgacctggagcctgtgaagaccctgaccacccagtgcacagccacagagctgtaccaggccgtggagaaggccaagcccaggaacaaccctgtgaacccccccctggccaccccccagcccccacctgctgtgcaggccagcggcggcagcggcagcagcagcgagagcgagagcagcagcgagagtgacagcgacacagagagcagcaccacagacagcgagagcaatgaggccccccgggtggccaccccagagcctgagccccccagcaccaacaagtggcagctggacaagtggctgaacaaggtgaccagccagaacaagagcttcatctgtggccagaatgagacccccatggagaccatcagcctgcccccacccatcatccagcccatggaggtgcagatgaaggtgaagaccaatgccagccaggtgcctgctgagcccaaggagcggcccctgctgagcctcatccgggagaaggcccggccccggcccacccagaagatccctgagaccaaggccctgaagcacaagctgagcaccaccagcgagaccgtgtcccagaggaccatcggcaagaagcagcccaagaaggtggagaagaacaccagcacagatgagttcacctggcccaagcccaacatcaccagcagcacccccaaggagaaggagagcgtggagctgcatgaccccccccggggcaggaacaaggccacagcccacaagccagcccccaggaaggagccccggcccaacatccccctggcccctgagaagaagaagtaccggggccctgggaagatcgtgcccaagagccgggagttcatcgagacagacagcagcaccagtgacagcaacacagaccaggaggagaccctgcagatcaaggtgctgcccccctgcatcatcagcggcggcaacacagccaagagcaaggagatctgtggggccagcctgaccctgagcaccctgatgagcagcagcggcagcaacaacaacctgagcatcagcaatgaggagcccaccttcagccccatccctgtgatgcagacagagatcctgagccccctgcgggaccacgagaacctgaagaacctgtgggtgaagattgacctggacctgctgagccgggtgcccggccacagcagcctgcacgccgccccagccaagccagaccacaaggagacagccaccaagcccaagaggcagacagctgtgacagctgtggagaagccagcccccaagggcaagaggaagcacaagcccatcgaggtggccgagaagatccctgagaagaagcagaggctggaggaggccaccaccatctgcctgctgcccccctgcatcagccctgccccaccccacaagccacccaacacccgggagaacaacagcagcagaagagccaacagaaggaaggaggagaagctgtttcctccacccctgagccccctgcctgaagatcctccaagaagaagaaatgtgtctggcaacaacggccccttcggccaggacaagaacatcgccatgacaggccagatcaccagcaccaagcccaagaggacagagggcaagttctgtgccaccttcaagggcatctctgtgaatgaaggagacacccccaagaaggccagcagcgccaccatcaccgtgaccaacacagccatcgccacagccaccgtgacagccacagccatcgtgaccaccaccgtgacagccacagccacagccacagccaccaccaccaccaccaccaccaccatcagcaccatcaccagcaccatcaccaccggcctgatggacagcagccacctggagatgacctcctgggccgccctgcccctgctgagcagcagcagcaccaacgtgcggcggcccaagctgacctttgatgattctgtgcacaatgctgactactacatgcaggaggccaagaagctgaagcacaaggcagatgccctgtttgagaagtttgggaaggctgtgaactatgcagatgctgccctgtccttcacagaatgtggaaatgccatggagcgggaccccctggaggccaagagcccctacaccatgtacagcgagaccgtggagctgctgcgctatgccatgaggctgaagaactttgccagccccctggccagtgatggagacaagaagctggccgtgctgtgctaccgctgcctgagcctgctgtacctgaggatgttcaagctgaagaaggaccacgccatgaagtacagccgcagcctgatggagtacttcaagcagaatgccagcaaggtggcccagatccccagcccctgggtgtccaatggcaagaacacccccagccctgtgtccctgaacaacgtgagccccatcaatgccatgggcaactgcaacaatggacctgtgaccatcccccagaggatccaccacatggccgccagccacgtgaacatcaccagcaatgtgctgcggggctatgagcactgggacatggctgacaagctgacccgggagaacaaggagttctttggagacctggacaccctgatgggccccctgacccagcacagctccatgaccaacctggtgcgctacgtgcggcagggcctgtgctggctgagaattgatgcccacctgctgtag

SEQ ID NO: 66587 - DNA, 12280 bp, Artificial Sequence
  derived and/or modified sequence
agttttggttgtggcaacccagaggaaggttgcagtggcccatctatctatcccagatgtaagatatgcttcacccctctttcttgatccatgaagttcaaaaggaggcaccaagcatttccgtccttcttcaagatgaaggtaagccttcccagtgatccaagctgtgttgaagaaatcttgcgggaatcgcagcatctgaccccaggattcaccttacaaaagtggaatgacccaaccaccagagcttctacaaagtcagtgtctttcaaatcgatgcttgaggatgacctgaagctgagcagtgatgaagatgaccttgagcctgtgaagaccttgaccactcagtgcactgccactgagctctaccaggctgttgaaaaggcaaaacctaggaataatcctgtgaacccacccttggccactccccagcccccacctgcagtgcaagccagcgggggttctggcagctccagcgaatcggagagcagctctgagtcggattcagacactgaaagtagcaccactgacagcgaatctaatgaggcacctcgtgtggcaactccagagcctgagccaccctcaaccaacaagtggcaactggataaatggcttaacaaagtgacatcccagaacaagtcttttatttgtggccaaaatgaaacacccatggagactatttctctgcctcctccaatcatccaaccaatggaagtccagatgaaagtgaagacgaatgccagtcaggtcccagctgaacccaaagaaaggcctctcctcagtctcattagggagaaagcccgtccacggcccactcagaaaattccagaaacaaaggctttgaagcataagttgtcaacaactagtgagacagtgtctcaaaggacaattgggaaaaaacagcccaaaaaagttgagaagaacaccagcactgacgagtttacctggcccaaaccaaatattaccagcagcactcccaaagaaaaagaaagtgtggagcttcatgacccaccaagaggccgcaacaaagccactgcccacaaaccagcccctaggaaagaaccaagacctaacatccctttggctcccgagaagaagaagtacagagggcctggcaagattgtgccaaagtctcgggaattcattgaaacagattcatctacatctgactccaacacagatcaggaagagaccctgcaaatcaaagtcctgcctccgtgcattatttctggaggtaatactgccaaatccaaggaaatctgtggtgccagcctgaccctcagcaccttaatgagtagcagtggcagcaacaacaacttatccatcagtaatgaagagccaacattttcacctattcctgtcatgcaaactgaaatcctgtcccctctgcgagatcatgagaacctgaaaaacctctgggtgaagattgaccttgacttactctctagagtacctggccacagctcactccatgcagcacctgccaagccagaccacaaggagactgccacaaaacccaagcgtcagacagctgtcacagctgtggagaaaccagcccctaagggcaaacgtaagcacaagccaatagaagttgcagagaagatccctgagaagaagcagcgcctggaggaggccacaactatctgcttgctccctccttgcatctcaccagccccaccccacaagcctcccaacactagagaaaataattcatccaggagagcaaatagaagaaaggaagaaaaactatttcctcctccactttccccactgccagaggaccctccacgccgcagaaatgtcagtggcaataatggtccctttggtcaagacaaaaacatcgccatgactggacaaatcacatctaccaaacctaagagaactgaaggcaaattctgtgctactttcaaagggatatcggtaaatgagggagacactccaaaaaaggcatcctctgccaccatcactgtcaccaatactgctattgccactgctactgtcactgctactgccattgtcaccaccactgtcacagctactgccaccgccacggccaccaccacaactactaccactaccatttccaccatcacctctaccatcactactggcctcatggatagcagtcacctggagatgacgtcctgggcggctctgccccttctatccagcagcagcactaatgtccggagacccaagctcacttttgatgactcggttcacaatgctgattattacatgcaagaagctaagaagctgaagcacaaagctgatgcactgttcgagaaatttggcaaagctgtgaattatgctgatgccgccctctccttcactgaatgtggcaatgccatggaacgcgaccctctggaagcaaagtccccatacaccatgtactctgagactgtggagctcctcaggtatgcaatgaggctgaagaactttgcaagtcccttggcttcggatggggacaaaaagctagcagtactatgctaccgatgtttatcactcctctatttgagaatgtttaagctgaagaaggaccatgctatgaagtactccagatcactgatggaatattttaagcaaaatgcttcaaaagtcgcacagataccctctccatgggtaagcaatggaaagaacactccatccccagtgtctctcaacaacgtctcccccatcaacgcaatggggaactgtaacaatggcccagtcaccattccccagcgcattcaccacatggctgccagccacgtcaacatcactagcaatgtgttacggggctatgaacactgggatatggccgacaaactgacaagagaaaacaaagaattctttggtgatctggacacgctgatggggcctctgacccagcacagcagcatgaccaatcttgtccgctacgttcgccaaggactgtgttggctgcgcatcgatgcccacttgttgtagtgggtgttctcagatctctagcatcacgacccatcactctacctctaccagcgcactgatggtcactggtggaactccactcactggggaacgttctctttggttatgtttgtttttatgcttcttttgttatctgtaaaaaacagaagtcattgtaagttgacactacaacttaagggcagtgtacgttttattacttagtcattttttttcttttagcatttgatatgcatttctcagattccaccatctttttgtgctttatggaatgacagtccctacaatattgttttaagcccacactacccaaaacaaagaatgggaagcacttgtgataaagacaggctcctgagaaatgcaacaagtggtcttacatatacatgagaacttagacacaagggaccatcccccaaactctactcttatacccagaaaagaacatatttcagaatctgtcaaacttttgtgtatcccacagattcaatcttcaggtgagaattttcattgtcaaaacccactggttagatgttgtagcaacatcataaaatcaagagtatcaagaaaataaatgagcatagcaatgctactcttaaaaagatgctatgccacacaaccagaggactttcttgttagcatccctttcctgattccctattttgttaattttaatgataagaagaaagggtgacatttattttgacaagttttaggcatcagctggcatcagtgtttttcaactccattatttgaagtgtaaatcctcacctggggttctctgtgtgcaaagctgtccttttgaagaacagtttggttgatgcatgccttagtagccaaaatgctacactctagacttacaagtgggagttaagagaggtctggaaagtgtccaacaaggaattcacacctctgcctcctttgcaacaacaacatttacacagttggtaagtgggtccataactggcaggatttttaaattgtattttgctcaaatctatgggaacaaaagtcaaggtatcactacctagaagtaatgatatacagttttcttcctagtggcttgaaaatctggacttcctcaattattattcacattttctctcttataggttttctgttttctactttcttttttctcttatctgtgtttccctttcctttgtttggctcattaacttttgactgaattacaattactccttttattaaagtccatattattgtgaatcatttccatgaaaatttctaagaaaactccaaactctctaaatagtagctaacttttatttttttaaaatgagtcgtggggtagtgcttcaccttgagatgctttgaaagagccctaaacattgggaaccattcacctaatttggagacatttctcactggttgtgactacccccttatgatccttcacattcattttatgtccctaaacatcacaatgtaaatatcatttttgatgttccagctcaccagaagattcttacacttggggtaaacactatccatgcattacttactggtaattacctgctggtatataattccatgtagcctttaatatgctgggttatcaaattctgttcactgagttatgaccagataaataatagatatgcacatgaaagatgcaaacttgtgtgattattaaagccagccatgcaggtccatgatagaaacagcaggtgatgactctgcactctcattgtcaaggttagatatatccccagttgcaaaacagccagacttgagctgtgctctggtcatctttgagtttaaggccttttgttgtataaggctgtggaagttgtactccaatggctgaagccatgttgttaatatggctgatgggagcatccctgcagctgaacccagcactttttatgctcccactgtggttgagctttatgtttacagtctcagcaacaacacttatgcatccaaacactcacaaatgaaacctgaaagaatcttttctgagcctcttaaaagaggaaaatgatgataacattaaagactctgaacacccaaggttggtgtcacatataaaaattaagctgatgactttgcagtgactcaagttgtctctttatcatggtttaccaggtagagtgcctggctattactatataatgaagcccactggcttgacttgtaagttcaacctaaaccacaatcctagaccatcatggatttaggagtagattcttcttgaaatcccacatccagaaactagacattagaatgttgaggcagtttcccagagaaacaagcatattgcctcatggatgaaagacttgtagttctagtttcagtgacttgttatatctacttacatacaacagggaggcaagaggattctctgtcatctctggtgactgagtgtaaaatatgtgccaagtctgcagcacagtgaccaaatctgacaatcgagctctggatcaccacttgattatgtagtagactcatttataaagcagcttaggaactaattaaacatggaggatgaattaccttcctatcccttgagataagacatctttcagtttcatgattaaggattgttgctgttttatagttactctgttcatcacagtgtaaatggtgatgcgtgtcgtaggtgtgcagctatttgagggactaagggatggagatattctgtcaaatgaatctcttcagtataccagtttgtgggagggatatgagacatgtggatggcagtgagagatcgtgcctctagatcttgatggaggcttggtgagacacacttaaataagcacgtggaggttagaatagagggcagagtaaaaggaagctccatctgagcaagtacaccaaatgatctcagccctgcaacttgacccaggtagggccaccactacgccttcacttgtcacccaagctccaaccacagagagtttgacaagtttgtgttatgatgttggcttggctttgtatttttaattaactttggatttttagtggttttgtcatataactgtctgagtttggtaggtaggattactttgaaaagggtttactagtgtggtcctccgggtagaatttagctgtaagcatgttgttagccagcctgtagactgttaattacttaataatctcattgggaaaatactagtagttttatatttggatgacataattggaaaagcagattagctgctactacttttaaaagacttaaggtcgggatgcctttttttccatgtaaggaaatgaaaagaccaaaatcttcaggcaaaaagcaagttgcaaaattagaaaccattggctaaaaatgtgttttgttgagtttccaaatggatgaattttcatttggacattacatcactaaattcattagattttgtctgcattggaaagatactcttctagcatatctttcccaaagatatctaatttggattctgtttcatgcaaatttgcatcccggaggttgaagttggagtttgaggttggaaaatatctttgaaggcagaatcagttgagttgtgagggtgaagcctcacatacttctcaacagacatgataaaattcacctgcatgagttggcaggtgggagaaccaaactggatcactgggtaagactactcagtaaagcaatgaactgcttgcttagagaagcatcactatccccattgagaaaaatgtgtggcaagatgatacagctacacagtatcaaatgaatgggtcaattcagcacccccaaatttaattctgtggggaaaaattattgagccagttgtcagtgttctgttacatgactggcagactaaattcttcatcgttgttgttattgttgttgttgtttctcattttcactcgcacggccttattctcataattaaaatctaattcattttctctttagtgttagtagactccaacaacagaagtggcatctgtgtattcataatcagcatttaccctggcaggagactaatcagataggccggtctcagacattaatcctaccatctgatatttttggtgaaggaaaaagtattaattctctttccatcctcctcctcagaaatatagaagccctctttaccaaaatcatcacattttactctgtaatctaccagctaaaagaaaattgcattgtggggagggcagaaagggggtgggggtgggggcgggggggtggggggtggggaagccccacaaagccagattgcagttcttgcccctttttgcgtctgacatgagatgttaaagaattattcatagtgctcacattgggttaggggacactgaactgctttttagatccatgatcagtcatcattcttctaagagattggagctttgctgtttcattaactgtgcagtgtagactaatggtgtttaataaaaatcattcaaaatttcaaactcttttgccagtgacctcaattttgttggctctgtgatttgtatcagactttgaggagggaagggggaagtgaaggaagcctacgtccaggcccctgacaggatgctgcagtagcaagctcaagctcgcctgcctgccagcagttgctggtgagcagcagcatgcagaccagctgtgggaagcctcctgaagaatgccccagctgatgctttcagctgggaatagtttgttcctattggggaactcattgttctccagtctctgcagcaggaagccagctgtcatattcggagggaatttcagatgctttacctttttggttttgtcctgcatcactcatgtggctacgaaagtgtctctgagaatagagcccaatgtggtgacaatgggtagtcaaatgcaccccagatgctcaagccctgttgtggttctgcagtgtttatgaaattgggaggaaggagaccctggacagtaagcaaaattggagacactccaacgaggctaagttaatgccgtgttgcccagaacaagatctagcttctcatttggtcagcctagcatgcaaccagtggtgtgctggtaaaatgtttaacaaccagctcgctgagaatagaaagcacctggtttgcaccatttgccaatttccatggcataaatactaccactttagatgattttaagctaccaactgtgatgtcactgaacacatggttggaaagagatgcacgcagttggctcttgcaagcctgggcaaaaatgcttcaacacgccactggatgcagccagtcagagggttcatatttaatatatgtgttcatgtggacacacacagacacacacacacaaactcacccttacacacacacttcgatgactaaaacaattacatagttttaagatatgaatcaatgtgtgaatgtagaaagcttatgataaggccctagaggtatgggttgccctggaagcctaggttttaagcaggagaatagctgagaagaatgaagccctcctgagctgaaaggagagatggatcaatggagatggttccatcatctccttccatatctcacaggtaaaatgggcactcagaaaaccctcacgattgattttttaaaaagataagtgagtgttttttattttattattattgtcatcattattttgatttacaaatgctatttgtaacttttacatgtaactaggataaagtatttacgggaactctatggagaatagcacaatccagaatttactgtgtttttcttttatgtgacgtggaaactcagtaattctcccaccttcacattgttgttcataagaattttactttagttattagggaatctaagttttttgttaacatttgtttttagttaaaagtatctacttactgttttagctctgaactcaaaccagaatatctctgtatcaattgcatgactattcagaaacaataatccaaaccaaaataattctttttccacccagtacgaagaaaactaagctcagtaacaagaaggcataaactaaagtatataatgaggctttcattaaatacacacacacacacactcacacacacacacatacactttttaaatttttaaattaggcctccacacataaatcattttgaaagtagaatagaaaatctcaaagaattcattctcctggtcctgtgcatcttctgcagttaataagaggtttgtatctggaaagatggaagaacttgttctaaaatcttatttttcaaaaaaaaatttccattttctctctgggcctgtatccatggttgaatgttagccctggaggagatccatgtcttactcgctctttctggcccttctgtcttttgcctctgcaattctttttgtagctggcacgatagcagggactgggggtctatcctttcatggtattgctacaatatttgtccttactggaaaatggtaacatccgggtctgatttaattggcattacacttacacagggactctgagcacccccgtcaccacaccagacagtggaccagttttcacagctacaaagagctagaaatgtgtttaacatcatccagtgcatcccctaattcaaaaccatcctcactaatcaatcatattcacccataaatattacaaatgagattgattccatctcaagacaatttgtcaaatacttaattttcttcctggatgattctacttactggatattttagaaagagaaatgtctgagataaaatccctcacatttactcaatataacaaattactgtttctactcctattctgagtagtgcttctgaagattgtttgctgtagtgttgtctttgataaaatgaatgtcagtagtgagccttttagagataccatgctcagaaatcctctttgggatcagaagatacctaaaattctccccttttgcccacttggttagatgagtgatatattctttggatcctgcaaagaagagattggtttattttcttttctggtggtggtagtggttgtatctgtggctgtgatggttgttgttacttgtctctctctctctctggctctggcttttgctttcctgctagtgttctttctctttccaaacaaatagttaaattaaatgtgagcttctgaattgtacttgttcatactttcaaaacataacagattaataaaaatagatgtgtcctgatttaaaacatgccccctggaaaggcatgctgtattatgaaatcgtgataatataactgcattattacatggcagtataaatattagtctgttgaattcatttgtccaattgtataactttgtggagcagtgttttgacctttgatacataattctggagcaagtggagtggttgcaggcagatgagacagtgttatatcaggatttttcaatcaactttagttggaggcctggcaattacaaacatcttcagatgtttctgtaaccattataaatatgaaaaaaacctcttcaaaaaatttcccatagtacttcagtcaagactttttaggtttatcttttttttttcatttctccttttccttttccattatttttcgatgggggggttgttatcattgactgaagaaatattttgattgcaatggtctctctctctctccccctctctctctctctcctctattctttcctccttccctctgtccatcacccctcattaaaatattgaaatctggagtctttgataaatctgcattagaccaggctatatgctaggaatgaaatctgggcaaatatcgatgggttttcaaagaatgctccatgttcattgggccctttcacaccccacagtgataaatgaaaaggatagaggtagttttttcaaaagagcactttaataatatcctctgagacctaatgcagtttaacaaatgactccacctatttttccagtaggtaaattgactgagacttgcaaaatacccctgagagttgtcaggggtgtcttctgcctggtctatagcgtgtgtgtttgctttgtatctaacaggcacattcacgtctcgtgtactcatatgaagtatttcctaacattcccattagcctgtatataagaatcagaaagataatcccaacatgttgtaaatgaagatgtgactctataacctttctcttcttcctggaaaaaaaaggacattttcatgcatattttaaacagaaattttgtatatttaagtgtcatagaaaatatttattgagtaactgggacacaaatgggaatttaattgtcatcatatgctttgtgtgtggggatgcttaccaacaccatgtcgctggaccattgtggcaagccataactgcacaaagagtacacatcgtcagtgtgtgtgtgtgtgtgtgtgtgcgcgcacacacgtgcgtgtgtgtgtccctgcatgtgcaacatgtctagcttgctgtccttcatgggattttagctttcccttcttgaaaaacattattttacagttccaggaggccctggttacattactatatgaaggcagtgatttgaaatgaaaattcctttcctcttggaagctttggtcataatatcatggttcaattaaacggattccaccggactttgtgatgaaaaaggctctgttaaaatccaattgagtttccaagaggaaattgtagtaggtcaagatgcatgagagggaagatggaggccacctcaactggagaacatgagctgagttgagccctcagtgttgaagttgacttgctccaagctgcagtctaaaaccctggggcccgtgcctggcctatgctccctcccaagtaagtagaggagcagaaccatcaggaacagcctgcctggctcctatgaagaaaacttcctgacgtcctgtccccaaaggaagaccctttccccaagggcaccccaggtggccattaaattgtgatgatcattcagaaagtgcccccttggctttatgagaatccaattagtcttctgaaccaccttttcttgggtgcagatttccaacattcatgctcattgcagatccaccaactgtcactgttcttaacaagcatgctcgtcttgtcagaatttcagtaagttccaatttcctgtacagaccagggtaaactgttctaaaatcaatcaattaatgaaatgttatctggtttttaaaagctggtttcatgtgctttatgtgtataaaactatatctgcctgtgtggctttgcatttcaaatgtgtggcgcacaagcgttttgttggtgctttgttctcagtacagtaactctgtgtacaaacattttaatgtggttttgttgttttccaacaagatgtctctgtaaaaatgatattggctgagctggtgcgttggtttctctcatagaggcattaactatactgccaatgcattgaattatttaaaaatgcaaaataaaatttttatgaaaatctca

SEQ ID NO: 66588 - DNA, 2859 bp, Artificial Sequence
  derived and/or modified sequence
atgaagttcaagcggcggcaccaggccttccccagcttcttcaagatgaaggtgagcctgcccagcgaccccagctgcgtcgaggagatcctgagggagtctcagcacctgaccccaggtttcacgttacaaaagtggaatgaccctacaacccgcgctagtacgaaaagcgtctcattcaagagcatgctggaggacgacctcaaactgtccagcgacgaagacgacttggagcccgttaaaaccctaactacacaatgcactgctacggagctgtatcaggcagtggagaaggccaaaccgagaaacaatcccgtgaacccgccccttgccaccccccaaccccctcctgctgtccaggcctctgggggttcaggctccagtagtgaatcagagtccagttccgagagcgactctgacactgagagctctacaactgactccgagtccaacgaagcaccaagggtggccaccccagagcctgagccacccagcacaaacaagtggcaactggacaaatggctgaacaaggtcacttcccagaataagtccttcatttgcgggcagaacgaaacgcccatggaaacaattagccttccaccccctataattcaacccatggaagtgcagatgaaggtcaaaacaaatgctagtcaggttcccgcagagcctaaggagcggccacttttatccctgattagagagaaagccaggcctagacccacccagaagatccccgagactaaagccttgaaacataagctttccactacttccgaaactgtcagccagcgtactattggcaaaaagcaaccaaagaaagtcgaaaagaacacttcaacagatgagtttacttggcctaaaccaaatatcaccagctcaaccccaaaagagaaggagtcggttgaattgcatgatccgcccagggggcgcaacaaggccaccgcccataagccagctcctaggaaagaaccaaggcccaatatcccgctcgcccctgagaaaaagaaataccggggcccgggcaaaatcgtcccaaaatccagagaattcatcgaaactgactctagcacaagcgacagcaacaccgaccaggaggagaccctgcagatcaaggtcctcccgccttgcatcatttctgggggaaatacagcaaaatcaaaggaaatctgcggagcttcactgaccctaagtacactgatgagcagctctggatcaaacaacaacctgagtattagcaatgaagagcccaccttctctcccatacctgtcatgcaaacagagatcttatctccacttagggatcatgaaaacttgaagaacctgtgggtcaaaattgacctggacctactgagccgggtgcctggacatagtagtctgcacgccgccccagccaagcccgaccataaggaaaccgccaccaagcctaaaaggcagacggccgtgaccgctgtggaaaagcctgcccctaaaggcaagcgcaagcataaaccaatcgaggtagcggaaaagatccccgaaaaaaaacaaaggctggaagaggctaccaccatatgtctcctgcccccctgcatttcccccgctccgcctcataagccacctaatacaagggagaataactcctctagacgcgctaatcggagaaaggaagagaagctttttccaccacccttgtctcctcttcccgaagatccgccccggaggcgcaatgtttctgggaacaacggccctttcggtcaggacaagaatattgccatgacaggacaaatcactagtacaaaacccaagagaactgaaggcaaattctgtgccacgttcaagggaatttcggtgaacgaaggggatacaccgaagaaggccagtagcgctactatcacagtcactaataccgcaattgccacagctacggtgactgccacagcaatcgtcactacaactgttaccgccactgctacagctacagctactacaacgacaacgaccacaacgataagcactataactagtaccatcacgacagggctgatggactcttctcatctggagatgacaagctgggccgctctccctttgttgtcaagtagctccaccaatgtccgacgacctaagctaacgttcgatgactctgtgcataacgcggattactacatgcaggaggctaaaaagctgaagcacaaggctgacgccctgttcgagaagtttggaaaagccgtgaattatgcggacgcagcgttgtccttcacagaatgcggtaacgcgatggagagggaccccctagaggcgaagtccccgtatacaatgtattccgaaactgtagagctcctgagatatgccatgcgattaaaaaacttcgcaagtccactggccagcgatggcgacaagaaattggcagtcctttgttatcggtgcttaagcctcctttacctcagaatgtttaaactgaagaaagatcacgccatgaaatactcgcggtctcttatggaatatttcaaacagaatgcatccaaggtcgctcagataccaagcccctgggtgtccaacggaaagaacaccccgtcccccgtttccctgaacaacgtgagcccaatcaacgccatgggaaactgtaacaacggaccagttactatccctcagcgcattcaccatatggccgcatctcatgttaatatcacctcaaacgttctgcgcggctacgagcattgggatatggccgataagctcacccgcgaaaacaaggaatttttcggagatttagataccttgatgggaccactcacacagcactcatccatgacaaacctcgtgcgttacgtccgccaggggctatgctggctgcgtatcgatgctcatcttctctag

SEQ ID NO: 66589 - DNA, 2859 bp, Artificial Sequence
  derived and/or modified sequence
atgaaattcaagcgcagacatcaggccttcccttcttttttcaagatgaaagtctctcttccaagtgatccaagctgtgtagaggagattctgcgagagagccagcatctgacgccaggcttcacactgcagaagtggaacgatccaacaacgcgggctagcacaaagtccgtgagcttcaagagtatgctggaagacgatctcaagctgagctcagacgaggacgatttagagccggtcaagaccttgaccactcagtgtacagccaccgagttataccaggccgtggagaaggctaaaccgaggaacaaccctgtcaacccccctctggcgactcctcagccaccgcctgctgtgcaagcctctggcggaagcggaagttcatctgagtcagagtctagcagtgaaagcgacagcgacacagaaagctcaacaacggattccgaaagtaacgaggcacctcgggtcgctacgcccgagccagaaccaccatccacaaacaagtggcagctcgataaatggctcaataaggtgaccagtcagaacaaaagcttcatttgtggccagaatgaaacgccaatggagacaatatcgcttcccccaccgattatccaaccaatggaagtccagatgaaggtcaaaacgaatgcctcacaagtccccgctgagcccaaagaaaggcctttgttgtcgctcatcagagagaaggcaaggccgcgaccaactcagaagattccagaaactaaggccctgaaacataagctgtccactacctctgaaaccgtgtcccaacgcactatcggaaagaagcagcctaagaaggtggagaagaacacctcgacagacgagttcacttggcccaagccgaacatcacgtcttctactcctaaagaaaaagagagcgtcgagctgcacgacccccctaggggtagaaataaggccacagctcataaacctgctccacgcaaggaacccaggcctaatataccactggccccagaaaagaagaaataccgcggaccgggaaagattgtaccaaaatctagggaattcattgagaccgactcttcaaccagcgactcaaatacggaccaggaggagacccttcaaatcaaggtattacccccttgtataatctctggcggaaacacagcaaagagtaaagagatctgtggggctagtcttacactcagtacactcatgagttcctctgggagcaataacaacctctcaatatctaacgaggaacctaccttttcccccatacccgttatgcaaacagagatcctctcacccttgcgcgatcatgagaacctgaaaaacctctgggtgaaaatcgatttggatctgttgagtcgggtgcccggacactcaagcctccacgctgcacctgctaagccagatcacaaggagacagcaaccaaaccaaaaagacagacggccgtcacggcagttgagaaacctgccccaaagggaaaacgcaagcataaacccatcgaggtggctgagaaaattcctgagaagaaacagaggctggaagaagctacaacaatatgcctacttccaccttgcatatcccccgctccccctcataagcctccaaacaccagggaaaacaactcgtcaagaagggctaataggcgtaaggaggagaaactgttccccccaccactatcaccactgccagaagatcccccacgccgacggaacgtgtctgggaataacgggcctttcggacaggacaagaacattgccatgaccggacagatcacatccaccaaacctaagcggaccgagggcaagttttgcgcaacatttaaagggatatccgtgaatgagggtgacactccgaagaaggccagtagcgccacaattactgttaccaacacagctatcgcaacagccaccgtaaccgctactgctatcgtgaccacaaccgttaccgcgacagccactgccacagcgacaactacaactactacaacaaccatcagcacaattacaagcaccattacaactggtctaatggattcctcccacctggagatgactagctgggcggctctgcccctcctgagctctagttcaaccaacgtgaggcgacccaagctgactttcgatgattctgtgcacaatgcagactactacatgcaagaggccaaaaagttgaagcataaggccgacgctttattcgaaaagtttgggaaagctgttaattatgccgacgctgcactaagttttactgaatgcggaaatgccatggaaagggatcccttggaagcgaagagcccctacaccatgtactctgagacagtcgaactgctgaggtatgctatgcggctgaagaattttgcttcccccctcgccagtgacggggacaagaagttagcagttctgtgttatcgctgcctgagcctcctttaccttaggatgttcaagctaaaaaaggatcacgccatgaagtactcccggtcactgatggaatactttaaacaaaatgcttctaaggtggcccagattccctccccctgggtatccaacgggaagaataccccttcgcctgtatctctgaataacgtgagtcccattaatgcgatgggcaactgtaacaacggacctgtgacaattccacaacggatccaccacatggcagcctcacatgtcaatatcacgtccaatgtgttgcgaggttacgagcactgggacatggccgacaagctaaccagggagaacaaagagtttttcggcgatctggataccttgatgggccctctgactcagcactcatctatgacaaacttggtgcggtacgttagacaaggcctttgttggttacgtattgacgcccacctactgtag

SEQ ID NO: 66590 - DNA, 2859 bp, Artificial Sequence
  derived and/or modified sequence
atgaagttcaagagaagacaccaggccttccccagcttcttcaagatgaaggtgagcctgcccagcgaccccagctgcgtggaggagatcctgagagagagccagcacctgacccccggcttcaccctgcagaagtggaacgaccccaccaccagagccagcaccaagagcgtgagcttcaagagcatgctggaggacgacctgaagctgagcagcgacgaggacgacctggagcccgtgaagaccctgaccacccagtgcaccgccaccgagctgtaccaggccgtggagaaggccaagcccagaaacaaccccgtgaacccccccctggccaccccccagcccccccccgccgtgcaggccagcggcggcagcggcagcagcagcgagagcgagagcagcagcgagagcgacagcgacaccgagagcagcaccaccgacagcgagagcaacgaggcccccagagtggccacccccgagcccgagccccccagcaccaacaagtggcagctggacaagtggctgaacaaggtgaccagccagaacaagagcttcatctgcggccagaacgagacccccatggagaccatcagcctgcccccccccatcatccagcccatggaggtgcagatgaaggtgaagaccaacgccagccaggtgcccgccgagcccaaggagagacccctgctgagcctgatcagagagaaggccagacccagacccacccagaagatccccgagaccaaggccctgaagcacaagctgagcaccaccagcgagaccgtgagccagagaaccatcggcaagaagcagcccaagaaggtggagaagaacaccagcaccgacgagttcacctggcccaagcccaacatcaccagcagcacccccaaggagaaggagagcgtggagctgcacgacccccccagaggcagaaacaaggccaccgcccacaagcccgcccccagaaaggagcccagacccaacatccccctggcccccgagaagaagaagtacagaggccccggcaagatcgtgcccaagagcagagagttcatcgagaccgacagcagcaccagcgacagcaacaccgaccaggaggagaccctgcagatcaaggtgctgcccccctgcatcatcagcggcggcaacaccgccaagagcaaggagatctgcggcgccagcctgaccctgagcaccctgatgagcagcagcggcagcaacaacaacctgagcatcagcaacgaggagcccaccttcagccccatccccgtgatgcagaccgagatcctgagccccctgagagaccacgagaacctgaagaacctgtgggtgaagatcgacctggacctgctgagcagagtgcccggccacagcagcctgcacgccgcccccgccaagcccgaccacaaggagaccgccaccaagcccaagagacagaccgccgtgaccgccgtggagaagcccgcccccaagggcaagagaaagcacaagcccatcgaggtggccgagaagatccccgagaagaagcagagactggaggaggccaccaccatctgcctgctgcccccctgcatcagccccgcccccccccacaagccccccaacaccagagagaacaacagcagcagaagagccaacagaagaaaggaggagaagctgttccccccccccctgagccccctgcccgaggacccccccagaagaagaaacgtgagcggcaacaacggccccttcggccaggacaagaacatcgccatgaccggccagatcaccagcaccaagcccaagagaaccgagggcaagttctgcgccaccttcaagggcatcagcgtgaacgagggcgacacccccaagaaggccagcagcgccaccatcaccgtgaccaacaccgccatcgccaccgccaccgtgaccgccaccgccatcgtgaccaccaccgtgaccgccaccgccaccgccaccgccaccaccaccaccaccaccaccaccatcagcaccatcaccagcaccatcaccaccggcctgatggacagcagccacctggagatgaccagctgggccgccctgcccctgctgagcagcagcagcaccaacgtgagaagacccaagctgaccttcgacgacagcgtgcacaacgccgactactacatgcaggaggccaagaagctgaagcacaaggccgacgccctgttcgagaagttcggcaaggccgtgaactacgccgacgccgccctgagcttcaccgagtgcggcaacgccatggagagagaccccctggaggccaagagcccctacaccatgtacagcgagaccgtggagctgctgagatacgccatgagactgaagaacttcgccagccccctggccagcgacggcgacaagaagctggccgtgctgtgctacagatgcctgagcctgctgtacctgagaatgttcaagctgaagaaggaccacgccatgaagtacagcagaagcctgatggagtacttcaagcagaacgccagcaaggtggcccagatccccagcccctgggtgagcaacggcaagaacacccccagccccgtgagcctgaacaacgtgagccccatcaacgccatgggcaactgcaacaacggccccgtgaccatcccccagagaatccaccacatggccgccagccacgtgaacatcaccagcaacgtgctgagaggctacgagcactgggacatggccgacaagctgaccagagagaacaaggagttcttcggcgacctggacaccctgatgggccccctgacccagcacagcagcatgaccaacctggtgagatacgtgagacagggcctgtgctggctgagaatcgacgcccacctgctgtag

SEQ ID NO: 66591 - protein, 2581 aa, Artificial Sequence
  derived and/or modified sequence
MADPIMDLFDDPNLFGLDSLTDDSFNQVTQDPIEEALGLPSSLDSLDQMNQDGGGGDVGNSSASELVPPPEETAPTELSKESTAPAPESITLHDYTTQPASQEQPAQPVLQTSTPTSGLLQVSKSQEILSQGNPFMGVSATAVSSSSAGGQPPQSAPKIVILKAPPSSSVTGAHVAQIQAQGITSTAQPLVAGTANGGKVTFTKVLTGTPLRPGVSIVSGNTVLAAKVPGNQAAVQRIVQPSRPVKQLVLQPVKGSAPAGNPGATGPPLKPAVTLTSTPTQGESKRITLVLQQPQSGGPQGHRHVVLGSLPGKIVLQGNQLAALTQAKNAQGQPAKVVTIQLQVQQPQQKIQIVPQPPSSQPQPQQPPSTQPVTLSSVQQAQIMGPGQSPGQRLSVPVKVVLQPQAGSSQGASSGLSVVKVLSASEVAALSSPASSAPHSGGKTGMEENRRLEHQKKQEKANRIVAEAIARARARGEQNIPRVLNEDELPSVRPEEEGEKKRRKKSAGERLKEEKPKKSKTSGASKTKGKSKLNTITPVVGKKRKRNTSSDNSDVEVMPAQSPREDEESSIQKRRSNRQVKRKKYTEDLDIKITDDEEEEEVDVTGPIKPEPILPEPVQEPDGETLPSMQFFVENPSEEDAAIVDKVLSMRIVKKELPSGQYTEAEEFFVKYKNYSYLHCEWATISQLEKDKRIHQKLKRFKTKMAQMRHFFHEDEEPFNPDYVEVDRILDESHSIDKDNGEPVIYYLVKWCSLPYEDSTWELKEDVDEGKIREFKRIQSRHPELKRVNRPQASAWKKLELSHEYKNRNQLREYQLEGVNWLLFNWYNRQNCILADEMGLGKTIQSIAFLQEVYNVGIHGPFLVIAPLSTITNWEREFNTWTEMNTIVYHGSLASRQMIQQYEMYCKDSRGRLIPGAYKFDALITTFEMILSDCPELREIEWRCVIIDEAHRLKNRNCKLLDSLKHMDLEHKVLLTGTPLQNTVEELFSLLHFLEPSQFPSESEFLKDFGDLKTEEQVQKLQAILKPMMLRRLKEDVEKNLAPKQETIIEVELTNIQKKYYRAILEKNFSFLSKGAGHTNMPNLLNTMMELRKCCNHPYLINGAEEKILTEFREACHIIPHDFHLQAMVRSAGKLVLIDKLLPKLKAGGHKVLIFSQMVRCLDILEDYLIQRRYLYERIDGRVRGNLRQAAIDRFSKPDSDRFVFLLCTRAGGLGINLTAADTCIIFDSDWNPQNDLQAQARCHRIGQSKAVKVYRLITRNSYEREMFDKASLKLGLDKAVLQSMSGRDGNITGIQQFSKKEIEDLLRKGAYAAIMEEDDEGSKFCEEDIDQILLRRTTTITIESEGKGSTFAKASFVASENRTDISLDDPNFWQKWAKKADLDMDLLNSKNNLVIDTPRVRKQTRHFSTLKDDDLVEFSDLESEDDERPRSRRHDRHHAYGRTDCFRVEKHLLVYGWGRWRDILSHGRFKRRMTERDVETICRAILVYCLLHYRGDENIKGFIWDLISPAENGKTKELQNHSGLSIPVPRGRKGKKVKSQSTFDIHKADWIRKYNPDTLFQDESYKKHLKHQCNKVLLRVRMLYYLRQEVIGDQAEKVLGGAIASEIDIWFPVVDQLEVPTTWWDSEADKSLLIGVFKHGYEKYNTMRADPALCFLEKAGRPDDKAIAAEHRVLDNFSDIVEGVDFDKDCEDPEYKPLQGPPKDQDDEGDPLMMMDEEISVIDGDEAQVTQQPGHLFWPPGSALTARLRRLVTAYQRSYKREQMKIEAAERGDRRRRRCEAAFKLKEIARREKQQRWTRREQTDFYRVVSTFGVEYDPDTMQFHWDRFRTFARLDKKTDESLTKYFHGFVAMCRQVCRLPPAAGDEPPDPNLFIEPITEERASRTLYRIELLRRLREQVLCHPLLEDRLALCQPPGPELPKWWEPVRHDGELLRGAARHGVSQTDCNIMQDPDFSFLAARMNYMQNHQAGAPAPSLSRCSTPLLHQQYTSRTASPLPLRPDAPVEKSPEETATQVPSLESLTLKLEHEVVARSRPTPQDYEMRVSPSDTTPLVSRSVPPVKLEDEDDSDSELDLSKLSPSSSSSSSSSSSSSSTDESEDEKEEKLTDQSRSKLYDEESLLSLTMSQDGFPNEDGEQMTPELLLLQERQRASEWPKDRVLINRIDLVCQAVLSGKWPSSRRSQEMVTGGILGPGNHLLDSPSLTPGEYGDSPVPTPRSSSAASMAEEEASAVSTAAAQFTKLRRGMDEKEFTVQIKDEEGLKLTFQKHKLMANGVMGDGHPLFHKKKGNRKKLVELEVECMEEPNHLDVDLETRIPVINKVDGTLLVGEDAPRRAELEMWLQGHPEFAVDPRFLAYMEDRRKQKWQRCKKNNKAELNCLGMEPVQTANSRNGKKGHHTETVFNRVLPGPIAPESSKKRARRMRPDLSKMMALMQGGSTGSLSLHNTFQHSSSGLQSVSSLGHSSATSASLPFMPFVMGGAPSSPHVDSSTMLHHHHHHPHPHHHHHHHPGLRAPGYPSSPVTTASGTTLRLPPLQPEEDDDEDEEDDDDLSQGYDSSERDFSLIDDPMMPANSDSSEDADD

SEQ ID NO: 66592 - DNA, 7746 bp, Artificial Sequence
  derived and/or modified sequence
atggcggatcccattatggacctgttcgatgatcccaacctgtttgggttggacagcttgaccgacgattcctttaatcaggttacccaggacccaatcgaggaggcactcggtctgccatccagtctggactccttggaccagatgaatcaggacggcggggggggcgatgtgggcaactcttccgcgagtgagttggtcccgcccccagaagagactgcaccgaccgagcttagcaaagagagtacagccccagccccagaaagcatcaccttgcacgactacaccactcaacctgcctctcaagagcagccagcgcaacctgtgctccagacatcgacacctacctctggcttgctccaggtcagtaaatcacaggagattctttcacaagggaacccttttatgggagtttccgcgactgcagttagtagctcttccgccggcgggcagcccccccaatctgcaccaaagatcgtaatccttaaggcccccccaagcagctctgtcaccggggcccatgttgcccagattcaggcccaaggcatcaccagcacagcccagcccctcgtagcaggtaccgcaaacggagggaaggtgaccttcacaaaggtattgacagggacccctttgaggcctggcgtgagcattgtctcagggaatactgtgttggccgccaaggtcccaggtaatcaggcagctgttcagcgcatcgtccagcccagtcgccctgtcaagcagctcgttctacagcccgtcaaagggagtgctcctgccggtaaccctggcgctacagggccacccttgaagccggcagtgacactgacatcaacgcctacgcagggagaatccaagcgaattacgctcgtgctccaacagccacagagcggaggaccccagggacatagacacgtggttctggggagtctcccaggcaagatagtgctgcaggggaatcagttggccgctctgactcaggccaaaaacgctcagggccagcccgctaaagttgtcaccatccagctgcaggtgcagcaaccacagcaaaaaatccagatagtgcctcagccaccctcttcccagccacaaccccaacagccgccgagtactcagccagtcacgctgtcatcagtccagcaggcccagattatgggccccgggcagagtccgggtcagagactgtccgttccagtgaaggtggtgctacaaccccaggccgggagctcccagggcgccagctctggtctttctgttgtgaaggtgctgagtgcttcggaggtcgcagcactctcatctcccgcatcttccgcaccacatagtggcggtaagaccggaatggaggagaaccgtaggctggaacatcagaagaaacaagagaaagctaacaggatagtagcagaggctatcgcccgggcccgggcccgtggcgagcagaacatccctcgggtcctgaatgaggacgaattgccctcggtccggccagaagaggagggtgaaaagaaaagacgaaagaaatctgccggagagcgcctcaaggaggagaaacctaagaagtctaagaccagtggcgctagcaaaaccaaagggaaatctaaactcaacacaataacgcctgtggtgggtaagaaacggaagcggaatacctcttcagacaatagcgatgtagaagtaatgccagctcagtcaccccgcgaggacgaagaatcttccattcagaaacgaaggtcaaatcggcaggtgaaaaggaaaaaatatacagaagatctggacattaagatcacagatgacgaagaggaggaggaggtcgacgttactggccctatcaaaccagagccgatcctccccgagcccgtgcaagagcctgacggggagacactaccatctatgcagttcttcgtggagaacccctccgaggaagatgctgcgattgtggacaaggtgctgtcgatgaggattgtcaagaaggagctaccatctggacagtacaccgaggcagaggagttcttcgtgaagtataagaactattcctatctgcattgtgagtgggctaccattagtcagctcgagaaggacaaaagaattcaccagaagctgaagcggttcaagactaaaatggcccaaatgaggcactttttccatgaggatgaagagcccttcaaccctgattatgtagaagtggaccggattcttgacgaaagccatagcatcgacaaggataacggcgaaccagtgatctactacctagttaaatggtgttctttaccttatgaagacagcacctgggagcttaaagaggatgtggacgaggggaagattcgtgagtttaaaaggattcagtcacgccatccagaacttaaaagagtaaaccggccccaggcttccgcctggaagaaacttgagctgagccatgagtataagaaccggaaccagttgcgcgagtaccaactcgaaggcgtcaattggctcctcttcaactggtataatagacagaattgcatactggctgatgagatgggactgggcaagaccatccaatctattgcctttctgcaggaggtttataatgtcggtatccatgggccctttctcgtgatagctcctttgtcaacgatcaccaattgggaacgggaatttaacacctggacagaaatgaataccatagtgtaccacggatccctcgccagccgccagatgatccagcagtatgaaatgtattgtaaagattcacgtggaagattaattccaggcgcttataagtttgacgcactgatcaccacattcgagatgatcctgtcagactgtcccgagctgcgcgaaatcgaatggcggtgcgtgattattgacgaggctcaccgcctgaagaaccggaactgtaaactgctcgacagtctgaagcacatggacctggagcacaaggtgctgctgactggcacgccactccaaaataccgttgaagagctgttttcccttctgcactttctggaaccatcgcaattcccctccgaatccgagttcctcaaggactttggcgatctaaagactgaagaacaggtacagaagctgcaggccatcctaaagccgatgatgctgcgacgtttgaaggaggatgtggagaagaacttggccccaaagcaggagactataatcgaagtggagctgactaatattcaaaaaaaatactatcgcgccatcctggaaaagaatttcagcttcttgtcgaagggagccggccacacaaacatgcccaatctgctgaatactatgatggaactgcgcaagtgctgcaaccacccctatctaattaacggagctgaagagaaaatactgactgagttcagagaggcctgccacattattccacatgatttccatctgcaggccatggtgagaagcgcgggaaagctagtcctaattgataagctccttcctaagctcaaggccgggggtcacaaagttctgatattcagccagatggtgagatgtctggacatcctggaagattatctgattcaaaggcggtatctatacgagcgaattgacggacgggtgagaggaaacttaaggcaggcggccattgacagattctcaaaacccgacagcgaccgcttcgtcttcctgctctgcacacgggccggagggctggggataaatctgaccgccgccgatacctgcattatttttgatagcgattggaaccctcagaacgatcttcaggcacaggcacggtgtcacaggatcggccagtccaaagccgtgaaggtgtatagactgatcacgcggaactcctatgaacgtgaaatgtttgacaaggcctccctgaagcttgggcttgataaagctgtgctccagagcatgagcggccgcgacggaaacattaccggtatccagcagttttctaaaaaggaaattgaggatctattacgaaagggagcctatgccgcgatcatggaagaagacgacgagggttctaaattttgcgaggaagacattgatcagattctactgcgccggaccactaccatcacaatcgaatccgaaggaaagggctctacattcgccaaggcatctttcgttgccagtgaaaacaggacagacatctcactcgatgaccctaatttctggcaaaaatgggctaagaaggctgatctggatatggacctgctcaatagcaaaaacaatcttgtgatcgatacaccccgggtgcggaaacagacgcgccacttcagcaccttgaaggatgacgatctagtggaattctccgatctggaaagcgaggacgacgaaaggccacgcagccgaaggcacgaccggcaccacgcctacggtcgcacagactgtttccgggtggagaaacacctgcttgtgtacggatggggacgatggagggatattttaagccatgggcgattcaagcgacgcatgaccgagagagatgtggaaacgatctgccgggctattctcgtgtactgtctgctacattatagaggggatgagaacattaaaggtttcatatgggatctcatttccccagccgagaacggaaaaaccaaagagctccagaatcacagcggactgtctatcccagttccgagaggtcggaagggaaaaaaggtcaagtcacagtccactttcgatatccacaaggcggactggatcaggaagtacaacccagatacactcttccaagacgaatcatataagaaacatcttaagcaccagtgtaataaggtgctgctccgagttcggatgttgtactacttacggcaagaggtgatcggggaccaggccgagaaggtactgggaggcgcaatcgccagcgaaattgacatctggttccctgttgtggatcagttggaggtgccaacaacatggtgggactctgaagctgacaagtcgcttttaataggcgtatttaaacatggatacgagaaatacaatacaatgagggctgatccagccctttgtttcctggagaaggcaggcagacccgacgacaaggctattgcggccgagcaccgtgtcctagataatttttccgatattgtagaaggagtcgattttgacaaagactgcgaagacccagaatacaagcccctgcagggccctccgaaggaccaggatgacgagggagatcccctcatgatgatggatgaggagatttcagtgatagatggggatgaagcacaggtgacccagcagcctggccatctgttctggccacccggaagcgccctgaccgcgcgtctgcggcggctggtcaccgcttaccagcggtcttacaagcgggagcagatgaaaattgaagcagcagaaagaggagacaggcggcgacgcagatgtgaggcggccttcaagctgaaagagatcgcacgtcgggaaaagcagcaaagatggacccgtcgggagcaaacagatttctatagagtcgtgtccacattcggggtggaatatgatccggacacgatgcaattccattgggatcgcttccgaaccttcgctcgacttgataaaaagaccgatgagtccctgacgaagtacttccatggcttcgtggcaatgtgtcgccaggtatgtcgacttccccccgctgctggggatgagccccctgacccgaatctctttatcgagccgatcactgaagagagggcttctcgtacgctgtatcggattgaactgcttaggcggctgcgcgaacaggtactgtgtcatccattgttagaggatcggctcgcactgtgtcaacctccgggaccggagcttcctaagtggtgggagcccgtccgtcacgatggggaactcctccggggagctgctaggcacggcgtgtcccagactgattgcaacattatgcaggacccggacttctcatttctcgctgcacggatgaactatatgcagaaccaccaggcaggggcgcctgcaccttctttaagtagatgttctactccactgctccaccaacaatacacttcgaggacagcgtctcctctccctctccgccctgacgctcctgtagaaaagagccccgaggaaacggctacacaagtaccctctcttgagagtctcactctgaagcttgaacacgaggttgtcgcaagaagtagaccgactccgcaagactacgaaatgagggtctctcccagtgataccacaccactggtctcacgctccgtgccccccgtgaagcttgaggatgaggacgatagtgacagcgagctggatctttccaaactctctccctcctccagcagctcctcttccagctcttcaagttcatcctctacagatgaatcagaggacgagaaggaagaaaaattgacagaccaaagcaggtctaagctttacgacgaggagtcgctgctatccctcaccatgtcccaggacggcttcccaaacgaggacggagagcagatgacaccagaactgcttctgctgcaggagaggcagcgtgcatctgaatggcctaaggacagagttctgataaacagaatcgatctggtatgtcaagccgttctaagcggcaagtggccaagttctcggcgttctcaggagatggtcacagggggtatccttgggcccggcaatcatcttctggactcgccctcccttactccaggggaatacggcgactctccagtgcccactccacggtcctcctctgccgcgtccatggctgaggaggaggcaagtgctgtgagcactgccgccgcccagttcacaaagctaaggaggggcatggatgagaaagaatttactgtccagatcaaggatgaagagggtctcaaactgaccttccaaaaacacaaacttatggctaacggtgtcatgggggacgggcaccctctcttccataaaaagaaaggaaacagaaaaaagctggtcgaattagaggtggaatgtatggaggagcccaatcaccttgacgtggatctcgaaactaggatcccagtgatcaacaaagttgacggcaccctgttggtgggagaggatgccccacgacgcgccgaattggaaatgtggctgcaaggccatcctgagtttgccgtcgaccctcggttccttgcctatatggaggatcggcgcaaacagaagtggcagagatgcaagaaaaacaacaaagcggagcttaactgcttgggaatggaaccagtgcaaacagctaactcgaggaacggaaagaaggggcatcataccgagacagtgttcaatcgtgtattgcctggaccgatcgccccagagtcgtcgaaaaagagagcccgcaggatgcgaccagacctctctaagatgatggccttgatgcaaggaggatctaccggtagcctgagtttgcataatacgtttcagcacagctctagcgggctccagagcgtctcgtcacttggccacagtagcgcaacttctgcctccttgcccttcatgcctttcgttatgggcggagcgccctcaagcccgcacgtcgatagttctactatgctgcaccatcaccatcaccaccctcatcctcaccaccaccatcaccaccacccaggattacgggccccaggttatccatctagccctgttaccaccgcttctggcaccacattacgtctgcctcccctccaacccgaggaggatgacgacgaggacgaggaggacgacgatgatttatcccagggctatgactcgtccgaaagggactttagcctgatcgacgatcctatgatgccggctaattcagacagtagcgaagacgctgacgactag

SEQ ID NO: 66593 - DNA, 7746 bp, Artificial Sequence
  derived and/or modified sequence
atggcagatcccatcatggacttattcgatgaccccaatctcttcggtttagattcactgacggatgactcttttaaccaggtcacccaggatccgattgaggaagctctcggcctgcccagctctttggacagtctggatcagatgaaccaggatggtggtggtggagacgtaggaaactcgagtgcgtccgaactggtcccgcctccagaagagactgcacccacagaacttagcaaggaatcgaccgctcccgccccagaatcaatcacccttcatgattatactactcagccagcttcacaagagcagcctgcgcagcccgtccttcagaccagcactccaacctctgggctgcttcaagtcagcaaatcacaagaaattttgtcccagggaaacccctttatgggcgtttcggccacggccgtatctagcagtagtgccggcggtcagcccccacagtctgcccccaagattgttattcttaaggcccctcccagctcatccgttacaggcgctcacgtagcccagatccaggcccagggaatcacatcaactgcacagccactcgtggccgggaccgcaaatgggggtaaggtgaccttcaccaaagttctcaccggcacccctctgaggccaggagtctccatcgttagtggaaatacggttcttgctgccaaagtccccggcaaccaggctgctgttcagagaatcgtgcaaccaagcaggccagtcaagcagctcgtgctccagccagtgaaggggtctgccccagccgggaatcctggtgcaacagggcctccactgaaacccgctgtgactctcacctctacacccacccaaggcgagtctaagcgaatcaccctggtgctacagcagccccagtcggggggtccccaaggccacagacacgttgtactgggtagcctgccagggaagatcgtgctccagggtaatcaattggcagcgttaacccaggcaaagaatgcccaagggcagccagccaaggtggttaccatacagttacaggtgcagcagcctcagcagaaaatccagatcgtgcctcaaccaccttcctcgcaaccacagcctcagcaacctcctagcacacagccagtgaccctttcttcagttcaacaggctcagatcatggggcctggtcagtcgcccggccagcgcctgtccgtacctgttaaggtggtgctgcagccccaggctggatcctcacaaggcgcgtctagtggtctgtccgtcgtgaaagtgctgagtgcttctgaggtagcggccctctcatctcccgcgagcagcgcaccacacagcggcgggaaaacaggtatggaggagaaccgcaggctagaacaccaaaagaagcaggaaaaagctaaccgcatcgtagctgaggccatcgcacgtgctagagcccgcggagaacagaacattcctcgggtgctcaatgaggatgaactcccatccgtccggccagaagaggaaggggagaaaaagcgcagaaaaaagtctgccggagaacggctgaaagaagagaagcctaaaaagtccaagacctccggtgccagtaagactaagggtaaatcaaagctgaacaccattacaccagttgttgggaagaagagaaaaagaaacacatccagcgataactcagatgtggaagtgatgccggcccagagcccccgggaagatgaagagtcaagcatccagaaacgacgatcgaatcgtcaagtgaagcgcaaaaaatataccgaggacctagatataaaaatcacagatgacgaagaggaagaagaggtagatgtgacaggcccaataaagcccgagccaatactgcctgaacccgtccaagagcctgacggggagacactaccctcaatgcagttctttgttgagaacccgtccgaagaggatgccgcaattgtcgataaggtcctcagcatgcgaatagtaaaaaaagaactcccatcgggccagtacacagaggctgaggagttctttgtcaaatataaaaactactcttatttgcattgtgaatgggcaactatttcacaactggaaaaagataagcggatccaccaaaaactgaagagattcaagactaaaatggcccaaatgagacacttttttcacgaggatgaagagccgttcaaccccgattacgtcgaggtcgaccggattttagatgagtctcactccatcgataaggacaatggagaacccgtcatatactacctggtaaaatggtgttctctaccatacgaggattcaacgtgggagcttaaggaagacgtcgatgaaggtaaaatcagagagttcaaaagaatccaatcaaggcacccggagcttaagagagtgaaccgccctcaggcgagtgcatggaagaagctggaactatcccacgaatacaaaaaccggaatcagctcagggagtaccagctcgagggcgtgaattggctcctcttcaattggtacaaccggcagaattgcattctggctgatgaaatggggttgggcaaaactatccaaagcatcgcttttctgcaggaggtgtacaacgtgggcattcacgggcccttccttgtgatcgcccccctcagcacaattaccaattgggaaagggagttcaacacttggactgaaatgaacacaatagtgtaccatggatccctcgcaagccgacagatgatccagcagtatgagatgtattgcaaggatagtcgcggcaggcttatccctggagcgtataaatttgatgcactgattacgacctttgagatgatcctctccgattgtcctgaactccgggagatagagtggcgctgtgtcattattgacgaggcacacaggctgaagaatcggaactgcaagctgctggattcacttaaacatatggatttggaacataaggtgctattgaccggtacccccctgcagaataccgtcgaagagttattctccctcttgcattttctggagccttcccagttcccatccgagtccgagtttctgaaggactttggtgacctaaagaccgaggaacaggtgcagaagttgcaagcgatactgaagccaatgatgctacgcagactgaaggaagacgttgaaaaaaacctagctcccaaacaggaaactatcattgaggtcgaactaactaacatacagaagaaatattatagagctatcctagagaagaacttttccttcctttcaaaaggtgcaggacatacaaatatgcccaacctgctcaacacaatgatggaacttaggaagtgctgcaaccatccctaccttattaacggcgccgaggagaaaatcctcaccgagtttcgagaggcctgccacatcataccacatgattttcatctgcaggcgatggtaaggtcagccggcaaactggttctgatcgataagctccttccaaagctaaaggcaggggggcataaggttttgattttttcacagatggtgcgctgcctggacatcctggaagactatctgattcagcgcagatatctctatgaacgaattgacgggagagttagaggaaacctgagacaggctgcaattgatcgcttcagcaagccggacagtgataggttcgtctttctcttatgtactagggctggcggcctagggataaatttgacagcagctgatacgtgtatcattttcgacagtgattggaatccacagaatgatctccaggcccaggcacggtgccatagaataggacagagtaaggcagtgaaagtttatcgcctgatcaccaggaactcttatgagagagagatgtttgacaaggcctcgcttaagctcgggttagacaaggcagttctgcagtcaatgtctgggagagacggcaatattactgggatccagcagttcagcaaaaaggaaattgaagacctactgcgaaaaggcgcttatgccgccatcatggaggaggacgatgagggatccaaattctgtgaagaagacattgaccagatattgctccgacggaccacaactattactatcgagagcgaaggtaaaggctctacctttgccaaagccagtttcgtggctagcgaaaacaggactgatatttcccttgacgatcccaacttttggcagaagtgggctaaaaaggccgatttggacatggaccttctgaatagcaagaacaacctcgtgattgacaccccccgagttcgaaagcagacgcggcattttagtaccttgaaagacgacgacttggtggaattttctgacctagaaagcgaggacgacgagagacctcggagtaggcgccatgataggcaccacgcttatggtaggacagactgcttccgggttgagaagcatctgctggtgtacggttggggccgttggcgggacattctgtcccacggacggtttaagaggcgaatgactgagcgggatgttgagaccatctgccgggccatcttggtgtactgcctacttcactataggggggacgaaaatattaaaggattcatctgggacctgataagcccagctgagaacggcaaaaccaaagaactccagaatcacagtgggctctccattcccgtcccacgtggcagaaagggcaagaaagttaaatcacagtcaaccttcgacattcacaaggccgattggattagaaaatacaaccccgatacactctttcaggacgaaagctataagaagcatctcaaacaccagtgcaataaagttttgttaagagtcaggatgctatactacctgaggcaggaggtgatcggggatcaggctgagaaagttttgggtggggctattgctagtgaaatagacatatggttccccgtggtcgatcagctggaggtccccacgacttggtgggatagtgaagctgacaagtctttgttgattggggtgtttaagcatggttacgagaaatataacacgatgcgagcagaccctgccctctgcttcttggaaaaagcagggcggccagacgataaagccatagcagcagaacaccgggtgctggataacttctcagatatcgttgagggagtggatttcgacaaggattgtgaggacccagagtataagcctcttcagggcccacctaaggatcaggatgatgagggggacccactgatgatgatggacgaagaaatcagcgtgatcgatggcgacgaagcacaggttacacaacagccgggtcacttgttctggccacccgggtccgccctcacagcccgtttgcggaggttagtgaccgcttatcaacgtagttataagcgggagcaaatgaagatcgaagccgctgagcggggcgatcgtcggcggcgaagatgtgaggctgcgttcaagttgaaagaaatagcccggcgagaaaaacaacagcggtggacaagaagagagcaaaccgacttttacagagtggttagtacctttggcgtggagtatgaccctgacacaatgcagtttcactgggacaggtttcggacttttgctcgtctggacaagaagactgacgagtcgttgacaaaatacttccatggctttgtcgcaatgtgtcgtcaggtgtgccgcctgccaccggccgccggggatgaaccccccgaccctaacctgttcattgaaccaatcactgaggagagagctagcaggaccctctatcgaattgagctgctgaggcgcctgcgggaacaggtgttgtgccatccgctgctcgaggatcgcctggccctgtgtcagcctcccgggccggaacttcccaaatggtgggagcctgtgagacacgatggcgaactgctgcgtggcgccgcccgacacggcgtcagccaaactgactgcaacattatgcaggatcccgacttctcgttcctcgcagccaggatgaattatatgcagaaccaccaagccggtgcaccagccccgagcctgtcaagatgctccacccctctacttcaccagcagtacaccagtcggacagcctctccactacccctgcgacccgatgcccccgtcgaaaagtctccggaggaaacagctactcaggttcccagcctggaatcactaacgctcaagctcgagcacgaggtcgtcgcaaggtcccgccccacacctcaggactatgagatgagggtatcgccttctgacaccactcccttggtgtctaggtcggtcccccccgtgaagttagaggacgaggatgattctgattccgagttggacttgtccaaactgagtccttcaagcagtagctccagcagcagtagctcatcctctagttcaactgacgagtctgaagatgagaaagaagaaaagctgacagatcagtcccgcagtaagctatacgatgaggagagtctcctgtcgctcaccatgtcccaggacggtttcccgaatgaggatggagaacaaatgacccccgagctgctgttgctgcaggaaagacagagggcaagcgagtggcccaaggatagggttctcattaacagaatcgacctcgtgtgtcaggcggtcttgagtggcaagtggccgtccagtcgaaggtcacaggaaatggtaacaggaggcatattggggccaggcaaccatttgcttgatagtccgagcttgacacctggagagtacggagacagccccgtccccacacccaggtcaagctcggcggctagcatggctgaagaggaagctagcgccgtgtcaacggcggccgcccagtttaccaaactgcgacgcggaatggacgagaaggaattcaccgttcagatcaaagacgaagagggcctcaagttaaccttccaaaagcataagcttatggctaacggcgtgatgggcgatggccaccccctcttccacaagaagaaaggcaatcgaaaaaaattggtcgaattagaagtggagtgcatggaagagcccaatcatctggatgtggacctcgagacaaggattccagtcattaacaaggtggatggcacacttttggtcggcgaggatgcaccgcgcagggccgagctagagatgtggctacagggccacccggagttcgcagttgaccctagatttctggcttatatggaggaccggaggaaacagaagtggcagcgctgcaaaaaaaataataaagccgagcttaattgcctgggcatggagccggtgcaaaccgctaattctcgaaatggaaaaaaggggcaccacactgaaactgtgttcaatagagtgttgcccggcccaattgcaccagagtcttcgaagaaacgtgcgcgcagaatgcgccctgatctgagcaaaatgatggcactcatgcagggcgggtccaccggttcactgagcctgcataacacctttcagcattcttcctcaggcctccagagcgtctcgtcattgggtcatagttccgctacaagtgccagcttaccattcatgcccttcgtcatgggcggtgcaccttccagcccacacgtagattcctctaccatgctgcatcatcaccaccaccatccacacccccatcatcatcaccatcaccaccccggactgcgggctcctgggtatccttcctcacctgtcacaaccgcttctggcacaaccctccgcctaccacccctgcagcctgaggaagacgatgacgaggatgaggaagatgacgatgacctgagccaaggctatgactcctcagaacgagatttcagcctcattgatgacccaatgatgcctgcaaatagcgacagttccgaggacgctgacgattag

SEQ ID NO: 66594 - DNA, 7746 bp, Artificial Sequence
  derived and/or modified sequence
atggctgaccccatcatggacctgtttgatgaccccaacctgtttggcctggacagcctgacagatgacagcttcaaccaggtgacccaggaccccatcgaggaggccctgggcctgcccagcagcctggacagcctggaccagatgaaccaggacggcggcggcggagatgtgggcaacagcagcgccagcgagctggtgcccccacctgaggagacagcccccacagagctgagcaaggagagcacagccccagcccctgagagcatcaccctgcatgactacaccacccagcctgccagccaggagcagcctgcccagcctgtgctgcagaccagcacccccaccagcggcctgctgcaggtgtccaagagccaggagatcctgagccagggcaaccccttcatgggcgtgtctgccacagctgtgagcagcagcagcgctgggggccagcccccccagagcgcccccaagatcgtcatcctgaaggccccacccagcagctctgtgactggagcccacgtggcccagatccaggcccagggcatcaccagcacagcccagcccctggtggccggcacagccaacggcggcaaggtgaccttcaccaaggtgctgaccggcacccccctgcggcctggggtgtccatcgtgtctggcaacacagtgctggccgccaaggtgcccggcaaccaggccgctgtgcagagaattgtgcagcccagcaggcctgtgaagcagctggtgctgcagcctgtgaagggcagcgccccagctggcaaccctggggccactggaccacccctgaagccagctgtgaccctgaccagcacccccacccagggcgagagcaagaggatcaccctggtgctgcagcagccccagagcggcggcccccagggccaccgccacgtggtgctgggcagcctgcccgggaagatcgtgctgcagggcaaccagctggccgccctgacccaggccaagaatgcccagggccagcctgccaaggtggtgaccatccagctgcaggtgcagcagccccagcagaagatccagatcgtgccccagccccccagcagccagccccagccccagcagccccccagcacccagcctgtgaccctgagctctgtgcagcaggcccagatcatgggccctggccagagccctggccagaggctgtctgtgcctgtgaaggtggtgctgcagccccaggccggcagcagccagggcgccagcagcggcctgtctgtggtgaaggtgctgagcgccagcgaggtggccgccctgagcagccctgccagcagcgccccccacagcggcggcaagacaggcatggaggagaacagaaggctggagcaccagaagaagcaggagaaggccaaccgcatcgtggccgaggccatcgcccgggcccgggcccggggggagcagaacatcccccgggtgctgaatgaagatgagctgcccagcgtgcggcctgaggaggagggggagaagaagaggaggaagaagtctgctggggagcggctgaaggaggagaagcccaagaagagcaagaccagcggggccagcaagaccaagggcaagagcaagctgaacaccatcacccctgtggtgggcaagaagaggaagaggaacaccagcagtgacaacagtgatgtggaggtgatgcctgcccagagccccagagaagatgaggagagcagcatccagaagaggaggagcaaccggcaggtgaagaggaagaagtacacagaggacctggacatcaagatcacagatgatgaggaggaggaggaggtggatgtgacaggccccatcaagccagagcccatcctgcctgagcctgtgcaggagccagatggagagaccctgcccagcatgcagttctttgtggagaaccccagtgaagaagatgctgccatcgtggacaaggtgctgtccatgagaattgtgaagaaggagctgcccagcggccagtacacagaagctgaggagttctttgtgaagtacaagaactacagctacctgcactgtgagtgggccaccatcagccagctggagaaggacaagaggatccaccagaagctgaagcgcttcaagaccaagatggcccagatgaggcacttcttccatgaagatgaggagcccttcaacccagactatgtggaggtggaccgcatcctggatgagagccacagcattgacaaggacaacggggagcctgtgatctactacctggtgaagtggtgcagcctgccctatgaggacagcacctgggagctgaaggaggatgtggatgagggcaagatccgggagttcaagaggatccagagccgccaccctgagctgaagagggtgaaccggccccaggccagcgcctggaagaagctggagctgagccatgagtacaagaacagaaaccagctgcgggagtaccagctggagggcgtgaactggctgctcttcaactggtacaaccggcagaactgcatcctggctgatgagatgggcctgggcaagaccatccagagcatcgccttcctgcaggaggtgtacaacgtgggcatccacggccccttcctggtgattgcccccctgagcaccatcaccaactgggagcgggagttcaacacctggacagagatgaacaccatcgtgtaccacggcagcctggccagccggcagatgatccagcagtatgagatgtactgcaaggacagccggggccgcctcatccctggggcctacaagtttgatgccctgatcaccacctttgagatgatcctgagtgactgcccagagctgcgggagattgagtggcgctgcgtcatcattgatgaggcccaccggctgaagaacagaaactgcaagctgctggacagcctgaagcacatggacctggagcacaaggtgctgctgaccggcacccccctgcagaacacagtggaggagctgttcagcctgctgcacttcctggagcccagccagttccccagcgagagcgagttcctgaaggactttggagacctgaagacagaggagcaggtgcagaagctgcaggccatcctgaagcccatgatgctgcggcggctgaaggaggatgtggagaagaacctggcccccaagcaggagaccatcatcgaggtggagctgaccaacatccagaagaagtactaccgggccatcctggagaagaacttctccttcctgagcaagggggccggccacaccaacatgcccaacctgctgaacaccatgatggagctgaggaagtgctgcaaccacccctacctgatcaacggggctgaggagaagatcctgacagagttccgggaggcctgccacatcatcccccatgacttccacctgcaggccatggtgcgctctgctgggaagctggtgctgattgacaagctgctgcccaagctgaaggccggcggccacaaggtgctgatcttcagccagatggtgcgctgcctggacatcctggaggactacctgatccagaggcgctacctgtatgaaagaattgatggccgggtgcggggcaacctgcggcaggccgccatcgaccgcttcagcaagccagacagcgacagatttgtgttcctgctgtgcaccagggctgggggcctgggcatcaacctgacagctgctgacacctgcatcatctttgacagcgactggaacccccagaatgacctgcaggcccaggcccgctgccaccgcatcggccagagcaaggctgtgaaggtgtaccgcctcatcaccaggaacagctatgagcgggagatgtttgacaaggccagcctgaagctgggcctggacaaggctgtgctgcagagcatgagcggcagagatggcaacatcaccggcatccagcagttcagcaagaaggagattgaggacctgctgaggaaaggagcctatgctgccatcatggaggaggatgatgagggcagcaagttctgtgaggaggacatcgaccagatcctgctgcggaggaccaccaccatcaccattgaaagtgagggcaagggcagcacctttgccaaggccagctttgtggcctctgaaaatagaacagacatcagcctggatgaccccaacttctggcagaagtgggccaagaaggctgacctggacatggacctgctgaacagcaagaacaacctggtgattgacaccccccgggtgaggaagcagaccaggcacttcagcaccctgaaggatgatgacctggtggagttcagtgacctggagagtgaagatgatgagcggcccaggagcagaagacatgacagacaccacgcctacggccgcacagactgcttccgggtggagaagcacctgctggtgtatggctggggccgctggagggacatcctgagccacggccgcttcaagaggaggatgacagaaagagatgtggagaccatctgccgggccatcctggtgtactgcctgctgcactacagaggagatgagaacatcaagggcttcatctgggacctgatcagccctgcagaaaatggcaagaccaaggagctgcagaaccacagcggcctgagcatccctgtgccccggggcaggaagggcaagaaggtgaagagccagagcacctttgacatccacaaggctgactggatcaggaagtacaacccagacaccctcttccaggatgagagctacaagaagcacctgaagcaccagtgcaacaaggtgctgctgcgggtgaggatgctgtactacctgcggcaggaggtgattggagaccaggccgagaaggtgctgggcggggccatcgccagcgagattgacatctggttccctgtggtggaccagctggaggtgcccaccacctggtgggacagcgaggccgacaagagcctgctgattggagtcttcaagcacggctatgagaagtacaacaccatgagagctgaccctgccctgtgcttcctggagaaggccggccgcccagatgacaaggccatcgctgctgagcaccgggtgctggacaacttcagtgacatcgtggagggcgtggactttgacaaggactgtgaggaccctgagtacaagcccctgcagggcccccccaaggaccaggatgatgaaggagaccccctgatgatgatggatgaggagatctctgtgattgatggagatgaggcccaggtgacccagcagcccggccacctgttctggcccccaggcagcgccctgacagcccggctgcggcggctggtgacagcctaccagaggagctacaagcgggagcagatgaagattgaagctgctgagcggggggacagaagaagaagaagatgtgaggccgccttcaagctgaaggagatcgcccggcgggagaagcagcagcgctggacccggcgggagcagacagacttctacagagtggtgtccacctttggagtggagtatgaccctgacaccatgcagttccactgggaccgcttccgcacctttgcccggctggacaagaagacagatgagagcctgaccaagtacttccacggctttgtggccatgtgccggcaggtgtgccgcctgcccccagctgctggagatgagcccccagaccccaacctcttcatcgagcccatcacagaggagcgggccagcaggaccctgtaccgcatcgagctgctgcggcggctgcgggagcaggtgctgtgccaccccctgctggaggaccggctggccctgtgccagcccccaggccctgagctgcccaagtggtgggagcctgtgagacatgatggagagctgctgcggggagctgcccggcatggagtgtcccagacagactgcaacatcatgcaggaccctgacttctccttcctggccgccaggatgaactacatgcagaaccaccaggccggggccccagcccccagcctgagccgctgcagcacccccctgctgcaccagcagtacaccagcaggacagccagccccctgcccctgcggccagatgcccctgtggagaagagccctgaggagacagccacccaggtgcccagcctggagagcctgaccctgaagctggagcacgaggtggtggcccggagccggcccaccccccaggactatgagatgagggtgagccccagcgacaccacccccctggtgagccgctctgtgccccctgtgaagctggaggatgaagatgacagcgacagcgagctggacctgagcaagctgagccccagcagcagcagcagcagcagcagcagcagcagcagcagcagcacagatgaaagtgaagatgagaaggaggagaagctgacagaccagagccgcagcaagctgtatgatgaggagagcctgctgagcctgaccatgagccaggacggcttccccaatgaagatggagagcagatgaccccagagctgctgctgctgcaggagcggcagagggccagcgagtggcccaaggacagagtgctgatcaacagaattgacctggtgtgccaggccgtgctgagcggcaagtggcccagcagccgccgcagccaggagatggtgactggaggcatcctgggccctggcaaccacctgctggacagccccagcctgaccccaggagaatatggagacagccctgtgcccacccccaggagcagcagcgctgcctccatggccgaggaggaggccagcgctgtgtccacagctgctgcccagttcaccaagctgcggcggggcatggatgagaaggagttcaccgtgcagatcaaggatgaggagggcctgaagctgaccttccagaagcacaagctgatggccaatggagtgatgggagatggccaccccctcttccacaagaagaagggcaacaggaagaagctggtggagctggaggtggagtgcatggaggagcccaaccacctggatgtggacctggagacccgcatccctgtgatcaacaaggtggatggcaccctgctggtgggagaagatgcccccaggagagctgagctggagatgtggctgcagggccaccctgagtttgctgtggacccccgcttcctggcctacatggaggacaggaggaagcagaagtggcagcgctgcaagaagaacaacaaggccgagctgaactgcctgggcatggagcctgtgcagacagccaacagcagaaatggcaagaagggccaccacacagagaccgtcttcaacagagtgctgcccggccccatcgcccctgagagcagcaagaagagggcccggaggatgaggccagacctgagcaagatgatggccctgatgcagggcggcagcacaggcagcctgagcctgcacaacaccttccagcacagcagcagcggcctgcagagcgtgagcagcctgggccacagcagcgccaccagcgccagcctgcccttcatgccctttgtgatgggcggggcccccagcagcccccacgtggacagcagcaccatgctgcaccaccaccaccaccacccccacccccaccaccaccaccaccaccaccctggcctgcgggcccctggctaccccagcagccctgtgaccacagccagcggcaccaccctgcggctgccccccctgcagcctgaggaggatgatgatgaagatgaagaagatgatgatgacctgagccagggctatgacagcagcgagcgggacttcagcctgattgatgaccccatgatgcctgccaacagcgacagcagtgaagatgctgatgactag

SEQ ID NO: 66595 - DNA, 7746 bp, Artificial Sequence
  derived and/or modified sequence
atggccgaccccatcatggacctgttcgacgaccccaacctgttcggccttgattctctcaccgatgacagctttaaccaggtgacgcaggaccccattgaggaggctcttggcttgcccagttcacttgacagtctagaccaaatgaatcaagacggggggggcggtgatgtcggtaattcctcagcttccgaacttgtgccaccccctgaggagacagcccctacagaactgtctaaggaatcaacagcccctgcccctgaatctattactctgcacgactatactacgcagccagctagccaggaacagccagctcagccagtgctacaaacctctacccctactagcggtctgttgcaggtcagcaagtctcaggagatcttgtcacagggcaatcctttcatgggcgtctcggcaactgccgtctcctcctctagcgccggagggcagcctccacaaagcgcccctaaaattgtgatccttaaagcaccaccctccagctctgtcaccggcgcccatgttgcacaaattcaggctcagggaattacatcaacggcccagccactggtggcaggaacagccaatggtggaaaagtcacctttactaaggtgctgactggcaccccactccggcccggtgtgtccattgtgagtggcaatacggtacttgccgctaaggtgcccggcaaccaggccgccgtgcagcggattgtccagcccagccgcccggttaaacagctggtgttgcagcccgttaaaggctcggcacccgctggcaaccccggcgctactggtccccctcttaaacctgcagtcacgctgaccagcaccccgactcagggagagtcaaagcgaattaccttagttttacaacagcctcaaagtggtggtccccagggccaccggcatgtcgttctgggctccctccctggaaagattgtgttgcaagggaaccagctagctgccttaacccaagcgaagaacgctcagggacagcccgctaaagttgttaccattcagctacaggtgcagcagccccagcagaaaatccaaattgttccccagccccctagcagccagcctcagcctcagcagcccccatccactcagcccgtcaccttatcttctgttcagcaggcgcaaatcatgggtccaggccaatcgcccggtcagcggctcagtgtcccagttaaagtggtgctacagccacaggcaggttcaagtcagggggcgagttctggattgtccgtggttaaagtactctctgctagcgaggtggcggccctttcttcccctgcgtcaagtgccccacacagcggtggcaagaccggcatggaggaaaatcgcaggctggagcatcagaagaagcaggagaaggccaatcggatagttgcagaggccatcgccagggcacgagctcgaggcgagcagaacattcccagagtgctcaacgaggacgagctcccctccgtcaggcctgaggaagaaggcgagaagaaacgacgcaaaaaatccgccggagagcgcttaaaggaggagaagcccaagaagagtaaaacatctggggctagcaaaacaaaggggaaatcgaagctaaatacgataaccccagtggtgggaaagaaaaggaaacgaaacacgtcaagcgacaattccgacgtagaggtgatgcctgctcagtctccaagggaggacgaggagtcttccattcagaaacgcagaagcaacaggcaggtgaaacgtaaaaagtatacggaggatctggacattaaaattacagacgatgaggaggaggaggaggttgatgtgaccgggcctatcaagcctgagcctatcttgccggagcccgtgcaggaacccgatggagagacactgccttcaatgcagttttttgtcgagaacccatccgaagaggacgcagctatcgtggacaaggtgctctcaatgcggatcgtgaagaaagaactgccctcagggcaatacaccgaagcagaggaatttttcgtgaagtacaaaaactattcatacctgcactgcgagtgggccacgatttcacagctggaaaaggacaagcgaatacatcagaagttaaaacgtttcaaaaccaagatggcccagatgcgccacttcttccacgaggatgaagagccttttaaccctgactacgtggaggtagatcggatcctagacgagagtcacagcatcgacaaggataatggcgaacccgtgatttactacttggttaagtggtgtagcctgccttacgaggactcaacgtgggaactgaaggaggacgtagatgagggcaaaatcagagaattcaagaggatccagtcaaggcaccccgagctcaaacgggtcaacagaccacaggcctctgcctggaagaaattggaactcagtcatgagtacaagaatcgaaaccaactgcgggagtaccaactggaaggggtcaactggctgctgtttaattggtacaatcggcaaaattgtatactcgccgatgagatgggactcggaaagaccatccagtcaattgcgtttcttcaggaggtgtataacgtcggaatacacggacctttcttagtgatcgcaccactgtccacaattacaaactgggaacgcgagttcaacacttggaccgagatgaacaccatcgtttatcacggcagcctggcgtctagacagatgatccagcaatacgagatgtactgcaaagactcccggggccgcctgatccctggggcatacaaatttgacgctctaattactacattcgagatgatccttagtgattgtccggagctaagggaaattgagtggagatgcgtcatcatcgatgaagcccatcgtctaaaaaaccgcaattgcaagctccttgactctctaaaacatatggacctcgaacacaaggtgttgctgacgggcacaccgctccaaaatacagttgaggaattattttcgttgttgcattttctggaaccgtcgcagtttccatcagaaagcgagttcctcaaagattttggcgatctgaaaacagaggaacaggtccagaagctgcaggccatcctaaagcccatgatgctaagacgccttaaagaggacgttgaaaagaatctagcccctaaacaggagacaatcatcgaggtagagctgacaaatatccagaagaagtactaccgtgcaatactggaaaaaaactttagctttctgtccaaaggagccgggcacaccaatatgccgaacttgttgaatactatgatggagctaaggaagtgctgcaaccacccatacctgattaacggtgccgaagaaaaaatcctcacggaattcagagaggcttgtcacataatcccccatgactttcatctgcaggccatggtgcggtcagcagggaagctggtgttaattgacaagctgttgcccaagctcaaagccggtggacacaaagtgttgatttttagccagatggtgcgctgtctggatattttagaggactacctgatccagagacgttatctgtacgagcgaattgatggccgagtgcgaggcaacctgcggcaggcggccatagaccgattcagcaaacctgacagcgatcgctttgttttccttctctgcacaagggcggggggattgggcattaatttgacagctgcagacacctgtattattttcgattcggactggaaccctcagaatgacctgcaagctcaagcgaggtgccacagaattggccagagcaaagccgtgaaggtttacaggctcatcaccagaaacagctatgagagggaaatgttcgacaaggcatcactgaagctgggtcttgacaaagcagtcctccagagcatgagcggcagggatgggaacatcactggaatacagcaattttcaaagaaggagattgaggacctccttagaaagggggcctacgcggcaatcatggaggaagacgatgagggcagcaagttttgcgaggaggacatcgaccagatcttgcttcgccgcaccacaacaatcacgatcgagtccgaaggtaaggggtccacatttgcgaaggcatcctttgtggccagcgaaaataggactgacatttctctggacgaccctaacttttggcagaagtgggcaaaaaaggccgacttggacatggatctcctcaactccaagaataatctcgtgatagatacaccaagagtcaggaaacagaccaggcacttctcaacgctgaaagatgacgacctggttgagttctcagatctagagtcggaggatgacgagagacctaggtctcgaagacacgatagacatcatgcttacggccggactgactgcttccgcgtggaaaagcacctgctcgtctacggatggggtcgctggcgcgacatcttgtctcatggccggtttaagcggcgcatgactgaacgggacgtcgaaacgatctgtcgggccatcctagtctactgtctactccactatagaggagatgagaatatcaagggcttcatctgggacctgatcagtccagccgaaaatgggaagactaaagagctgcagaatcacagcggactctccattccagtaccccgtggaaggaaaggtaagaaggtcaaaagtcaatcaaccttcgatattcataaagccgactggatccgaaagtacaatccagatactctcttccaggacgagagctataagaagcatctgaaacaccaatgtaataaagtgcttcttcgggtgaggatgctgtattatctgcgacaggaagtgattggcgatcaggccgaaaaggtcctcggcggggccatcgccagcgagattgacatttggtttccagtagttgatcagctggaggttcccactacttggtgggattccgaggccgacaagagcttacttatcggcgtctttaagcacggttacgaaaaatataataccatgagggcagatcccgcattgtgctttcttgaaaaagccggacgccccgacgacaaagccattgctgcagagcaccgcgtgctggacaacttctccgacatcgttgagggtgtagattttgacaaagattgcgaggatcccgaatataaacctctgcaaggcccacctaaggatcaagacgacgaaggcgatcccctgatgatgatggacgaagagatttcagttatagacggcgacgaggcccaggtgacacagcaaccaggccatctgttctggccacccggatccgccctcaccgcacgactgagacgactagtgactgcctaccagaggagctacaagcgcgagcaaatgaaaatcgaggctgcagagagaggggacaggagacggcgcaggtgcgaggcagcttttaagcttaaggaaattgcacgccgggagaagcaacaacgctggaccaggcgtgaacaaacagacttttacagagtggtgtccacatttggtgtagagtacgaccccgatactatgcagttccactgggacaggttccggactttcgcacgtctggataagaaaaccgatgaatcattaactaaatattttcacggttttgtggcaatgtgccgccaagtgtgtcgtttaccgcctgctgcgggggacgaaccacccgatcctaacctgtttattgagccaattactgaggagagagcctccagaaccctctaccgcatcgagctgttgcgtagactgcgcgagcaggtcttatgtcatcccctcctggaggatcgtcttgctctgtgtcagccaccggggccagagctgcctaaatggtgggagcccgttagacacgacggagagctgctacgcggggccgctcggcacggagtttctcaaacagactgcaacattatgcaggaccctgacttctcctttctcgctgctcgcatgaactatatgcagaaccatcaggctggagcccctgcaccctccctcagcagatgctccaccccactcttgcatcaacagtatactagtcgaaccgccagtccactcccacttcgaccggacgctcccgtagaaaagagcccagaggagactgctacacaggtgccgtccttggaatcgttgaccctgaagttagaacacgaagtagtggccaggtcacggccaactcctcaggactacgaaatgagagtgagcccctcagataccactcccctcgtgtctagaagcgtgcctcctgttaagttagaggacgaggatgactctgattctgagttggacctttcaaaactgtccccatcgtcctcatcaagttccagctcaagtagttcctctagttccactgacgagtcagaagacgaaaaagaagaaaagctgacagatcagagcaggtcaaagttgtatgacgaggaaagcctcttgtctctcactatgagtcaggacggcttcccaaatgaagatggagaacagatgacccccgagctgctacttctccaggagcggcagcgggcatccgaatggccaaaagacagagtcctgatcaaccgcattgatctggtgtgccaagcggtcctgagcgggaagtggcccagctcgaggcggtcccaggagatggtcacaggcgggatactcggacctgggaatcacctgttggattccccaagtttgacacccggtgagtatggcgactctccagttcctacaccccgctcttcctcggcggcgtccatggccgaggaggaggccagcgcagtctccactgctgcagcccagtttactaagctccgccggggcatggacgagaaagagtttacggtacagattaaggatgaggaaggactgaagctgacttttcagaaacacaagttaatggcgaacggagtgatgggagacggccatcctctcttccacaaaaagaagggaaaccgaaaaaagctggttgagctagaggttgaatgtatggaggaacccaatcatctcgatgtggatcttgaaactcggatcccagtgatcaacaaggttgacggaactctgctagtgggcgaagatgccccaagaagggcagagcttgaaatgtggttgcaggggcaccctgagttcgcagttgaccccagatttctggcatatatggaggaccggaggaagcagaagtggcaacgctgcaagaaaaataacaaggctgaactgaactgcctgggcatggaacccgtccagaccgcaaactctaggaatggcaagaagggccaccacactgagactgtgtttaatagagtccttccaggtccaatagcccccgagagcagcaagaagcgcgcccgccgaatgagacctgatctcagcaagatgatggctctgatgcagggaggaagtaccggctccctttctttacacaatacttttcagcacagcagcagtggattgcaatcggtgagcagcctagggcactcctcagccacctctgcatctctcccatttatgccgttcgtcatgggcggcgctccctcatcaccccacgtggatagctctaccatgctccatcatcaccatcaccaccctcacccgcaccaccaccatcaccatcacccaggattacgggccccaggctacccctctagccccgtcacaaccgcctcgggaactacgttaaggcttcctcctttgcagcccgaggaagatgacgacgaggatgaagaagacgatgacgacctgagtcagggatatgactccagcgagagggatttctccttgattgatgatcctatgatgcccgccaactccgattccagcgaggatgccgatgactag

SEQ ID NO: 66596 - DNA, 7746 bp, Artificial Sequence
  derived and/or modified sequence
atggccgaccccatcatggacctgttcgacgaccccaacctgttcggcctggacagtctgaccgatgactcctttaatcaggtgacacaggaccctatcgaggaggctctaggcctgcctagtagtctggatagccttgatcagatgaatcaggacggaggggggggtgacgtgggcaatagctctgccagtgaactagtgcctccaccagaagaaacggcaccaaccgagctgagtaaggagtccactgcgccagcccctgagagcataacgctgcatgattacacaacacaacccgccagccaggagcagccggcacagcctgtactgcaaacctcaacacctacgtcggggcttctacaggtatctaaaagccaagagattctgagtcaggggaacccttttatgggagtctcggcaactgccgtctctagttctagtgcaggaggtcagccgccccaaagcgccccgaaaattgttatcttgaaagcacctcctagcagctctgtgacgggcgcacatgtggctcagatacaggctcagggaatcaccagcacagctcagcctctggtggccggtacagcgaatggagggaaagttactttcacaaaagtgctcactggcaccccactgagacccggtgtctcaattgtgtctggcaacacggtgttggccgctaaggtccctggtaatcaagccgctgtccagcgcatcgtccagccgagccgacccgtcaaacagcttgtcctacagccggtgaaaggctcagcccccgctggaaacccaggtgctacggggccacccctgaagccagcagtcactctcacgagcaccccaactcagggagaaagtaagaggattactttggtcctccagcaaccacaatccgggggaccccaaggccatcgacacgtcgtcctcgggtccttgcctggtaagattgtgctgcaagggaaccagctagctgctctgacacaagccaagaacgcccagggccagccagctaaagtggtgacaattcagcttcaggtacagcagcctcagcaaaaaattcagatagtccctcagcctccaagcagccaaccacagccacagcagcctcccagtactcagccagttacgctgagctcagtgcaacaggcacagattatggggcccggccagtctccgggacagcgactgtccgtgccagtcaaggtggtgttgcaacctcaggcaggaagctctcagggcgcctctagtggcctttctgtggtcaaggtgctgtccgcctcagaggtcgctgcattgtcaagccccgcctcttctgcacctcatagcggaggcaagactggtatggaagagaatcggcgcctggagcatcaaaagaaacaggagaaagccaacagaattgtcgcagaggccattgctcgagcccgcgccaggggcgaacagaatattcccagggtgctgaacgaagatgaacttccaagcgtacggcctgaggaggagggagagaagaagagacggaaaaaatccgccggtgagcggctcaaggaggaaaagcctaagaagtctaaaacctcaggcgcctcgaaaaccaaggggaagtccaagctcaataccattactccagtagtgggtaagaagcgaaaacggaacaccagttccgacaacagcgacgtcgaagtgatgcccgctcagtctcctcgcgaggacgaagagtctagtatccagaagagacgctctaacaggcaggtgaagagaaagaaatacaccgaggatctggacataaagatcaccgacgatgaagaggaggaggaagtagatgtgactgggcctattaaacccgagcccatcttacccgagccagtgcaggaacctgatggggagactttgccctctatgcagtttttcgtcgaaaacccgtcggaggaagacgctgccatcgtcgacaaggtgttgtccatgcgcatagtgaagaaggaactgccctctgggcagtatacggaggccgaagaattctttgtaaagtacaagaattattcgtacctgcattgtgaatgggctacaatctcacagctggaaaaggacaaacgaatccaccagaagctcaagagattcaaaaccaagatggcacagatgagacacttttttcacgaggatgaggagccctttaatcccgactatgtggaagtggatagaattcttgacgagtcccacagcattgataaggacaatggcgagccagtgatatactacttagtcaaatggtgtagcctcccgtacgaggactctacctgggagctgaaagaggatgtagacgagggcaagattcgggagttcaaacgcatacaatcaaggcacccagagttgaagcgggtgaataggccccaggcatcggcctggaagaaactggagctgtctcatgagtacaaaaaccggaatcaacttcgagagtaccagctggagggcgtcaattggttgctgttcaattggtataatcgccagaactgtatcctggccgatgagatgggccttggtaaaactatccagagcattgcgttcctccaagaagtctacaacgttgggattcacggacctttccttgttatcgcccctttgtccaccatcaccaattgggaaagagagtttaatacctggacagagatgaatacaatcgtctatcatggcagccttgcaagtcggcagatgatccagcagtacgaaatgtattgtaaggattctcgggggcggttgattcccggcgcctataagtttgatgcactgattactactttcgaaatgatcttgagcgactgccccgagctcagagagattgagtggagatgtgtgatcatcgacgaggcccacagactgaagaaccgtaactgtaagctgctcgacagcctgaaacacatggacttggaacacaaggttttgcttaccgggacgcccctacagaatactgttgaggagctattttcgcttctccatttcctggagccctcccagtttccatccgaatccgaatttctgaaggacttcggggacctgaaaacagaagagcaggtgcagaaattacaggcaatcctgaagcccatgatgctgaggaggctcaaggaagatgtggagaaaaaccttgcccctaaacaagagacaataatagaagtagagctcacgaatatacagaaaaaatactatagggccatcttggaaaaaaacttctccttcttatctaagggagctgggcacaccaacatgcccaacctactgaacaccatgatggagctgcgaaaatgctgcaatcacccttatcttattaacggggctgaagagaaaatcctgacggaatttcgcgaggcctgccacataattccccacgacttccatctgcaggctatggtacggtccgccggaaaactggtccttatagacaagctactgcctaaacttaaagccggggggcacaaggtgctgattttcagtcaaatggttcgatgcctcgatatcttagaagattatctgatacagcggcgatacctgtatgagagaattgacggtcgggtgcggggtaacttaaggcaggccgcaatcgacagattttccaaaccagactctgatcgattcgtctttctcttatgtacaagagccggaggcctgggtatcaatcttaccgccgctgatacctgtataattttcgattccgattggaacccccagaacgatctgcaggcccaagctcggtgccacaggattggtcaatcaaaggctgtgaaagtgtacaggctcattacccggaattcttacgagcgtgaaatgtttgataaagctagtctcaagctgggcctcgataaagccgtcttacaaagtatgagcggcagagatggcaatattactggcatacagcaattttcaaaaaaggaaatcgaagatcttctccgaaagggcgcatatgccgcaatcatggaggaggacgatgaagggtcgaagttctgcgaagaagacattgatcagatcctcctccgacggaccacaacaattacgatcgagtccgagggaaagggcagcacattcgccaaggcgtcattcgtagcctccgagaacaggaccgacatcagtctggacgatcccaacttctggcagaaatgggcgaaaaaggcggacctcgacatggacctgctcaattccaaaaacaacctggtcatcgacactccccgcgtcagaaaacagactagacatttcagcactctgaaggacgacgatctggtggagtttagcgacttggaatctgaggatgacgaacgaccaagatctagacgtcacgacagacatcatgcctatgggcgtaccgattgtttccgggtggaaaaacaccttctggtgtacgggtggggccgctggagagacatcctttcacatggtcggtttaaacgtagaatgactgaaagggatgtggagacaatctgcagagccatcctagtatactgccttctgcactaccgcggggatgagaacattaaaggcttcatttgggatctgattagccctgccgaaaacggtaagacaaaggagttacagaatcattccggactcagcatccccgtgccccgcggaagaaagggcaaaaaggtaaaaagccagtcgacatttgacattcataaggctgattggatacgcaagtataaccccgataccctgtttcaggatgaaagctacaagaaacacctcaaacaccagtgcaataaggtgcttctccgcgtacgaatgctctattacctgaggcaggaagtaattggggatcaggccgaaaaggtgctcgggggtgccatcgctagcgagattgacatttggttccccgtggtcgaccagttggaagtgcctactacgtggtgggattcagaggcagataaatctctccttatcggcgtgtttaaacatgggtacgaaaaatacaacaccatgagagctgaccctgcgctgtgttttctcgagaaggcgggaagaccagacgacaaagctatcgcggcggaacatcgggtgttggataatttctctgacatcgtagagggggtcgacttcgataaggattgtgaagacccggagtataaaccattgcagggccctcctaaggatcaggatgacgagggggatccactgatgatgatggatgaagagatttctgtgattgacggagacgaggctcaagtgactcaacagccagggcatctcttttggcctcctggttctgcacttactgctaggctaagacgcctggtgactgcctaccaacgatcctacaaacgggagcagatgaagatagaggccgctgagcgcggcgacagacgcagacgtagatgcgaggcggctttcaagttaaaagaaatcgccaggcgtgagaagcagcagagatggactagacgtgagcaaacagatttttaccgtgtcgtctccacctttggcgtggagtacgatcccgatacaatgcaattccattgggataggttcagaactttcgcacgccttgacaagaagactgacgagagtttaacgaagtatttccatggattcgttgccatgtgtcgccaggtgtgtcggctgccacctgccgcgggagatgaaccacctgatcccaacctgttcatagaaccaattaccgaggagcgcgcctccaggaccctgtacagaattgagttgctccgtcgcctacgcgagcaggtactttgccatccgttgctcgaagacaggttagccttgtgtcaaccccctgggcccgagctgcctaaatggtgggagcctgtccgccatgacggggagctgttacgaggagctgcaagacacggtgtgtctcaaactgactgcaatatcatgcaagatcctgatttctccttcttagccgcacgcatgaactatatgcagaaccatcaggcaggagctccggcaccctccctctccaggtgcagtacgcctctgttgcaccaacagtacaccagccgaacagcttcgcctctccccttacgtccagatgctcctgtggagaaaagtccagaggagacagctacgcaggtgccgtcacttgagagcctgacactgaaactggaacatgaggtcgtggcacgatctcggccgacaccccaggattacgagatgagggtctcccccagtgacacaactccgctcgttagcagatctgttccacccgtgaagttagaagatgaagatgattctgactccgaacttgacctatccaaactcagtccatcctcttcctcctcatcaagcagctccagttcttcatcctctaccgacgaaagcgaagacgagaaggaggagaaactgacagatcagtctcgctctaaactttatgacgaggagtccctgctttctcttacgatgagtcaggacggatttccaaacgaggacggtgagcagatgacccctgagctgcttctgctgcaggaacgccagcgcgcctccgagtggccaaaggacagagtgctgataaatcgtattgacctggtgtgtcaggccgtgctgtcaggaaagtggcccagcagtcgacggtcacaggagatggtgacagggggtattttgggtccaggtaatcatctgctggactcaccttcacttacccccggggagtacggcgattctccggtccccactcctagatcttcttccgccgctagtatggctgaggaagaagccagcgccgtgtcaaccgctgctgcacagttcaccaagcttcgtcgtggaatggacgagaaggagttcacagtgcaaatcaaagatgaggagggtctgaagctgaccttccagaagcataagcttatggctaacggggtgatgggggacgggcacccattattccacaaaaagaaagggaataggaagaaactcgtggagctggaagtggagtgtatggaggagcccaaccatttagacgttgacttagagaccagaatccctgtgatcaataaagtcgatggaactctgctggttggagaggacgcccctaggcgggccgagctggaaatgtggctgcagggccatccagagtttgccgttgatccacgcttcctggcttacatggaagatagacgcaaacagaagtggcagcgttgcaagaagaataacaaagctgagctgaactgcctcgggatggaacccgttcagaccgcaaactctcggaatggaaaaaaaggacaccacactgagacggtattcaacagggtgctccccgggcccattgccccggagagcagcaagaaacgtgcccgacgtatgcgcccagatctttccaagatgatggcccttatgcaaggcggcagcacggggtccctttctctgcacaatacgtttcaacattccagctctgggcttcagagtgtctcttctctggggcattcatcagcaacatctgcaagcctaccttttatgccctttgtgatggggggtgccccatcctcacctcacgtggactccagcaccatgcttcaccatcaccatcaccacccccatcctcatcaccaccatcaccaccacccaggcctccgtgctcctggctacccatcttccccagtgaccacagcctctggaacaactctgagactaccgccattgcagcctgaggaagatgacgatgaagatgaagaagatgacgacgacctaagtcagggatacgatagtagcgaacgcgactttagtctcatcgatgaccccatgatgccagcaaactcagactccagcgaagacgcggacgattag

SEQ ID NO: 66597 - DNA, 7745 bp, Artificial Sequence
  derived and/or modified sequence
atggccgatccaattatggacctctttgatgatcccaatctctttggcttggacagtcttaccgacgacagtttcaaccaagtgacacaggaccctatcgaggaggcattggggctgccgagcagcctggattctctggaccagatgaatcaggacggcggaggaggggacgtggggaattcgagcgcctccgaactcgtccccccaccggaggaaacggcaccaactgaactgagcaaggagtcaaccgctcccgctcccgagtcaattaccctacacgactacacaacacagcccgcatctcaggaacagccagcccaacccgtcttacagacatcgactcccacctccggccttctacaggtcagtaagagccaggagatactctcacagggaaacccctttatgggggtaagcgccactgccgtgagttcctcttcagccggtggccaaccaccacaaagcgcccctaagatcgtgattctgaaggctccaccatcttcgtcagtgaccggcgcacatgtggcccagattcaggcccagggcataactagcacggcccagcccctggtggccggtacggcaaatggcggaaaggtgacgttcactaaggtcctcaccgggacaccgctccggccaggggtgagcatcgtatctggaaacacggtccttgccgctaaggttcctggaaaccaggctgctgtgcaaaggatcgtccaacctagccgtcctgtcaaacagctggttctgcaacccgtcaaaggctccgccccagcaggaaatccaggggctacagggccacccctgaaacccgcagtgaccctcacttccacccccacccagggcgaaagtaaacgcattaccctggttctccagcagcctcaaagcgggggaccccaggggcaccggcacgtcgttctcggcagtcttcctggcaagatcgtcctccagggcaaccagctggcagctttgacccaggcgaagaatgctcaaggacaacctgccaaagtcgtgacaatccagctacaggttcagcagccccagcagaagatccagattgtgcctcagcccccttctagccagccacagccccaacagcctccatccacccagccagtaaccctgtcctccgtccagcaggctcagatcatgggccctggtcagagccccggacaacgtttgagtgttcccgtgaaggtagtcctgcaacctcaggctggtagttctcagggggcttccagcggcctcagcgttgtcaaggtgttaagcgctagcgaggtggctgctctgagcagtccagccagcagcgctccacactctggaggaaaaactgggatggaggagaaccgcaggctcgaacaccagaaaaagcaggagaaggcaaaccgcatcgtggccgaggccattgcgagagctcgggctagaggcgaacagaatattccacgggtcctgaatgaggatgaacttccaagtgtccgccctgaggaagagggcgaaaagaaacgacgaaagaagtcagccggagagcggctcaaagaggagaaaccaaagaagtctaaaacgtcaggcgctagcaagacgaaaggaaagtcaaagcttaatacaatcacccctgtcgttgggaagaagcggaagcgcaacacctccagcgacaattcggacgtcgaggtgatgccagcacagtctccaagagaagacgaagaatcctctatccagaagcgaagaagcaatagacaggtgaagaggaagaagtacactgaggatttggacataaagatcacagacgacgaggaagaggaggaagtggatgttactgggccaatcaaaccagagccaattcttcctgagcccgtgcaggaacccgacggggagaccttaccctcaatgcagtttttcgtggagaatccatctgaggaggacgcagcgatagtagacaaggtgctgagtatgaggatcgtcaaaaaggagctgccaagtggtcagtacaccgaggcggaggaattttttgtcaagtacaaaaattattcatacttgcactgtgaatgggccactatctcccagttagaaaaggataagcgcatacaccagaaattgaagcgttttaaaactaagatggcccagatgcgacacttcttccatgaggatgaggaaccattcaatcccgattatgtcgaggtggacaggatcttagatgaatcacactctatcgacaaagacaacggagagcccgttatctactatctggtgaaatggtgctcccttccgtatgaagatagcacctgggaactgaaagaagatgtcgacgagggcaagatccgagagtttaaaagaattcagagccggcacccagaattgaaaagagtgaatcgccctcaggctagtgcgtggaaaaagctggaactgagccacgaatataaaaatcgcaaccagctgcgagaataccagcttgaaggggtcaactggctgctgttcaattggtacaatagacaaaactgtatcctcgccgacgaaatgggcctggggaaaactattcagagtattgctttcctgcaagaggtgtataacgtaggaattcacggccctttcttagttattgccccactttctactatcaccaactgggagagggagtttaatacatggaccgaaatgaatacaattgtttaccacggcagcctggccagcaggcagatgatccagcagtatgagatgtattgtaaggattccaggggtagactgattcctggtgcatataagttcgatgctctaatcacaaccttcgagatgatcctttccgattgtcctgaattaagggagatagaatggcgatgtgttataatcgatgaggctcatcggctgaaaaaccgaaattgtaagcttttggacagtctaaagcacatggacctggaacataaagtcctgttgactggcacgccgttacagaacaccgtggaggagctattctctctcttgcatttcctggagccatctcagttcccgagcgaaagcgagtttttaaaggactttggcgaccttaaaacagaggagcaggtgcaaaagctgcaagccatcctaaagcctatgatgctgcgcaggctcaaggaagacgtcgaaaagaatcttgccccaaagcaggagacgatcatcgaagtcgaactgacaaacatacagaaaaagtattacagagctattctcgaaaagaactttagttttttgagtaaaggggctggtcatacaaacatgccaaacctcctcaatacgatgatggagctgagaaagtgctgcaatcatccatacctgattaatggagcagaagagaaaatcctaaccgagttccgtgaggcttgccacatcatccctcacgacttccatctgcaggcaatggtcaggagtgccggtaagctcgttctgattgacaagttgctgccgaaactcaaagcagggggacacaaagttctgatcttcagtcagatggtacggtgcttggatatcctggaagactaccttatccagcgcagatacctatatgaaaggatcgacgggcgagtacggggtaacctgcgccaggccgctattgaccgattttccaaacccgattccgaccgtttcgttttcctgctgtgtactcgggcaggcggtttgggaattaatttaacagctgcagatacgtgtattatcttcgatagcgattggaacccccagaatgatttgcaggcgcaagcacgttgccatcgcattgggcagtctaaagcagtgaaagtctaccgccttattacccgtaactcctacgagagagagatgttcgataaagccagtctgaagctcggcctggataaggctgtgctccagtctatgtcagggagagacggtaacatcaccggaattcaacaattttccaaaaaggaaatagaggatttgctgcggaagggagcctatgcggctatcatggaagaagatgacgagggttctaagttctgtgaggaagatattgaccagattttgctacgtaggacaactaccatcactatcgagagcgagggaaaagggagtacgttcgctaaagccagcttcgtggcttcagagaatagaacagacatttccttagacgaccccaatttctggcagaaatgggccaagaaggccgacttggatatggatctgctgaactctaagaacaacctcgtcattgacaccccacgggtccgaaagcagactcgacacttttccactcttaaagacgacgacctggtggagttttccgatttggagtctgaggatgatgaacggccacgcagcagacgtcacgaccggcatcacgcttatggacgcacagactgcttcagggttgagaagcatctgctagtgtacgggtggggcagatggcgtgatatcctgtcgcatggcaggtttaaacgccgtatgaccgaacgagatgtcgagaccatctgcagggctatccttgtgtattgccttttgcactaccggggtgatgagaatatcaaagggttcatatgggacctgatctctcctgcagaaaacggcaaaaccaaagaactgcagaatcatagcggtctgtcaattcccgtgcccagaggcaggaaaggcaagaaggtgaagagtcaatctacgttcgatattcataaggccgattggatcagaaagtataatccagataccctgttccaagacgagagctacaagaagcatctgaagcaccagtgcaataaggtgctcctgcgtgtgagaatgttatattacctgcggcaagaggtgattggagatcaagccgaaaaagttctgggtggcgcaatcgcctcagagattgacatttggttccctgtcgtagatcaactcgaagtgcctaccacctggtgggacagcgaagctgataagtccctgctcattggcgtgtttaaacacgggtacgagaaatataacaccatgcgggcagaccctgccttgtgttttctggagaaggcgggtagaccagacgataaagcgatcgccgctgagcacagggtgctggacaacttttcggacatcgtcgagggcgtggacttcgataaagattgcgaggatccagaatataagccactgcaggggcctcctaaagatcaggatgacgaaggcgaccccctgatgatgatggacgaggagatcagtgtgatagatggggacgaagcccaggtcacccagcagcccggtcatctgttttggccccctgggtccgcgttaactgcacgtctaaggagacttgtgacagcataccaaaggtcttataaaagggaacagatgaaaattgaggctgccgagaggggagacaggcgtcgtaggcgatgtgaagctgccttcaaattaaaggagattgccaggagagagaagcaacagaggtggactaggcgtgagcaaactgacttttatcgggtggtgtccactttcggagttgaatatgacccagacaccatgcaatttcattgggacaggtttaggacgtttgctcgcctggataaaaaaacagatgagtccctgacaaaatacttccacggctttgtggcaatgtgccggcaggtctgccggctacctcccgctgctggggacgaacctcctgaccctaacctatttatcgaaccaatcacggaagagcgggcatccaggacactctaccggatagaacttctccgcagattgcgagagcaggtcctgtgtcaccccctgctcgaagacagattagccctctgccaaccccctggcccagagttgccaaagtggtgggaacccgtgagacatgacggggaattattgaggggcgctgccaggcacggagtgagccagaccgactgcaacatcatgcaggaccctgacttcagcttcctcgccgctaggatgaactatatgcaaaaccatcaggccggagctccagcaccatctctgtcaaggtgcagcactccgctgctgcatcagcagtacacctcccgcactgcctccccccttcccctacgcccagatgctcctgtagagaaatcaccagaagagacagcaacccaggtaccatccctcgagtccctgactctgaaacttgaacatgaggtagtcgctcgcagtcgtcctacgccccaggattatgaaatgcgcgtctccccttcagacactaccccgctcgtgtcaagatccgtgcctcctgtcaaacttgaggatgaagatgacagcgactctgagttggacttatcaaagctgtcgccatctagtagctcatcctcttccagcagcagctcttccagtagtacagatgaaagcgaagatgaaaaagaggaaaagctgactgatcaaagcagaagcaagctttatgacgaggagtcccttctgagcctcaccatgagccaggatggcttccctaacgaagacggcgaacaaatgactcccgaactgctgctgttgcaagagaggcagcgcgcttcagagtggcctaaagaccgggttttgattaacaggattgatctcgtgtgtcaagctgtgctgtctggcaagtggccttccagcagacgatcccaggagatggtgaccggagggattctcgggccaggcaaccacctgttggattctccgtcattgaccccgggagagtatggcgatagccccgtgcctacccctaggagttcatcggcagcatccatggcggaagaagaggccagcgctgtatccaccgccgctgctcagttcactaaactgcggagaggaatggacgagaaggagtttaccgtgcagatcaaggacgaggaaggcctcaagctgacatttcagaaacacaagcttatggccaacggggttatgggcgatggacacccattatttcacaaaaagaaaggaaaccgcaaaaagctggttgaactggaggttgagtgcatggaagaacctaaccacctggatgttgatttggaaacaaggatccccgtgattaataaggttgatggtaccctgctggtgggagaagatgctcctaggcgcgcagagctggaaatgtggctgcagggtcaccccgagtttgcagtcgacccccgttttctcgcatacatggaggacaggaggaagcagaaatggcagagatgcaaaaagaacaacaaagccgaattaaactgcttaggcatggaacctgtccagacagcgaactctcgaaacgggaagaaaggccatcacaccgagaccgtatttaacagggtgttaccaggacccatagcgcctgaaagtagcaaaaagcgcgctagaaggatgagacccgatttaagtaaaatgatggcattgatgcagggaggatccaccggcagtctcagtctccataacacctttcagcatagcagctcggggcttcagtctgtaagcagcctggggcattctagtgccacatcggcatcccttcctttcatgccgtttgttatgggaggagcgccatcctctcctcacgtggatagttcaaccatgctgcatcaccaccaccaccatcctcacccccaccaccatcatcaccatcatcccggtctgcgagccccaggttacccatcttcccccgtgacaaccgcttcaggaacaacacttagacttccgcctctgcagccagaagaagacgatgatgaagacgaagaagacgatgatgacctgagccagggatatgatagtagcgagcgggatttttcgttaatagatgaccctatgatgcccgcaaactcagactcatcagaagatgctgatgatta

SEQ ID NO: 66598 - DNA, 7745 bp, Artificial Sequence
  derived and/or modified sequence
atggctgaccctattatggaccttttcgacgaccctaacctcttcggcctggattcacttacggacgattcctttaatcaagtaacacaggatccaatcgaggaggcattaggcctcccttccagccttgattccctcgaccagatgaatcaggacggtggcggtggggatgtgggaaatagcagcgcctctgagcttgtaccccctcctgaagaaactgcacccacagaactgtctaaggagagcacagctcccgctcctgagtctatcacgctccacgactatacaacacagccggcttctcaagagcagcctgcgcagcctgtcctgcagactagtacccccacctcagggcttttgcaggtgtctaagagccaggaaatcctgagccagggtaatccatttatgggcgtatccgctacagctgttagctccagttccgctggcggtcaaccgccacagtctgctcctaaaattgtgattctgaaagcccctccaagctcctccgtaactggggcacatgtggcccagatccaggcgcaaggcataacatccacagcacagcctctggtggcagggacagccaacgggggaaaagtgaccttcacaaaagttctgactggcactccactccggccaggcgtgagcatcgtgagcggcaacaccgtcctggctgccaaggtcccaggcaaccaagctgctgtgcagagaatcgttcagccatctaggccagtcaaacagttagtactgcagccagtgaaggggagcgcacctgctgggaaccctggggcaacaggaccacctctgaagccagctgtgactttaacaagcaccccgactcaaggcgaaagcaagaggataacactggttctgcaacagccccagtcaggcggaccacagggacaccggcatgttgtactcggtagcctgcccggtaaaatagtcctgcagggcaaccagcttgctgctctgacgcaggctaagaacgcccagggccaaccagccaaagtggtgaccatccagctccaggtccagcaaccacagcaaaagattcagatagtgccgcaaccgcctagctcacagcctcaaccgcagcagcccccaagtacacagcccgtcacactgtcttcggtgcagcaggctcaaataatggggcctggccaatcccctggccagcgattaagtgtgccagtgaaagtggtgctgcagccacaggcaggctctagccagggggcatctagcggtctgagcgttgtgaaagtcctttcggcctctgaagtcgccgctctgtctagccctgctagttctgctccccacagcggaggaaaaaccggaatggaagagaacagaaggctcgaacaccagaagaagcaggagaaggccaatagaatagttgccgaggcaatcgcgagggcaagggccagaggggagcaaaatatccccagagttctaaacgaggacgaactccctagtgtgaggccagaagaagagggcgagaagaaacgtcggaagaagagcgcaggagagcgcctcaaggaggaaaagcctaagaaatctaaaaccagcggcgctagtaagacaaaggggaaaagcaagctcaatactattacgcccgtcgttggaaagaagaggaaacggaacacgagctcagataatagtgacgtggaggtcatgcccgcacagtcaccaagggaagatgaggagtccagcatacagaaacgcagatcaaatcgccaagtgaaacggaagaaatatacagaggacctcgatataaagataaccgatgacgaagaggaggaggaggtggacgtgactggcccaataaaacccgaacctatcctaccagagccagtacaggaacccgatggagagaccctccctagtatgcagttcttcgtggagaatccctctgaagaggatgctgctattgtggataaagttctgtcaatgcgcattgtaaagaaagaattaccctccggacagtacactgaggctgaggagttctttgtgaaatataagaactatagttacttacattgtgagtgggccactatttcgcagctggagaaagacaaacgcattcaccaaaagctgaaaagattcaagaccaagatggcccagatgagacacttcttccatgaagatgaggagcctttcaaccctgattatgtggaagtcgaccgcatcctcgacgagtctcactctatcgacaaggacaacggcgagcctgtaatatactatctagtgaagtggtgttcgctcccgtatgaagattccacttgggagcttaaagaagatgttgatgaaggaaaaatccgggagttcaaaagaatccagtcgagacatcccgaactgaagcgggtgaatcgcccacaggcctcggcctggaaaaagttggagctgagtcacgagtataagaatagaaatcaactacgggaatatcagttggagggcgtgaattggctgctctttaactggtacaaccgccagaactgcattcttgctgacgagatgggtctgggcaaaactatacagtccattgcttttcttcaggaagtttataatgtcgggatccacggaccgttcttggtgatcgctcctttgtctaccataacgaattgggaacgcgagtttaatacctggacagagatgaacaccattgtataccacggaagtcttgccagtcgccagatgatccagcagtacgagatgtactgtaaggacagccggggacgactgatccccggagcatataagttcgacgctcttattacaacctttgagatgatcctgtcagactgtcctgagctgcgcgagatcgagtggaggtgcgtgataatcgacgaggctcacagactgaaaaatcggaactgcaagcttctagattccttgaaacacatggatctcgagcataaggtgttgcttacggggacaccccttcaaaacacagtagaagaacttttcagcctgctccattttctggagccttcccaattccctagtgaaagcgagtttttaaaggatttcggggatttaaagaccgaggaacaggtgcaaaaactacaggccatacttaaacctatgatgctgagaagactcaaagaagacgtggagaagaacttagcacctaaacaagagacaatcattgaagtcgaactgacgaacattcagaaaaagtattaccgagccatactggagaagaattttagctttctcagtaagggggcagggcataccaacatgcccaacttgttaaacacaatgatggagctaaggaaatgctgcaaccatccatacctgataaacggcgctgaagagaagatcctcacagagttccgcgaagcatgccacatcattccacacgacttccacctccaagcaatggtcaggtctgcaggcaagttagtgctgatcgacaagctgttacctaaactcaaggctggaggccataaggttctcattttctctcaaatggtcaggtgtctggacattttggaagattatttgatccagcgccgatatttgtatgagcggatcgacggaagagtgcgcggtaacctcagacaggccgctatcgacaggttcagcaagcctgatagcgaccgcttcgtgtttctcttgtgcacaagagctgggggtttaggcatcaatcttacagccgcagatacatgtataatatttgattcagattggaacccccaaaacgacctccaggcacaagccagatgtcataggattggacagtctaaggccgtcaaagtgtacagactgatcacccgcaacagctacgagcgggaaatgttcgacaaggccagcttgaaactgggactagacaaggcggttctgcagtcaatgtccgggagagacggaaacataaccggaatacaacaattcagtaaaaaagagattgaagacttgctccgcaagggtgcgtacgctgcaataatggaggaggatgacgaaggctccaagttctgcgaggaagacatagatcaaatcctgctgaggcgcaccactacaataaccatcgagtccgaaggaaaagggagcacatttgccaaagccagcttcgtggccagtgaaaacaggaccgatatatcgctggacgaccccaacttctggcagaagtgggccaaaaaggctgatcttgatatggacttactgaactctaagaacaaccttgtcatagacaccccaagggttaggaaacagacccgtcactttagcactcttaaggacgacgatctggtcgagttttcggatctagagagtgaggatgatgagagaccccgttcccggcgacacgaccgccatcatgcttacgggaggactgactgcttccgggtggaaaagcatttactggtgtacgggtggggcagatggagggacatcctaagccacggacgcttcaagcgcaggatgacagagcgcgatgtggagactatctgtcgcgcaatcctggtctactgtctgctgcactatcgaggggacgaaaacattaaaggattcatttgggatttaatcagtcctgctgagaatggaaaaaccaaagaactgcaaaatcacagcggactgtctatccctgttccaagggggagaaaaggcaagaaggtcaagtcacagagcacatttgatattcacaaagccgattggattagaaagtacaatccagatacgttattccaggacgaatcctataaaaagcatctgaaacaccagtgtaataaagtgctcttgagagtaagaatgctttattatctcaggcaagaagtgatcggggaccaggcagaaaaagtgcttggtggggcaatcgcgtccgagatcgacatctggttccccgtggttgatcagctcgaagttcctaccacatggtgggactctgaggccgataagagtcttctgattggcgtgtttaagcatggctacgaaaagtacaacaccatgcgcgcagacccggctctgtgcttccttgaaaaggccggtcgcccagacgacaaggctatagctgccgaacacagggtgctggacaatttctccgatatcgttgaaggtgtggactttgacaaagactgcgaagaccccgaatacaagccacttcaagggccacctaaagatcaggacgatgaaggggatcccctcatgatgatggacgaagagatctcggtgattgatggcgatgaggcacaggtgacacagcagcctggccacctattttggcccccaggatcagccttgacagcccgactgaggcgcctggtgacagcgtaccagcgcagttataaacgggagcagatgaaaattgaggcagcggaaaggggggaccgcaggcgcaggcgttgcgaggctgcctttaagctgaaggaaattgccaggagagagaaacagcaacgatggacgcgccgagaacaaacagatttttaccgcgtggtcagcacgttcggcgtcgagtatgatcccgataccatgcagttccactgggaccgcttcaggacttttgccagacttgacaagaagaccgacgaatctttgacaaagtacttccatgggttcgtcgcgatgtgcaggcaagtgtgccgcttaccacctgctgccggtgatgagccacccgacccgaacctgttcatagaacccattactgaggagcgtgcctcaaggaccctgtaccggattgaactccttcgacgtctgcgagagcaagtcctgtgtcatccactcctagaggaccgactggccttgtgtcaaccacccggacccgaactacctaagtggtgggagccggtgagacacgacggagaactgctaagaggcgctgcacggcacggtgtgagtcaaactgattgcaatattatgcaggacccagatttctcctttctggccgctagaatgaattacatgcagaaccaccaggcgggtgcacccgcaccatcactctcccgttgctcaaccccactattgcaccagcaatacacttcccgcacagccagtccattgccgctgcgaccagatgctccggtggagaagtccccagaagaaactgccacacaagtgccaagcttggagagcctgacccttaaactggagcacgaagtagtagcccgtagccgcccaactcctcaagattacgaaatgcgggtctctccctctgatacaactcccttagtctctaggtctgtgccaccagtaaagctcgaggacgaagacgactccgatagcgagttggatctgtccaaactgtcaccgtcttctagcagtagttcttctagtagtagctctagctccagtaccgacgaatcagaagacgaaaaagaagaaaagctgacggaccagagccgttcaaagctgtatgacgaggagagcctcctgtcactcacaatgtctcaggatgggttccctaatgaggacggagaacaaatgacgcctgagttactcctgctgcaagaacgccaaagggcctctgaatggcccaaggatagggtgctgattaatagaattgaccttgtatgtcaagcagtgctctcaggcaagtggccttcttcaagacggagccaggaaatggtcaccggaggcatactcggccctggaaaccacctgcttgacagccctagcttgacccccggtgaatatggagacagccctgtacctacccctaggtcttcaagcgcagcatccatggccgaagaggaggctagcgccgtgtctaccgcagcagctcagttcaccaaactgagaagggggatggatgagaaagagttcacagtgcagattaaagatgaggaaggcttaaagctcacctttcagaagcacaaactcatggctaatggagtgatgggtgacggacatcccctgtttcataaaaagaaaggcaatcgcaagaaacttgtcgagttagaggtggagtgtatggaagaacccaaccatctggatgttgatctggaaaccaggatcccggttattaataaagtcgacgggacactcttagtgggggaggacgctcccaggcgcgctgaattagagatgtggctccagggtcaccccgaattcgctgttgatcctcggtttctggcatacatggaagaccgacgtaagcagaaatggcagcggtgcaagaagaataataaggccgaactgaattgccttgggatggaaccagtgcaaaccgctaatagccggaacggtaagaaaggacaccacaccgaaaccgtgttcaatcgcgttctcccgggaccaatagcgccagagtctagcaaaaagcgagccaggagaatgcgacctgatctctccaaaatgatggccctgatgcagggtggatccaccggctccctctccttacataatacgtttcagcactcttccagcgggctgcagtccgtgtcctcactgggccatagctccgctactagtgcttctctgccttttatgccatttgtgatggggggtgccccatccagcccccacgttgactccagtacaatgctgcatcatcaccaccatcacccacatccccatcatcaccaccaccatcatcctggcctgcgcgcacccggatacccttccagcccagtgactacagcctcaggcaccacactgaggctgccccctctacagcctgaagaagacgacgacgaggacgaagaggatgacgacgatctctcccagggttacgactcatctgaaagagattttagcctcattgatgatcctatgatgcccgctaattccgacagctcagaggacgccgatgatta

SEQ ID NO: 66599 - DNA, 8229 bp, Artificial Sequence
  derived and/or modified sequence
gccagtaccccccctccccttccctccctagaccttggagaagtaccctccattactttcccaagatggcagaccccatcatggatctgttcgatgacccaaatttatttggcctggactctctgactgatgacagctttaaccaggtcacacaagaccccattgaggaagcccttggactgccaagctctctggactccttggatcagatgaaccaggatggtggaggtggtgatgtggggaattcatcagcaagtgaactggtccctccaccagaggaaacagctcccacagaactttccaaagaatccacagctccagctccagaatccataaccttgcatgattataccactcagcctgccagccaggagcagccagcccaacctgtcttacagacatcgacgccaacatcaggacttttgcaagtctccaagagccaggagatcctgagccaagggaatcctttcatgggtgtctctgccacagctgtctcctccagtagtgctggagggcagccacctcagtcagcccctaagattgttatccttaaggccccaccaagctcctcagtcactggtgcccatgtggcacaaattcaggcccaaggtatcaccagcacagctcagcccctggtggcaggcacagccaatggtggaaaagtcacttttaccaaagtgctaaccggcacaccccttcgaccaggtgtttccattgtctctggtaatacagtgttggccgccaaggtccctgggaaccaggctgctgttcagcgcattgtccagcccagccgaccagtaaagcagctggtcctccagccagttaagggttcagctcctgctggaaaccctggggccacagggcccccactgaagcctgcagttacactgacctctacacctacccagggtgaatcgaaacgcatcaccctggtcctccagcagccacagtctggaggtccccaaggacatcggcatgttgtgctagggagtctaccaggcaagatagtgttacagggcaaccagctggcagccctgactcaagccaagaatgcccaagggcagcctgccaaggtagtaactatccagctgcaggtgcagcagccacagcaaaaaatccagattgtaccacaaccaccatcatcgcagccacagccccagcagccaccctccacccagccagtgactctgtcctctgtacagcaggctcagataatgggaccaggacaaagcccaggacaaagactttcagtaccagtcaaggtggtactgcagccacaggctggctcttcccaaggggcctcttctgggctctctgtagttaaagttctgagtgccagtgaagtggcagctttgtcatcaccagcaagctctgctcctcattcggggggaaagacaggaatggaggaaaaccgcagattggaacaccagaagaagcaagagaaagcaaatcggattgtagcagaggccattgcgagagcccgtgcccgcggtgagcagaacatacctcgagtcttaaatgaggacgagttgcccagcgttcggccagaggaggaaggcgagaagaaacgcaggaagaagagtgctggggagaggctgaaagaggagaagccaaagaagagtaaaacatctggtgcctccaaaacaaagggcaagagcaagctcaacaccatcactcctgtagtgggtaagaagagaaaacgtaatacctcatctgataattcagatgtggaagtcatgcctgcacagtcacctcgagaagatgaagaaagcagcattcagaagagacgctcaaaccgccaagttaagcgaaaaaaatatacagaggacctggatataaagatcacagatgatgaagaagaagaagaggtggatgtaactggtccaataaaacctgagcctatcctccctgaaccagtgcaagaaccagatggcgagactttgccttccatgcagttctttgtggagaatcccagtgaagaagatgcagccattgtagacaaagtgctttctatgcggattgtgaagaaggagctcccttctggacaatatactgaagcagaagaattctttgtcaagtacaagaactactcctatctgcattgtgaatgggctactatctcccaactagagaaggataagaggatacatcaaaaattaaagcgcttcaaaaccaaaatggctcagatgagacacttcttccatgaggatgaagagccctttaatccagactacgtagaggtggataggatattggatgagtctcacagtattgacaaggacaatggggagcccgttatttactacctggtgaaatggtgctctctgccctatgaggatagcacatgggagctaaaagaagatgttgatgagggcaagattcgagaatttaaacggattcagtcaaggcacccagaactcaaaagggtgaatcgtccgcaggcaagtgcctggaagaaattggagctatcacatgaatataaaaacagaaaccagctacgggaatatcagttggaaggggttaattggctgctctttaattggtataacaggcagaactgcatcctggctgatgagatgggattgggcaaaactattcagtccattgccttcttgcaggaagtatataatgtgggcatccatggtcccttcttggtcattgccccactgtccacaattactaactgggagcgagaatttaatacatggacagaaatgaacactattgtgtaccatggcagtctggccagcaggcagatgattcaacagtatgaaatgtactgcaaagattcacggggacgcctcatcccaggcgcatacaagtttgacgctctgatcaccacttttgagatgattttgtcagattgtcctgagcttcgtgaaattgaatggcgttgtgttatcattgatgaagcccatcgactgaaaaaccgtaattgcaagctgcttgatagtctcaagcacatggacctggaacacaaggtgctactcacaggaacaccattgcaaaatactgtagaagaactgtttagcttgcttcatttcttggaaccgtcacaatttccctcagaatcagagtttctcaaggactttggggatctcaagacagaggaacaggttcaaaagctacaggccattcttaagccaatgatgctgagaagactcaaagaggatgttgaaaaaaacttggcacccaaacaggaaacaattattgaagtagagctgactaatatccagaagaaatactatcgggctattttggagaagaatttctccttcctttccaaaggggcaggtcataccaacatgcctaatctacttaacacaatgatggagttgcgcaagtgctgcaaccacccatatctcatcaatggtgctgaagaaaaaatcctaacagaattccgtgaagcttgccatattatacctcatgactttcacctgcaggccatggttcgttcagccggcaaactggttcttattgacaagttgcttccaaagcttaaagctggtggccataaagttctgatcttctctcagatggtgcgctgcctagacatcctagaggattatttaatccagaggaggtacttatatgaacgtattgatgggcgagttagaggcaaccttcgacaggctgccattgaccgcttcagcaagcctgactcagaccgctttgtcttcttactgtgtacccgggctggtggacttggtattaatcttacagctgctgatacctgcatcatctttgattcagactggaatccacaaaatgacctgcaggcccaggcacgatgtcatcgaattgggcagagcaaagctgtgaaggtgtaccgcctcatcactcgtaattcctacgagagagagatgtttgataaggccagcctcaagttggggttggataaggctgtgcttcaatccatgagtggtcgggatggcaacattactggaatccaacagttctctaagaaggagattgaagatcttttaagaaaaggagcatatgcagccatcatggaggaagatgatgaaggctccaagttttgtgaagaggacattgaccagatcttgttaagacgaactacaaccatcaccattgaatctgaaggaaaaggttccacctttgctaaggcaagctttgttgcttctgaaaacaggacagatatttctttggatgaccccaacttttggcaaaagtgggccaaaaaggctgacctagacatggatctgctcaacagcaagaataatttggtaattgacacacctagagtacgaaaacaaacgcgccactttagcactctgaaagatgatgacctggtggaattctctgatttggaaagtgaggatgatgagcggccacgctcccgcagacatgaccgtcatcatgcctatgggcgcactgactgctttcgggtggaaaagcatctcctggtatatggttggggacgatggcgagatattttatctcatggacgcttcaagcgacgtatgactgaacgagatgtggagaccatttgtcgggccattctcgtgtactgtcttctacactaccgtggggatgaaaatattaaaggcttcatctgggacttgattagcccagctgaaaatggcaagacaaaagaattgcagaatcattcaggtctatctatccctgtgcctcgtggacgcaaaggaaaaaaagtaaagtcacaaagcacttttgatatccataaggcagattggatccggaaatataaccctgacactttgttccaagatgaaagttataagaagcacttgaaacatcagtgtaacaaggtactgttgcgggtacgaatgctatactacctgaggcaggaggttattggagaccaagcagaaaaggtgttagggggtgcgattgccagtgagattgacatatggttcccagtagtggatcaactggaggttccaacaacttggtgggacagtgaggctgacaagtcgctgctcattggagtctttaaacatggctatgagaaatataataccatgagggcagacccagccttatgtttcctagaaaaggctggccgaccagatgacaaagcaattgcagcagaacatcgagtgttggataacttctctgacatagtagaaggggttgactttgataaagattgtgaagatcctgaatataaaccactccaaggtcccccaaaggaccaagatgatgagggtgatcccttgatgatgatggatgaggagatctcagtgattgatggagatgaagcccaggtgacccaacagccaggccatttattctggcctccgggctctgccctaacagctaggcttcggcgtctagtaacagcgtatcagcgcagctacaagagagaacaaatgaagatagaggctgcagaacgtggggaccggcgaaggcggcgttgtgaagcagccttcaagctgaaagaaattgcacggcgggagaaacaacaacgatggacaaggcgtgaacaaactgatttttatcgagtggtgtctacgtttggtgtggaatatgaccctgacaccatgcagttccattgggatcgcttccgcacttttgctcgactagacaaaaagacagatgaaagccttaccaagtacttccatggctttgtggccatgtgccgccaagtatgccgccttcccccagcagctggagatgaaccccccgaccctaacctgttcattgagcccatcactgaggagagagcctcacggactctctaccgtatagaattgcttcggcgcttacgggaacaagttttatgccacccccttttggaagatcggctggcattgtgtcagcctcctggtcctgaattgcccaaatggtgggagcctgttcggcatgatggggagcttctaagaggggcagcccgccatggggtgagccaaacagactgcaacatcatgcaggacccagacttctcttttctggctgcccgtatgaattatatgcagaaccatcaagcaggagcaccagctccatccttgtcacgctgctctactccactgctgcaccagcagtatacctcacgcactgcctcaccactgcccctgcgcccagatgctcctgttgaaaagtcacccgaggagacagctacccaggtccccagtctggagagtctgactttaaagctagagcacgaggtggtggccaggagccgaccaaccccacaagactatgagatgcgagtatccccctctgatactacccctctggtttcccggagtgttccaccagtcaaactggaggatgaggatgattcggactctgagctggacttgagcaagctgtcaccatcttcttcttcttcctcatcctcatccagctccagctccagcactgatgagagtgaggatgagaaggaagagaagctaactgaccagtcccgctcaaagctctatgatgaagagagtctcctgtccctcactatgtcccaagatggattcccaaatgaagatggagaacaaatgacccctgagcttctgctactgcaggaaagacaaagagcctctgagtggcccaaggatcgtgtcctgataaaccgtattgacctcgtctgccaggctgtactctcagggaagtggccttctagccgtaggagccaggaaatggtaacaggaggaattttggggccaggcaaccacttgctagacagtccctcattgactcctggagaatatggtgactctccagtccccacaccacgaagtagtagtgcagcttccatggcagaggaggaagcatctgcagtcagcacagcggcagcccagttcaccaaacttcgccgaggcatggatgaaaaggagtttacagttcaaatcaaagatgaggaaggattgaagttaacattccagaagcacaagttgatggcgaatggagtaatgggagatggacatccactgtttcataagaagaaggggaacagaaagaagctagtagagctggaggtggagtgcatggaagagcctaatcaccttgatgtggacctggagacccggatccctgtcatcaataaggtggatggtactttgctggtgggtgaggatgcccctcgccgggctgaactggagatgtggttacagggtcatccagagtttgctgttgatccccgatttctagcgtatatggaggatcgcagaaaacagaagtggcaaagatgtaaaaaaaataataaggcagaattgaactgtttgggaatggaaccagtacagacagctaactctagaaatgggaaaaagggtcatcacactgaaacggtgttcaaccgggttttgccagggcctattgcaccagagagcagcaagaagcgggcccgtaggatgcgaccagacctttctaagatgatggccctcatgcagggtggaagcactgggtctctatctctgcataacacgttccaacacagcagtagtggcctacagtctgtgtcatctttgggtcacagcagtgccacttctgcatctttgccttttatgccatttgtgatgggtggtgcaccatcatcccctcatgtagactccagcaccatgcttcatcaccaccaccaccacccccacccccaccatcaccaccatcaccatccaggcttgagagcccctggctacccctcttcaccagtgactaccgcctctggtactaccttgcggttgccaccactgcaacctgaggaggatgacgatgaggatgaagaagatgatgatgacttatctcagggctatgatagctcagaaagggacttctcactcattgatgatcctatgatgccagctaactcagactccagtgaagatgctgatgactgaagccccagcatgggccccattgcttgggcggctgctgtattttcatttactctggcccttggactatggaaacgtgggaggggcaggggagatgtggggaagtccaggactccaggaggtgaaaaggaaaaaaaaaaaaaaatgtacctgattgctcccaattatgagaggattgggtgggcaggggaactcctaaaataatacatgaccacttcctcatttctggggaaggaaaggagactagagcagctggtgtgctcacccctccctagtcacctccattaaccacagactatgtagcgctggccctagcctctggcagagcctgttcctggccgaactgtggatacagctggagggtcaggaactgttaccttctttccccttggcattaataaatttaagttaatccttttcc

SEQ ID NO: 66600 - DNA, 7420 bp, Artificial Sequence
  derived and/or modified sequence
tgctggagagacagggagaggggcgaaccggccccccacagccactgcaggagttccaccatcttcctctgaagacgtagccatcttgctccatgaagggtgaatcgaaacgcatcaccctggtcctccagcagccacagtctggaggtccccaaggacatcggcatgttgtgctagggagtctaccaggcaagatagtgttacagggcaaccagctggcagccctgactcaagccaagaatgcccaagggcagcctgccaaggtagtaactatccagctgcaggtgcagcagccacagcaaaaaatccagattgtaccacaaccaccatcatcgcagccacagccccagcagccaccctccacccagccagtgactctgtcctctgtacagcaggctcagataatgggaccaggacaaagcccaggacaaagactttcagtaccagtcaaggtggtactgcagccacaggctggctcttcccaaggggcctcttctgggctctctgtagttaaagttctgagtgccagtgaagtggcagctttgtcatcaccagcaagctctgctcctcattcggggggaaagacaggaatggaggaaaaccgcagattggaacaccagaagaagcaagagaaagcaaatcggattgtagcagaggccattgcgagagcccgtgcccgcggtgagcagaacatacctcgagtcttaaatgaggacgagttgcccagcgttcggccagaggaggaaggcgagaagaaacgcaggaagaagagtgctggggagaggctgaaagaggagaagccaaagaagagtaaaacatctggtgcctccaaaacaaagggcaagagcaagctcaacaccatcactcctgtagtgggtaagaagagaaaacgtaatacctcatctgataattcagatgtggaagtcatgcctgcacagtcacctcgagaagatgaagaaagcagcattcagaagagacgctcaaaccgccaagttaagcgaaaaaaatatacagaggacctggatataaagatcacagatgatgaagaagaagaagaggtggatgtaactggtccaataaaacctgagcctatcctccctgaaccagtgcaagaaccagatggcgagactttgccttccatgcagttctttgtggagaatcccagtgaagaagatgcagccattgtagacaaagtgctttctatgcggattgtgaagaaggagctcccttctggacaatatactgaagcagaagaattctttgtcaagtacaagaactactcctatctgcattgtgaatgggctactatctcccaactagagaaggataagaggatacatcaaaaattaaagcgcttcaaaaccaaaatggctcagatgagacacttcttccatgaggatgaagagccctttaatccagactacgtagaggtggataggatattggatgagtctcacagtattgacaaggacaatggggagcccgttatttactacctggtgaaatggtgctctctgccctatgaggatagcacatgggagctaaaagaagatgttgatgagggcaagattcgagaatttaaacggattcagtcaaggcacccagaactcaaaagggtgaatcgtccgcaggcaagtgcctggaagaaattggagctatcacatgaatataaaaacagaaaccagctacgggaatatcagttggaaggggttaattggctgctctttaattggtataacaggcagaactgcatcctggctgatgagatgggattgggcaaaactattcagtccattgccttcttgcaggaagtatataatgtgggcatccatggtcccttcttggtcattgccccactgtccacaattactaactgggagcgagaatttaatacatggacagaaatgaacactattgtgtaccatggcagtctggccagcaggcagatgattcaacagtatgaaatgtactgcaaagattcacggggacgcctcatcccaggcgcatacaagtttgacgctctgatcaccacttttgagatgattttgtcagattgtcctgagcttcgtgaaattgaatggcgttgtgttatcattgatgaagcccatcgactgaaaaaccgtaattgcaagctgcttgatagtctcaagcacatggacctggaacacaaggtgctactcacaggaacaccattgcaaaatactgtagaagaactgtttagcttgcttcatttcttggaaccgtcacaatttccctcagaatcagagtttctcaaggactttggggatctcaagacagaggaacaggttcaaaagctacaggccattcttaagccaatgatgctgagaagactcaaagaggatgttgaaaaaaacttggcacccaaacaggaaacaattattgaagtagagctgactaatatccagaagaaatactatcgggctattttggagaagaatttctccttcctttccaaaggggcaggtcataccaacatgcctaatctacttaacacaatgatggagttgcgcaagtgctgcaaccacccatatctcatcaatggtgctgaagaaaaaatcctaacagaattccgtgaagcttgccatattatacctcatgactttcacctgcaggccatggttcgttcagccggcaaactggttcttattgacaagttgcttccaaagcttaaagctggtggccataaagttctgatcttctctcagatggtgcgctgcctagacatcctagaggattatttaatccagaggaggtacttatatgaacgtattgatgggcgagttagaggcaaccttcgacaggctgccattgaccgcttcagcaagcctgactcagaccgctttgtcttcttactgtgtacccgggctggtggacttggtattaatcttacagctgctgatacctgcatcatctttgattcagactggaatccacaaaatgacctgcaggcccaggcacgatgtcatcgaattgggcagagcaaagctgtgaaggtgtaccgcctcatcactcgtaattcctacgagagagagatgtttgataaggccagcctcaagttggggttggataaggctgtgcttcaatccatgagtggtcgggatggcaacattactggaatccaacagttctctaagaaggagattgaagatcttttaagaaaaggagcatatgcagccatcatggaggaagatgatgaaggctccaagttttgtgaagaggacattgaccagatcttgttaagacgaactacaaccatcaccattgaatctgaaggaaaaggttccacctttgctaaggcaagctttgttgcttctgaaaacaggacagatatttctttggatgaccccaacttttggcaaaagtgggccaaaaaggctgacctagacatggatctgctcaacagcaagaataatttggtaattgacacacctagagtacgaaaacaaacgcgccactttagcactctgaaagatgatgacctggtggaattctctgatttggaaagtgaggatgatgagcggccacgctcccgcagacatgaccgtcatcatgcctatgggcgcactgactgctttcgggtggaaaagcatctcctggtatatggttggggacgatggcgagatattttatctcatggacgcttcaagcgacgtatgactgaacgagatgtggagaccatttgtcgggccattctcgtgtactgtcttctacactaccgtggggatgaaaatattaaaggcttcatctgggacttgattagcccagctgaaaatggcaagacaaaagaattgcagaatcattcaggtctatctatccctgtgcctcgtggacgcaaaggaaaaaaagtaaagtcacaaagcacttttgatatccataaggcagattggatccggaaatataaccctgacactttgttccaagatgaaagttataagaagcacttgaaacatcagtgtaacaaggtactgttgcgggtacgaatgctatactacctgaggcaggaggttattggagaccaagcagaaaaggtgttagggggtgcgattgccagtgagattgacatatggttcccagtagtggatcaactggaggttccaacaacttggtgggacagtgaggctgacaagtcgctgctcattggagtctttaaacatggctatgagaaatataataccatgagggcagacccagccttatgtttcctagaaaaggctggccgaccagatgacaaagcaattgcagcagaacatcgagtgttggataacttctctgacatagtagaaggggttgactttgataaagattgtgaagatcctgaatataaaccactccaaggtcccccaaaggaccaagatgatgagggtgatcccttgatgatgatggatgaggagatctcagtgattgatggagatgaagcccaggtgacccaacagccaggccatttattctggcctccgggctctgccctaacagctaggcttcggcgtctagtaacagcgtatcagcgcagctacaagagagaacaaatgaagatagaggctgcagaacgtggggaccggcgaaggcggcgttgtgaagcagccttcaagctgaaagaaattgcacggcgggagaaacaacaacgatggacaaggcgtgaacaaactgatttttatcgagtggtgtctacgtttggtgtggaatatgaccctgacaccatgcagttccattgggatcgcttccgcacttttgctcgactagacaaaaagacagatgaaagccttaccaagtacttccatggctttgtggccatgtgccgccaagtatgccgccttcccccagcagctggagatgaaccccccgaccctaacctgttcattgagcccatcactgaggagagagcctcacggactctctaccgtatagaattgcttcggcgcttacgggaacaagttttatgccacccccttttggaagatcggctggcattgtgtcagcctcctggtcctgaattgcccaaatggtgggagcctgttcggcatgatggggagcttctaagaggggcagcccgccatggggtgagccaaacagactgcaacatcatgcaggacccagacttctcttttctggctgcccgtatgaattatatgcagaaccatcaagcaggagcaccagctccatccttgtcacgctgctctactccactgctgcaccagcagtatacctcacgcactgcctcaccactgcccctgcgcccagatgctcctgttgaaaagtcacccgaggagacagctacccaggtccccagtctggagagtctgactttaaagctagagcacgaggtggtggccaggagccgaccaaccccacaagactatgagatgcgagtatccccctctgatactacccctctggtttcccggagtgttccaccagtcaaactggaggatgaggatgattcggactctgagctggacttgagcaagctgtcaccatcttcttcttcttcctcatcctcatccagctccagctccagcactgatgagagtgaggatgagaaggaagagaagctaactgaccagtcccgctcaaagctctatgatgaagagagtctcctgtccctcactatgtcccaagatggattcccaaatgaagatggagaacaaatgacccctgagcttctgctactgcaggaaagacaaagagcctctgagtggcccaaggatcgtgtcctgataaaccgtattgacctcgtctgccaggctgtactctcagggaagtggccttctagccgtaggagccaggaaatggtaacaggaggaattttggggccaggcaaccacttgctagacagtccctcattgactcctggagaatatggtgactctccagtccccacaccacgaagtagtagtgcagcttccatggcagaggaggaagcatctgcagtcagcacagcggcagcccagttcaccaaacttcgccgaggcatggatgaaaaggagtttacagttcaaatcaaagatgaggaaggattgaagttaacattccagaagcacaagttgatggcgaatggagtaatgggagatggacatccactgtttcataagaagaaggggaacagaaagaagctagtagagctggaggtggagtgcatggaagagcctaatcaccttgatgtggacctggagacccggatccctgtcatcaataaggtggatggtactttgctggtgggtgaggatgcccctcgccgggctgaactggagatgtggttacagggtcatccagagtttgctgttgatccccgatttctagcgtatatggaggatcgcagaaaacagaagtggcaaagatgtaaaaaaaataataaggcagaattgaactgtttgggaatggaaccagtacagacagctaactctagaaatgggaaaaagggtcatcacactgaaacggtgttcaaccgggttttgccagggcctattgcaccagagagcagcaagaagcgggcccgtaggatgcgaccagacctttctaagatgatggccctcatgcagggtggaagcactgggtctctatctctgcataacacgttccaacacagcagtagtggcctacagtctgtgtcatctttgggtcacagcagtgccacttctgcatctttgccttttatgccatttgtgatgggtggtgcaccatcatcccctcatgtagactccagcaccatgcttcatcaccaccaccaccacccccacccccaccatcaccaccatcaccatccaggcttgagagcccctggctacccctcttcaccagtgactaccgcctctggtactaccttgcggttgccaccactgcaacctgaggaggatgacgatgaggatgaagaagatgatgatgacttatctcagggctatgatagctcagaaagggacttctcactcattgatgatcctatgatgccagctaactcagactccagtgaagatgctgatgactgaagccccagcatgggccccattgcttgggcggctgctgtattttcatttactctggcccttggactatggaaacgtgggaggggcaggggagatgtggggaagtccaggactccaggaggtgaaaaggaaaaaaaaaaaaaaatgtacctgattgctcccaattatgagaggattgggtgggcaggggaactcctaaaataatacatgaccacttcctcatttctggggaaggaaaggagactagagcagctggtgtgctcacccctccctagtcacctccattaaccacagactatgtagcgctggccctagcctctggcagagcctgttcctggccgaactgtggatacagctggagggtcaggaactgttaccttctttccccttggcattaataaatttaagttaatccttttcca

SEQ ID NO: 66601 - DNA, 8137 bp, Artificial Sequence
  derived and/or modified sequence
agggtgagttgaaacgctgcctggaaaggaagtaccaggacttgcacaggagttccaccatcttcctctgaagacgtagccatcttgctccatgaaggtcaggacaatctgacatgcacttgtttcttgcctctatacttgaagagtagtcctcttacattgtgtacatttttttcttaataggggaggggaggggagagccagtaccccccctccccttccctccctagaccttggagaagtaccctccattactttcccaagatggcagaccccatcatggatctgttcgatgacccaaatttatttggcctggactctctgactgatgacagctttaaccaggtcacacaagaccccattgaggaagcccttggactgccaagctctctggactccttggatcagatgaaccaggatggtggaggtggtgatgtggggaattcatcagcaagtgaactggtccctccaccagaggaaacagctcccacagaactttccaaagaatccacagctccagctccagaatccataaccttgcatgattataccactcagcctgccagccaggagcagccagcccaacctgtcttacagacatcgacgccaacatcaggacttttgcaagtctccaagagccaggagatcctgagccaagggaatcctttcatgggtgtctctgccacagctgtctcctccagtagtgctggagggcagccacctcagtcagcccctaagattgttatccttaaggccccaccaagctcctcagtcactggtgcccatgtggcacaaattcaggcccaaggtatcaccagcacagctcagcccctggtggcaggcacagccaatggtggaaaagtcacttttaccaaagtgctaaccggcacaccccttcgaccaggtgtttccattgtctctggtaatacagtgttggccgccaaggtccctgggaaccaggctgctgttcagcgcattgtccagcccagccgaccagtaaagcagctggtcctccagccagttaagggttcagctcctgctggaaaccctggggccacagggcccccactgaagcctgcagttacactgacctctacacctacccagggtgaatcgaaacgcatcaccctggtcctccagcagccacagtctggaggtccccaaggacatcggcatgttgtgctagggagtctaccaggcaagatagtgttacagggcaaccagctggcagccctgactcaagccaagaatgcccaagggcagcctgccaaggtagtaactatccagctgcaggtgcagcagccacagcaaaaaatccagattgtaccacaaccaccatcatcgcagccacagccccagcagccaccctccacccagccagtgactctgtcctctgtacagcaggctcagataatgggaccaggacaaagcccaggacaaagactttcagtaccagtcaaggtggtactgcagccacaggctggctcttcccaaggggcctcttctgggctctctgtagttaaagttctgagtgccagtgaagtggcagctttgtcatcaccagcaagctctgctcctcattcggggggaaagacaggaatggaggaaaaccgcagattggaacaccagaagaagcaagagaaagcaaatcggattgtagcagaggccattgcgagagcccgtgcccgcggtgagcagaacatacctcgagtcttaaatgaggacgagttgcccagcgttcggccagaggaggaaggcgagaagaaacgcaggaagaagagtgctggggagaggctgaaagaggagaagccaaagaagagtaaaacatctggtgcctccaaaacaaagggcaagagcaagctcaacaccatcactcctgtagtgggtaagaagagaaaacgtaatacctcatctgataattcagatgtggaagtcatgcctgcacagtcacctcgagaagatgaagaaagcagcattcagaagagacgctcaaaccgccaagttaagcgaaaaaaatatacagaggacctggatataaagatcacagatgatgaagaagaagaagaggtggatgtaactggtccaataaaacctgagcctatcctccctgaaccagtgcaagaaccagatggcgagactttgccttccatgcagttctttgtggagaatcccagtgaagaagatgcagccattgtagacaaagtgctttctatgcggattgtgaagaaggagctcccttctggacaatatactgaagcagaagaattctttgtcaagtacaagaactactcctatctgcattgtgaatgggctactatctcccaactagagaaggataagaggatacatcaaaaattaaagcgcttcaaaaccaaaatggctcagatgagacacttcttccatgaggatgaagagccctttaatccagactacgtagaggtggataggatattggatgagtctcacagtattgacaaggacaatggggagcccgttatttactacctggtgaaatggtgctctctgccctatgaggatagcacatgggagctaaaagaagatgttgatgagggcaagattcgagaatttaaacggattcagtcaaggcacccagaactcaaaagggtgaatcgtccgcaggcaagtgcctggaagaaattggagctatcacatgaatataaaaacagaaaccagctacgggaatatcagttggaaggggttaattggctgctctttaattggtataacaggcagaactgcatcctggctgatgagatgggattgggcaaaactattcagtccattgccttcttgcaggaagtatataatgtgggcatccatggtcccttcttggtcattgccccactgtccacaattactaactgggagcgagaatttaatacatggacagaaatgaacactattgtgtaccatggcagtctggccagcaggcagatgattcaacagtatgaaatgtactgcaaagattcacggggacgcctcatcccaggcgcatacaagtttgacgctctgatcaccacttttgagatgattttgtcagattgtcctgagcttcgtgaaattgaatggcgttgtgttatcattgatgaagcccatcgactgaaaaaccgtaattgcaagctgcttgatagtctcaagcacatggacctggaacacaaggtgctactcacaggaacaccattgcaaaatactgtagaagaactgtttagcttgcttcatttcttggaaccgtcacaatttccctcagaatcagagtttctcaaggactttggggatctcaagacagaggaacaggttcaaaagctacaggccattcttaagccaatgatgctgagaagactcaaagaggatgttgaaaaaaacttggcacccaaacaggaaacaattattgaagtagagctgactaatatccagaagaaatactatcgggctattttggagaagaatttctccttcctttccaaaggggcaggtcataccaacatgcctaatctacttaacacaatgatggagttgcgcaagtgctgcaaccacccatatctcatcaatggtgctgaagaaaaaatcctaacagaattccgtgaagcttgccatattatacctcatgactttcacctgcaggccatggttcgttcagccggcaaactggttcttattgacaagttgcttccaaagcttaaagctggtggccataaagttctgatcttctctcagatggtgcgctgcctagacatcctagaggattatttaatccagaggaggtacttatatgaacgtattgatgggcgagttagaggcaaccttcgacaggctgccattgaccgcttcagcaagcctgactcagaccgctttgtcttcttactgtgtacccgggctggtggacttggtattaatcttacagctgctgatacctgcatcatctttgattcagactggaatccacaaaatgacctgcaggcccaggcacgatgtcatcgaattgggcagagcaaagctgtgaaggtgtaccgcctcatcactcgtaattcctacgagagagagatgtttgataaggccagcctcaagttggggttggataaggctgtgcttcaatccatgagtggtcgggatggcaacattactggaatccaacagttctctaagaaggagattgaagatcttttaagaaaaggagcatatgcagccatcatggaggaagatgatgaaggctccaagttttgtgaagaggacattgaccagatcttgttaagacgaactacaaccatcaccattgaatctgaaggaaaaggttccacctttgctaaggcaagctttgttgcttctgaaaacaggacagatatttctttggatgaccccaacttttggcaaaagtgggccaaaaaggctgacctagacatggatctgctcaacagcaagaataatttggtaattgacacacctagagtacgaaaacaaacgcgccactttagcactctgaaagatgatgacctggtggaattctctgatttggaaagtgaggatgatgagcggccacgctcccgcagacatgaccgtcatcatgcctatgggcgcactgactgctttcgggtggaaaagcatctcctggtatatggttggggacgatggcgagatattttatctcatggacgcttcaagcgacgtatgactgaacgagatgtggagaccatttgtcgggccattctcgtgtactgtcttctacactaccgtggggatgaaaatattaaaggcttcatctgggacttgattagcccagctgaaaatggcaagacaaaagaattgcagaatcattcaggtctatctatccctgtgcctcgtggacgcaaaggaaaaaaagtaaagtcacaaagcacttttgatatccataaggcagattggatccggaaatataaccctgacactttgttccaagatgaaagttataagaagcacttgaaacatcagtgtaacaaggtactgttgcgggtacgaatgctatactacctgaggcaggaggttattggagaccaagcagaaaaggtgttagggggtgcgattgccagtgagattgacatatggttcccagtagtggatcaactggaggttccaacaacttggtgggacagtgaggctgacaagtcgctgctcattggagtctttaaacatggctatgagaaatataataccatgagggcagacccagccttatgtttcctagaaaaggctggccgaccagatgacaaagcaattgcagcagaacatcgagtgttggataacttctctgacatagtagaaggggttgactttgataaagattgtgaagatcctgaatataaaccactccaaggtcccccaaaggaccaagatgatgagggtgatcccttgatgatgatggatgaggagatctcagtgattgatggagatgaagcccaggtgacccaacagccaggccatttattctggcctccgggctctgccctaacagctaggcttcggcgtctagtaacagcgtatcagcgcagctacaagagagaacaaatgaagatagaggctgcagaacgtggggaccggcgaaggcggcgttgtgaagcagccttcaagctgaaagaaattgcacggcgggagaaacaacaacgatggacaaggcgtgaacaaactgatttttatcgagtggtgtctacgtttggtgtggaatatgaccctgacaccatgcagttccattgggatcgcttccgcacttttgctcgactagacaaaaagacagatgaaagccttaccaagtacttccatggctttgtggccatgtgccgccaagtatgccgccttcccccagcagctggagatgaaccccccgaccctaacctgttcattgagcccatcactgaggagagagcctcacggactctctaccgtatagaattgcttcggcgcttacgggaacaagttttatgccacccccttttggaagatcggctggcattgtgtcagcctcctggtcctgaattgcccaaatggtgggagcctgttcggcatgatggggagcttctaagaggggcagcccgccatggggtgagccaaacagactgcaacatcatgcaggacccagacttctcttttctggctgcccgtatgaattatatgcagaaccatcaagcaggagcaccagctccatccttgtcacgctgctctactccactgctgcaccagcagtatacctcacgcactgcctcaccactgcccctgcgcccagatgctcctgttgaaaagtcacccgaggagacagctacccaggtccccagtctggagagtctgactttaaagctagagcacgaggtggtggccaggagccgaccaaccccacaagactatgagatgcgagtatccccctctgatactacccctctggtttcccggagtgttccaccagtcaaactggaggatgaggatgattcggactctgagctggacttgagcaagctgtcaccatcttcttcttcttcctcatcctcatccagctccagctccagcactgatgagagtgaggatgagaaggaagagaagctaactgaccagtcccgctcaaagctctatgatgaagagagtctcctgtccctcactatgtcccaagatggattcccaaatgaagatggagaacaaatgacccctgagcttctgctactgcaggaaagacaaagagcctctgagtggcccaaggatcgtgtcctgataaaccgtattgacctcgtctgccaggctgtactctcagggaagtggccttctagccgtaggagccaggaaatggtaacaggaggaattttggggccaggcaaccacttgctagacagtccctcattgactcctggagaatatggtgactctccagtccccacaccacgaagtagtagtgcagcttccatggcagaggaggaagcatctgcagtcagcacagcggcagcccagttcaccaaacttcgccgaggcatggatgaaaaggagtttacagttcaaatcaaagatgaggaaggattgaagttaacattccagaagcacaagttgatggcgaatggagtaatgggagatggacatccactgtttcataagaagaaggggaacagaaagaagctagtagagctggaggtggagtgcatggaagagcctaatcaccttgatgtggacctggagacccggatccctgtcatcaataaggtggatggtactttgctggtgggtgaggatgcccctcgccgggctgaactggagatgtggttacagggtcatccagagtttgctgttgatccccgatttctagcgtatatggaggatcgcagaaaacagaagtggcaaagatgtaaaaaaaataataaggcagaattgaactgtttgggaatggaaccagtacagacagctaactctagaaatgggaaaaagggtcatcacactgaaacggtgttcaaccgggttttgccagggcctattgcaccagagagcagcaagaagcgggcccgtaggatgcgaccagacctttctaagatgatggccctcatgcagggtggaagcactgggtctctatctctgcataacacgttccaacacagcagtagtggcctacagtctgtgtcatctttgggtcacagcagtgccacttctgcatctttgccttttatgccatttgtgatgggtggtgcaccatcatcccctcatgtagactccagcaccatgcttcatcaccaccaccaccacccccacccccaccatcaccaccatcaccatccaggcttgagagcccctggctacccctcttcaccagtgactaccgcctctggtactaccttgcggttgccaccactgcaacctgaggaggatgacgatgaggatgaagaagatgatgatgacttatctcagggctatgatagctcagaaagggacttctcactcattgatgatcctatgatgccagctaactcagactccagtgaagatgctgatgactgaagccccagcatgggccccattgcttgggcggctgctgtattttcatttactctggcccttggactatggaaacgtgggaggggcaggggagatgtggggaagtccaggactccaggaggtgaaaagg

SEQ ID NO: 66602 - DNA, 7746 bp, Artificial Sequence
  derived and/or modified sequence
atggccgaccccatcatggacctgttcgacgaccccaacctgttcggcctggacagcctgaccgacgacagcttcaaccaggtgacccaggaccccatcgaggaggccctgggcctgcccagcagcctggacagcctggaccagatgaaccaggacggcggcggcggcgacgtgggcaacagcagcgccagcgagctggtgcccccccccgaggagaccgcccccaccgagctgagcaaggagagcaccgcccccgcccccgagagcatcaccctgcacgactacaccacccagcccgccagccaggagcagcccgcccagcccgtgctgcagaccagcacccccaccagcggcctgctgcaggtgagcaagagccaggagatcctgagccagggcaaccccttcatgggcgtgagcgccaccgccgtgagcagcagcagcgccggcggccagcccccccagagcgcccccaagatcgtgatcctgaaggccccccccagcagcagcgtgaccggcgcccacgtggcccagatccaggcccagggcatcaccagcaccgcccagcccctggtggccggcaccgccaacggcggcaaggtgaccttcaccaaggtgctgaccggcacccccctgagacccggcgtgagcatcgtgagcggcaacaccgtgctggccgccaaggtgcccggcaaccaggccgccgtgcagagaatcgtgcagcccagcagacccgtgaagcagctggtgctgcagcccgtgaagggcagcgcccccgccggcaaccccggcgccaccggcccccccctgaagcccgccgtgaccctgaccagcacccccacccagggcgagagcaagagaatcaccctggtgctgcagcagccccagagcggcggcccccagggccacagacacgtggtgctgggcagcctgcccggcaagatcgtgctgcagggcaaccagctggccgccctgacccaggccaagaacgcccagggccagcccgccaaggtggtgaccatccagctgcaggtgcagcagccccagcagaagatccagatcgtgccccagccccccagcagccagccccagccccagcagccccccagcacccagcccgtgaccctgagcagcgtgcagcaggcccagatcatgggccccggccagagccccggccagagactgagcgtgcccgtgaaggtggtgctgcagccccaggccggcagcagccagggcgccagcagcggcctgagcgtggtgaaggtgctgagcgccagcgaggtggccgccctgagcagccccgccagcagcgccccccacagcggcggcaagaccggcatggaggagaacagaagactggagcaccagaagaagcaggagaaggccaacagaatcgtggccgaggccatcgccagagccagagccagaggcgagcagaacatccccagagtgctgaacgaggacgagctgcccagcgtgagacccgaggaggagggcgagaagaagagaagaaagaagagcgccggcgagagactgaaggaggagaagcccaagaagagcaagaccagcggcgccagcaagaccaagggcaagagcaagctgaacaccatcacccccgtggtgggcaagaagagaaagagaaacaccagcagcgacaacagcgacgtggaggtgatgcccgcccagagccccagagaggacgaggagagcagcatccagaagagaagaagcaacagacaggtgaagagaaagaagtacaccgaggacctggacatcaagatcaccgacgacgaggaggaggaggaggtggacgtgaccggccccatcaagcccgagcccatcctgcccgagcccgtgcaggagcccgacggcgagaccctgcccagcatgcagttcttcgtggagaaccccagcgaggaggacgccgccatcgtggacaaggtgctgagcatgagaatcgtgaagaaggagctgcccagcggccagtacaccgaggccgaggagttcttcgtgaagtacaagaactacagctacctgcactgcgagtgggccaccatcagccagctggagaaggacaagagaatccaccagaagctgaagagattcaagaccaagatggcccagatgagacacttcttccacgaggacgaggagcccttcaaccccgactacgtggaggtggacagaatcctggacgagagccacagcatcgacaaggacaacggcgagcccgtgatctactacctggtgaagtggtgcagcctgccctacgaggacagcacctgggagctgaaggaggacgtggacgagggcaagatcagagagttcaagagaatccagagcagacaccccgagctgaagagagtgaacagaccccaggccagcgcctggaagaagctggagctgagccacgagtacaagaacagaaaccagctgagagagtaccagctggagggcgtgaactggctgctgttcaactggtacaacagacagaactgcatcctggccgacgagatgggcctgggcaagaccatccagagcatcgccttcctgcaggaggtgtacaacgtgggcatccacggccccttcctggtgatcgcccccctgagcaccatcaccaactgggagagagagttcaacacctggaccgagatgaacaccatcgtgtaccacggcagcctggccagcagacagatgatccagcagtacgagatgtactgcaaggacagcagaggcagactgatccccggcgcctacaagttcgacgccctgatcaccaccttcgagatgatcctgagcgactgccccgagctgagagagatcgagtggagatgcgtgatcatcgacgaggcccacagactgaagaacagaaactgcaagctgctggacagcctgaagcacatggacctggagcacaaggtgctgctgaccggcacccccctgcagaacaccgtggaggagctgttcagcctgctgcacttcctggagcccagccagttccccagcgagagcgagttcctgaaggacttcggcgacctgaagaccgaggagcaggtgcagaagctgcaggccatcctgaagcccatgatgctgagaagactgaaggaggacgtggagaagaacctggcccccaagcaggagaccatcatcgaggtggagctgaccaacatccagaagaagtactacagagccatcctggagaagaacttcagcttcctgagcaagggcgccggccacaccaacatgcccaacctgctgaacaccatgatggagctgagaaagtgctgcaaccacccctacctgatcaacggcgccgaggagaagatcctgaccgagttcagagaggcctgccacatcatcccccacgacttccacctgcaggccatggtgagaagcgccggcaagctggtgctgatcgacaagctgctgcccaagctgaaggccggcggccacaaggtgctgatcttcagccagatggtgagatgcctggacatcctggaggactacctgatccagagaagatacctgtacgagagaatcgacggcagagtgagaggcaacctgagacaggccgccatcgacagattcagcaagcccgacagcgacagattcgtgttcctgctgtgcaccagagccggcggcctgggcatcaacctgaccgccgccgacacctgcatcatcttcgacagcgactggaacccccagaacgacctgcaggcccaggccagatgccacagaatcggccagagcaaggccgtgaaggtgtacagactgatcaccagaaacagctacgagagagagatgttcgacaaggccagcctgaagctgggcctggacaaggccgtgctgcagagcatgagcggcagagacggcaacatcaccggcatccagcagttcagcaagaaggagatcgaggacctgctgagaaagggcgcctacgccgccatcatggaggaggacgacgagggcagcaagttctgcgaggaggacatcgaccagatcctgctgagaagaaccaccaccatcaccatcgagagcgagggcaagggcagcaccttcgccaaggccagcttcgtggccagcgagaacagaaccgacatcagcctggacgaccccaacttctggcagaagtgggccaagaaggccgacctggacatggacctgctgaacagcaagaacaacctggtgatcgacacccccagagtgagaaagcagaccagacacttcagcaccctgaaggacgacgacctggtggagttcagcgacctggagagcgaggacgacgagagacccagaagcagaagacacgacagacaccacgcctacggcagaaccgactgcttcagagtggagaagcacctgctggtgtacggctggggcagatggagagacatcctgagccacggcagattcaagagaagaatgaccgagagagacgtggagaccatctgcagagccatcctggtgtactgcctgctgcactacagaggcgacgagaacatcaagggcttcatctgggacctgatcagccccgccgagaacggcaagaccaaggagctgcagaaccacagcggcctgagcatccccgtgcccagaggcagaaagggcaagaaggtgaagagccagagcaccttcgacatccacaaggccgactggatcagaaagtacaaccccgacaccctgttccaggacgagagctacaagaagcacctgaagcaccagtgcaacaaggtgctgctgagagtgagaatgctgtactacctgagacaggaggtgatcggcgaccaggccgagaaggtgctgggcggcgccatcgccagcgagatcgacatctggttccccgtggtggaccagctggaggtgcccaccacctggtgggacagcgaggccgacaagagcctgctgatcggcgtgttcaagcacggctacgagaagtacaacaccatgagagccgaccccgccctgtgcttcctggagaaggccggcagacccgacgacaaggccatcgccgccgagcacagagtgctggacaacttcagcgacatcgtggagggcgtggacttcgacaaggactgcgaggaccccgagtacaagcccctgcagggcccccccaaggaccaggacgacgagggcgaccccctgatgatgatggacgaggagatcagcgtgatcgacggcgacgaggcccaggtgacccagcagcccggccacctgttctggccccccggcagcgccctgaccgccagactgagaagactggtgaccgcctaccagagaagctacaagagagagcagatgaagatcgaggccgccgagagaggcgacagaagaagaagaagatgcgaggccgccttcaagctgaaggagatcgccagaagagagaagcagcagagatggaccagaagagagcagaccgacttctacagagtggtgagcaccttcggcgtggagtacgaccccgacaccatgcagttccactgggacagattcagaaccttcgccagactggacaagaagaccgacgagagcctgaccaagtacttccacggcttcgtggccatgtgcagacaggtgtgcagactgccccccgccgccggcgacgagccccccgaccccaacctgttcatcgagcccatcaccgaggagagagccagcagaaccctgtacagaatcgagctgctgagaagactgagagagcaggtgctgtgccaccccctgctggaggacagactggccctgtgccagccccccggccccgagctgcccaagtggtgggagcccgtgagacacgacggcgagctgctgagaggcgccgccagacacggcgtgagccagaccgactgcaacatcatgcaggaccccgacttcagcttcctggccgccagaatgaactacatgcagaaccaccaggccggcgcccccgcccccagcctgagcagatgcagcacccccctgctgcaccagcagtacaccagcagaaccgccagccccctgcccctgagacccgacgcccccgtggagaagagccccgaggagaccgccacccaggtgcccagcctggagagcctgaccctgaagctggagcacgaggtggtggccagaagcagacccaccccccaggactacgagatgagagtgagccccagcgacaccacccccctggtgagcagaagcgtgccccccgtgaagctggaggacgaggacgacagcgacagcgagctggacctgagcaagctgagccccagcagcagcagcagcagcagcagcagcagcagcagcagcagcaccgacgagagcgaggacgagaaggaggagaagctgaccgaccagagcagaagcaagctgtacgacgaggagagcctgctgagcctgaccatgagccaggacggcttccccaacgaggacggcgagcagatgacccccgagctgctgctgctgcaggagagacagagagccagcgagtggcccaaggacagagtgctgatcaacagaatcgacctggtgtgccaggccgtgctgagcggcaagtggcccagcagcagaagaagccaggagatggtgaccggcggcatcctgggccccggcaaccacctgctggacagccccagcctgacccccggcgagtacggcgacagccccgtgcccacccccagaagcagcagcgccgccagcatggccgaggaggaggccagcgccgtgagcaccgccgccgcccagttcaccaagctgagaagaggcatggacgagaaggagttcaccgtgcagatcaaggacgaggagggcctgaagctgaccttccagaagcacaagctgatggccaacggcgtgatgggcgacggccaccccctgttccacaagaagaagggcaacagaaagaagctggtggagctggaggtggagtgcatggaggagcccaaccacctggacgtggacctggagaccagaatccccgtgatcaacaaggtggacggcaccctgctggtgggcgaggacgcccccagaagagccgagctggagatgtggctgcagggccaccccgagttcgccgtggaccccagattcctggcctacatggaggacagaagaaagcagaagtggcagagatgcaagaagaacaacaaggccgagctgaactgcctgggcatggagcccgtgcagaccgccaacagcagaaacggcaagaagggccaccacaccgagaccgtgttcaacagagtgctgcccggccccatcgcccccgagagcagcaagaagagagccagaagaatgagacccgacctgagcaagatgatggccctgatgcagggcggcagcaccggcagcctgagcctgcacaacaccttccagcacagcagcagcggcctgcagagcgtgagcagcctgggccacagcagcgccaccagcgccagcctgcccttcatgcccttcgtgatgggcggcgcccccagcagcccccacgtggacagcagcaccatgctgcaccaccaccaccaccacccccacccccaccaccaccaccaccaccaccccggcctgagagcccccggctaccccagcagccccgtgaccaccgccagcggcaccaccctgagactgccccccctgcagcccgaggaggacgacgacgaggacgaggaggacgacgacgacctgagccagggctacgacagcagcgagagagacttcagcctgatcgacgaccccatgatgcccgccaacagcgacagcagcgaggacgccgacgactag

SEQ ID NO: 66603 - protein, 993 aa, Artificial Sequence
  derived and/or modified sequence
MPVRGDRGFPPRRELSGWLRAPGMEELIWEQYTVTLQKDSKRGFGIAVSGGRDNPHFENGETSIVISDVLPGGPADGLLQENDRVVMVNGTPMEDVLHSFAVQQLRKSGKVAAIVVKRPRKVQVAALQASPPLDQDDRAFEVMDEFDGRSFRSGYSERSRLNSHGGRSRSWEDSPERGRPHERARSRERDLSRDRSRGRSLERGLDQDHARTRDRSRGRSLERGLDHDFGPSRDRDRDRSRGRSIDQDYERAYHRAYDPDYERAYSPEYRRGARHDARSRGPRSRSREHPHSRSPSPEPRGRPGPIGVLLMKSRANEEYGLRLGSQIFVKEMTRTGLATKDGNLHEGDIILKINGTVTENMSLTDARKLIEKSRGKLQLVVLRDSQQTLINIPSLNDSDSEIEDISEIESNRSFSPEERRHQYSDYDYHSSSEKLKERPSSREDTPSRLSRMGATPTPFKSTGDIAGTVVPETNKEPRYQEDPPAPQPKAAPRTFLRPSPEDEAIYGPNTKMVRFKKGDSVGLRLAGGNDVGIFVAGIQEGTSAEQEGLQEGDQILKVNTQDFRGLVREDAVLYLLEIPKGEMVTILAQSRADVYRDILACGRGDSFFIRSHFECEKETPQSLAFTRGEVFRVVDTLYDGKLGNWLAVRIGNELEKGLIPNKSRAEQMASVQNAQRDNAGDRADFWRMRGQRSGVKKNLRKSREDLTAVVSVSTKFPAYERVLLREAGFKRPVVLFGPIADIAMEKLANELPDWFQTAKTEPKDAGSEKSTGVVRLNTVRQIIEQDKHALLDVTPKAVDLLNYTQWFPIVIFFNPDSRQGVKTMRQRLNPTSNKSSRKLFDQANKLKKTCAHLFTATINLNSANDSWFGSLKDTIQHQQGEAVWVSEGKMEGMDDDPEDRMSYLTAMGADYLSCDSRLISDFEDTDGEGGAYTDNELDEPAEEPLVSSITRSSEPVQHEEVRRGRPRAGTGEPGVFLALSWTAVCSGCCGRHS

SEQ ID NO: 66604 - DNA, 2982 bp, Artificial Sequence
  derived and/or modified sequence
atgcccgtgagaggcgacagaggcttcccccccagaagagagctgagcggctggctgagagcccccggcatggaggagctgatctgggagcagtacaccgtgaccctgcagaaggacagcaagagaggcttcggcatcgccgtgagcggcggcagagacaacccccacttcgagaacggcgagaccagcatcgtgatcagcgacgtgctgcccggcggccccgccgacggcctgctgcaggagaacgacagagtggtgatggtgaacggcacccccatggaggacgtgctgcacagcttcgccgtgcagcagctgagaaagagcggcaaggtggccgccatcgtggtgaagagacccagaaaggtgcaggtggccgccctgcaggccagcccccccctggaccaggacgacagagccttcgaggtgatggacgagttcgacggcagaagcttcagaagcggctacagcgagagaagcagactgaacagccacggcggcagaagcagaagctgggaggacagccccgagagaggcagaccccacgagagagccagaagcagagagagagacctgagcagagacagaagcagaggcagaagcctggagagaggcctggaccaggaccacgccagaaccagagacagaagcagaggcagaagcctggagagaggcctggaccacgacttcggccccagcagagacagagacagagacagaagcagaggcagaagcatcgaccaggactacgagagagcctaccacagagcctacgaccccgactacgagagagcctacagccccgagtacagaagaggcgccagacacgacgccagaagcagaggccccagaagcagaagcagagagcacccccacagcagaagccccagccccgagcccagaggcagacccggccccatcggcgtgctgctgatgaagagcagagccaacgaggagtacggcctgagactgggcagccagatcttcgtgaaggagatgaccagaaccggcctggccaccaaggacggcaacctgcacgagggcgacatcatcctgaagatcaacggcaccgtgaccgagaacatgagcctgaccgacgccagaaagctgatcgagaagagcagaggcaagctgcagctggtggtgctgagagacagccagcagaccctgatcaacatccccagcctgaacgacagcgacagcgagatcgaggacatcagcgagatcgagagcaacagaagcttcagccccgaggagagaagacaccagtacagcgactacgactaccacagcagcagcgagaagctgaaggagagacccagcagcagagaggacacccccagcagactgagcagaatgggcgccacccccacccccttcaagagcaccggcgacatcgccggcaccgtggtgcccgagaccaacaaggagcccagataccaggaggacccccccgccccccagcccaaggccgcccccagaaccttcctgagacccagccccgaggacgaggccatctacggccccaacaccaagatggtgagattcaagaagggcgacagcgtgggcctgagactggccggcggcaacgacgtgggcatcttcgtggccggcatccaggagggcaccagcgccgagcaggagggcctgcaggagggcgaccagatcctgaaggtgaacacccaggacttcagaggcctggtgagagaggacgccgtgctgtacctgctggagatccccaagggcgagatggtgaccatcctggcccagagcagagccgacgtgtacagagacatcctggcctgcggcagaggcgacagcttcttcatcagaagccacttcgagtgcgagaaggagaccccccagagcctggccttcaccagaggcgaggtgttcagagtggtggacaccctgtacgacggcaagctgggcaactggctggccgtgagaatcggcaacgagctggagaagggcctgatccccaacaagagcagagccgagcagatggccagcgtgcagaacgcccagagagacaacgccggcgacagagccgacttctggagaatgagaggccagagaagcggcgtgaagaagaacctgagaaagagcagagaggacctgaccgccgtggtgagcgtgagcaccaagttccccgcctacgagagagtgctgctgagagaggccggcttcaagagacccgtggtgctgttcggccccatcgccgacatcgccatggagaagctggccaacgagctgcccgactggttccagaccgccaagaccgagcccaaggacgccggcagcgagaagagcaccggcgtggtgagactgaacaccgtgagacagatcatcgagcaggacaagcacgccctgctggacgtgacccccaaggccgtggacctgctgaactacacccagtggttccccatcgtgatcttcttcaaccccgacagcagacagggcgtgaagaccatgagacagagactgaaccccaccagcaacaagagcagcagaaagctgttcgaccaggccaacaagctgaagaagacctgcgcccacctgttcaccgccaccatcaacctgaacagcgccaacgacagctggttcggcagcctgaaggacaccatccagcaccagcagggcgaggccgtgtgggtgagcgagggcaagatggagggcatggacgacgaccccgaggacagaatgagctacctgaccgccatgggcgccgactacctgagctgcgacagcagactgatcagcgacttcgaggacaccgacggcgagggcggcgcctacaccgacaacgagctggacgagcccgccgaggagcccctggtgagcagcatcaccagaagcagcgagcccgtgcagcacgaggaggtgagaagaggcagacccagagccggcaccggcgagcccggcgtgttcctggccctgagctggaccgccgtgtgcagcggctgctgcggcagacacagctag

SEQ ID NO: 66605 - DNA, 306 bp, Artificial Sequence
  derived and/or modified sequence
atggaggagctgatctgggagcagtacaccgtgaccctgcagaaggacagcaagagaggcttcggcatcgccgtgagcggcggcagagacaacccccacttcgagaacggcgagaccagcatcgtgatcagcgacgtgctgcccggcggccccgccgacggcctgctgcaggagaacgacagagtggtgatggtgaacggcacccccatggaggacgtgctgcacagcttcgccgtgcagcagctgagaaagagcggcaaggtggccgccatcgtgagcaccggcttcgccttcagcctgccctag

SEQ ID NO: 66606 - DNA, 486 bp, Artificial Sequence
  derived and/or modified sequence
atggaggagctgatctgggagcagtacaccgtgaccctgcagaaggacagcaagagaggcttcggcatcgccgtgagcggcggcagagacaacccccacttcgagaacggcgagaccagcatcgtgatcagcgacgtgctgcccggcggccccgccgacggcctgctgcaggagaacgacagagtggtgatggtgaacggcacccccatggaggacgtgctgcacagcttcgccgtgcagcagctgagaaagagcggcaaggtggccgccatcgtggtgaagagacccagaaaggtgcaggtggccgccctgcaggccagcccccccctggaccaggacgacagagccttcgaggtgatggacgagttcgacggcagaagcttcagaagcggctacagcgagagaagcagactgaacagccacggcggcagaagcagaagctgggaggacagccccgagagaggcagaccccacgagagagcctag

SEQ ID NO: 66607 - DNA, 2982 bp, Artificial Sequence
  derived and/or modified sequence
atgcccgtgaggggcgatcgtggctttcccccccgcagagaactttctggatggttaagggctcctggcatggaggaactaatttgggaacaatatacagttacactgcagaaagatagtaagaggggctttggcatcgccgtgagcggcggacgggacaaccctcactttgaaaatggtgaaacctccattgtaataagcgacgtcctgccaggggggccggcagacggactgctgcaggagaacgatcgtgtagtcatggtaaatggtacccctatggaggacgtcctgcatagctttgccgtccaacagctgcgtaaatctgggaaagtagccgctattgtcgtgaagcgcccgagaaaggtgcaagttgcggccctgcaggcctcacctccactggaccaggacgacagggccttcgaggtaatggatgaattcgatggccgcagcttccgatcggggtactccgagagatcacgtctcaactctcacggtggcagatcacgcagttgggaagactctcctgagagggggaggccgcatgaacgggccaggtcccgagagagggacctgagtcgcgatcgatccaggggccgctctctggagcgcggacttgatcaggaccacgcacgcaccagagataggagtaggggaaggtccctggaaaggggattggaccatgacttcggacctagccgcgatagagacagggatcgctcccggggacgttctatcgatcaggactatgaacgagcttatcatcgtgcttatgatcctgattatgagcgggcgtactctcccgagtacaggaggggggccagacacgacgcccgcagtaggggaccccgaagccgcagcagggaacacccgcactccagaagcccctcgcccgagcctagaggaaggccagggccaattggggtgctgttgatgaagtctagggcaaatgaggaatatgggctccgcctaggttcccagatattcgtgaaggaaatgactcggactggcctggctactaaggatggaaacctccacgaaggcgacatcattctcaaaataaacggcacggtaaccgagaatatgagcctaacagacgcccgcaagctgatcgagaagagtagaggcaagcttcaactcgtggttctgagagatagtcagcagactttgattaacatccccagcctcaatgactctgattcggagatcgaggacatcagcgagattgagagcaacagaagcttcagtccggaggagaggcgacatcagtactcagattacgactaccacagctctagcgaaaaactcaaagagcgcccgtcatctcgcgaggacacacctagccggctgagcagaatgggtgctacacccacaccattcaagagcaccggagatatagctggaacggtagtccccgagactaacaaagaaccccggtatcaagaagatcctcctgctcctcagccaaaggccgcccctaggacttttctgaggcccagccccgaagatgaagcgatctatggtcctaatacaaagatggttcggttcaagaagggggattctgttggactgcgattagctggggggaatgacgtaggcattttcgtagccggcatccaagaggggacctctgctgaacaggaggggctccaagagggagatcagatcctgaaggtgaatacccaggacttcagggggctggtgcgggaagacgccgtgttatacctgctcgaaatacccaagggcgagatggtgactatcttggcccagagccgcgcagacgtctatcgagatattttggcttgtgggcggggcgactcttttttcatcagatcccattttgaatgcgaaaaagaaaccccccagagtttggcttttactaggggagaagtcttccgcgttgtcgatactctgtacgacggcaaactggggaactggctcgccgtcaggattggtaatgagcttgaaaaaggccttatccccaataaaagccgcgcagagcagatggcatcggtgcagaacgctcagagagacaatgccggtgaccgagcagatttctggaggatgcggggccagcgatctggcgtcaagaaaaacttacgcaagtccagggaggatcttacagcagtcgtgagcgtctcaaccaagttccctgcttacgaaagggtgctgctgagggaggccggatttaagcgcccagtggtgctctttggccctatcgccgatattgcgatggagaaactggctaacgagctccccgattggttccagaccgctaaaactgaacctaaagatgccggaagtgaaaaatcaacaggtgttgtgagactaaacactgtgcgtcagataatcgagcaggacaagcatgcactgttggacgtaaccccaaaggccgtggacctcctgaattatacccagtggtttcctatagttatctttttcaatccggactctaggcaaggcgtgaagaccatgcgacaaaggcttaacccgaccagcaacaaaagtagccggaagctcttcgatcaagccaacaagctgaagaagacatgtgctcatctgtttacagctaccatcaacctgaatagcgctaatgactcttggttcgggagtttaaaagataccattcaacatcaacaaggcgaagccgtatgggtttctgagggaaagatggaagggatggatgatgatccggaggatcgtatgagctacctgactgcaatgggggcggattatttaagctgtgattctaggctaatttcggacttcgaggatactgacggggaggggggggcctacacagacaacgaactcgacgaaccggccgaagagccactggtgagctccattactcgttcgagcgaacctgtgcagcatgaagaggtgcgcagaggcaggccacgcgccggcaccggcgagcccggtgtgtttctggccctgtcttggactgccgtatgctctggctgctgcggcagacatagctag

SEQ ID NO: 66608 - DNA, 306 bp, Artificial Sequence
  derived and/or modified sequence
atggaggaattaatctgggaacaatatactgtgacactgcagaaagactctaagcgaggtttcggcatagctgtgtctggcggccgcgacaacccccacttcgaaaacggagagacatccatcgttatttccgacgtgctccccggcggcccagctgatggcctgttgcaggaaaatgacagagtcgtgatggtgaatgggactcccatggaggacgtgctgcacagctttgcagttcagcagttacgcaagtctggtaaggttgcggctattgtgagcacaggattcgcatttagcctaccatag

SEQ ID NO: 66609 - DNA, 486 bp, Artificial Sequence
  derived and/or modified sequence
atggaggaactgatctgggagcagtacaccgtcaccctgcagaaagacagtaagcgaggattcgggatcgctgtgtctgggggacgagataatccacacttcgagaacggagaaacctccattgtgatttccgatgtcctccccggtgggcctgccgacggattgctgcaggaaaacgaccgggtggtcatggtgaacggaaccccgatggaggacgttctccacagttttgccgtacagcaactgcgaaagagcggcaaagtagcggccattgtcgtgaagcgtccaagaaaagtacaggtggccgcactgcaggcgtcacctccattggaccaagatgaccgcgcctttgaggtgatggatgaattcgacggccggagctttcgttctgggtactccgaacgctcacggctcaatagtcatgggggcagatcacgctcttgggaggactccccagaaaggggacgcccacacgaacgcgcgtag

SEQ ID NO: 66610 - DNA, 2982 bp, Artificial Sequence
  derived and/or modified sequence
atgcctgtgcggggggaccggggcttccccccccggcgggagctgagcggctggctgcgggcccctggcatggaggagctgatctgggagcagtacacagtgaccctgcagaaggacagcaagaggggcttcggcattgctgtgtctgggggccgggacaacccccactttgaaaatggagagaccagcatcgtcatcagtgatgtgctgcccggcggccctgcagatggcctgctgcaggagaatgacagagtggtgatggtgaatggcacccccatggaggatgtgctgcacagctttgctgtgcagcagctgaggaagagcggcaaggtggccgccatcgtggtgaagaggcccaggaaggtgcaggtggccgccctgcaggccagcccccccctggaccaggatgaccgggcctttgaggtgatggatgaatttgatggccgctccttccgcagcggctacagcgagaggagccggctgaacagccacggcggccgcagccgctcctgggaggacagccctgagcggggccggccccatgagcgggcccggagccgggagcgggacctgagccgggacaggagccggggccgcagcctggagcggggcctggaccaggaccacgcccggacccgggacaggagccggggccgcagcctggagcggggcctggaccatgactttggccccagccgggaccgggaccgggacaggagccggggccgcagcattgaccaggactatgagcgggcctaccaccgggcctatgaccctgactatgagcgggcctacagccctgagtaccgccgcggggcccggcatgatgcccggagccggggccccaggagccgcagccgggagcacccccacagccgcagccccagccctgagccccggggccggcccggccccatcggcgtgctgctgatgaagagccgggccaatgaggagtatggcctgcggctgggcagccagatctttgtgaaggagatgaccaggacaggcctggccaccaaggatggcaacctgcatgaaggagacatcatcctgaagatcaatggcaccgtgacagagaacatgagcctgacagatgccaggaagctgattgagaagagccggggcaagctgcagctggtggtgctgcgggacagccagcagaccctcatcaacatccccagcctgaatgacagcgacagcgagattgaggacatcagcgagattgagagcaacagaagcttcagccctgaggagaggaggcaccagtacagcgactatgactaccacagcagcagcgagaagctgaaggagcggcccagcagccgggaggacacccccagccggctgagcaggatgggcgccacccccacccccttcaagagcactggagacattgctggcaccgtggtgcctgagaccaacaaggagccccgctaccaggaggaccccccagccccccagcccaaggccgcccccaggaccttcctgcggcccagcccagaagatgaggccatctacggccccaacaccaagatggtgcgcttcaagaagggggacagcgtgggcctgcggctggccggcggcaatgatgtgggcatctttgtggccggcatccaggagggcaccagcgctgagcaggagggcctgcaggagggggaccagatcctgaaggtgaacacccaggacttccggggcctggtgagagaagatgctgtgctgtacctgctggagatccccaagggggagatggtgaccatcctggcccagagcagagcagatgtgtacagagacatcctggcctgtggccgcggggacagcttcttcatccgcagccactttgaatgtgagaaggagaccccccagagcctggccttcaccagaggagaggtgttccgggtggtggacaccctgtatgatggcaagctgggcaactggctggccgtgagaattggaaatgagctggagaagggcctcatccccaacaagagcagagctgagcagatggcctctgtgcagaatgcccagagggacaatgctggggacagagctgacttctggaggatgaggggccagaggtctggagtgaagaagaacctgaggaagagccgggaggacctgacagctgtggtgtctgtgtccaccaagtttcctgcctatgagcgggtgctgctgcgggaggccggcttcaagaggcctgtggtgctgtttggccccatcgctgacatcgccatggagaagctggccaatgagctgcctgactggttccagacagccaagacagagcccaaggatgctggcagcgagaagagcactggagtggtgcggctgaacacagtgcggcagatcatcgagcaggacaagcacgccctgctggatgtgacccccaaggctgtggacctgctgaactacacccagtggttccccatcgtcatcttcttcaacccagacagccggcagggcgtgaagaccatgaggcagaggctgaaccccaccagcaacaagagcagcaggaagctgtttgaccaggccaacaagctgaagaagacctgtgcccacctgttcaccgccaccatcaacctgaacagcgccaatgacagctggtttggcagcctgaaggacaccatccagcaccagcagggcgaggccgtgtgggtgtctgagggcaagatggagggcatggatgatgatcctgaggacaggatgagctacctgacagccatgggcgctgactacctgagctgtgacagccgcctcatcagtgactttgaggacacagatggagagggcggggcctacacagacaatgagctggatgagcctgctgaggagcccctggtgagcagcatcaccaggagcagcgagcctgtgcagcacgaggaggtgcggcggggccggccccgggccggcaccggggagcccggggtcttcctggccctgtcctggacagctgtgtgcagcggctgctgcggccgccacagctag

SEQ ID NO: 66611 - DNA, 306 bp, Artificial Sequence
  derived and/or modified sequence
atggaggagctgatctgggagcagtacacagtgaccctgcagaaggacagcaagaggggctttggaattgctgtgtctgggggccgggacaacccccactttgaaaatggagagaccagcatcgtcatcagtgatgtgctgcccggcggccctgcagatggcctgctgcaggagaatgacagagtggtgatggtgaatggcacccccatggaggatgtgctgcacagctttgctgtgcagcagctgaggaagagcggcaaggtggccgccatcgtgtccacaggctttgccttcagcctgccctag

SEQ ID NO: 66612 - DNA, 486 bp, Artificial Sequence
  derived and/or modified sequence
atggaggagctgatctgggagcagtacacagtgaccctgcagaaggacagcaagaggggctttggaattgctgtgtctgggggccgggacaacccccactttgaaaatggagagaccagcatcgtcatcagtgatgtgctgcccggcggccctgcagatggcctgctgcaggagaatgacagagtggtgatggtgaatggcacccccatggaggatgtgctgcacagctttgctgtgcagcagctgaggaagagcggcaaggtggccgccatcgtggtgaagaggcccaggaaggtgcaggtggccgccctgcaggccagcccccccctggaccaggatgaccgggcctttgaggtgatggatgaatttgatggccgctccttccgcagcggctacagcgagaggagccggctgaacagccatggaggccgcagccgctcctgggaggacagccctgagcggggccggccccatgagcgggcctag

SEQ ID NO: 66613 - DNA, 2982 bp, Artificial Sequence
  derived and/or modified sequence
atgcccgtgcggggcgaccggggcttccccccccggcgggagctgagcggatggctccgggcaccaggcatggaggagctgatctgggaacaatacactgttaccctgcagaaggactccaaacgggggttcggtatcgcagtctcaggtggccgagataaccctcactttgagaacggcgaaacttcaattgtcatctcagacgtccttccaggaggaccagctgatggcctcctgcaggagaatgatagagtggtgatggtgaacggtacccctatggaagacgtacttcattcgtttgctgtgcagcagctgaggaaatctggcaaagtcgccgcaatagtagtaaaaaggcctcggaaggtgcaagtcgctgcccttcaggccagtcctcctctggatcaggatgaccgagccttcgaggttatggacgaatttgatggccggtccttccgcagcggctacagcgagaggtcccgtttaaactctcatggagggaggtccagatcctgggaagactctcccgagcgaggcaggcctcatgaaagagccaggtctcgcgagcgcgatttatcccgcgatagatcccgcgggagaagcctcgagcgcggcttggaccaggaccatgcccgaacacgcgaccgtagtaggggaaggtccctcgaacggggactcgatcacgatttcggcccctcccgagatcgcgaccgtgacaggagtcgcggcagatctatcgaccaggattatgagcgtgcttaccaccgtgcctatgaccctgactacgagagagcatactccccagagtaccgccgtggtgcaaggcacgatgccagaagccggggacctagatcgcgcagccgtgaacatcctcattctcgcagccctagtcctgagccccgcggccgacctggcccgattggggtcttactcatgaaatcccgggccaatgaagaatacggcctgaggctggggagtcagatttttgtgaaggagatgactcgtaccggtctggcgacaaaagacggcaacctgcatgagggtgacataatcttgaaaattaatggcaccgttacagagaatatgagccttacggacgctaggaaactgattgagaaaagtcgcggaaaactacaactggtggtgcttagggacagtcagcaaacattgattaacattccatctctaaacgattccgactcagaaattgaagatatcagtgaaattgagagcaataggtctttctctcctgaggagaggcgccaccagtacagtgattacgactatcattccagcagtgagaaattgaaggaaaggccaagctcacgggaggataccccaagtagactgtctcgcatgggggctactcctactcctttcaaatccacaggggacatagcagggaccgtggttcccgaaacaaataaggagccccgctatcaggaagacccacccgcacctcaacccaaagccgcgccgcgcacatttctcagaccctcgcccgaggatgaggccatctatgggcctaacacgaagatggtgaggttcaagaagggggactccgtgggcctgcgcctggcggggggtaatgacgtgggtatattcgtcgctggcatccaggaaggcacctccgcggagcaggaagggcttcaggagggggatcaaatccttaaagttaatacacaggatttccggggtttagtcagagaggacgcagtcctgtacctgttggaaatacctaagggcgaaatggtaacaatcctggcgcaatcaagggccgacgtgtaccgcgacattttggcttgtggcagaggcgattcttttttcataagatcccattttgaatgtgagaaggaaaccccccaaagcctggcgtttactaggggtgaagtgtttagggtggtagacacactgtacgatggcaaactggggaattggttggccgtgcgcatcggaaacgaattggagaaggggctgatccccaacaagtcccgcgccgagcagatggcctccgtgcaaaatgcacagagggataacgctggggaccgggctgacttttggcgcatgcggggacagcgaagcggtgtgaagaaaaatctgagaaagagccgggaggacttgactgccgtggtgtcagtgtctaccaagttccctgcatatgaaagagtgttactcagggaagctggcttcaagagacccgtggtgctctttggccctatcgccgatattgctatggagaaacttgccaatgaactgcctgactggttccagaccgccaaaaccgaacctaaagacgctggaagcgagaagagcaccggagttgtacgccttaacacagttcgacagattatcgaacaggataaacatgctctgctggacgtaactccaaaagccgttgacttactgaactacacccaatggtttccaattgtcatattcttcaatccggactctaggcagggcgtcaaaaccatgcggcagcggctgaatccaacctctaacaaaagcagcaggaaactttttgatcaagccaacaaacttaagaagacctgcgctcatctgtttacagcgacaataaatctgaattccgctaatgacagctggttcggaagtcttaaagatactattcaacaccagcaaggggaagccgtgtgggtgtccgagggaaagatggaaggtatggatgatgaccccgaagatcgaatgtcgtatctgactgccatgggtgccgattatctgtcctgcgattcccgcctgatttccgactttgaggacacagatggggaagggggtgcttacacagataatgagcttgacgaaccggccgaggagcctctcgtgtcatcaattacccgatcatccgagccagtgcagcacgaagaggtcaggcgcggacggcctcgggcaggtacaggagaacctggcgtttttctggcactgagctggacagccgtgtgttcaggctgctgcggacgccacagctag

SEQ ID NO: 66614 - DNA, 306 bp, Artificial Sequence
  derived and/or modified sequence
atggaggagctgatctgggagcagtacaccgtgaccctgcagaaggattcaaagcgcggctttggaattgccgtctccggaggccgagataaccctcattttgaaaatggcgagacatccatcgtcattagcgacgtcctgccaggaggtcccgcagatgggctgcttcaggaaaacgacagagtggtgatggtgaatgggacacctatggaggacgttttgcacagcttcgctgtccagcagctcagaaagagtgggaaggtcgcagccatagtctccaccggtttcgctttttctctaccttag

SEQ ID NO: 66615 - DNA, 486 bp, Artificial Sequence
  derived and/or modified sequence
atggaggagctgatctgggagcagtacaccgtgaccctgcagaaggattccaaacgcggcttcggtattgccgtcagcggcggccgcgacaaccctcacttcgaaaatggagagacctccatcgtgatttcggacgtgctgccaggcggacctgctgatgggcttttacaggagaatgatcgggtggtgatggttaatggaacacctatggaagacgtgctacactcattcgccgtacagcaactgcgaaagtctggaaaggtggccgccatcgtggtcaaaagaccccgtaaagttcaagtggctgccttgcaagcgtccccacctttggaccaggacgatagagctttcgaggtgatggacgaattcgacggccgctcttttcggtccggatattccgaaagaagccgcctgaattcccacgggggcagatcacgcagctgggaggattcaccggagcggggcaggccacatgagagggcctag

SEQ ID NO: 66616 - DNA, 2982 bp, Artificial Sequence
  derived and/or modified sequence
atgccagtacgaggagatcggggatttccacctcgccgtgagttaagtggatggctcagagcacctggcatggaggaactgatctgggaacaatacaccgtcacactacagaaggacagcaaaagaggctttggaattgctgtaagcggcggtcgagacaacccgcatttcgagaacggcgagacaagcatcgtgatctccgatgtgctgcctggcggaccggcagacgggctcctgcaggagaacgatagagtagttatggtgaatggcacccccatggaagacgtgcttcacagttttgcggtgcagcagctacgaaagagcggaaaggtcgcggcaatagtcgtaaaacggccaaggaaggtccaagtggctgctctgcaggcgagccccccactggaccaggatgacagggccttcgaagtcatggacgagtttgacggcaggtccttccggtctggttattcagagcgttcacggctgaacagccacggcggtcgttccaggagttgggaggactcgcctgagcggggaaggccccacgaaagagctcgaagccgggaaagggacttgagtagggaccggagccggggtaggtctctggagcggggactggaccaggatcacgctcgcaccagggatcggtcgcgtggccgttccctggagagaggattggatcatgactttggtccctcccgcgaccgtgacagggataggtccagaggacgaagcatagaccaggattacgagagagcataccacagggcgtatgatcctgactacgaaagagcatattctcctgaataccgacggggagcaagacacgatgctcgctcccggggacctcgctctaggtcacgggagcatccgcacagccgctcaccctcccccgaaccacgaggcaggcctggcccaatcggggtgctgctgatgaaatcgagagccaacgaggaatacgggctgagactcggcagccagatctttgtcaaggagatgactcgtacaggactggccactaaggacggtaatttgcatgagggcgacatcattcttaaaatcaacgggacggtcaccgaaaacatgagccttacagacgccaggaagttgatcgaaaagagtaggggcaaacttcagctggtggttcttagagatagccagcagactctaatcaacattccgtcccttaatgatagtgattctgagatcgaagatatttcagaaatcgagtctaaccgctctttctcaccagaggagcgccgacaccagtacagcgattatgactaccattcctctagtgagaaactcaaggagagacctagcagcagagaagatacaccctccagactgtctaggatgggggctactccaacccccttcaaaagcacaggggacatagctggcactgtggtcccagaaaccaacaaagagcctcggtatcaagaagaccctccagcccctcagcctaaagccgctccccgtaccttcttacggccttctcccgaggatgaggccatttatggccctaatacaaagatggtccggtttaagaagggagatagcgtgggcctgaggctagccggaggcaacgacgtaggcatcttcgtcgcgggtattcaggaagggacatccgcggaacaggaagggttgcaagagggcgaccagatcctcaaagtgaacacccaggactttaggggattagtgcgagaggacgctgttctgtaccttcttgaaatcccgaagggcgagatggttacgattttagctcagtcaagagctgatgtatatcgagacatattagcttgcggtcgcggtgatagcttcttcatccggagtcacttcgaatgcgaaaaagagacacctcagagcctggcttttacacgtggcgaggtgtttagggtggtggacacgctatatgacggtaagcttggcaactggctggcggtgaggatcgggaacgaacttgaaaagggactcattcctaataagagcagagccgagcagatggcatcagtacagaatgcccagcgggataatgcgggagatcgggctgacttttggcgcatgcgcggacagagatcaggggtgaaaaaaaacctccgaaaatctagggaagatctgacagctgtggtcagcgtgtcaaccaagtttccagcttatgagagagtgctgttgcgcgaggcagggttcaaacgcccagtggttctgttcggaccgatcgctgacattgcaatggaaaaactcgctaacgaactccccgactggtttcagacagctaagacggagcccaaggatgccggaagtgagaaatctacaggcgttgtgagactgaatactgtgaggcaaataatagagcaggacaaacatgctctgctcgatgtcacacccaaggctgttgacctattaaactacacccagtggttcccgattgtcatcttcttcaatccagattcgcgacagggcgtgaagaccatgaggcagaggcttaacccgactagcaataaatcaagccgaaaactcttcgatcaggccaacaaactcaaaaagacctgtgctcacctgttcaccgcaactatcaacctgaattcagctaatgattcatggtttggaagcttgaaggatacaatacagcatcagcagggcgaagcagtttgggtgtcagaggggaagatggaggggatggacgatgaccccgaagatcgcatgtcatatcttacagctatgggcgctgattatcttagctgcgattctcgcctgattagcgatttcgaggacaccgacggagaaggcggtgcgtacacggacaatgagctggacgaacctgctgaagagcccctagtctctagcataacccggagtagcgagccagtgcagcatgaagaggtgcgcagaggcagaccacgcgcagggacaggggagccaggagtgtttcttgccctcagttggacagcagtatgcagtggatgttgtgggcgtcacagttag

SEQ ID NO: 66617 - DNA, 306 bp, Artificial Sequence
  derived and/or modified sequence
atggaggagctgatatgggagcagtacacagttacactccagaaagactccaaacggggttttggaatcgcagtctcaggcggacgggacaatccgcactttgaaaacggcgaaacctctattgtgatttctgatgtcttgccgggtggcccagcggacggtctcctgcaggaaaacgaccgtgtagtgatggtgaatgggacacctatggaagacgtactgcattccttcgccgtgcaacaactgagaaaaagtggaaaagtcgccgctatcgtctctactggcttcgctttctctctgccatag

SEQ ID NO: 66618 - DNA, 486 bp, Artificial Sequence
  derived and/or modified sequence
atggaagagctgatctgggagcagtacacagttacgttgcagaaagacagtaaaagaggcttcggcattgctgtttccggaggtagggacaaccctcattttgaaaatggcgagacaagcattgttatctccgatgtgttgcctggtgggcctgctgacggcctcttgcaggaaaatgatagggtagttatggtgaatgggacaccgatggaggatgtcctccatagcttcgccgttcagcagctgaggaagtcaggaaaagtggcagccatcgtagtcaaacgcccaaggaaggttcaggtcgctgcgctccaagcctctccgcctttagaccaggacgatagagctttcgaggtgatggacgagtttgatggcagatccttcagatccggctactctgagcgaagccgcctgaatagccatggcggaaggtccagatcctgggaggatagcccagagagaggtagacctcacgaaagggcctag

SEQ ID NO: 66619 - DNA, 3725 bp, Artificial Sequence
  derived and/or modified sequence
tgcccaggaggagtaggagcaggagcagaagcagaagcggggtccggagctgcgcgcctacgcgggacctgtgtccgaaatgccggtgcgaggagaccgcgggtttccaccccggcgggagctgtcaggttggctccgcgccccaggcatggaagagctgatatgggaacagtacactgtgaccctacaaaaggattccaaaagaggatttggaattgcagtgtccggaggcagagacaacccccactttgaaaatggagaaacgtcaattgtcatttctgatgtgctcccgggtgggcctgctgatgggctgctccaagaaaatgacagagtggtcatggtcaatggcacccccatggaggatgtgcttcattcgtttgcagttcagcagctcagaaaaagtgggaaggtcgctgctattgtggtcaagaggccccggaaggtccaggtggccgcacttcaggccagccctcccctggatcaggatgaccgggcttttgaggtgatggacgagtttgatggcagaagtttccggagtggctacagcgagaggagccggctgaacagccatggggggcgcagccgcagctgggaggacagcccggaaagggggcgtccccatgagcgggcccggagccgggagcgggacctcagccgggaccggagccgtggccggagcctggagcggggcctggaccaagaccatgcgcgcacccgagaccgcagccgtggccggagcctggagcggggcctggaccacgactttgggccatcccgggaccgggaccgtgaccgcagccgcggccggagcattgaccaggactacgagcgagcctatcaccgggcctacgacccagactacgagcgggcctacagcccggagtacaggcgcggggcccgccacgatgcccgctctcggggaccccgaagccgcagccgcgagcacccgcactcacggagccccagccccgagcctagggggcggccggggcccatcggggtcctcctgatgaaaagcagagcgaacgaagagtatggtctccggcttgggagtcagatcttcgtaaaggaaatgacccgaacgggtctggcaactaaagatggcaaccttcacgaaggagacataattctcaagatcaatgggactgtaactgagaacatgtctttaacggatgctcgaaaattgatagaaaagtcaagaggaaaactacagctagtggtgttgagagacagccagcagaccctcatcaacatcccgtcattaaatgacagtgactcagaaatagaagatatttcagaaatagagtcaaaccgatcattttctccagaggagagacgtcatcagtattctgattatgattatcattcctcaagtgagaagctgaaggaaaggccaagttccagagaggacacgccgagcagattgtccaggatgggtgcgacacccactccctttaagtccacaggggatattgcaggcacagttgtcccagagaccaacaaggaacccagataccaagaggaccccccagctcctcaaccaaaagcagccccgagaacttttcttcgtcctagtcctgaagatgaagcaatatatggccctaataccaaaatggtaaggttcaagaagggagacagcgtgggcctccggttggctggtggcaatgatgtcgggatatttgttgctggcattcaagaagggacctcggcggagcaggagggccttcaagaaggagaccagattctgaaggtgaacacacaggatttcagaggattagtgcgggaggatgccgttctctacctgttagaaatccctaaaggtgaaatggtgaccattttagctcagagccgagccgatgtgtatagagacatcctggcttgtggcagaggggattcgttttttataagaagccactttgaatgtgagaaggaaactccacagagcctggccttcaccagaggggaggtcttccgagtggtagacacactgtatgacggcaagctgggcaactggctggctgtgaggattgggaacgagttggagaaaggcttaatccccaacaagagcagagctgaacaaatggccagtgttcaaaatgcccagagagacaacgctggggaccgggcagatttctggagaatgcgtggccagaggtctggggtgaagaagaacctgaggaaaagtcgggaagacctcacagctgttgtgtctgtcagcaccaagttcccagcttatgagagggttttgctgcgagaagctggtttcaagagacctgtggtcttattcggccccatagctgatatagcaatggaaaaattggctaatgagttacctgactggtttcaaactgctaaaacggaaccaaaagatgcaggatctgagaaatccactggagtggtccggttaaataccgtgaggcaaattattgaacaggataagcatgcactactggatgtgactccgaaagctgtggacctgttgaattacacccagtggttcccaattgtgatttttttcaacccagactccagacaaggtgtcaaaaccatgagacaaaggttaaatccaacgtccaacaaaagttctcgaaagttatttgatcaagccaacaagcttaaaaaaacgtgtgcacacctttttacagctacaatcaacctaaattcagccaatgatagctggtttggcagcttaaaggacactattcagcatcagcaaggagaagcggtttgggtctctgaaggaaagatggaagggatggatgatgaccccgaagaccgcatgtcctacttaaccgccatgggcgcggactatctgagttgcgacagccgcctcatcagtgactttgaagacacggacggtgaaggaggcgcctacactgacaatgagctggatgagccagccgaggagccgctggtgtcgtccatcacccgctcctcggagccggtgcagcacgaggaggtgaggcgaggcaggccacgggcaggaacaggagagcctggtgttttccttgcactctcgtggacagctgtgtgttcagggtgctgtggaaggcattcctaagggttggagcagatgacttccagggagtctctcgctttgagtccacgctggcatggttgcagtctgtgggaaagtggggcaggcaggtggacttcagaagagcttgaggggtcagcactccgcacacccatgccctcaggtgcgatggataaacagaatggctttaggtgccgtctgtccaaattaccagcggaaccttccttcccatgcagtattgttgtatgtacttgtaacctttgattaggtttctctctgtactcttagatgtccttgcttttcttccccatcctgcctttaacctttctaatcttgccaaagctcttgagtgtttccccatcagtttccttctctcttatatttcagttttttaattgagttcatgatcaaaccttcatctgatcacatcacatgtactgtgcatccactgtgattagatagcttatgggatccttgaaatcacattgacaggcactgtaaagtcacagccaagttagcaattattagttgcacctcagagaatgttggaataatgatctttgaagatgggattgttcatatatttggataattattgctgtggatttctctctagcattttagctcattccagtaaatgatttttttctttatgaaatagaactaccaaaaaaaaaaaaaaaaaaaa

SEQ ID NO: 66620 - DNA, 614 bp, Artificial Sequence
  derived and/or modified sequence
gggtgcgaagtaccacattactgtcatctccctgtgagtgggattggcaccccggctgcagctccaggagcaagtactccaggaagcacagagctgtaccagtacacggcccacgttgccaggccccaggcatggaagagctgatatgggaacagtacactgtgaccctacaaaaggattccaaaagaggatttggaattgcagtgtccggaggcagagacaacccccactttgaaaatggagaaacgtcaattgtcatttctgatgtgctcccgggtgggcctgctgatgggctgctccaagaaaatgacagagtggtcatggtcaatggcacccccatggaggatgtgcttcattcgtttgcagttcagcagctcagaaaaagtgggaaggtcgctgctattgtggtcaagaggccccggaaggtccaggtggccgcacttcaggccagccctcccctggatcaggatgaccgggcttttgaggtgatggacgagtttgatggcagaagtttccggagtggctacagcgagaggagccggctgaacagccatggggggcgcagccgcagctgggaggacagcccggaaagggggcgtccccatgagcgggcc

SEQ ID NO: 66621 - protein, 427 aa, Artificial Sequence
  derived and/or modified sequence
MAGGRPHLKRSFSIIPCFVFVEGFFCYDSTYAKPYPGPEAASRVPPALVYALVTAGPTLTILLGELARAFFPAPPSAVPVIGESTIVSGACCRFSPPVRRLVRFLGVYSFGLFTTTIFANAGQVVTGNPTPHFLSVCRPNYTALGCLPPSPDRPGPDRFVTDQGACAGSPSLVAAARRAFPCKDAALCAYAVTYTAMYVTLVFRVKGSRLVKPSLCLALLCPAFLVGVVRVAEYRNHWSDVLAGFLTGAAIATFLVTCVVHNFQSRPPSGRRLSPWEDLGQAPTMDSPLEKLSVAQEPEVCRPHSTPARLTPSKSQNCARRGHLIPSCVSSRAPAMCSSPRVPRPRLRSEPTPLPLPLPLPAPTPSQGPSPSSPGPGGPGGGGGRGRKLLLPTPLLRDLYTLSGLYPSPFHRDNFSPYLFASRDHLL

SEQ ID NO: 66622 - DNA, 1284 bp, Artificial Sequence
  derived and/or modified sequence
atggccggcggcagaccccacctgaagagaagcttcagcatcatcccctgcttcgtgttcgtggagggcttcttctgctacgacagcacctacgccaagccctaccccggccccgaggccgccagcagagtgccccccgccctggtgtacgccctggtgaccgccggccccaccctgaccatcctgctgggcgagctggccagagccttcttccccgccccccccagcgccgtgcccgtgatcggcgagagcaccatcgtgagcggcgcctgctgcagattcagcccccccgtgagaagactggtgagattcctgggcgtgtacagcttcggcctgttcaccaccaccatcttcgccaacgccggccaggtggtgaccggcaaccccaccccccacttcctgagcgtgtgcagacccaactacaccgccctgggctgcctgccccccagccccgacagacccggccccgacagattcgtgaccgaccagggcgcctgcgccggcagccccagcctggtggccgccgccagaagagccttcccctgcaaggacgccgccctgtgcgcctacgccgtgacctacaccgccatgtacgtgaccctggtgttcagagtgaagggcagcagactggtgaagcccagcctgtgcctggccctgctgtgccccgccttcctggtgggcgtggtgagagtggccgagtacagaaaccactggagcgacgtgctggccggcttcctgaccggcgccgccatcgccaccttcctggtgacctgcgtggtgcacaacttccagagcagaccccccagcggcagaagactgagcccctgggaggacctgggccaggcccccaccatggacagccccctggagaagctgagcgtggcccaggagcccgaggtgtgcagaccccacagcacccccgccagactgacccccagcaagagccagaactgcgccagaagaggccacctgatccccagctgcgtgagcagcagagcccccgccatgtgcagcagccccagagtgcccagacccagactgagaagcgagcccacccccctgcccctgcccctgcccctgcccgcccccacccccagccagggccccagccccagcagccccggccccggcggccccggcggcggcggcggcagaggcagaaagctgctgctgcccacccccctgctgagagacctgtacaccctgagcggcctgtaccccagccccttccacagagacaacttcagcccctacctgttcgccagcagagaccacctgctgtag

SEQ ID NO: 66623 - DNA, 1284 bp, Artificial Sequence
  derived and/or modified sequence
atggccggcggtaggccgcatctgaaaagatcattcagtataattccatgttttgtcttcgtggaaggcttcttctgctatgatagcacctatgctaagccctatcctgggcctgaggccgcgtctcgggtgccccccgcgctggtatacgctttggttacagccggtccaaccctcactatcctcctgggcgaactagcaagagcattcttccccgcgcctccaagtgcggtgccggttatcggggagtctacaatcgtgtcaggcgcgtgctgtagattcagcccacctgttcggcgcttggtccggtttctgggggtatatagttttggccttttcaccacaaccatctttgcaaatgccgggcaagttgtaaccggaaaccctaccccccattttctcagcgtctgtcgccctaactacaccgccctgggctgtctgccgccaagccctgaccggcctgggccggaccgctttgttaccgatcaaggagcctgcgctggaagtccttccttggtggccgcagcacgccgagcatttccatgcaaagacgcagccctttgtgcctacgcagtgacctacacagcaatgtacgttacgctggtttttcgggttaaggggtccaggttagtgaaacctagcctgtgtttggcattgctgtgtcccgctttcctggtcggtgtcgttcgtgtggctgagtatcgcaatcattggagtgacgtgttggccgggtttctgacaggagctgctattgcaactttcctggtgacctgtgtggtgcacaacttccagtctcggccaccttccggccgtcgtctctcaccatgggaagatctggggcaggcccctacgatggattctcctctcgagaaactctccgtggcccaggagccagaggtgtgccgtccacactccacccccgcacgtcttactccctcaaaatctcagaactgcgccaggcggggacacctaataccttcgtgcgtgtcctccagagctccagcaatgtgtagctcacctagagtgcctagacctcgcttgcgtagcgaacccactcctttacctctccccctgccactgccagcaccaacaccctcccaggggccttctccctcatcgcctggccccggcggtccgggcggaggcggcgggcgaggacgaaagcttctcctgcctactcctctgcttcgagacttgtataccctgtccggactctacccaagcccgtttcaccgggataatttttccccttatctcttcgcatccagggatcatctgctgtag

SEQ ID NO: 66624 - DNA, 2552 bp, Artificial Sequence
  derived and/or modified sequence
agtccgtctgtccatcccgccgcgccggggcagtctaggcggagcgggggctcaggcggcggcggcctcgacgcgagtgagtgtcgtggttggggtgctggacccagagtgcctaccctcgcctgcctgggcctcagtttccacatctgcacaatgggggtgaccatccctgccctgctggctgccaggagcggctgtgagtcttcaggcgtggatgcagcctgggggaagccatagggcgctttcacaggcctggccttcaccatggcgggagggagaccgcatctgaagaggagtttctccatcatcccctgctttgtcttcgtggagggattcttctgctatgacagtacctacgccaagccctacccagggcctgaggctgccagccgagtgcctcctgctcttgtctacgcactggtcactgccgggcccaccctcacgatcctgctgggagagctggcgcgtgcctttttccctgcaccaccttcagccgtcccagtcatcggggagagcaccatcgtgtctggggcctgctgccgcttcagccccccagtgcggaggctggtccgcttcctgggggtctactccttcggcctcttcaccacgaccatcttcgccaacgcggggcaggtggtgaccggcaatcccacgccacacttcctgtccgtgtgccgccccaactacacggccctgggctgcctgccaccttctccggatcggccaggtcccgaccgctttgtcactgaccagggtgcctgcgctggcagtcccagcctcgtggccgccgcgcgccgcgccttcccctgcaaggatgcggccctctgcgcctacgcggtcacctacacagcgatgtacgtgactctcgtgttccgcgtgaagggctcccgcctggtcaaaccctcgctctgcctggccttgctgtgcccggccttcctggtgggcgtggtccgcgtggccgagtaccgaaaccactggtcggacgtgctggctggcttcctgacaggggcggccatcgccacctttttggtcacctgcgttgtgcataactttcagagccggccaccctctggccgaaggctctctccctgggaggacctgggccaagcccccaccatggatagccccctcgaaaagttaagtgtggcgcaggaacccgaggtctgcaggccgcattcgacaccggcacggctcaccccatccaagtcgcagaactgcgcccgccgtggccacctgatccccagctgtgtctcctccagggccccagccatgtgttcgtcgccccgtgtgccccgtcctcgattgaggtctgagccgacgcccttgcccctgcccctacccctgccagcgcccacccccagccagggcccctcgccttcctcccctggacctggggggccaggcgggggtggtggacgtggccggaagctgctgctgcccacgcccctgctgcgggacctgtacaccctgagtggactctatccctcccccttccaccgggacaacttcagcccttacctgtttgccagccgtgaccacctgctgtgaggcccgaccacccacccagaatctgcccagtccccacttcttccctgccacgcgtgtgtgtgcgtgtgccacgtgagtgccaaagtcccctgccccccaagccagccagacccagacattagaagatggctagaaggacatttaggagacatctgcctctctggccctctgagatatcccgatgggcacaaatggaaggtgcgcacttgcccctactattgcccttttaagggccaaagcttgaccccattggccattgcctggctaatgagaacccctggttctcagaattttaaccaaaaggagttggctccaaccaatgggagccttcccctcacttcttagaatcctcctgcaagagggcaactccagccagtgttcagcgactgaacagccaataggagcccttggtttccagaatttctagagtgggtgggcatgattccagtcaatgggggaccgcccgtgtctaagcatgtgcaaaggagaggagggagatgaggtcattgtttgtcattgagtcttctctcagaatcagcgagcccagctgtagggtggggggcaggctcccccatggcagggtccttggggtaccccttttcctctcagcccctccctgtgtgcggcctctccacctctcacccactctctcctaatcccctacttaagtagggcttgccccacttcagaggttttggggttcagggtgctgtgtctccccttgcctgtgcccaggtcatcccaaacccttctgttatttattagggctgtgggaagggtttttcttctttttcttggaacctgcccctgttcttcacactgccccccatgcctcagcctcatacagatgtgccatcatggggggcatgggtggagcagaggggctccctcaccccgggcaggcaaaggcagtgggtagaggaggcactgcccccctttcctgccccctcctcatctttaataaagacctggcttctcatctttaataaagacctgtttgtaac

SEQ ID NO: 66625 - DNA, 1284 bp, Artificial Sequence
  derived and/or modified sequence
atggccggcggccggccccacctgaagaggagcttcagcatcatcccctgctttgtgtttgtggagggcttcttctgctatgacagcacctacgccaagccctacccaggccctgaggccgccagccgggtgcccccagccctggtgtatgccctggtgacagctggccccaccctgaccatcctgctgggggagctggcccgggccttcttccctgccccacccagcgctgtgcctgtgattggagagagcaccatcgtgtctggggcctgctgccgcttcagcccccctgtgcggcggctggtgcgcttcctgggcgtgtacagctttggcctcttcaccaccaccatctttgccaatgccggccaggtggtgacaggcaaccccaccccccacttcctgtctgtgtgccggcccaactacacagccctgggctgcctgccccccagcccagaccggcccggccctgacagatttgtgacagaccagggcgcctgtgccggcagccccagcctggtggccgccgcccggcgggccttcccctgcaaggatgctgccctgtgtgcctatgctgtgacctacacagccatgtatgtgaccctggtgttccgggtgaagggcagccggctggtgaagcccagcctgtgcctggccctgctgtgcccagccttcctggtgggcgtggtgcgggtggccgagtacagaaaccactggagcgatgtgctggccggcttcctgactggagctgccatcgccaccttcctggtgacctgtgtggtgcacaacttccagagcaggcctccttctggaagaaggctgagcccctgggaggacctgggccaggcccccaccatggacagccccctggagaagctgtctgtggcccaggagcctgaggtgtgccggccccacagcaccccagcccggctgacccccagcaagagccagaactgtgcccggcggggccacctgatccccagctgtgtgagcagccgggccccagccatgtgcagcagcccccgggtgccccggccccggctgcggtctgagcccacccccctgcccctgcccctgcccctgcctgcccccacccccagccagggccccagccccagcagccctggccctgggggccctgggggcggcggcggccggggcaggaagctgctgctgcccacccccctgctgcgggacctgtacaccctgagcggcctgtaccccagccccttccaccgggacaacttcagcccctacctgtttgccagccgggaccacctgctgtag

SEQ ID NO: 66626 - DNA, 1284 bp, Artificial Sequence
  derived and/or modified sequence
atggccggcggccggccccacctgaagcggagcttcagcatcatcccatgctttgtttttgtggaaggcttcttctgctacgattcaacttatgccaagccatacccaggccccgaggccgctagtcgtgtgccaccggcgctggtgtacgcactggtgactgcaggccctacacttactattctattaggggaattagcccgcgctttctttccagccccaccttccgctgtcccggtcatcggcgagtctaccatagtgtcaggagcctgctgcaggttcagtccccccgtaaggaggctagttcgttttctgggcgtctactcattcggacttttcactaccactattttcgccaacgcgggacaggtggttacggggaacccgacacctcattttctttctgtgtgtcgtcctaactacacggcccttggatgtctgcctccgtcacccgatcgccctgggcccgataggttcgttaccgatcagggcgcctgcgccggatcgccctcgttggtcgccgccgcgcggcgagctttcccttgcaaagatgcagcgctgtgcgcctacgctgtcacttataccgcaatgtatgtcacactcgtgtttcgcgttaagggaagccggctggttaagccgtctctgtgcctggccctcctctgtcccgccttcctggtcggtgtggtcagggtggccgaatataggaaccactggtcagacgttctcgcgggcttcttgactggagcggcaatcgcaacctttctggtcacatgtgtggttcataattttcaatccaggccacctagtggccgccgcttatctccttgggaagacttgggacaggcaccaacaatggactcccccttggagaaactgtctgtggctcaagagcctgaagtgtgtaggccgcattccacacctgcccggcttaccccttcgaagagccagaattgtgccaggcgcgggcatctgatcccatcatgcgtgtcttcaagggctcccgccatgtgttctagtcctcgcgtgccgaggccacggctccgatccgagcccacccccttacctctccccttgcctttaccagctccaaccccatcacaggggccctccccttcgtctcccggccccggtggccccggaggtggcggagggcggggacgcaagctgcttctgcctactccattgctgcgcgacctgtatacactgagtggcctgtaccctagtccctttcaccgcgataatttctccccatacctctttgcgtcacgcgaccacctgctttag

SEQ ID NO: 66627 - DNA, 1284 bp, Artificial Sequence
  derived and/or modified sequence
atggctggaggcagaccccacttgaagaggagctttagcatcatcccttgtttcgtttttgttgagggctttttctgttacgactcaacctacgccaaaccctatccgggacctgaggccgcatccagggtgccacctgccctggtgtacgcattggtgaccgcaggacccactctgacaatcctgttgggggagctggccagagccttcttccctgcccctccttccgcggttcctgtgattggcgaaagtacaattgtatcgggagcttgctgtagattttccccacccgtgagacggcttgttagatttctgggagtctactcattcgggctctttaccaccacaatctttgcaaatgcgggacaggtcgtcaccggaaaccccaccccccatttcctgagtgtgtgccgccctaattatactgccttagggtgtctgccccctagtccggatcggcctgggccagatcgcttcgtcacagatcaaggggcttgcgctggcagcccctcccttgtagctgccgcacgtagagcgttcccctgcaaagatgctgccctctgcgcttatgctgtgacttatacggccatgtacgtaacactggtctttcgcgtaaagggaagccgcctggtgaagccaagtctctgtctagcccttctgtgtccagctttcctggttggggtcgtccgcgtcgctgagtatagaaatcactggtcggacgtcctggcagggtttctcacaggagctgcaatcgcgacgtttctcgttacttgtgtggtccacaatttccagagtaggcccccaagcggacggaggttgagcccttgggaggatctggggcaagctccaactatggattctccattggaaaaactgagtgtcgcacaagagcctgaggtgtgcaggccccactccacacctgccaggctgacgccctccaaaagccagaactgtgccagaagaggccatttgatccccagctgcgtaagctcccgtgctccagcgatgtgcagctctccaagagtgccccgacctcgccttagaagtgaacctacccctctccctctccctttgccccttcctgccccaacccccagtcagggaccttcaccttcctctcccggacctgggggacccggtggtggtgggggtagaggccgaaaactcctgctaccaacacccctccttcgggatctgtacacactcagcggcttgtatccaagtccatttcatcgggacaatttttccccatacttgttcgcatctcgagatcaccttttatag

SEQ ID NO: 66628 - DNA, 480 bp, Artificial Sequence
  derived and/or modified sequence
atgcaccaaacccacgcgatccagcggctggaagtgctcccttcctttagcaatgagtcacccacctcacgggagacatccgaatcttggaccaaccaagacgatattttctatgcctatgcatcgatgtctcccggcgccgagcacagggggacaacacagctcttacgttttcagctggctccaattaagaagctcgagggttctttgcagactcattttcttctttcctccctgcaccctaggatgacattcccgggtcgggccggcgggggggaggcgggaagtcgacctccccgccggccgtgggcggggatcttgatactgcaacttccctccacacggggtggaaggaggagtggccatggagccgttcggagctggggcccttggaaagtggtggccgagcagcctgtagggggaaccgatcctcccgcgcacggtggaagaggacgcccatccccaaacgaaaacacatag

SEQ ID NO: 66629 - protein, 243 aa, Artificial Sequence
  derived and/or modified sequence
MDQYCILGRIGEGAHGIVFKAKHVETGEIVALKKVALRRLEDGFPNQALREIKALQEMEDNQYVVQLKAVFPHGGGFVLAFEFMLSDLAEVVRHAQRPLAQAQVKSYLQMLLKGVAFCHANNIVHRDLKPANLLISASGQLKIADFGLARVFSPDGSRLYTHQVATRSSLSCRTTTRSPLRSRCPCPWRRCCLTSLPRHWICWVNSFSTLLTSASQLPRLSSISTSSQLPCLPIHLSCRFLSV

SEQ ID NO: 66630 - DNA, 2202 bp, Artificial Sequence
  derived and/or modified sequence
gggggcgggggcagataggaggtgcctgctgtcatcgttccgtgggccctgctgcgggcacgctctcggcgcatgcgttttttatgcgggattaagcttgctgctgcgtgacagcggagggctaggaaaaggcgcagtggggcccggagctgtcacccctgactcgacgcagcttccgttctcctggtgacgtcgcctacaggaaccgccccagtggtcagctgccgcgctgttgctaggcaacagcgtgcgagctcagatcagcgtggggtggaggagaagtggagtttggaagttcaggggcacaggggcacaggcccacgactgcagcgggatggaccagtactgcatcctgggccgcatcggggagggcgcccacggcatcgtcttcaaggccaagcacgtggagactggcgagatagttgccctcaagaaggtggccctaaggcggttggaggacggcttccctaaccaggccctgcgggagattaaggctctgcaggagatggaggacaatcagtatgtggtacaactgaaggctgtgttcccacacggtggaggctttgtgctggcctttgagttcatgctgtcggatctggccgaggtggtgcgccatgcccagaggccactagcccaggcacaggtcaagagctacctgcagatgctgctcaagggtgtcgccttctgccatgccaacaacattgtacatcgggacctgaaacctgccaacctgctcatcagcgcctcaggccagctcaagatagcggactttggcctggctcgagtcttttccccagacggcagccgcctctacacacaccaggtggccaccaggagctcactgagctgccggactacaacaagatctcctttaaggagcaggtgcccatgcccctggaggaggtgctgcctgacgtctctccccaggcattggatctgctgggtcaattccttctctaccctcctcaccagcgcatcgcagcttccaaggctctcctccatcagtacttcttcacagctcccctgcctgcccatccatctgagctgccgattcctcagcgtctagggggacctgcccccaaggcccatccagggcccccccacatccatgacttccacgtggaccggcctcttgaggagtcgctgttgaacccagagctgattcggcccttcatcctggaggggtgagaagttggccctggtcccgtctgcctgctcctcaggaccactcagtccacctgttcctctgccacctgcctggcttcaccctccaaggcctccccatggccacagtgggcccacaccacaccctgccccttagcccttgcgagggttggtctcgaggcagaggtcatgttcccagccaagagtatgagaacatccagtcgagcagaggagattcatggcctgtgctcggtgagccttaccttctgtgtgctactgacgtacccatcaggacagtgagctctgctgccagtcaaggcctgcatatgcagaatgacgatgcctgccttggtgctgcttccccgagtgctgcctcctggtcaaggagaagtgcagagagtaaggtgtccttatgttggaaactcaagtggaaggaagatttggtttggttttattctcagagccattaaacactagttcagtatgtgagatatagattctaaaaacctcaggtggctctgccttatgtctgttcctccttcatttctctcaagggaaatggctaaggtggcattgtctcatggctctcgtttttggggtcatggggagggtagcaccaggcatagccacttttgccctgagggactcctgtgtacttcacatcactgagcactcatttagaagtgagggagacagaagtctaggcccagggatggctccagttggggatccagcaggagaccctctgcacatgaggctggtttaccaacatctactccctcaggatgagcgtgagccagaagcagctgtgtatttaaggaaacaagcgttcctggaattaatttataaatttaataaatcccaatataatcccagctagtgctttttccttattataatttgataaggtgattataaaagatacatggaaggaagtggaaccagatgcagaagaggaaatgatggaaggacttacggtatcagataccaatatttaaaagtttgtataataataaagagtatgattgtggttcaagg
